United States Patent Application Publication US 2004/0234960 A1 - sequence listing, part 7

SEQ ID NO: 20158 - DNA, 1482 bp, Artificial Sequence
  chemically treated genomic DNA (Homo sapiens) CpG-island No: 20158
aataacctatcaaaatacgcccaatcacgcttatcaaaaattaaaacaactaccacctaaccccataacgaaaacgaaactatccgctaaaacctaccgccccgcgctcgcccgctaaatcgataaaccaacgaaccgaatccgaatccccataccattcgaacaccctctaaacgaaccctaccgatccgcgacgccgcgcccctaataaaaaaaccgctaccccacgccgtcaaaaacaaaatactaaaacgacgacaacgaatataaaatcaacgcgccatccccgcgcacgaacctaccgctcctcgacctatatcccgtactcctcgcgcatccgcaacaacgcgtcctccaaccgcgcgcgcaactactccaacccgaacgcctcgcgccgcaacgcctctacctcctacgcgcacaaccgcgtctcttcctccgcctaaaatctactctcctaaccgcgccgcaacgcctcctccaactcgcgcacctcgtcctcgtacaactacaccgtctcccgccacgactcgaccaccaacaatacgtaactatcgtacacctcccgcaaacgtaacgacgacgcgacgaaaccgataacgcgaacgcgaaaatacataataaaactaacgacgcgcgcgcgcaactcccgcacgtcgcgttcgtaaaccgcgtcgaaacctcgacgctcgacctacaatcgacccaacaacgcctcgaaaacgacgcgcgcgcccaacgcctcctacaactcgcgctactacgcacccaactcgacgtccaaacgaccgcgaacgacgcgctcctccgcatccaaacgctacaactcccgcaactcgcgccgcaaaacgtcccgctcgccctccgccaacgcaataacccaactcaactcgtccaactactaccgcaaactacgcgcctcctcgacgcaacgaacctacccctcgacccacaaaccctctcgcccgcgccgaccgcgcaactcctcctccaaaaataaattttcgcgctccaactcccgcacccgacacacgtaatcataaaaccgaacgttaaactcctaaaactcgaccttctcgaaacccgtctacaaccgccaaaacaacatcttaccgaacgtacgaaattctcgcgactaaccgactccctcctaccctaatcttatcccgatctcgtcctctccgccgcgacgctccgacctcgccgctaccccgaaaacccgcaaactaaaacgcgaacgaaaaaacccaaacacttaacgaacgaaacgaacaaactaaacgaacgacctaaacgaaaaccgcgacctccaaccaatcaaaacgcgacccgacgcgacctctacgaccgcacaacgccccctaccgcaccttaacgaccgcaaataatcgatacgaacaatcgaataacaacgaacgaaataacgaactaaccaaaccgaactcaacgaaaaaacgccgaaaaaaacgtccgaaaacatac

SEQ ID NO: 20159 - DNA, 1482 bp, Artificial Sequence
  chemically treated genomic DNA (Homo sapiens) CpG-island No: 20159
ggtggtttattaggatgcgtttagttacgtttgttaagagttaaagtagttgttatttaattttatgacgaggacggggttattcgttaggatttgtcgtttcgcgttcgttcgttgagtcgatggattagcggatcgagttcgggtttttatgttattcgggtattttttgggcgggttttatcggttcgcgacgtcgcgtttttggtgaaggggtcgttgttttacgtcgttaagggtagggtgttggggcgacggtagcgggtatggggttagcgcgttattttcgcgtacggatttgtcgtttttcggtttgtatttcgtatttttcgcgtattcgtagtagcgcgttttttagtcgcgcgcgtagttgttttaattcgagcgtttcgcgtcgtagcgtttttgttttttgcgcgtatagtcgcgttttttttttcgtttggagtttgtttttttggtcgcgtcgtagcgttttttttagttcgcgtatttcgttttcgtatagttgtatcgtttttcgttacgattcggttattagtagtgcgtagttgtcgtgtatttttcgtaggcgtggcggcggcgcggcggggtcggtggcgcgggcgcggaaatgtatggtaaggttggcggcgcgcgcgcgtagttttcgtacgtcgcgttcgtgggtcgcgtcgaggtttcggcgttcggtttgtagtcggtttagtagcgtttcgagggcggcgcgcgcgtttagcgttttttgtagttcgcgttgttgcgtatttagttcggcgtttaggcggtcgcgggcggcgcgttttttcgtatttaggcgttgtagttttcgtagttcgcgtcgtagagcgtttcgttcgtttttcgttagcgtagtggtttagtttagttcgtttagttgttgtcgtaagttgcgcgttttttcggcgtagcgggtttgtttttcggtttataggttttttcgttcgcgtcggtcgcgtagttttttttttaggagtaggttttcgcgttttagttttcgtattcgatatacgtagttatagagtcgggcgttgagtttttggagttcggttttttcggggttcgtttgtagtcgttaggatagtattttgtcgggcgtgcggggttttcgcggttggtcggtttttttttgttttggttttgtttcggtttcgtttttttcgtcgcgacgtttcggtttcgtcgttgtttcggaggttcgtagattgggacgcgagcgggagagtttaggtatttagcggacggggcgggtagattgggcgggcggtttgggcgagggtcgcggtttttagttaattagagcgcggttcggcgcggtttttgcggtcgtatagcgttttttgtcgtattttggcggtcgtaggtggtcggtgcgggtagtcgggtaatagcgggcggggtggcgggttagttaggtcgggtttagcgaagggacgtcggagagggcgttcgggagtatat

SEQ ID NO: 20160 - DNA, 1482 bp, Artificial Sequence
  chemically treated genomic DNA (Homo sapiens) CpG-island No: 20160
atatactcccgaacgccctctccgacgtcccttcgctaaacccgacctaactaacccgccaccccgcccgctattacccgactacccgcaccgaccacctacgaccgccaaaatacgacaaaaaacgctatacgaccgcaaaaaccgcgccgaaccgcgctctaattaactaaaaaccgcgaccctcgcccaaaccgcccgcccaatctacccgccccgtccgctaaatacctaaactctcccgctcgcgtcccaatctacgaacctccgaaacaacgacgaaaccgaaacgtcgcgacgaaaaaaacgaaaccgaaacaaaaccaaaacaaaaaaaaaccgaccaaccgcgaaaaccccgcacgcccgacaaaatactatcctaacgactacaaacgaaccccgaaaaaaccgaactccaaaaactcaacgcccgactctataactacgtatatcgaatacgaaaactaaaacgcgaaaacctactcctaaaaaaaaaactacgcgaccgacgcgaacgaaaaaacctataaaccgaaaaacaaacccgctacgccgaaaaaacgcgcaacttacgacaacaactaaacgaactaaactaaaccactacgctaacgaaaaacgaacgaaacgctctacgacgcgaactacgaaaactacaacgcctaaatacgaaaaaacgcgccgcccgcgaccgcctaaacgccgaactaaatacgcaacaacgcgaactacaaaaaacgctaaacgcgcgcgccgccctcgaaacgctactaaaccgactacaaaccgaacgccgaaacctcgacgcgacccacgaacgcgacgtacgaaaactacgcgcgcgcgccgccaaccttaccatacatttccgcgcccgcgccaccgaccccgccgcgccgccgccacgcctacgaaaaatacacgacaactacgcactactaataaccgaatcgtaacgaaaaacgatacaactatacgaaaacgaaatacgcgaactaaaaaaaacgctacgacgcgaccaaaaaaacaaactccaaacgaaaaaaaaaacgcgactatacgcgcaaaaaacaaaaacgctacgacgcgaaacgctcgaattaaaacaactacgcgcgcgactaaaaaacgcgctactacgaatacgcgaaaaatacgaaatacaaaccgaaaaacgacaaatccgtacgcgaaaataacgcgctaaccccatacccgctaccgtcgccccaacaccctacccttaacgacgtaaaacaacgaccccttcaccaaaaacgcgacgtcgcgaaccgataaaacccgcccaaaaaatacccgaataacataaaaacccgaactcgatccgctaatccatcgactcaacgaacgaacgcgaaacgacaaatcctaacgaataaccccgtcctcgtcataaaattaaataacaactactttaactcttaacaaacgtaactaaacgcatcctaataaaccacc

SEQ ID NO: 20161 - DNA, 726 bp, Artificial Sequence
  chemically treated genomic DNA (Homo sapiens) CpG-island No: 20161
cgttcgcgtttagtttaggggatgttcggttcgtaattgattttttttttttttttaggagcgcgttgaggtcgtttgcgcgttttacggaatcggttttcgggttcgcgttcgttttcgttttggagcgagggattttatcgattttttcggtagttgtcggggtcgggcgtttattttttggggtttggttttcgtcgtttttttagtttggcggcggagtgtggggttgtagcggttattgttattgtcgtcgtcgtcgtcgttttcgttgttatcgcggtcgtcgtcgttatcgaagcgttgttcggcgcgtcgtcggggttggaggttggggggtcgcggaatttttggaggcgcgagttcgggacgcggcggggtcgagtcgcgggaagttgtttgcgtcgggcgcggagcgagcggggcgttagttattcgcgtttaagtagttataattttgtcgtttgggtgggtgcgcgtttcggagagaggcgagcgcgggagagcggggtaaaggcgttggggcgggagggttttcggagtaggtaggattgtaatttgaacggttcgcgaggaaaggggaaaggtggcgcggggggatgtttatatagtttgtgtggtgcgcggcgagcgagtgtgtaagagcgcgggcgtttattttattttgttttttgtagtttttgtatatttatggggatttttgatgtttttgttagtaattaatat

SEQ ID NO: 20162 - DNA, 726 bp, Artificial Sequence
  chemically treated genomic DNA (Homo sapiens) CpG-island No: 20162
atattaattactaacaaaaacatcaaaaatccccataaatatacaaaaactacaaaaaacaaaataaaataaacgcccgcgctcttacacactcgctcgccgcgcaccacacaaactatataaacatccccccgcgccacctttcccctttcctcgcgaaccgttcaaattacaatcctacctactccgaaaaccctcccgccccaacgcctttaccccgctctcccgcgctcgcctctctccgaaacgcgcacccacccaaacgacaaaattataactacttaaacgcgaataactaacgccccgctcgctccgcgcccgacgcaaacaacttcccgcgactcgaccccgccgcgtcccgaactcgcgcctccaaaaattccgcgaccccccaacctccaaccccgacgacgcgccgaacaacgcttcgataacgacgacgaccgcgataacaacgaaaacgacgacgacgacgacaataacaataaccgctacaaccccacactccgccgccaaactaaaaaaacgacgaaaaccaaaccccaaaaaataaacgcccgaccccgacaactaccgaaaaaatcgataaaatccctcgctccaaaacgaaaacgaacgcgaacccgaaaaccgattccgtaaaacgcgcaaacgacctcaacgcgctcctaaaaaaaaaaaaaaaatcaattacgaaccgaacatcccctaaactaaacgcgaacg

SEQ ID NO: 20163 - DNA, 726 bp, Artificial Sequence
  chemically treated genomic DNA (Homo sapiens) CpG-island No: 20163
gtgttagttattagtaggaatattagagatttttataaatatgtaggagttgtaggaggtaaagtagagtagacgttcgcgtttttatatattcgttcgtcgcgtattatataggttgtgtagatattttttcgcgttatttttttttttttttcgcgggtcgtttaggttgtagttttgtttgtttcgaagattttttcgttttagcgtttttgtttcgttttttcgcgttcgttttttttcggagcgcgtatttatttaggcggtaaagttgtgattatttgggcgcgggtgattggcgtttcgttcgtttcgcgttcggcgtagataatttttcgcggttcggtttcgtcgcgtttcgggttcgcgtttttagggatttcgcggttttttagtttttaatttcggcggcgcgtcgggtagcgtttcggtggcggcggcggtcgcggtggtagcgaaggcggcggcggcggcggtagtggtagtggtcgttgtagttttatatttcgtcgttaaattggaggagcgacggaagttagattttaggaggtgagcgttcggtttcggtagttgtcgggagggtcgatggggtttttcgttttaaggcggaggcgggcgcgggttcgggggtcgatttcgtagggcgcgtaggcggttttagcgcgtttttgggagggagagagaggttaattgcgggtcgggtattttttgagttgggcgcgggcg

SEQ ID NO: 20164 - DNA, 726 bp, Artificial Sequence
  chemically treated genomic DNA (Homo sapiens) CpG-island No: 20164
cgcccgcgcccaactcaaaaaatacccgacccgcaattaacctctctctccctcccaaaaacgcgctaaaaccgcctacgcgccctacgaaatcgacccccgaacccgcgcccgcctccgccttaaaacgaaaaaccccatcgaccctcccgacaactaccgaaaccgaacgctcacctcctaaaatctaacttccgtcgctcctccaatttaacgacgaaatataaaactacaacgaccactaccactaccgccgccgccgccgccttcgctaccaccgcgaccgccgccgccaccgaaacgctacccgacgcgccgccgaaattaaaaactaaaaaaccgcgaaatccctaaaaacgcgaacccgaaacgcgacgaaaccgaaccgcgaaaaattatctacgccgaacgcgaaacgaacgaaacgccaatcacccgcgcccaaataatcacaactttaccgcctaaataaatacgcgctccgaaaaaaaacgaacgcgaaaaaacgaaacaaaaacgctaaaacgaaaaaatcttcgaaacaaacaaaactacaacctaaacgacccgcgaaaaaaaaaaaaaaataacgcgaaaaaatatctacacaacctatataatacgcgacgaacgaatatataaaaacgcgaacgtctactctactttacctcctacaactcctacatatttataaaaatctctaatattcctactaataactaacac

SEQ ID NO: 20165 - DNA, 670 bp, Artificial Sequence
  chemically treated genomic DNA (Homo sapiens) CpG-island No: 20165
tggtttttttcgttttttttcgtttttcgaatttttcggttggtttttttgcggttttcgtttcggcgttgatgtggtttggtagtggagattggcgttcgggcggagtacgatgggttttttcgcggtaggtaggtaggttgttgttgtaggtgggtttcggcgttcgcgtcgtttcgcgtttttcgcggtcgtttcgtttttgttcgttcgtttcgtttcgttcgtattggcgttgtttgttgtttgttttcgcgcggtggggagggggcgtattcggcggcgggttttgtagagggcgttttgtttcgggtgcgatcgcggttttttggaggtttgggcggcgggtttcgcgagcgcgtcgttatttcgggagtagtgttggttaaggatttcgacgttttacgtaagtaaaggtagggcggggagtttgcgggggaggagggtcgggggtaatgttcggttcgcggatcgcggagtgggtaagaggtgtttattggatacggggtattcgagttttttgaggtgttgggagtaagaacgcgggaggtcgtttgttcgttggaattcgcggttagggcgatttttattaggtttgtttatttatttttttcgcgttatagtttgttttagaagtatgggttgtcggtggtttttttttttttttatt

SEQ ID NO: 20166 - DNA, 670 bp, Artificial Sequence
  chemically treated genomic DNA (Homo sapiens) CpG-island No: 20166
aataaaaaaaaaaaaaaaccaccgacaacccatacttctaaaacaaactataacgcgaaaaaaataaataaacaaacctaataaaaatcgccctaaccgcgaattccaacgaacaaacgacctcccgcgttcttactcccaacacctcaaaaaactcgaataccccgtatccaataaacacctcttacccactccgcgatccgcgaaccgaacattacccccgaccctcctcccccgcaaactccccgccctacctttacttacgtaaaacgtcgaaatccttaaccaacactactcccgaaataacgacgcgctcgcgaaacccgccgcccaaacctccaaaaaaccgcgatcgcacccgaaacaaaacgccctctacaaaacccgccgccgaatacgccccctccccaccgcgcgaaaacaaacaacaaacaacgccaatacgaacgaaacgaaacgaacgaacaaaaacgaaacgaccgcgaaaaacgcgaaacgacgcgaacgccgaaacccacctacaacaacaacctacctacctaccgcgaaaaaacccatcgtactccgcccgaacgccaatctccactaccaaaccacatcaacgccgaaacgaaaaccgcaaaaaaaccaaccgaaaaattcgaaaaacgaaaaaaaacgaaaaaaacca

SEQ ID NO: 20167 - DNA, 670 bp, Artificial Sequence
  chemically treated genomic DNA (Homo sapiens) CpG-island No: 20167
gataaagaaggaaaaaagttatcggtaatttatgtttttaagataagttgtaacgcgaaggggataggtgggtagatttgatgagggtcgttttggtcgcggattttagcggataagcgatttttcgcgtttttatttttagtattttagagggttcggatatttcgtatttagtgggtattttttgtttatttcgcggttcgcggatcggatattgttttcgatttttttttttcgtaggtttttcgttttgtttttatttacgtagggcgtcggggtttttggttaatattgttttcgaggtggcggcgcgttcgcggggttcgtcgtttaggtttttagggagtcgcggtcgtattcggagtaaggcgttttttgtagagttcgtcgtcgggtgcgttttttttttatcgcgcggggatagatagtaggtagcgttaatgcgagcggagcggagcgggcgggtaggggcggggcgatcgcgggaggcgcggggcggcgcgggcgtcgggatttatttgtagtagtagtttgtttgtttgtcgcggggaagtttatcgtgtttcgttcgggcgttaatttttattgttagattatattagcgtcgaggcggggatcgtaagagagttagtcggaaggttcggggggcgggggaaggcgggggggatta

SEQ ID NO: 20168 - DNA, 670 bp, Artificial Sequence
  chemically treated genomic DNA (Homo sapiens) CpG-island No: 20168
taatcccccccgccttcccccgccccccgaaccttccgactaactctcttacgatccccgcctcgacgctaatataatctaacaataaaaattaacgcccgaacgaaacacgataaacttccccgcgacaaacaaacaaactactactacaaataaatcccgacgcccgcgccgccccgcgcctcccgcgatcgccccgcccctacccgcccgctccgctccgctcgcattaacgctacctactatctatccccgcgcgataaaaaaaaaacgcacccgacgacgaactctacaaaaaacgccttactccgaatacgaccgcgactccctaaaaacctaaacgacgaaccccgcgaacgcgccgccacctcgaaaacaatattaaccaaaaaccccgacgccctacgtaaataaaaacaaaacgaaaaacctacgaaaaaaaaaaatcgaaaacaatatccgatccgcgaaccgcgaaataaacaaaaaatacccactaaatacgaaatatccgaaccctctaaaatactaaaaataaaaacgcgaaaaatcgcttatccgctaaaatccgcgaccaaaacgaccctcatcaaatctacccacctatccccttcgcgttacaacttatcttaaaaacataaattaccgataacttttttccttctttatc

SEQ ID NO: 20169 - DNA, 703 bp, Artificial Sequence
  chemically treated genomic DNA (Homo sapiens) CpG-island No: 20169
tttcgcggtgcgggttgcgttagttttttcggagttcgacgtagaaatttgttgtaataaataggcgatcgcgggtgtttttagtagttagcggtagagtgggtgggcgggcgagagggaggggaaggttggcggacgtcgtagcgaattggtgggtagattcggagtcgtcgcgtaagcggggtcggtttagtgcggtgcggtaggcgcggttgtgcggtagcggaagttttttgttgtagtatagtttttggtagagttagagttttttcgcgtagtttagttcgagcgtcgagcgtcgcgcgtcgtcgttattgtagttcgcggttttttcgttttcgttcgtttttttcgcggttgatttgttttaaattttttaaaattttcgtagttttggtttttgttgcggtcggtaagtatttgttagttgtggggttatttgcgtaattttggtttaggtcggagggcgacgggtcgcgggtttggcggagtgcggggtcggaggggcgtcgattcgtgcggggagtcggagcgcggcggacgcgttgcgaggattcggtgacgggcggttgttaggtcgtttgtttgttgtcggcgcgttaggtttcgggcgtgcggtttttttgagtcggaggcgaagtttttacggagattagtttttaaattagttatttttttttttttttttttttgtttttatttt

SEQ ID NO: 20170 - DNA, 703 bp, Artificial Sequence
  chemically treated genomic DNA (Homo sapiens) CpG-island No: 20170
aaaataaaaacaaaaaaaaaaaaaaaaaaaaataactaatttaaaaactaatctccgtaaaaacttcgcctccgactcaaaaaaaccgcacgcccgaaacctaacgcgccgacaacaaacaaacgacctaacaaccgcccgtcaccgaatcctcgcaacgcgtccgccgcgctccgactccccgcacgaatcgacgcccctccgaccccgcactccgccaaacccgcgacccgtcgccctccgacctaaaccaaaattacgcaaataaccccacaactaacaaatacttaccgaccgcaacaaaaaccaaaactacgaaaattttaaaaaatttaaaacaaatcaaccgcgaaaaaaacgaacgaaaacgaaaaaaccgcgaactacaataacgacgacgcgcgacgctcgacgctcgaactaaactacgcgaaaaaactctaactctaccaaaaactatactacaacaaaaaacttccgctaccgcacaaccgcgcctaccgcaccgcactaaaccgaccccgcttacgcgacgactccgaatctacccaccaattcgctacgacgtccgccaaccttcccctccctctcgcccgcccacccactctaccgctaactactaaaaacacccgcgatcgcctatttattacaacaaatttctacgtcgaactccgaaaaaactaacgcaacccgcaccgcgaaa

SEQ ID NO: 20171 - DNA, 703 bp, Artificial Sequence
  chemically treated genomic DNA (Homo sapiens) CpG-island No: 20171
aaaataaaggtagagaaagaaagaaaagaaggtaattaatttgggaattagttttcgtaggggtttcgttttcgatttagggaggtcgtacgttcgggatttgacgcgtcggtaataagtaggcggtttggtagtcgttcgttatcgggttttcgtagcgcgttcgtcgcgtttcggtttttcgtacggatcggcgttttttcggtttcgtatttcgttaggttcgcggttcgtcgtttttcggtttgggttaaagttgcgtaaatagttttataattggtaaatatttatcggtcgtaataggaattagagttgcggagattttagggagtttaaggtaaattagtcgcgggaaaggcgggcgaaggcgaaggggtcgcgagttgtagtggcggcggcgcgcggcgttcggcgttcgggttgggttgcgcggagaggttttggttttgttagggattgtgttgtaataaaggattttcgttgtcgtatagtcgcgtttgtcgtatcgtattgagtcggtttcgtttacgcggcgatttcgggtttgtttattagttcgttgcggcgttcgttagtttttttttttttttcgttcgtttatttattttgtcgttggttgttaggggtattcgcggtcgtttgtttgttgtaataagtttttgcgtcgagtttcgaggaggttggcgtaattcgtatcgcgggg

SEQ ID NO: 20172 - DNA, 703 bp, Artificial Sequence
  chemically treated genomic DNA (Homo sapiens) CpG-island No: 20172
ccccgcgatacgaattacgccaacctcctcgaaactcgacgcaaaaacttattacaacaaacaaacgaccgcgaatacccctaacaaccaacgacaaaataaataaacgaacgaaaaaaaaaaaaaaactaacgaacgccgcaacgaactaataaacaaacccgaaatcgccgcgtaaacgaaaccgactcaatacgatacgacaaacgcgactatacgacaacgaaaatcctttattacaacacaatccctaacaaaaccaaaacctctccgcgcaacccaacccgaacgccgaacgccgcgcgccgccgccactacaactcgcgaccccttcgccttcgcccgcctttcccgcgactaatttaccttaaactccctaaaatctccgcaactctaattcctattacgaccgataaatatttaccaattataaaactatttacgcaactttaacccaaaccgaaaaacgacgaaccgcgaacctaacgaaatacgaaaccgaaaaaacgccgatccgtacgaaaaaccgaaacgcgacgaacgcgctacgaaaacccgataacgaacgactaccaaaccgcctacttattaccgacgcgtcaaatcccgaacgtacgacctccctaaatcgaaaacgaaacccctacgaaaactaattcccaaattaattaccttcttttctttctttctctacctttatttt

SEQ ID NO: 20173 - DNA, 642 bp, Artificial Sequence
  chemically treated genomic DNA (Homo sapiens) CpG-island No: 20173
ggttataacggtttcggtttattttaacgattcgtagcgttaggttattaaggacgtaggtattattacggggtttaatgtgttgcgtattattaacgagtttacggcggcggttatcgtttacggtttggataagaagggttgcgcgggcggcgagaagaacgtgtttatttttgatttgggcggtggtattttcgacgtgtttattttgattatcgaggatggtattttcgaggtgaagtttacggtcggcgatatttatttgggcggtgaggatttcgataatcgtatggtgagttatttggcggaggagtttaagcgtaagtataagaaggatattgggtttaataagcgcgtcgtgaggcggttgcgtatcgtttgcgagcgcgttaagcgtattttgagttcgtttacgtaggcgagtatcgagatcgattcgttttacgagggcgtggatttttatacgtttattacgcgcgttcgtttcgaggagtttaatgtcgatttttttcgcgggattttggagtcggtggagaaggcgttgcgcgacgttaagttggataagggttagatttaggagatcgtgttggtgggcggttttattcgtatttttaagatttagaagttgttgtaggatttttt

SEQ ID NO: 20174 - DNA, 642 bp, Artificial Sequence
  chemically treated genomic DNA (Homo sapiens) CpG-island No: 20174
aaaaaatcctacaacaacttctaaatcttaaaaatacgaataaaaccgcccaccaacacgatctcctaaatctaacccttatccaacttaacgtcgcgcaacgccttctccaccgactccaaaatcccgcgaaaaaaatcgacattaaactcctcgaaacgaacgcgcgtaataaacgtataaaaatccacgccctcgtaaaacgaatcgatctcgatactcgcctacgtaaacgaactcaaaatacgcttaacgcgctcgcaaacgatacgcaaccgcctcacgacgcgcttattaaacccaatatccttcttatacttacgcttaaactcctccgccaaataactcaccatacgattatcgaaatcctcaccgcccaaataaatatcgccgaccgtaaacttcacctcgaaaataccatcctcgataatcaaaataaacacgtcgaaaataccaccgcccaaatcaaaaataaacacgttcttctcgccgcccgcgcaacccttcttatccaaaccgtaaacgataaccgccgccgtaaactcgttaataatacgcaacacattaaaccccgtaataatacctacgtccttaataacctaacgctacgaatcgttaaaataaaccgaaaccgttataacc

SEQ ID NO: 20175 - DNA, 642 bp, Artificial Sequence
  chemically treated genomic DNA (Homo sapiens) CpG-island No: 20175
aagaaattttgtagtagtttttggattttggggatacgagtggagtcgtttattagtacgattttttggatttggtttttgtttagtttggcgtcgcgtagcgttttttttatcggttttagggtttcgcgaaagaggtcggtattgagtttttcgaagcgggcgcgcgtgatggacgtatagaagtttacgttttcgtagagcgagtcgatttcgatgttcgtttgcgtggacgagtttagggtgcgtttggcgcgttcgtaagcggtgcgtagtcgttttacggcgcgtttgttgggtttaatgttttttttgtgtttgcgtttgaattttttcgttaggtggtttattatgcggttgtcgaagtttttatcgtttaggtgggtgtcgtcggtcgtggattttatttcgaagatgttattttcgatggttaggatggatacgtcgaaagtgttatcgtttaggttaaagatgagtacgtttttttcgtcgttcgcgtagttttttttgtttaggtcgtaggcgatggtcgtcgtcgtgggttcgttgatgatgcgtagtatattgagtttcgtgatggtgtttgcgtttttggtggtttggcgttgcgagtcgttgaaataggtcgggatcgttatgatt

SEQ ID NO: 20176 - DNA, 642 bp, Artificial Sequence
  chemically treated genomic DNA (Homo sapiens) CpG-island No: 20176
aatcataacgatcccgacctatttcaacgactcgcaacgccaaaccaccaaaaacgcaaacaccatcacgaaactcaatatactacgcatcatcaacgaacccacgacgacgaccatcgcctacgacctaaacaaaaaaaactacgcgaacgacgaaaaaaacgtactcatctttaacctaaacgataacactttcgacgtatccatcctaaccatcgaaaataacatcttcgaaataaaatccacgaccgacgacacccacctaaacgataaaaacttcgacaaccgcataataaaccacctaacgaaaaaattcaaacgcaaacacaaaaaaaacattaaacccaacaaacgcgccgtaaaacgactacgcaccgcttacgaacgcgccaaacgcaccctaaactcgtccacgcaaacgaacatcgaaatcgactcgctctacgaaaacgtaaacttctatacgtccatcacgcgcgcccgcttcgaaaaactcaataccgacctctttcgcgaaaccctaaaaccgataaaaaaaacgctacgcgacgccaaactaaacaaaaaccaaatccaaaaaatcgtactaataaacgactccactcgtatccccaaaatccaaaaactactacaaaatttctt

SEQ ID NO: 20177 - DNA, 812 bp, Artificial Sequence
  chemically treated genomic DNA (Homo sapiens) CpG-island No: 20177
tttttcgttttttttaggttatttttgtcgggcgtttcgcgaagatgtagtttaagtcgatggagattaatttcgaggtgagcgttaggtgtatcgttattcggagagcgcgaggtcgagggagggggagtcgagtcgttgatcggttcggttttgtttttttttttgtatttgttttttagatgttgaataaagtgagtggcgtttcgcgtcgtttttggttttttttttcgcgagcgtcgaggcgggggcgtttatcggtttcggttgttggtagggattaagtcgttcgttgcgagtatcggagacggtcgggttggggcgtgggttgggcgttttttttgggtttttgtatttagcgggtgattttacgaaatcggttacggggagacggagggggttgcgtttcgtggcgagcgagcgttaggcggagttttcgagggcgtggcgcgggtagtatagattcggttgtacgggtttcgcgggcgttacgtgtgggtcgcgttttgtgttgtgttattgcgtcggttcgggtgggggtggtagggcgggattggggttttttttaggttcgggtgcgggcgcggagggcgcgcgttttttggtttcgttttttggtaggtgttcgcgattcgcgtgttttcgtgcgtttggtcgttttgtttttttttcgtaggtgttgtttcggttgggggtcgtcggttagtggcgtttcgtggacgtgttggggttggaagaggagtttttgggttcggtgttagcgtttgtttgcgcgttgttgttgttgtttttttttacggtttaggtagggt

SEQ ID NO: 20178 - DNA, 812 bp, Artificial Sequence
  chemically treated genomic DNA (Homo sapiens) CpG-island No: 20178
accctacctaaaccgtaaaaaaaaacaacaacaacaacgcgcaaacaaacgctaacaccgaacccaaaaactcctcttccaaccccaacacgtccacgaaacgccactaaccgacgacccccaaccgaaacaacacctacgaaaaaaaaacaaaacgaccaaacgcacgaaaacacgcgaatcgcgaacacctaccaaaaaacgaaaccaaaaaacgcgcgccctccgcgcccgcacccgaacctaaaaaaaaccccaatcccgccctaccacccccacccgaaccgacgcaataacacaacacaaaacgcgacccacacgtaacgcccgcgaaacccgtacaaccgaatctatactacccgcgccacgccctcgaaaactccgcctaacgctcgctcgccacgaaacgcaaccccctccgtctccccgtaaccgatttcgtaaaatcacccgctaaatacaaaaacccaaaaaaaacgcccaacccacgccccaacccgaccgtctccgatactcgcaacgaacgacttaatccctaccaacaaccgaaaccgataaacgcccccgcctcgacgctcgcgaaaaaaaaaaccaaaaacgacgcgaaacgccactcactttattcaacatctaaaaaacaaatacaaaaaaaaaaacaaaaccgaaccgatcaacgactcgactccccctccctcgacctcgcgctctccgaataacgatacacctaacgctcacctcgaaattaatctccatcgacttaaactacatcttcgcgaaacgcccgacaaaaataacctaaaaaaaacgaaaaa

SEQ ID NO: 20179 - DNA, 812 bp, Artificial Sequence
  chemically treated genomic DNA (Homo sapiens) CpG-island No: 20179
gttttatttgggtcgtgaggggaaatagtagtagtagcgcgtaggtaggcgttggtatcgagtttagagattttttttttagttttagtacgtttacgaagcgttattggtcggcgatttttagtcgggatagtatttgcggagaggagataaggcggttaggcgtacggggatacgcgggtcgcgggtatttgttagggggcggggttaggaggcgcgcgtttttcgcgttcgtattcgagtttgggaggagttttagtttcgttttgttatttttattcgggtcggcgtaatgatatagtataaagcgcggtttatacgtggcgttcgcgaagttcgtgtagtcgagtttgtgttgttcgcgttacgttttcgggagtttcgtttggcgttcgttcgttacggggcgtagtttttttcgttttttcgtgatcggtttcgtagagttattcgttaaatgtaggggtttaggaaaggcgtttagtttacgttttagttcggtcgttttcggtgttcgtagcgggcggtttggtttttgttagtagtcggaatcggtgggcgttttcgtttcggcgttcgcgggggagggggttagagacggcgcgagacgttatttattttgtttagtatttgaaaggtaaatgtaaagaaaaaggtaaaatcgaatcgattagcgattcggttttttttttttcggtttcgcgtttttcgggtagcggtgtatttggcgtttatttcggggttgatttttatcggtttgagttgtattttcgcggagcgttcggtagaaatagtttagggaagacgaaaaa

SEQ ID NO: 20180 - DNA, 812 bp, Artificial Sequence
  chemically treated genomic DNA (Homo sapiens) CpG-island No: 20180
tttttcgtcttccctaaactatttctaccgaacgctccgcgaaaatacaactcaaaccgataaaaatcaaccccgaaataaacgccaaatacaccgctacccgaaaaacgcgaaaccgaaaaaaaaaaaaccgaatcgctaatcgattcgattttacctttttctttacatttacctttcaaatactaaacaaaataaataacgtctcgcgccgtctctaaccccctcccccgcgaacgccgaaacgaaaacgcccaccgattccgactactaacaaaaaccaaaccgcccgctacgaacaccgaaaacgaccgaactaaaacgtaaactaaacgcctttcctaaacccctacatttaacgaataactctacgaaaccgatcacgaaaaaacgaaaaaaactacgccccgtaacgaacgaacgccaaacgaaactcccgaaaacgtaacgcgaacaacacaaactcgactacacgaacttcgcgaacgccacgtataaaccgcgctttatactatatcattacgccgacccgaataaaaataacaaaacgaaactaaaactcctcccaaactcgaatacgaacgcgaaaaacgcgcgcctcctaaccccgccccctaacaaatacccgcgacccgcgtatccccgtacgcctaaccgccttatctcctctccgcaaatactatcccgactaaaaatcgccgaccaataacgcttcgtaaacgtactaaaactaaaaaaaaaatctctaaactcgataccaacgcctacctacgcgctactactactatttcccctcacgacccaaataaaac

SEQ ID NO: 20181 - DNA, 1154 bp, Artificial Sequence
  chemically treated genomic DNA (Homo sapiens) CpG-island No: 20181
gttcgcgcgttttattgtttcggtgtcgtagcgttcgttttttcgggttcgggtgcgttttattgggcgcgcgttttttatatgatgttagatttattcgttcgttttttagtagtcggcggggcgtagggacgtgcggggcggttagcggattttttttatcgggtcgggtgtgaacgggagggagatacgtagcgttcgtttcgggttatttttagttcgtagttgtgtttttttttttcgggggcggagcggttttcgaaggtggggaggagaagaagttttcggcgttttcgcgttcgttttcgcgggttatttacggcgcgttggagttcgggcggcgtcgggaatagttgtcgcggcgttttttagtagcgcgcggttttttcgggatttgcgtcggtcgggggcggggagaggcggggaggggaggtcggcgggcgggaaggggcggggagcgcgtttttgcggcggcgacggcggcggtcgtttttatttcggcgtttgagaggacgcggggttgcgtaaatggtttgtttcgttttcggtttggaagttttttagtttttgtagttcgagtcgtttttcgagttcgtttttttcgaggcgtagaagtggattgaggtaggtgcgggtggttggcgggcggttttgtattggcgttttgagttacggattcgcgtacgtttcgatcgtaggtttagttttgtttttttttaatcgtttttatttttttttgttagttgttttaggttattttttcgggtttcggcgagtcgcgaaattttagcgttttggtattggaatttcgggcgagggtgggcgtgaaaggggatattgtagtttagttgcgcgcgtgagggtaggaagggattttttgcgcgtttattttttttgttcgttggtttcgtaaattttagttagcgtcgtttttaggcgttgttaagggaagcgtagtgttagtaaagcgttgtaaaggcgtaggaagcgcgagtttttagagattttatcggtgttcgtatttcggggtattttgtttttggttttatatttcgttttttgtttttttatttcgtattttttcggagtagagttggtagtgtttttacggaggcgtatatttatcggagttttttgttgtatttttggtatcg

SEQ ID NO: 20182 - DNA, 1154 bp, Artificial Sequence
  chemically treated genomic DNA (Homo sapiens) CpG-island No: 20182
cgataccaaaaatacaacaaaaaactccgataaatatacgcctccgtaaaaacactaccaactctactccgaaaaaatacgaaataaaaaaacaaaaaacgaaatataaaaccaaaaacaaaataccccgaaatacgaacaccgataaaatctctaaaaactcgcgcttcctacgcctttacaacgctttactaacactacgcttcccttaacaacgcctaaaaacgacgctaactaaaatttacgaaaccaacgaacaaaaaaaataaacgcgcaaaaaatcccttcctaccctcacgcgcgcaactaaactacaatatcccctttcacgcccaccctcgcccgaaattccaataccaaaacgctaaaatttcgcgactcgccgaaacccgaaaaaataacctaaaacaactaacaaaaaaaaataaaaacgattaaaaaaaaacaaaactaaacctacgatcgaaacgtacgcgaatccgtaactcaaaacgccaatacaaaaccgcccgccaaccacccgcacctacctcaatccacttctacgcctcgaaaaaaacgaactcgaaaaacgactcgaactacaaaaactaaaaaacttccaaaccgaaaacgaaacaaaccatttacgcaaccccgcgtcctctcaaacgccgaaataaaaacgaccgccgccgtcgccgccgcaaaaacgcgctccccgccccttcccgcccgccgacctcccctccccgcctctccccgcccccgaccgacgcaaatcccgaaaaaaccgcgcgctactaaaaaacgccgcgacaactattcccgacgccgcccgaactccaacgcgccgtaaataacccgcgaaaacgaacgcgaaaacgccgaaaacttcttctcctccccaccttcgaaaaccgctccgcccccgaaaaaaaaaaacacaactacgaactaaaaataacccgaaacgaacgctacgtatctccctcccgttcacacccgacccgataaaaaaaatccgctaaccgccccgcacgtccctacgccccgccgactactaaaaaacgaacgaataaatctaacatcatataaaaaacgcgcgcccaataaaacgcacccgaacccgaaaaaacgaacgctacgacaccgaaacaataaaacgcgcgaac

SEQ ID NO: 20183 - DNA, 1154 bp, Artificial Sequence
  chemically treated genomic DNA (Homo sapiens) CpG-island No: 20183
cggtgttaggaatatagtaagaggtttcggtgggtatgcgttttcgtgaagatattgttaattttgtttcggaagggtgcggggtagggggataaggggcgaaatgtgggattagaagtaagatatttcgaaatgcgagtatcggtgaagtttttgggggttcgcgttttttgcgtttttgtaacgttttgttagtattgcgttttttttggtagcgtttggaagcggcgttagttgagatttgcgaggttagcgggtaggaaggatggacgcgtaggggatttttttttgtttttacgcgcgtagttagattgtagtgtttttttttacgtttattttcgttcgggattttaatgttaaagcgttaaggtttcgcggttcgtcgaggttcgggggggtgatttggagtagttggtaaaagaaagtgggggcggttggggggaggtaaggttggatttgcggtcggagcgtgcgcgggttcgtggtttagggcgttagtgtaaggtcgttcgttagttattcgtatttattttaatttatttttgcgtttcggagaaggcgggttcggggggcggttcgggttgtaggggttgaagagtttttagatcgagagcgggataagttatttgcgtagtttcgcgtttttttaagcgtcgggatgaggacggtcgtcgtcgtcgtcgtcgtaggagcgcgtttttcgttttttttcgttcgtcggtttttttttttcgttttttttcgttttcggtcggcgtaggtttcgggagagtcgcgcgttgttagaggacgtcgcggtagttgttttcggcgtcgttcgggttttaacgcgtcgtgagtgattcgcgggagcgagcgcggaggcgtcgggagtttttttttttttttattttcgagggtcgtttcgttttcggggagggggagtatagttacggattaaaaataattcggagcgagcgttgcgtgtttttttttcgtttatattcggttcgatagagggaattcgttggtcgtttcgtacgtttttgcgtttcgtcggttgttgaggggcgggcggatgggtttggtattatatgggagacgcgcgtttagtggggcgtattcgggttcgggggagcgggcgttgcggtatcggagtagtaggacgcgcgggt

SEQ ID NO: 20184 - DNA, 1154 bp, Artificial Sequence
  chemically treated genomic DNA (Homo sapiens) CpG-island No: 20184
acccgcgcgtcctactactccgataccgcaacgcccgctcccccgaacccgaatacgccccactaaacgcgcgtctcccatataataccaaacccatccgcccgcccctcaacaaccgacgaaacgcaaaaacgtacgaaacgaccaacgaattccctctatcgaaccgaatataaacgaaaaaaaaacacgcaacgctcgctccgaattatttttaatccgtaactatactccccctccccgaaaacgaaacgaccctcgaaaataaaaaaaaaaaaaaactcccgacgcctccgcgctcgctcccgcgaatcactcacgacgcgttaaaacccgaacgacgccgaaaacaactaccgcgacgtcctctaacaacgcgcgactctcccgaaacctacgccgaccgaaaacgaaaaaaaacgaaaaaaaaaaaccgacgaacgaaaaaaaacgaaaaacgcgctcctacgacgacgacgacgacgaccgtcctcatcccgacgcttaaaaaaacgcgaaactacgcaaataacttatcccgctctcgatctaaaaactcttcaacccctacaacccgaaccgccccccgaacccgccttctccgaaacgcaaaaataaattaaaataaatacgaataactaacgaacgaccttacactaacgccctaaaccacgaacccgcgcacgctccgaccgcaaatccaaccttacctccccccaaccgcccccactttcttttaccaactactccaaatcacccccccgaacctcgacgaaccgcgaaaccttaacgctttaacattaaaatcccgaacgaaaataaacgtaaaaaaaaacactacaatctaactacgcgcgtaaaaacaaaaaaaaatcccctacgcgtccatccttcctacccgctaacctcgcaaatctcaactaacgccgcttccaaacgctaccaaaaaaaacgcaatactaacaaaacgttacaaaaacgcaaaaaacgcgaacccccaaaaacttcaccgatactcgcatttcgaaatatcttacttctaatcccacatttcgccccttatccccctaccccgcacccttccgaaacaaaattaacaatatcttcacgaaaacgcatacccaccgaaacctcttactatattcctaacaccg

SEQ ID NO: 20185 - DNA, 1003 bp, Artificial Sequence
  chemically treated genomic DNA (Homo sapiens) CpG-island No: 20185
agaatgacgtcggtgttcgggtaggagagcggtcgtaggcggtcgtagtttttttggttcgtcgtgttttatagcgttagttttatttgtttgtcgtttattttaatgtcggttatatagttttcgaagacggtgggtacgtatatttcggggaattcgtttttattgaatacgattagtaggtacgttttgttatacgcgtcgtcgtttattattattagttttttgcggatggtcgttatgagcgggtcgggttcgggtagtaggagggggttcgcgaacgtttcgttgttttttcgttcgtcgtttattgtttatttcgggttgcgcgtaggtggcgagagggtcgttagttgtattcgggtttcgcggtggcgcgttttttcgttgcgtttcggttgtcgcggcgggggcggtgggggcgcgggggtatagggcgtatcgtgcgtttcgtcgcgttgttttcgggcggtggtcgttttgtttattttaggtcggggatcggcggttttgtgcgtaacgcgggttcgggtagtagattcgggcggtggattcggtttagttttttttcgggttttttcgggtttcgttgagtatataagataatagttttaattagattgcggtggtagatgagggttgcggttttagcgttcgttatttaaagagttcggttatttttttaatatagtcgtttaatgggaaattagtcggttgagtttatcgttgcggagtttagttttgattggtcgttttttgtagttcgagggcggggtagggttagtttgattgacggtttaggtcgtcgggttgggagaggtagcgatcggggagtttgcgttgttgttgtcgttgcggggttttggcggtattcgggttttttttttcgtcgtagcgtttgcgcgcggggttcgggagttggttgtttggagtttttagggtttgggcgagcggtttcgagataggttttatttagtggggcgttggcgatttttatttagaa

SEQ ID NO: 20186 - DNA, 1003 bp, Artificial Sequence
  chemically treated genomic DNA (Homo sapiens) CpG-island No: 20186
ttctaaataaaaatcgccaacgccccactaaataaaacctatctcgaaaccgctcgcccaaaccctaaaaactccaaacaaccaactcccgaaccccgcgcgcaaacgctacgacgaaaaaaaaaacccgaataccgccaaaaccccgcaacgacaacaacaacgcaaactccccgatcgctacctctcccaacccgacgacctaaaccgtcaatcaaactaaccctaccccgccctcgaactacaaaaaacgaccaatcaaaactaaactccgcaacgataaactcaaccgactaatttcccattaaacgactatattaaaaaaataaccgaactctttaaataacgaacgctaaaaccgcaaccctcatctaccaccgcaatctaattaaaactattatcttatatactcaacgaaacccgaaaaaacccgaaaaaaaactaaaccgaatccaccgcccgaatctactacccgaacccgcgttacgcacaaaaccgccgatccccgacctaaaataaacaaaacgaccaccgcccgaaaacaacgcgacgaaacgcacgatacgccctatacccccgcgcccccaccgcccccgccgcgacaaccgaaacgcaacgaaaaaacgcgccaccgcgaaacccgaatacaactaacgaccctctcgccacctacgcgcaacccgaaataaacaataaacgacgaacgaaaaaacaacgaaacgttcgcgaaccccctcctactacccgaacccgacccgctcataacgaccatccgcaaaaaactaataataataaacgacgacgcgtataacaaaacgtacctactaatcgtattcaataaaaacgaattccccgaaatatacgtacccaccgtcttcgaaaactatataaccgacattaaaataaacgacaaacaaataaaactaacgctataaaacacgacgaaccaaaaaaactacgaccgcctacgaccgctctcctacccgaacaccgacgtcattct

SEQ ID NO: 20187 - DNA, 1003 bp, Artificial Sequence
  chemically treated genomic DNA (Homo sapiens) CpG-island No: 20187
ttttggatgggagtcgttaacgttttattgagtgaagtttgtttcggaatcgttcgtttagattttggaggttttagatagttagttttcggatttcgcgcgtaaacgttgcggcgaaggaggggattcgggtatcgttagagtttcgtagcggtagtagtagcgtagatttttcggtcgttgttttttttagttcggcggtttgggtcgttaattaagttggttttgtttcgttttcgggttgtagggggcggttaattagagttaagtttcgtagcgatgagtttagtcggttggttttttattggacggttatattaagaaagtggtcggattttttaaatagcgggcgttagggtcgtagtttttatttgttatcgtagtttggttggagttgttgttttgtatgtttagcgaggttcggagagattcgggagagagttaggtcgagtttatcgttcgagtttgttgttcgagttcgcgttacgtataaagtcgtcgattttcggtttggggtgagtagagcgattatcgttcgggagtagcgcggcgagacgtacggtgcgttttatgttttcgcgtttttatcgttttcgtcgcggtagtcgaagcgtagcgagagaacgcgttatcgcggggttcgggtgtagttagcgattttttcgttatttgcgcgtagttcgaggtgagtagtgagcggcgagcgggagggtagcgaggcgttcgcgggtttttttttgttgttcgggttcggttcgtttatggcggttattcgtaagaagttggtggtggtgggcgacggcgcgtgtggtaagacgtgtttgttgatcgtgtttagtaaggacgagtttttcgaggtgtacgtgtttatcgttttcgagaattatgtggtcgatattgaggtggacggtaagtaggtggagttggcgttgtgggatacggcgggttaggaggattacgatcgtttgcggtcgtttttttattcggatatcgacgttatttt

SEQ ID NO: 20188 - DNA, 1003 bp, Artificial Sequence
  chemically treated genomic DNA (Homo sapiens) CpG-island No: 20188
aaaataacgtcgatatccgaataaaaaaacgaccgcaaacgatcgtaatcctcctaacccgccgtatcccacaacgccaactccacctacttaccgtccacctcaatatcgaccacataattctcgaaaacgataaacacgtacacctcgaaaaactcgtccttactaaacacgatcaacaaacacgtcttaccacacgcgccgtcgcccaccaccaccaacttcttacgaataaccgccataaacgaaccgaacccgaacaacaaaaaaaaacccgcgaacgcctcgctaccctcccgctcgccgctcactactcacctcgaactacgcgcaaataacgaaaaaatcgctaactacacccgaaccccgcgataacgcgttctctcgctacgcttcgactaccgcgacgaaaacgataaaaacgcgaaaacataaaacgcaccgtacgtctcgccgcgctactcccgaacgataatcgctctactcaccccaaaccgaaaatcgacgactttatacgtaacgcgaactcgaacaacaaactcgaacgataaactcgacctaactctctcccgaatctctccgaacctcgctaaacatacaaaacaacaactccaaccaaactacgataacaaataaaaactacgaccctaacgcccgctatttaaaaaatccgaccactttcttaatataaccgtccaataaaaaaccaaccgactaaactcatcgctacgaaacttaactctaattaaccgccccctacaacccgaaaacgaaacaaaaccaacttaattaacgacccaaaccgccgaactaaaaaaaacaacgaccgaaaaatctacgctactactaccgctacgaaactctaacgatacccgaatcccctccttcgccgcaacgtttacgcgcgaaatccgaaaactaactatctaaaacctccaaaatctaaacgaacgattccgaaacaaacttcactcaataaaacgttaacgactcccatccaaaa

SEQ ID NO: 20189 - DNA, 788 bp, Artificial Sequence
  chemically treated genomic DNA (Homo sapiens) CpG-island No: 20189
ttaagtttcgttttatttaggttcgtttcgggtgcggagggtcgggtcgtaaattcgtaaggcgcggaggtcgtcgcgacgtttatcggggggcgttgtgaagtcggtatcgggcggatagaggtgagtcggttcggaggcggtggttttcgtttttgttcgcgcgtcgaggggcgaattttaggtagcgaggtcgtcgttttcgtttttcggtcggttttttcgttagcgggcgagaggggagtggtcgggtttttttcgtcgtcgttgagtatttcgtagttgggtgcgtacgggagttttaatcgcggcgcgtggaggtagtattagagcgcgcggcgcgtagtcggtcggtagtcgcgggatagttttggtagaatagtcgcggcgggagtttcgtagtttcgggttgggttcgcgtttcggagcgttatcggagagcgaggacgacgtggaggcggagtggcgttcggcgaggtagcgttaggcgaggtagcgcgagcgtttttttttttttttttttgtttttttttttgcgttcgtcgtcggttttcgaggcgtttgtttcgcgtttttgtgttcgcggtttttggtttcgtcgtattttgcgggcgggggttagcgggttttgtcgtttttttgggagacgcggcgttgcggcgggaacggcgtacgttgtaggttgcggagggtggtcgtgatttcgtagtggtttcgggggtggcgggagggaagaagggtttgtaaattaagttgtttttattttgttttatgtttttcgtatttgt

SEQ ID NO: 20190 - DNA, 788 bp, Artificial Sequence
  chemically treated genomic DNA (Homo sapiens) CpG-island No: 20190
acaaatacgaaaaacataaaacaaaataaaaacaacttaatttacaaacccttcttccctcccgccacccccgaaaccactacgaaatcacgaccaccctccgcaacctacaacgtacgccgttcccgccgcaacgccgcgtctcccaaaaaaacgacaaaacccgctaacccccgcccgcaaaatacgacgaaaccaaaaaccgcgaacacaaaaacgcgaaacaaacgcctcgaaaaccgacgacgaacgcaaaaaaaaaaacaaaaaaaaaaaaaaaaaaacgctcgcgctacctcgcctaacgctacctcgccgaacgccactccgcctccacgtcgtcctcgctctccgataacgctccgaaacgcgaacccaacccgaaactacgaaactcccgccgcgactattctaccaaaactatcccgcgactaccgaccgactacgcgccgcgcgctctaatactacctccacgcgccgcgattaaaactcccgtacgcacccaactacgaaatactcaacgacgacgaaaaaaacccgaccactcccctctcgcccgctaacgaaaaaaccgaccgaaaaacgaaaacgacgacctcgctacctaaaattcgcccctcgacgcgcgaacaaaaacgaaaaccaccgcctccgaaccgactcacctctatccgcccgataccgacttcacaacgccccccgataaacgtcgcgacgacctccgcgccttacgaatttacgacccgaccctccgcacccgaaacgaacctaaataaaacgaaacttaa

SEQ ID NO: 20191 - DNA, 788 bp, Artificial Sequence
  chemically treated genomic DNA (Homo sapiens) CpG-island No: 20191
ataggtacgagaggtatggggtaaagtaagagtaatttagtttataagttttttttttttttcgttattttcgaagttattgcggagttacgattatttttcgtaatttatagcgtgcgtcgttttcgtcgtagcgtcgcgttttttaagagagcggtagagttcgttgattttcgttcgtagggtgcgacggggttagggatcgcgggtataaaggcgcggagtaggcgtttcgggggtcgacgacggacgtagagggaagggtaggggagagagagagaaagcgttcgcgttatttcgtttggcgttatttcgtcgggcgttatttcgtttttacgtcgttttcgtttttcggtggcgtttcgggacgcgggtttagttcggggttgcggggttttcgtcgcggttgttttgttaaggttgtttcgcggttgtcggtcgattgcgcgtcgcgcgttttggtattgtttttacgcgtcgcggttgaggttttcgtgcgtatttagttgcggagtgtttagcggcggcgggaggagttcggttatttttttttcgttcgttggcggaggggtcggtcgaggggcgggggcggcgatttcgttgtttgggattcgtttttcggcgcgcgggtaggaacgggagttatcgttttcgagtcgatttatttttgttcgttcggtgtcggttttatagcgtttttcggtgagcgtcgcggcggttttcgcgttttgcgggtttgcggttcgatttttcgtattcggggcgagtttggatgggacgaggtttga

SEQ ID NO: 20192 - DNA, 788 bp, Artificial Sequence
  chemically treated genomic DNA (Homo sapiens) CpG-island No: 20192
tcaaacctcgtcccatccaaactcgccccgaatacgaaaaatcgaaccgcaaacccgcaaaacgcgaaaaccgccgcgacgctcaccgaaaaacgctataaaaccgacaccgaacgaacaaaaataaatcgactcgaaaacgataactcccgttcctacccgcgcgccgaaaaacgaatcccaaacaacgaaatcgccgcccccgcccctcgaccgacccctccgccaacgaacgaaaaaaaaataaccgaactcctcccgccgccgctaaacactccgcaactaaatacgcacgaaaacctcaaccgcgacgcgtaaaaacaataccaaaacgcgcgacgcgcaatcgaccgacaaccgcgaaacaaccttaacaaaacaaccgcgacgaaaaccccgcaaccccgaactaaacccgcgtcccgaaacgccaccgaaaaacgaaaacgacgtaaaaacgaaataacgcccgacgaaataacgccaaacgaaataacgcgaacgctttctctctctctcccctacccttccctctacgtccgtcgtcgacccccgaaacgcctactccgcgcctttatacccgcgatccctaaccccgtcgcaccctacgaacgaaaatcaacgaactctaccgctctcttaaaaaacgcgacgctacgacgaaaacgacgcacgctataaattacgaaaaataatcgtaactccgcaataacttcgaaaataacgaaaaaaaaaaaaaacttataaactaaattactcttactttaccccatacctctcgtacctat

SEQ ID NO: 20193 - DNA, 956 bp, Artificial Sequence
  chemically treated genomic DNA (Homo sapiens) CpG-island No: 20193
gttattcgtttttaaattttaaattttgcgtaatgtttttttatagatttttttaggtattacgtagtttcgagtttcgagtttcgtttcgggggttttatttcgttttttcgcgttcgcggttcgtttttttttattgagcgtttagttttcgtagttttttcggtcgtcgagcgtcgtgggcggggttttagggcggcggcgtttcgcggggagggtttttcgtgttgggggcgaggttattcgaggtagtttttcgttcgtttttaatttcgtttcgttttcggagtttataaagggaggcgattcgcggttcgttcggttggtattttttagtcgtcgttagtttcgtcgaggggagttagcgtcgtttttgaggggcgttcggcgtcggagttatgatttttcgtcgatttaggaagttgtagtagaaggaggaggcggcggttatttcggatttcgtcgttcggattttcgattcggaagtcgcgttcgtcgtttcggtttcgatttcgggattttttgtcgtagtcgttatttttgggtttttagcggacgagttgtacgcggcgttggaggattattattttgtcgagttgtatcgcgcgttcgtcgtgttcgggggtattttgtttcgtcgaaaggtgcgtttttcgttcgtttttaggatttgtttagttttttttcgattttttatagggtttgttgatttcgtagtgtttttttttcggcgttcgcggagttttttattttttttttcggttcgttgggtgtttcgatttttcgcgtttttcgttgttgcgaaggtcgtggttttcgtttgtatatcgcgtttaggttcggtggtttttaatttcgcgttttatgtacgttttttttttttttttttgattttttttagtatttttttttttttattcgttttatttggttttttgttttttatgtttcgtttt

SEQ ID NO: 20194 - DNA, 956 bp, Artificial Sequence
  chemically treated genomic DNA (Homo sapiens) CpG-island No: 20194
aaaacgaaacataaaaaacaaaaaaccaaataaaacgaataaaaaaaaaaaaatactaaaaaaaatcaaaaaaaaaaaaaaaaaacgtacataaaacgcgaaattaaaaaccaccgaacctaaacgcgatatacaaacgaaaaccacgaccttcgcaacaacgaaaaacgcgaaaaatcgaaacacccaacgaaccgaaaaaaaaaataaaaaactccgcgaacgccgaaaaaaaaacactacgaaatcaacaaaccctataaaaaatcgaaaaaaaactaaacaaatcctaaaaacgaacgaaaaacgcacctttcgacgaaacaaaatacccccgaacacgacgaacgcgcgatacaactcgacaaaataataatcctccaacgccgcgtacaactcgtccgctaaaaacccaaaaataacgactacgacaaaaaatcccgaaatcgaaaccgaaacgacgaacgcgacttccgaatcgaaaatccgaacgacgaaatccgaaataaccgccgcctcctccttctactacaacttcctaaatcgacgaaaaatcataactccgacgccgaacgcccctcaaaaacgacgctaactcccctcgacgaaactaacgacgactaaaaaataccaaccgaacgaaccgcgaatcgcctccctttataaactccgaaaacgaaacgaaattaaaaacgaacgaaaaactacctcgaataacctcgcccccaacacgaaaaaccctccccgcgaaacgccgccgccctaaaaccccgcccacgacgctcgacgaccgaaaaaactacgaaaactaaacgctcaataaaaaaaaacgaaccgcgaacgcgaaaaaacgaaataaaacccccgaaacgaaactcgaaactcgaaactacgtaatacctaaaaaaatctataaaaaaacattacgcaaaatttaaaatttaaaaacgaataac

SEQ ID NO: 20195 - DNA, 956 bp, Artificial Sequence
  chemically treated genomic DNA (Homo sapiens) CpG-island No: 20195
gaggcggggtatggggggtagaaagttagatggagcgggtaggagaaggggggtgttgggaggagttaaggagggagagagggggcgtgtatggggcgcggagttaagagttatcgagtttgggcgcggtgtgtaggcgagggttacggttttcgtagtagcggggaacgcggggagtcgaggtatttagcgggtcggggaagaaggtgggggatttcgcggacgtcgaggagagggtattgcggagttagtaggttttgtagggagtcggagaggggttgagtagattttgaaggcgggcgggggacgtatttttcggcggggtagggtgttttcggatacggcgagcgcgcggtatagttcggtagggtgatagttttttagcgtcgcgtatagttcgttcgttgggggtttaggggtggcggttgcggtagggggtttcggggtcgggatcggagcggcgggcgcgattttcgagtcgggagttcgggcggcggggttcggggtggtcgtcgttttttttttttgttgtagttttttgagtcggcggagggttatggtttcggcgtcggacgttttttagagacggcgttggtttttttcggcggggttggcggcggttgggggatgttagtcgggcgggtcgcgggtcgtttttttttataggtttcgagagcggggcggggttgggggcgggcggggagttgtttcgggtggtttcgtttttagtacggaggatttttttcgcgaggcgtcgtcgttttggagtttcgtttacggcgttcgacggtcggggaaattgcgggagttgggcgtttagtgggggaaaacgagtcgcggacgcgaaggggcgggatgaggttttcggggcggggttcggggttcggggttgcgtgatatttggaggggtttgtgaagggatattgcgtaaggtttgaaatttagggacgaatagt

SEQ ID NO: 20196 - DNA, 956 bp, Artificial Sequence
  chemically treated genomic DNA (Homo sapiens) CpG-island No: 20196
actattcgtccctaaatttcaaaccttacgcaatatcccttcacaaacccctccaaatatcacgcaaccccgaaccccgaaccccgccccgaaaacctcatcccgccccttcgcgtccgcgactcgttttcccccactaaacgcccaactcccgcaatttccccgaccgtcgaacgccgtaaacgaaactccaaaacgacgacgcctcgcgaaaaaaatcctccgtactaaaaacgaaaccacccgaaacaactccccgcccgcccccaaccccgccccgctctcgaaacctataaaaaaaaacgacccgcgacccgcccgactaacatcccccaaccgccgccaaccccgccgaaaaaaaccaacgccgtctctaaaaaacgtccgacgccgaaaccataaccctccgccgactcaaaaaactacaacaaaaaaaaaaaacgacgaccaccccgaaccccgccgcccgaactcccgactcgaaaatcgcgcccgccgctccgatcccgaccccgaaaccccctaccgcaaccgccacccctaaacccccaacgaacgaactatacgcgacgctaaaaaactatcaccctaccgaactataccgcgcgctcgccgtatccgaaaacaccctaccccgccgaaaaatacgtcccccgcccgccttcaaaatctactcaacccctctccgactccctacaaaacctactaactccgcaataccctctcctcgacgtccgcgaaatcccccaccttcttccccgacccgctaaatacctcgactccccgcgttccccgctactacgaaaaccgtaaccctcgcctacacaccgcgcccaaactcgataactcttaactccgcgccccatacacgccccctctctccctccttaactcctcccaacaccccccttctcctacccgctccatctaactttctaccccccataccccgcctc

SEQ ID NO: 20197 - DNA, 571 bp, Artificial Sequence
  chemically treated genomic DNA (Homo sapiens) CpG-island No: 20197
tacgatacgttggagtcggtgcgtttttgtttttacggcgcgggtttgttttcgggttcgttgtttttcgggtttttgttcgtcgtgttcgggcgttttcgcggaggcgttcgacgggttaggggcgacgtcgacgacgtcgtttattatacgtgttttttcggggatttcgagtcgtcggcgttgtcgttttcgtcgttttcggttcgcgttttcggttcgggtttcgtcgagatttttgtcgtggggtcgggttttgggtcgcgggtcgcgttgagtcgtagcgttagtgtgcggtgcgcgggttttggcgggggcggaggcgggggcgcgtcgggcgcgttttggattgaggttcgcgagtaggttttatgcggtttcggtttgcgtaaaattaagtatcgtagttttcgtcggcggttgtttaagtttattttcggatttaatcgttttttggaggaggaggagagttagttgtaggggcgggggcgggtagggaggtatttatttatttattcgtaatagttagcgttaaaagagggggaggtcgagttaagaggattttaggagt

SEQ ID NO: 20198 - DNA, 571 bp, Artificial Sequence
  chemically treated genomic DNA (Homo sapiens) CpG-island No: 20198
actcctaaaatcctcttaactcgacctccccctcttttaacgctaactattacgaataaataaataaatacctccctacccgcccccgcccctacaactaactctcctcctcctccaaaaaacgattaaatccgaaaataaacttaaacaaccgccgacgaaaactacgatacttaattttacgcaaaccgaaaccgcataaaacctactcgcgaacctcaatccaaaacgcgcccgacgcgcccccgcctccgcccccgccaaaacccgcgcaccgcacactaacgctacgactcaacgcgacccgcgacccaaaacccgaccccacgacaaaaatctcgacgaaacccgaaccgaaaacgcgaaccgaaaacgacgaaaacgacaacgccgacgactcgaaatccccgaaaaaacacgtataataaacgacgtcgtcgacgtcgcccctaacccgtcgaacgcctccgcgaaaacgcccgaacacgacgaacaaaaacccgaaaaacaacgaacccgaaaacaaacccgcgccgtaaaaacaaaaacgcaccgactccaacgtatcgta

SEQ ID NO: 20199 - DNA, 571 bp, Artificial Sequence
  chemically treated genomic DNA (Homo sapiens) CpG-island No: 20199
gtttttggggtttttttggttcggttttttttttttttagcgttggttgttgcgaataaataaataaatatttttttgttcgttttcgtttttatagttggtttttttttttttttagggagcggttgagttcggggatgaatttgagtagtcgtcggcggaagttgcggtatttggttttgcgtaggtcggggtcgtatagggtttgttcgcgagttttagtttagagcgcgttcggcgcgttttcgttttcgttttcgttagggttcgcgtatcgtatattggcgttgcggtttagcgcggttcgcggtttagggttcggttttacggtaggggtttcggcggggttcgggtcgaaggcgcgggtcgggggcggcgggggcggtagcgtcggcggttcggagttttcgaagaagtacgtgtggtagacggcgtcgtcggcgtcgtttttggttcgtcgggcgttttcgcggggacgttcgggtacggcgagtagaggttcgaagggtagcgagttcgggagtaggttcgcgtcgtagaggtaggagcgtatcgattttagcgtgtcgta

SEQ ID NO: 20200 - DNA, 571 bp, Artificial Sequence
  chemically treated genomic DNA (Homo sapiens) CpG-island No: 20200
tacgacacgctaaaatcgatacgctcctacctctacgacgcgaacctactcccgaactcgctacccttcgaacctctactcgccgtacccgaacgtccccgcgaaaacgcccgacgaaccaaaaacgacgccgacgacgccgtctaccacacgtacttcttcgaaaactccgaaccgccgacgctaccgcccccgccgcccccgacccgcgccttcgacccgaaccccgccgaaacccctaccgtaaaaccgaaccctaaaccgcgaaccgcgctaaaccgcaacgccaatatacgatacgcgaaccctaacgaaaacgaaaacgaaaacgcgccgaacgcgctctaaactaaaactcgcgaacaaaccctatacgaccccgacctacgcaaaaccaaataccgcaacttccgccgacgactactcaaattcatccccgaactcaaccgctccctaaaaaaaaaaaaaaaccaactataaaaacgaaaacgaacaaaaaaatatttatttatttattcgcaacaaccaacgctaaaaaaaaaaaaaaccgaaccaaaaaaaccccaaaaac

SEQ ID NO: 20201 - DNA, 569 bp, Artificial Sequence
  chemically treated genomic DNA (Homo sapiens) CpG-island No: 20201
gcgcgtatatttattttttttatgtatcgtttttaaaaatagatgtacgtttttcgaagggaatttattcggtcggttttcgttgtttttgttcggattggcgtttcgagttttagtttggtttttggtttcgcgtgcgttttcgaagtttttttgtgtatttttttaagtttcgtagttttcgttattgggatttttcggtcgagttcgattttttttttaagcgtttcgtgacgtacggggaggggcgggggcgttattgacgtaggtcgttcgtcgagttttggttatataagggcgcggggggcggtgcggtttcggcgggaggcggttagggggaggtgcggttcggggagttcgagggggcggggcgaggagggggggtttggaatgtttgcgcgcgtgacgtacgcggggttttattgacgtagggagcgcggattgtttgatttataaataggtttttcgcgttcgtcgcgttcgttaaaaatagtagtttttaggtttattaggtttttcgtatcggattcgggttttagttgggggtttttaggtttagaataattagt

SEQ ID NO: 20202 - DNA, 569 bp, Artificial Sequence
  chemically treated genomic DNA (Homo sapiens) CpG-island No: 20202
actaattattctaaacctaaaaacccccaactaaaacccgaatccgatacgaaaaacctaataaacctaaaaactactatttttaacgaacgcgacgaacgcgaaaaacctatttataaatcaaacaatccgcgctccctacgtcaataaaaccccgcgtacgtcacgcgcgcaaacattccaaaccccccctcctcgccccgccccctcgaactccccgaaccgcacctccccctaaccgcctcccgccgaaaccgcaccgccccccgcgcccttatataaccaaaactcgacgaacgacctacgtcaataacgcccccgcccctccccgtacgtcacgaaacgcttaaaaaaaaaatcgaactcgaccgaaaaatcccaataacgaaaactacgaaacttaaaaaaatacacaaaaaaacttcgaaaacgcacgcgaaaccaaaaaccaaactaaaactcgaaacgccaatccgaacaaaaacaacgaaaaccgaccgaataaattcccttcgaaaaacgtacatctatttttaaaaacgatacataaaaaaaataaatatacgcgc

SEQ ID NO: 20203 - DNA, 569 bp, Artificial Sequence
  chemically treated genomic DNA (Homo sapiens) CpG-island No: 20203
gttggttattttggatttgggggtttttagttgggattcgagttcggtgcggggagtttagtgggtttgggagttgttatttttagcgggcgcggcgggcgcgaggagtttatttatagattaaataattcgcgttttttgcgttaatggaatttcgcgtgcgttacgcgcgtagatattttaggtttttttttttcgtttcgttttttcgggtttttcgggtcgtatttttttttggtcgtttttcgtcggaatcgtatcgtttttcgcgtttttgtatggttaaagttcgacgggcggtttgcgttagtggcgttttcgttttttttcgtgcgttacggagcgtttaagaggagggtcgggttcggtcggggagttttagtggcggaggttacgaaatttgggggagtgtatagaagaatttcgggagcgtacgcgggattagggattaggttgagattcggggcgttagttcgggtaggggtagcgggagtcggtcgggtaggtttttttcggggaacgtgtatttgtttttaggagcggtgtatgaaggagatgggtgtacgcgt

SEQ ID NO: 20204 - DNA, 569 bp, Artificial Sequence
  chemically treated genomic DNA (Homo sapiens) CpG-island No: 20204
acgcgtacacccatctccttcatacaccgctcctaaaaacaaatacacgttccccgaaaaaaacctacccgaccgactcccgctacccctacccgaactaacgccccgaatctcaacctaatccctaatcccgcgtacgctcccgaaattcttctatacactcccccaaatttcgtaacctccgccactaaaactccccgaccgaacccgaccctcctcttaaacgctccgtaacgcacgaaaaaaaacgaaaacgccactaacgcaaaccgcccgtcgaactttaaccatacaaaaacgcgaaaaacgatacgattccgacgaaaaacgaccaaaaaaaaatacgacccgaaaaacccgaaaaaacgaaacgaaaaaaaaaaacctaaaatatctacgcgcgtaacgcacgcgaaattccattaacgcaaaaaacgcgaattatttaatctataaataaactcctcgcgcccgccgcgcccgctaaaaataacaactcccaaacccactaaactccccgcaccgaactcgaatcccaactaaaaacccccaaatccaaaataaccaac

SEQ ID NO: 20205 - DNA, 674 bp, Artificial Sequence
  chemically treated genomic DNA (Homo sapiens) CpG-island No: 20205
cgggatttcggcgtggtttcgagttcgtttaaaggtatttatcgaagattcgagattgttcggttttttcggggtttatttttcgttatttcggtagttttttatttggtttcgcgggtttcgttcgtttttttattttcgtttttcggggtcgcgtattagtcggttttgagttgttttgtatcgtaggggcgtttatgtttggaggtcgggggtttcgggcgtcgcgaggggattttcgttagtttcgtcgtcgtcgttatttttttttcgcgtttttgtagtcgcgtcgtagtcgtttagcgtttttcgttttcgggaagtttttcgttcgtagtttcggtcgcgcggcgtttttcgttttcgcgttcgcggtcgttcgcgcgttgttttagtttcggcgcgtttttttcggcgggcggggcggggatcgtgacgcgtgtttattgacgttttcggaatttcggcggcggcggtcgacgtagttttattaatggggttaaaaatagcggcgttcggaatagtcgcgagcgtttcgtttcgcggttttttttacgtcgtatattcggttatataattcgcggttagagtcggggagttggtttttaggtgagggtgtcgaggtttcgtttatatttttcgaggttgggtatttggggttaggttataaataa

SEQ ID NO: 20206 - DNA, 674 bp, Artificial Sequence
  chemically treated genomic DNA (Homo sapiens) CpG-island No: 20206
ttatttataacctaaccccaaatacccaacctcgaaaaatataaacgaaacctcgacaccctcacctaaaaaccaactccccgactctaaccgcgaattatataaccgaatatacgacgtaaaaaaaaccgcgaaacgaaacgctcgcgactattccgaacgccgctatttttaaccccattaataaaactacgtcgaccgccgccgccgaaattccgaaaacgtcaataaacacgcgtcacgatccccgccccgcccgccgaaaaaaacgcgccgaaactaaaacaacgcgcgaacgaccgcgaacgcgaaaacgaaaaacgccgcgcgaccgaaactacgaacgaaaaacttcccgaaaacgaaaaacgctaaacgactacgacgcgactacaaaaacgcgaaaaaaaaataacgacgacgacgaaactaacgaaaatcccctcgcgacgcccgaaacccccgacctccaaacataaacgcccctacgatacaaaacaactcaaaaccgactaatacgcgaccccgaaaaacgaaaataaaaaaacgaacgaaacccgcgaaaccaaataaaaaactaccgaaataacgaaaaataaaccccgaaaaaaccgaacaatctcgaatcttcgataaatacctttaaacgaactcgaaaccacgccgaaatcccg

SEQ ID NO: 20207 - DNA, 674 bp, Artificial Sequence
  chemically treated genomic DNA (Homo sapiens) CpG-island No: 20207
ttatttataatttagttttaggtgtttagtttcggaaggtgtgagcgagatttcggtatttttatttgagaattagtttttcggttttggtcgcgggttatgtaatcgggtgtgcggcgtggggggagtcgcggggcggggcgttcgcggttatttcgggcgtcgttatttttagttttattgatgaggttgcgtcggtcgtcgtcgtcgggatttcggagacgttaatgggtacgcgttacggttttcgtttcgttcgtcgggggaggcgcgtcggggttgggatagcgcgcgggcggtcgcgggcgcgggggcggggggcgtcgcgcggtcggaattgcgggcggggggtttttcgggggcggggggcgttgagcggttgcggcgcggttgtaggagcgcgaggaggaggtggcggcggcggcggaattggcgggggttttttcgcggcgttcgggattttcggtttttaggtatgggcgtttttgcggtgtagagtagtttagggtcggttggtgcgcgatttcggaaagcgggggtggagaggcgagcggagttcgcggggttaggtgaggggttgtcggggtggcgggaggtgggtttcggagaggtcgggtaatttcgggttttcggtggatgtttttgggcgggttcggggttacgtcggagtttcg

SEQ ID NO: 20208 - DNA, 674 bp, Artificial Sequence
  chemically treated genomic DNA (Homo sapiens) CpG-island No: 20208
cgaaactccgacgtaaccccgaacccgcccaaaaacatccaccgaaaacccgaaattacccgacctctccgaaacccacctcccgccaccccgacaacccctcacctaaccccgcgaactccgctcgcctctccacccccgctttccgaaatcgcgcaccaaccgaccctaaactactctacaccgcaaaaacgcccatacctaaaaaccgaaaatcccgaacgccgcgaaaaaacccccgccaattccgccgccgccgccacctcctcctcgcgctcctacaaccgcgccgcaaccgctcaacgccccccgcccccgaaaaaccccccgcccgcaattccgaccgcgcgacgccccccgcccccgcgcccgcgaccgcccgcgcgctatcccaaccccgacgcgcctcccccgacgaacgaaacgaaaaccgtaacgcgtacccattaacgtctccgaaatcccgacgacgacgaccgacgcaacctcatcaataaaactaaaaataacgacgcccgaaataaccgcgaacgccccgccccgcgactccccccacgccgcacacccgattacataacccgcgaccaaaaccgaaaaactaattctcaaataaaaataccgaaatctcgctcacaccttccgaaactaaacacctaaaactaaattataaataa

SEQ ID NO: 20209 - DNA, 633 bp, Artificial Sequence
  chemically treated genomic DNA (Homo sapiens) CpG-island No: 20209
tcgagcgttttgcgtaaggggtaggggcgtagggcgtttggggttcgttttttggtttttttttcgacgtagtcgtcggttcgttcgttagtttgggtttttgtatatttggcgatttcgttatatttgggtagtcggcgttggagtatgaacggtttttaggcgggcgtcgcggtttaggtcgtttggttgagtttttgttgtaattagtcggcgtcgtcgtcggagtttttcgaggggtcgcgcgcggtgtaggcggtggtgttcggcgtgttgtttttgttggtgttttgcggggttttgtttttgggcggcggttttttttttcgcgtttagggtttgatagcgttgttgattcgcgagtagcgcgcgtttcgcgagttcgagtcgggtagtgttagcggagaggacggcgacgacgatttttaggcgttcggttgcgttcggtggtcgcggtttttaggtagtttttgatttcgagcggttcggagtatgttcgacggttgttgcggtttcgattttttattcgaagcggcgcgttttatataggtgagagggagggtagtaggagtgtgggcgcgggggttcggggggttatagtagtttttttattgaggaggttttttggggcgt

SEQ ID NO: 20210 - DNA, 633 bp, Artificial Sequence
  chemically treated genomic DNA (Homo sapiens) CpG-island No: 20210
acgccccaaaaaacctcctcaataaaaaaactactataaccccccgaacccccgcgcccacactcctactaccctccctctcacctatataaaacgcgccgcttcgaataaaaaatcgaaaccgcaacaaccgtcgaacatactccgaaccgctcgaaatcaaaaactacctaaaaaccgcgaccaccgaacgcaaccgaacgcctaaaaatcgtcgtcgccgtcctctccgctaacactacccgactcgaactcgcgaaacgcgcgctactcgcgaatcaacaacgctatcaaaccctaaacgcgaaaaaaaaaaccgccgcccaaaaacaaaaccccgcaaaacaccaacaaaaacaacacgccgaacaccaccgcctacaccgcgcgcgacccctcgaaaaactccgacgacgacgccgactaattacaacaaaaactcaaccaaacgacctaaaccgcgacgcccgcctaaaaaccgttcatactccaacgccgactacccaaatataacgaaatcgccaaatatacaaaaacccaaactaacgaacgaaccgacgactacgtcgaaaaaaaaaccaaaaaacgaaccccaaacgccctacgcccctaccccttacgcaaaacgctcga

SEQ ID NO: 20211 - DNA, 633 bp, Artificial Sequence
  chemically treated genomic DNA (Homo sapiens) CpG-island No: 20211
gcgttttaagaagtttttttagtaaggaagttattgtagtttttcgaattttcgcgtttatatttttgttatttttttttttatttgtgtggggcgcgtcgtttcgggtaaggggtcgggatcgtagtagtcgtcgggtatgtttcggatcgttcggagttaggggttgtttggaggtcgcgattatcgagcgtagtcgggcgtttaggagtcgtcgtcgtcgtttttttcgttggtattgttcggttcgggttcgcgggacgcgcgttgttcgcgggttagtagcgttgttaggttttgggcgcggaggaggaggtcgtcgtttaggaataggatttcgtaaagtattagtagggatagtacgtcgagtattatcgtttgtatcgcgcgcggtttttcggggggtttcggcggcgacgtcgattggttatagtaggagtttagttaggcggtttgagtcgcggcgttcgtttgagagtcgtttatgttttagcgtcggttgtttagatgtggcgggatcgttagatgtgtaggagtttagattggcgggcgggtcggcggttgcgtcggggagggaattaaggggcggattttaggcgttttacgtttttattttttgcgtagagcgttcgg

SEQ ID NO: 20212 - DNA, 633 bp, Artificial Sequence
  chemically treated genomic DNA (Homo sapiens) CpG-island No: 20212
ccgaacgctctacgcaaaaaataaaaacgtaaaacgcctaaaatccgccccttaattccctccccgacgcaaccgccgacccgcccgccaatctaaactcctacacatctaacgatcccgccacatctaaacaaccgacgctaaaacataaacgactctcaaacgaacgccgcgactcaaaccgcctaactaaactcctactataaccaatcgacgtcgccgccgaaaccccccgaaaaaccgcgcgcgatacaaacgataatactcgacgtactatccctactaatactttacgaaatcctattcctaaacgacgacctcctcctccgcgcccaaaacctaacaacgctactaacccgcgaacaacgcgcgtcccgcgaacccgaaccgaacaataccaacgaaaaaaacgacgacgacgactcctaaacgcccgactacgctcgataatcgcgacctccaaacaacccctaactccgaacgatccgaaacatacccgacgactactacgatcccgaccccttacccgaaacgacgcgccccacacaaataaaaaaaaaaataacaaaaatataaacgcgaaaattcgaaaaactacaataacttccttactaaaaaaacttcttaaaacgc

SEQ ID NO: 20213 - DNA, 615 bp, Artificial Sequence
  chemically treated genomic DNA (Homo sapiens) CpG-island No: 20213
ttatttattcgtcggttgcgcggtttcggtcgcggtggcggcggcgacggcggcgattttcgtttgggttatgattttaggaggggaaggtaggagtgtttgatcgtttgggcgaattttttcgttcgcggttatcgtttgttttttcggggttgggggagcgcgggtttaggttttttttttttttcgttttcgtcgtttttttttgcggttatcgtagtcgttgcgagttcgagtttttaaggtcggagattcggcggtagcgcggttttaatttttttagttttttttttttcgttttttttcgtttttttcgcggtcgtagtttagtaagcgaatagtttattttgggcgcgtcgcgttttcgttttttttatttaattcgttaattaggttgcgggaacgttgtcgtggtagttaataagaagatagaatgtcgttgtattacgttagagggcgggaggaggcggagaggaaattaaggagtgaacggggatcgggcggtttaatgaggagggtcggggggcggaggtgtgtaagttgggttgaagaaataggaaatatttttaaaggtagagtgacggataggaaggaaagttagtaggtgaatgggaa

SEQ ID NO: 20214 - DNA, 615 bp, Artificial Sequence
  chemically treated genomic DNA (Homo sapiens) CpG-island No: 20214
ttcccattcacctactaactttccttcctatccgtcactctacctttaaaaatatttcctatttcttcaacccaacttacacacctccgccccccgaccctcctcattaaaccgcccgatccccgttcactccttaatttcctctccgcctcctcccgccctctaacgtaatacaacgacattctatcttcttattaactaccacgacaacgttcccgcaacctaattaacgaattaaataaaaaaaacgaaaacgcgacgcgcccaaaataaactattcgcttactaaactacgaccgcgaaaaaaacgaaaaaaaacgaaaaaaaaaaaactaaaaaaattaaaaccgcgctaccgccgaatctccgaccttaaaaactcgaactcgcaacgactacgataaccgcaaaaaaaaacgacgaaaacgaaaaaaaaaaaaaacctaaacccgcgctcccccaaccccgaaaaaacaaacgataaccgcgaacgaaaaaattcgcccaaacgatcaaacactcctaccttcccctcctaaaatcataacccaaacgaaaatcgccgccgtcgccgccgccaccgcgaccgaaaccgcgcaaccgacgaataaataa

SEQ ID NO: 20215 - DNA, 615 bp, Artificial Sequence
  chemically treated genomic DNA (Homo sapiens) CpG-island No: 20215
tttttatttatttattggtttttttttttgttcgttattttatttttaagaatattttttgtttttttaatttaatttgtatattttcgtttttcggttttttttattgggtcgttcgattttcgtttattttttggtttttttttcgttttttttcgttttttagcgtagtgtaacggtattttgtttttttattggttattacggtagcgttttcgtagtttgattggcgggttgagtgaaagaggcgggaacgcggcgcgtttagggtaggttgttcgtttgttgagttgcggtcgcgggaggggcggggaggggcggggggaggggggttgggaaagttgaggtcgcgttgtcgtcgggttttcggttttgagggttcgggttcgtagcggttgcggtggtcgtaaaaagaggcggcgggggcggggggagaggagggtttgggttcgcgtttttttagtttcggaggagtaggcggtggtcgcggacggagagattcgtttagacggttagatatttttgttttttttttttgggattatgatttaggcgggggtcgtcgtcgtcgtcgtcgttatcgcggtcgagatcgcgtagtcggcgggtaagtga

SEQ ID NO: 20216 - DNA, 615 bp, Artificial Sequence
  chemically treated genomic DNA (Homo sapiens) CpG-island No: 20216
tcacttacccgccgactacgcgatctcgaccgcgataacgacgacgacgacgacgacccccgcctaaatcataatcccaaaaaaaaaaaacaaaaatatctaaccgtctaaacgaatctctccgtccgcgaccaccgcctactcctccgaaactaaaaaaacgcgaacccaaaccctcctctccccccgcccccgccgcctctttttacgaccaccgcaaccgctacgaacccgaaccctcaaaaccgaaaacccgacgacaacgcgacctcaactttcccaacccccctccccccgcccctccccgcccctcccgcgaccgcaactcaacaaacgaacaacctaccctaaacgcgccgcgttcccgcctctttcactcaacccgccaatcaaactacgaaaacgctaccgtaataaccaataaaaaaacaaaataccgttacactacgctaaaaaacgaaaaaaaacgaaaaaaaaaccaaaaaataaacgaaaatcgaacgacccaataaaaaaaaccgaaaaacgaaaatatacaaattaaattaaaaaaacaaaaaatattcttaaaaataaaataacgaacaaaaaaaaaaaccaataaataaataaaaa

SEQ ID NO: 20217 - DNA, 510 bp, Artificial Sequence
  chemically treated genomic DNA (Homo sapiens) CpG-island No: 20217
tttgcgtcgttcggagcggtgatagtaaggagcgtagcgcggaggtcgggcggtaaggggagtttttagttttcgataagtggagtttttgttttgcgttgcgttagcgtttttcgtttgggttcgcggtgttagatatttgtcgagttcgaagcgggagttaggttgagttttcggtttttaagtaagtttttttttttttttttatttttttttcgtcgtttttatttttttatttgcgaagcgaggagttgttgacggaggttttgcgcgaaaagcgtatcggggagttttggcggcgtttaggatgttttagtttttcggcgcgtcgcggtcggcgtagagattcgatcgcgaggttcgtcgttcggttttcgtgcgtagtatggttcgaggcggcggtagagttgttggtattgataagattcgttttttgtgttttgttcgatttcggagttgtgttaggtcggggggagggagcggaagttattttatggttcgtggttttat

SEQ ID NO: 20218 - DNA, 510 bp, Artificial Sequence
  chemically treated genomic DNA (Homo sapiens) CpG-island No: 20218
ataaaaccacgaaccataaaataacttccgctccctccccccgacctaacacaactccgaaatcgaacaaaacacaaaaaacgaatcttatcaataccaacaactctaccgccgcctcgaaccatactacgcacgaaaaccgaacgacgaacctcgcgatcgaatctctacgccgaccgcgacgcgccgaaaaactaaaacatcctaaacgccgccaaaactccccgatacgcttttcgcgcaaaacctccgtcaacaactcctcgcttcgcaaataaaaaaataaaaacgacgaaaaaaaaataaaaaaaaaaaaaaaaacttacttaaaaaccgaaaactcaacctaactcccgcttcgaactcgacaaatatctaacaccgcgaacccaaacgaaaaacgctaacgcaacgcaaaacaaaaactccacttatcgaaaactaaaaactccccttaccgcccgacctccgcgctacgctccttactatcaccgctccgaacgacgcaaa

SEQ ID NO: 20219 - DNA, 510 bp, Artificial Sequence
  chemically treated genomic DNA (Homo sapiens) CpG-island No: 20219
gtggggttacgagttataaagtggttttcgtttttttttttcggtttggtatagtttcgggatcgggtaagatataaaagacgggttttattagtgttaataattttgtcgtcgtttcgggttatgttgcgtacgggaatcgggcggcgggtttcgcggtcgggtttttgcgtcggtcgcggcgcgtcgggaggttggagtattttggacgtcgttagagtttttcggtgcgtttttcgcgtagaattttcgttagtagtttttcgtttcgtagataaagaagtaaaggcgacggaggagaaatggagagaaaagggaagatttatttgggggtcgaaggtttagtttgattttcgtttcggattcggtaggtgtttagtatcgcgggtttaggcggaaggcgttggcgtagcgtagagtagggattttatttatcgaggattggaaattttttttgtcgttcggttttcgcgttgcgttttttgttgttatcgtttcgagcgacgtagg

SEQ ID NO: 20220 - DNA, 510 bp, Artificial Sequence
  chemically treated genomic DNA (Homo sapiens) CpG-island No: 20220
cctacgtcgctcgaaacgataacaacaaaaaacgcaacgcgaaaaccgaacgacaaaaaaaatttccaatcctcgataaataaaatccctactctacgctacgccaacgccttccgcctaaacccgcgatactaaacacctaccgaatccgaaacgaaaatcaaactaaaccttcgacccccaaataaatcttcccttttctctccatttctcctccgtcgcctttacttctttatctacgaaacgaaaaactactaacgaaaattctacgcgaaaaacgcaccgaaaaactctaacgacgtccaaaatactccaacctcccgacgcgccgcgaccgacgcaaaaacccgaccgcgaaacccgccgcccgattcccgtacgcaacataacccgaaacgacgacaaaattattaacactaataaaacccgtcttttatatcttacccgatcccgaaactataccaaaccgaaaaaaaaaaacgaaaaccactttataactcgtaaccccac

SEQ ID NO: 20221 - DNA, 718 bp, Artificial Sequence
  chemically treated genomic DNA (Homo sapiens) CpG-island No: 20221
ttcgggtagatgttgcggggttttggcgttttgttcgggtagatgttgttgggatttggcgttttgttcgggtagatgttgcggggttttggcgttttgttcgggtagatgttgcggggttttggcgttttgttcgggtagatgttgcggggttttggcgttttgttcgggtaggtgttgcggggttttggcgttttgttcgggtaggtgttgtcgggttttggcgttttgttcgggtaggtgttgtcgggttttggcgttttgttcgggtaggtgttgcggggttttggcgttttgttcgggtaggtgttgcggggttttggcgttttgttcgggtaggtgttgcggggttttggcgttttgttcgggtaggtgttgcggggttttggcgttttgttcgggtaggtgttgcggggttttggcgttttgttcgggtaggtgttgcggggttttggcgttttgttcgggtaggtgttgcggggttttggcgttttgttcgggtagatgttgcggggttttggcgttttgttcgggtaggtgttgcggggttttggcgttttgttcgggtagatgttgcggggttttggcgttttgttcgggtagatgttgtcgggttttggcgttttgttcgggtagatgttgcggggttttggcgttttgttcgggtagatgttgtcgggttttggcgttttgttcgggtagatgttgtggggttttg

SEQ ID NO: 20222 - DNA, 718 bp, Artificial Sequence
  chemically treated genomic DNA (Homo sapiens) CpG-island No: 20222
caaaaccccacaacatctacccgaacaaaacgccaaaacccgacaacatctacccgaacaaaacgccaaaaccccgcaacatctacccgaacaaaacgccaaaacccgacaacatctacccgaacaaaacgccaaaaccccgcaacatctacccgaacaaaacgccaaaaccccgcaacacctacccgaacaaaacgccaaaaccccgcaacatctacccgaacaaaacgccaaaaccccgcaacacctacccgaacaaaacgccaaaaccccgcaacacctacccgaacaaaacgccaaaaccccgcaacacctacccgaacaaaacgccaaaaccccgcaacacctacccgaacaaaacgccaaaaccccgcaacacctacccgaacaaaacgccaaaaccccgcaacacctacccgaacaaaacgccaaaaccccgcaacacctacccgaacaaaacgccaaaacccgacaacacctacccgaacaaaacgccaaaacccgacaacacctacccgaacaaaacgccaaaaccccgcaacacctacccgaacaaaacgccaaaaccccgcaacatctacccgaacaaaacgccaaaaccccgcaacatctacccgaacaaaacgccaaaaccccgcaacatctacccgaacaaaacgccaaatcccaacaacatctacccgaacaaaacgccaaaaccccgcaacatctacccgaa

SEQ ID NO: 20223 - DNA, 718 bp, Artificial Sequence
  chemically treated genomic DNA (Homo sapiens) CpG-island No: 20223
taaggttttatagtatttattcggatagggcgttaaggttcggtagtatttattcggatagggcgttaaggtttcgtagtatttattcggatagggcgttaaggttcggtagtatttattcggatagggcgttaaggtttcgtagtatttattcggatagggcgttaaggtttcgtagtatttattcggatagggcgttaaggtttcgtagtatttattcggatagggcgttaaggtttcgtagtatttattcggatagggcgttaaggtttcgtagtatttattcggatagggcgttaaggtttcgtagtatttattcggatagggcgttaaggtttcgtagtatttattcggatagggcgttaaggtttcgtagtatttattcggatagggcgttaaggtttcgtagtatttattcggatagggcgttaaggtttcgtagtatttattcggatagggcgttaaggttcggtagtatttattcggatagggcgttaaggttcggtagtatttattcggatagggcgttaaggtttcgtagtatttattcggatagggcgttaaggtttcgtagtatttattcggatagggcgttaaggtttcgtagtatttattcggatagggcgttaaggtttcgtagtatttattcggatagggcgttaagttttagtagtatttattcggatagggcgttaaggtttcgtagtatttattcgga

SEQ ID NO: 20224 - DNA, 718 bp, Artificial Sequence
  chemically treated genomic DNA (Homo sapiens) CpG-island No: 20224
tccgaataaatactacgaaaccttaacgccctatccgaataaatactactaaaacttaacgccctatccgaataaatactacgaaaccttaacgccctatccgaataaatactacgaaaccttaacgccctatccgaataaatactacgaaaccttaacgccctatccgaataaatactacgaaaccttaacgccctatccgaataaatactaccgaaccttaacgccctatccgaataaatactaccgaaccttaacgccctatccgaataaatactacgaaaccttaacgccctatccgaataaatactacgaaaccttaacgccctatccgaataaatactacgaaaccttaacgccctatccgaataaatactacgaaaccttaacgccctatccgaataaatactacgaaaccttaacgccctatccgaataaatactacgaaaccttaacgccctatccgaataaatactacgaaaccttaacgccctatccgaataaatactacgaaaccttaacgccctatccgaataaatactacgaaaccttaacgccctatccgaataaatactacgaaaccttaacgccctatccgaataaatactaccgaaccttaacgccctatccgaataaatactacgaaaccttaacgccctatccgaataaatactaccgaaccttaacgccctatccgaataaatactataaaacctta

SEQ ID NO: 20225 - DNA, 587 bp, Artificial Sequence
  chemically treated genomic DNA (Homo sapiens) CpG-island No: 20225
ttgttttttcggggttcgttttatttcgtcgcggtttttttttagtcgtcgggttcgggacgcgtagttaggcgggtgggtttcggcgtatgcgcgcggtcgtttttcggtatttgtgggagtcgcggttcggttttttcgagtatttgcgagcgggagttgttttttcgattcgtagcggggcgtgggcggtagagggggcggtggataggttttttcgtttttttaggtcgcgcggagttagcgtttcggttttaggttgcgaggggcgcgcgcggggcgcggggaggggggcgggcgcgtgtatacggggcgttttcgggcgcgcgttttttggttgggtttgcggaggggttgtgggtttttcggggtttttttgtttcgcgtttgttcgtcgggcgtttttttttttttaggatcgcggtttacgtcgttattcgagttcgagttcgagttcgcgtttacgcgcgggggtcgttttttgcgaggaggcggggataggtgttcgcgggcgtaaatagcggagtttcgtgcgtttattttttggtaaaagtagaggcgatgcgttgttgatatatttagtggtt

SEQ ID NO: 20226 - DNA, 587 bp, Artificial Sequence
  chemically treated genomic DNA (Homo sapiens) CpG-island No: 20226
aaccactaaatatatcaacaacgcatcgcctctacttttaccaaaaaataaacgcacgaaactccgctatttacgcccgcgaacacctatccccgcctcctcgcaaaaaacgacccccgcgcgtaaacgcgaactcgaactcgaactcgaataacgacgtaaaccgcgatcctaaaaaaaaaaaaacgcccgacgaacaaacgcgaaacaaaaaaaccccgaaaaacccacaacccctccgcaaacccaaccaaaaaacgcgcgcccgaaaacgccccgtatacacgcgcccgcccccctccccgcgccccgcgcgcgcccctcgcaacctaaaaccgaaacgctaactccgcgcgacctaaaaaaacgaaaaaacctatccaccgccccctctaccgcccacgccccgctacgaatcgaaaaaacaactcccgctcgcaaatactcgaaaaaaccgaaccgcgactcccacaaataccgaaaaacgaccgcgcgcatacgccgaaacccacccgcctaactacgcgtcccgaacccgacgactaaaaaaaaaccgcgacgaaataaaacgaaccccgaaaaaacaa

SEQ ID NO: 20227 - DNA, 587 bp, Artificial Sequence
  chemically treated genomic DNA (Homo sapiens) CpG-island No: 20227
aattattaaatatgttaataacgtatcgtttttatttttattaaaaaataggcgtacgaaatttcgttgtttgcgttcgcggatatttgttttcgttttttcgtaggaagcggttttcgcgcgtgggcgcgggttcgggttcgggttcgagtggcgacgtgggtcgcggttttggagggggagaagcgttcggcgggtaggcgcggggtagggaagtttcggggaatttatagttttttcgtagatttagttagggggcgcgcgttcgaaaacgtttcgtgtgtacgcgttcgttttttttttcgcgtttcgcgcgcgtttttcgtagtttggagtcggagcgttggtttcgcgcggtttggagaggcggagaggtttgtttatcgttttttttgtcgtttacgtttcgttgcgggtcggaggagtagttttcgttcgtaggtgttcggagaggtcgggtcgcggtttttataggtgtcgggaagcggtcgcgcgtatgcgtcggagtttattcgtttggttgcgcgtttcgggttcggcggttgaagaggagtcgcggcgaggtagggcggatttcggggaggtag

SEQ ID NO: 20228 - DNA, 587 bp, Artificial Sequence
  chemically treated genomic DNA (Homo sapiens) CpG-island No: 20228
ctacctccccgaaatccgccctacctcgccgcgactcctcttcaaccgccgaacccgaaacgcgcaaccaaacgaataaactccgacgcatacgcgcgaccgcttcccgacacctataaaaaccgcgacccgacctctccgaacacctacgaacgaaaactactcctccgacccgcaacgaaacgtaaacgacaaaaaaaacgataaacaaacctctccgcctctccaaaccgcgcgaaaccaacgctccgactccaaactacgaaaaacgcgcgcgaaacgcgaaaaaaaaaacgaacgcgtacacacgaaacgttttcgaacgcgcgccccctaactaaatctacgaaaaaactataaattccccgaaacttccctaccccgcgcctacccgccgaacgcttctccccctccaaaaccgcgacccacgtcgccactcgaacccgaacccgaacccgcgcccacgcgcgaaaaccgcttcctacgaaaaaacgaaaacaaatatccgcgaacgcaaacaacgaaatttcgtacgcctattttttaataaaaataaaaacgatacgttattaacatatttaataatt

SEQ ID NO: 20229 - DNA, 698 bp, Artificial Sequence
  chemically treated genomic DNA (Homo sapiens) CpG-island No: 20229
cgcgtggttgtcggcgtagtattgagcgcgggtgtggggcgattcgtagtttttcgcggtgtaaataattttgagtcgcgtatacgttcgaacgacgttttatagtttgtaggtagattgtagcgtagaaagagttcgaggtacgttagtagtttttaagggttttagtaagtttcgtaagcgtgaagcggaggcgcgggggcgcggggtcgcggcggggaggggggtcgttaatcggggggtttttgttaggcgtttagattttttaaagcgcggagttgcgcgttggttcggtttcggtttcgtttcggcgttaaaggaagaagatagagatttacgggagggagaagtaaaggaagggtcgtattttgtagggttcgggagaggcgcgcgtcgcgggttttattagcgattaggtagcgcgagaaggtttgggtgcgggggcggtttttcgattttttagatgcggtataatcgtcgtaagttcggtttagcgcgattcggaaggaagacgcggaggtcgcgaggagcggcgggttcggggaggcggggcggagtcggggaggaggggcggggtcgcggggttggggcggggtcggggaggcggggcggggtttggagggaggcggggcggggttagaagtaaagtcgggcgttttttttatgggaggtgttttgggttttacggatagttcgtt

SEQ ID NO: 20230 - DNA, 698 bp, Artificial Sequence
  chemically treated genomic DNA (Homo sapiens) CpG-island No: 20230
aacgaactatccgtaaaacccaaaacacctcccataaaaaaaacgcccgactttacttctaaccccgccccgcctccctccaaaccccgccccgcctccccgaccccgccccaaccccgcgaccccgcccctcctccccgactccgccccgcctccccgaacccgccgctcctcgcgacctccgcgtcttccttccgaatcgcgctaaaccgaacttacgacgattataccgcatctaaaaaatcgaaaaaccgcccccgcacccaaaccttctcgcgctacctaatcgctaataaaacccgcgacgcgcgcctctcccgaaccctacaaaatacgacccttcctttacttctccctcccgtaaatctctatcttcttcctttaacgccgaaacgaaaccgaaaccgaaccaacgcgcaactccgcgctttaaaaaatctaaacgcctaacaaaaaccccccgattaacgacccccctccccgccgcgaccccgcgcccccgcgcctccgcttcacgcttacgaaacttactaaaacccttaaaaactactaacgtacctcgaactctttctacgctacaatctacctacaaactataaaacgtcgttcgaacgtatacgcgactcaaaattatttacaccgcgaaaaactacgaatcgccccacacccgcgctcaatactacgccgacaaccacgcg

SEQ ID NO: 20231 - DNA, 698 bp, Artificial Sequence
  chemically treated genomic DNA (Homo sapiens) CpG-island No: 20231
agcgggttgttcgtaggatttagagtattttttatgggagaaacgttcggttttgtttttggtttcgtttcgtttttttttaggtttcgtttcgttttttcggtttcgttttaatttcgcggtttcgtttttttttttcggtttcgtttcgttttttcgggttcgtcgtttttcgcggttttcgcgtttttttttcgggtcgcgttaggtcgggtttgcggcggttgtgtcgtatttagagagtcggggagtcgttttcgtatttaggttttttcgcgttgtttggtcgttggtgaagttcgcggcgcgcgtttttttcggattttgtagggtacggttttttttttatttttttttttcgtgggtttttgttttttttttttggcgtcggggcggggtcggggtcgagttagcgcgtagtttcgcgttttggggagtttggacgtttggtaaaggtttttcggttggcggttttttttttcgtcgcggtttcgcgttttcgcgttttcgttttacgtttgcggggtttgttggggtttttgagaattgttgacgtgtttcgggttttttttacgttatagtttgtttgtaggttgtgaggcgtcgttcggacgtgtgcgcggtttagggttgtttatatcgcgggggattgcgggtcgttttatattcgcgtttagtgttgcgtcggtagttacgcg

SEQ ID NO: 20232 - DNA, 698 bp, Artificial Sequence
  chemically treated genomic DNA (Homo sapiens) CpG-island No: 20232
cgcgtaactaccgacgcaacactaaacgcgaatataaaacgacccgcaatcccccgcgatataaacaaccctaaaccgcgcacacgtccgaacgacgcctcacaacctacaaacaaactataacgtaaaaaaaacccgaaacacgtcaacaattctcaaaaaccccaacaaaccccgcaaacgtaaaacgaaaacgcgaaaacgcgaaaccgcgacgaaaaaaaaaaccgccaaccgaaaaacctttaccaaacgtccaaactccccaaaacgcgaaactacgcgctaactcgaccccgaccccgccccgacgccaaaaaaaaaaaacaaaaacccacgaaaaaaaaaaataaaaaaaaaaccgtaccctacaaaatccgaaaaaaacgcgcgccgcgaacttcaccaacgaccaaacaacgcgaaaaaacctaaatacgaaaacgactccccgactctctaaatacgacacaaccgccgcaaacccgacctaacgcgacccgaaaaaaaaacgcgaaaaccgcgaaaaacgacgaacccgaaaaaacgaaacgaaaccgaaaaaaaaaaacgaaaccgcgaaattaaaacgaaaccgaaaaaacgaaacgaaacctaaaaaaaaacgaaacgaaaccaaaaacaaaaccgaacgtttctcccataaaaaatactctaaatcctacgaacaacccgct

SEQ ID NO: 20233 - DNA, 820 bp, Artificial Sequence
  chemically treated genomic DNA (Homo sapiens) CpG-island No: 20233
agttcgttcgcgtcgcgttttatcgttttcgtacgttcgggcgtacgtttttttcgttcgggtcgttttttggtttttcgcgttcggtagttagtgttttatcgcgtcgtttcgcgttagggttcgtttcgagagtcgtttttttttcgtcgcggtcggcgcgggtttttcggttatgcgttttcgagttttagtttgcgtcgtcgcggcgttcgggttttgtagttttttgttgttgttcgcgttcgggtacgcgtgtttcgcgggttgcgtttgtatcgattcgtatatcgtggattgtcgcgatcgcgggttgtttagcgtgttagattttttttttttggacgtgcgtaagttgttggtggtcggtaatcgtatttagcggattttcgaggatttttttattttttacggcgatttggtttatttggattttaggaataattcgttgcgttcgttggaggagggtacgtttagcggttcggttaagttcgtgtttttcgattttagttataataatttgatttagttgggcgtcggcgtttttcgttcggtcgggaggttggtgaagtttagtttggttaataataatttggtgggcgtgtacgaggacgttttcgagattttggagtcgttgtaggtgttggagtttaacgataataatttgcgtagttttagcgtggtcgttttggtcgcgttgttcgcgttgcgttttttgcgtttggacgggaatttttggttgtgcgattgtgatttcgtttatttttttttttggatttaggagaacgtatttaaattgtttaaaggtgagtcgagtcgg

SEQ ID NO: 20234 - DNA, 820 bp, Artificial Sequence
  chemically treated genomic DNA (Homo sapiens) CpG-island No: 20234
ccgactcgactcacctttaaacaatttaaatacgttctcctaaatccaaaaaaaaaaataaacgaaatcacaatcgcacaaccaaaaattcccgtccaaacgcaaaaaacgcaacgcgaacaacgcgaccaaaacgaccacgctaaaactacgcaaattattatcgttaaactccaacacctacaacgactccaaaatctcgaaaacgtcctcgtacacgcccaccaaattattattaaccaaactaaacttcaccaacctcccgaccgaacgaaaaacgccgacgcccaactaaatcaaattattataactaaaatcgaaaaacacgaacttaaccgaaccgctaaacgtaccctcctccaacgaacgcaacgaattattcctaaaatccaaataaaccaaatcgccgtaaaaaataaaaaaatcctcgaaaatccgctaaatacgattaccgaccaccaacaacttacgcacgtccaaaaaaaaaaaatctaacacgctaaacaacccgcgatcgcgacaatccacgatatacgaatcgatacaaacgcaacccgcgaaacacgcgtacccgaacgcgaacaacaacaaaaaactacaaaacccgaacgccgcgacgacgcaaactaaaactcgaaaacgcataaccgaaaaacccgcgccgaccgcgacgaaaaaaaaacgactctcgaaacgaaccctaacgcgaaacgacgcgataaaacactaactaccgaacgcgaaaaaccaaaaaacgacccgaacgaaaaaaacgtacgcccgaacgtacgaaaacgataaaacgcgacgcgaacgaact

SEQ ID NO: 20235 - DNA, 820 bp, Artificial Sequence
  chemically treated genomic DNA (Homo sapiens) CpG-island No: 20235
tcggttcggtttatttttgggtagtttggatgcgtttttttggatttaggagaagaggtgggcgaagttatagtcgtatagttaggggttttcgtttagacgtagggagcgtagcgcgggtagcgcggttagggcggttacgttgaggttgcgtaggttgttgtcgttgagttttagtatttgtagcgattttagggtttcgaaggcgttttcgtgtacgtttattaggttgttgttagttaggttaagttttattagtttttcggtcgagcggaaggcgtcggcgtttagttgggttaagttgttgtagttgaggtcgaggaatacgagtttggtcgagtcgttgaacgtgtttttttttagcgagcgtagcgagttgtttttgaagtttaggtagattaggtcgtcgtagaagatgaagaagttttcggggattcgttggatgcggttgtcggttattagtagtttgcgtacgtttagggggaaagggtttggtacgttgggtagttcgcggtcgcggtagtttacggtgtgcgggtcggtgtaggcgtagttcgcggggtacgcgtgttcgggcgcgagtagtagtagaaggttgtagagttcgagcgtcgcggcggcgtaggttggggttcgggggcgtatggtcggggggttcgcgtcggtcgcggcgagaaggaagcggttttcggagcgagttttggcgcgggacggcgcggtgaggtattggttgtcgggcgcggggagttagagggcggttcgggcggggagggcgtgcgttcgggcgtgcgggggcgatggagcgcggcgcggacggatt

SEQ ID NO: 20236 - DNA, 820 bp, Artificial Sequence
  chemically treated genomic DNA (Homo sapiens) CpG-island No: 20236
aatccgtccgcgccgcgctccatcgcccccgcacgcccgaacgcacgccctccccgcccgaaccgccctctaactccccgcgcccgacaaccaatacctcaccgcgccgtcccgcgccaaaactcgctccgaaaaccgcttccttctcgccgcgaccgacgcgaaccccccgaccatacgcccccgaaccccaacctacgccgccgcgacgctcgaactctacaaccttctactactactcgcgcccgaacacgcgtaccccgcgaactacgcctacaccgacccgcacaccgtaaactaccgcgaccgcgaactacccaacgtaccaaaccctttccccctaaacgtacgcaaactactaataaccgacaaccgcatccaacgaatccccgaaaacttcttcatcttctacgacgacctaatctacctaaacttcaaaaacaactcgctacgctcgctaaaaaaaaacacgttcaacgactcgaccaaactcgtattcctcgacctcaactacaacaacttaacccaactaaacgccgacgccttccgctcgaccgaaaaactaataaaacttaacctaactaacaacaacctaataaacgtacacgaaaacgccttcgaaaccctaaaatcgctacaaatactaaaactcaacgacaacaacctacgcaacctcaacgtaaccgccctaaccgcgctacccgcgctacgctccctacgtctaaacgaaaacccctaactatacgactataacttcgcccacctcttctcctaaatccaaaaaaacgcatccaaactacccaaaaataaaccgaaccga

SEQ ID NO: 20237 - DNA, 800 bp, Artificial Sequence
  chemically treated genomic DNA (Homo sapiens) CpG-island No: 20237
tggttcgtattcgtagaaaggtttgggagaagatcgcgggtagatgtaagaaaagaaaagagagcgttaggcgcggtttgtagttttggttttcgttttagtatcggattttcgattaaagttgtttcgttttaaatagttcgtaaataaatttattttttttttttcgtcggtttttttgttttttcggtcgtttcgggttttcggtatagtcgtcgggcgttgttttaacgggatttcgtggtcgttgcgcggtgtcgttttagttttggttttcggcgttttgggttttacggtcgttcggtcggcgagggcggcgatgcgggcggatttttcgtggttgttcggcggcggcggtattttagttttaagcggcggcggcggttatgttggttttaattacgtgatttgtcgtcgtcgcgcgttgggggtgaaagtttataatgcggcgggggcggtcggatagagattaggaagttgtcgtttgtattcgggtagtaatcggtagaagttttttcggggttttttttatcgttcgtgaagtttatttatttaatttttagcggttgcgaagtttttttattttattttacgatttttttcgttgcggggtttttttcgttttatcgttcggtttcggttttcgttttttgtgtttgtttttttcgcggttgtttttagggtagaggtatcgcgttgggtgttttataggggataaggcgttcgaattttttatcgtttgtgggcgattttcgtttaatttttaggttatttagttttgttattagaggatttttaat

SEQ ID NO: 20238 - DNA, 800 bp, Artificial Sequence
  chemically treated genomic DNA (Homo sapiens) CpG-island No: 20238
attaaaaatcctctaataacaaaactaaataacctaaaaattaaacgaaaatcgcccacaaacgataaaaaattcgaacgccttatcccctataaaacacccaacgcgatacctctaccctaaaaacaaccgcgaaaaaaacaaacacaaaaaacgaaaaccgaaaccgaacgataaaacgaaaaaaaccccgcaacgaaaaaaatcgtaaaataaaataaaaaaacttcgcaaccgctaaaaattaaataaataaacttcacgaacgataaaaaaaaccccgaaaaaacttctaccgattactacccgaatacaaacgacaacttcctaatctctatccgaccgcccccgccgcattataaactttcacccccaacgcgcgacgacgacaaatcacgtaattaaaaccaacataaccgccgccgccgcttaaaactaaaataccgccgccgccgaacaaccacgaaaaatccgcccgcatcgccgccctcgccgaccgaacgaccgtaaaacccaaaacgccgaaaaccaaaactaaaacgacaccgcgcaacgaccacgaaatcccgttaaaacaacgcccgacgactataccgaaaacccgaaacgaccgaaaaaacaaaaaaaccgacgaaaaaaaaaaaataaatttatttacgaactatttaaaacgaaacaactttaatcgaaaatccgatactaaaacgaaaaccaaaactacaaaccgcgcctaacgctctcttttcttttcttacatctacccgcgatcttctcccaaacctttctacgaatacgaacca

SEQ ID NO: 20239 - DNA, 800 bp, Artificial Sequence
  chemically treated genomic DNA (Homo sapiens) CpG-island No: 20239
gttgggagttttttgataatagaattggatggtttaggggttgggcggggatcgtttataggcgatagggaattcggacgttttgttttttgtaaagtatttaacgcgatgtttttgttttaagggtagtcgcgagaaaggtaggtataggaggcgggagtcggggtcgggcgatggggcggaaggagtttcgtagcgggaggggtcgtggagtggggtggaaggatttcgtagtcgttaaagattgggtgggtaggttttacgggcggtgggagggatttcggggaggtttttgtcggttgttattcgagtataaacggtagttttttggtttttgttcggtcgttttcgtcgtattgtgaatttttatttttagcgcgcgacggcggtagattacgtgattagggttaatatggtcgtcgtcgtcgtttggagttgaagtgtcgtcgtcgtcgggtagttacggggaattcgttcgtatcgtcgttttcgtcggtcgggcggtcgtggggtttagagcgtcggaggttagggttggggcggtatcgcgtagcggttacggggtttcgttagagtagcgttcggcggttatgtcgagagttcggagcggtcggaggagtagaggggtcggcgggagggaggaagtaggtttgtttacgggttgtttggggcggagtagttttggtcgggggttcggtgttggggcgggggttaggattgtaggtcgcgtttgacgtttttttttttttttttgtatttgttcgcgatttttttttagatttttttgcgagtacgagtta

SEQ ID NO: 20240 - DNA, 800 bp, Artificial Sequence
  chemically treated genomic DNA (Homo sapiens) CpG-island No: 20240
taactcgtactcgcaaaaaaatctaaaaaaaaatcgcgaacaaatacaaaaaaaaaaaaaaaaacgtcaaacgcgacctacaatcctaacccccgccccaacaccgaacccccgaccaaaactactccgccccaaacaacccgtaaacaaacctacttcctccctcccgccgacccctctactcctccgaccgctccgaactctcgacataaccgccgaacgctactctaacgaaaccccgtaaccgctacgcgataccgccccaaccctaacctccgacgctctaaaccccacgaccgcccgaccgacgaaaacgacgatacgaacgaattccccgtaactacccgacgacgacgacacttcaactccaaacgacgacgacgaccatattaaccctaatcacgtaatctaccgccgtcgcgcgctaaaaataaaaattcacaatacgacgaaaacgaccgaacaaaaaccaaaaaactaccgtttatactcgaataacaaccgacaaaaacctccccgaaatccctcccaccgcccgtaaaacctacccacccaatctttaacgactacgaaatccttccaccccactccacgacccctcccgctacgaaactccttccgccccatcgcccgaccccgactcccgcctcctatacctacctttctcgcgactacccttaaaacaaaaacatcgcgttaaatactttacaaaaaacaaaacgtccgaattccctatcgcctataaacgatccccgcccaacccctaaaccatccaattctattatcaaaaaactcccaac

SEQ ID NO: 20241 - DNA, 570 bp, Artificial Sequence
  chemically treated genomic DNA (Homo sapiens) CpG-island No: 20241
cgttattttcggtttaaacgaattaagattttttaggaaagcgatatttagcgagcgtttcgtaatttagattcgttttttatttttaaatagttattcgtcgggttttttgacggttacgaaaagaaaacggggtggtcgttggttaggttttaggcgagacggaaaacgaaaggtaaagggtcgaatttagtcgtttatttggtggaaaagttcgaaaaggagtttttcggttattttcgttttaaggttgtttataaagagagtgcgattcgttttcgtcgtcgtcgtttttattttagcgtcgttttttttttaatttggttaaaaggtcgtggtcgacgtatttattgcgtatttacggaagttttacgtttttacgttttttggcgttataaacgaaaacgttcgttgcgtttgtttttagcgggcgacgacgtgcgcggacggtttgcgtatgttcgttaggatatttttcgttaaaggtaaggcggtttttggttttttcgtaggtttagttatgggtttttgtgtgtttagttatcgggttcgatataggttggattgatt

SEQ ID NO: 20242 - DNA, 570 bp, Artificial Sequence
  chemically treated genomic DNA (Homo sapiens) CpG-island No: 20242
aatcaatccaacctatatcgaacccgataactaaacacacaaaaacccataactaaacctacgaaaaaaccaaaaaccgccttacctttaacgaaaaatatcctaacgaacatacgcaaaccgtccgcgcacgtcgtcgcccgctaaaaacaaacgcaacgaacgttttcgtttataacgccaaaaaacgtaaaaacgtaaaacttccgtaaatacgcaataaatacgtcgaccacgaccttttaaccaaattaaaaaaaaaacgacgctaaaataaaaacgacgacgacgaaaacgaatcgcactctctttataaacaaccttaaaacgaaaataaccgaaaaactccttttcgaacttttccaccaaataaacgactaaattcgaccctttacctttcgttttccgtctcgcctaaaacctaaccaacgaccaccccgttttcttttcgtaaccgtcaaaaaacccgacgaataactatttaaaaataaaaaacgaatctaaattacgaaacgctcgctaaatatcgctttcctaaaaaatcttaattcgtttaaaccgaaaataacg

SEQ ID NO: 20243 - DNA, 570 bp, Artificial Sequence
  chemically treated genomic DNA (Homo sapiens) CpG-island No: 20243
gattagtttagtttgtgtcggattcgatgattaagtatataggaatttataattgagtttgcggaagagttagaagtcgttttgtttttaacgaggggtattttggcgagtatgcgtagatcgttcgcgtacgtcgtcgttcgttgagagtaagcgtaacgggcgttttcgtttgtgacgttagggagcgtgaggacgtggggttttcgtgaatgcgtagtgggtgcgtcggttacgattttttggttaggttagggagggggcgacgttgagatgggggcggcggcggcggaagcggatcgtattttttttgtgggtaattttgaaacgaaagtgatcgaggagttttttttcgagtttttttattaggtaagcggttgggttcggttttttgtttttcgtttttcgtttcgtttagggtttggttagcggttatttcgtttttttttcgtagtcgttaggggattcgacgggtggttgtttgggggtgaaaggcgggtttgggttgcgaaacgttcgttgggtgtcgtttttttggaagattttggttcgtttaggtcgaaagtgacg

SEQ ID NO: 20244 - DNA, 570 bp, Artificial Sequence
  chemically treated genomic DNA (Homo sapiens) CpG-island No: 20244
cgtcactttcgacctaaacgaaccaaaatcttccaaaaaaacgacacccaacgaacgtttcgcaacccaaacccgcctttcacccccaaacaaccacccgtcgaatcccctaacgactacgaaaaaaaaacgaaataaccgctaaccaaaccctaaacgaaacgaaaaacgaaaaacaaaaaaccgaacccaaccgcttacctaataaaaaaactcgaaaaaaaactcctcgatcactttcgtttcaaaattacccacaaaaaaaatacgatccgcttccgccgccgccgcccccatctcaacgtcgccccctccctaacctaaccaaaaaatcgtaaccgacgcacccactacgcattcacgaaaaccccacgtcctcacgctccctaacgtcacaaacgaaaacgcccgttacgcttactctcaacgaacgacgacgtacgcgaacgatctacgcatactcgccaaaatacccctcgttaaaaacaaaacgacttctaactcttccgcaaactcaattataaattcctatatacttaatcatcgaatccgacacaaactaaactaatc

SEQ ID NO: 20245 - DNA, 519 bp, Artificial Sequence
  chemically treated genomic DNA (Homo sapiens) CpG-island No: 20245
ttttgtatcgttcgtggtcggtcgcgtttatttgttatatttgagatttagatttttaacgtttttttaggacgggttcgatttttcggttttacgagcgaaattttattcgtttttttaagtttttcgtcgattttatttatttttaggtttatttagattattcgttgagttatgtttttttttgtcgttatggttgcgttattttcgcggatatttcgggtttcgaatcgttcgtgatttttatttatatttcgtaatagtttggagtttagggagtcgtttagtattattcgggattagtagttacggttttagtttcgtagtcggcgttggcgtaggcgtaatagtcgttaaacgtcgtaaatttacggggaggcgtacgagttgaaattatacgttttagcgtacggtgcgtcggttcgtttttaatagtttggtttggttgtcgaagggaatgatgggatttagagttttatttgcggttgcgattagatgttttattttcgttacgtgttt

SEQ ID NO: 20246 - DNA, 519 bp, Artificial Sequence
  chemically treated genomic DNA (Homo sapiens) CpG-island No: 20246
aaacacgtaacgaaaataaaacatctaatcgcaaccgcaaataaaactctaaatcccatcattcccttcgacaaccaaaccaaactattaaaaacgaaccgacgcaccgtacgctaaaacgtataatttcaactcgtacgcctccccgtaaatttacgacgtttaacgactattacgcctacgccaacgccgactacgaaactaaaaccgtaactactaatcccgaataatactaaacgactccctaaactccaaactattacgaaatataaataaaaatcacgaacgattcgaaacccgaaatatccgcgaaaataacgcaaccataacgacaaaaaaaaacataactcaacgaataatctaaataaacctaaaaataaataaaatcgacgaaaaacttaaaaaaacgaataaaatttcgctcgtaaaaccgaaaaatcgaacccgtcctaaaaaaacgttaaaaatctaaatctcaaatataacaaataaacgcgaccgaccacgaacgatacaaaa

SEQ ID NO: 20247 - DNA, 519 bp, Artificial Sequence
  chemically treated genomic DNA (Homo sapiens) CpG-island No: 20247
aaatacgtggcgggggtggggtatttggtcgtaatcgtaggtgagattttaagttttattatttttttcggtagttaagttaggttgttgagggcgagtcggcgtatcgtacgttgggacgtgtggttttagttcgtgcgttttttcgtgggtttgcgacgtttagcgattattgcgtttgcgttagcgtcggttgcgagattggggtcgtggttgttggtttcgggtgatgttaggcggttttttgggttttaggttgttgcggggtgtaggtgggagttacggacggttcggggttcgaggtgttcgcgaaggtggcgtagttatggcggtaggggagagtatggtttagcggatggtttgggtggatttggaggtgagtgaggtcggcggggggtttggggaggcgagtgaggtttcgttcgtggaatcgaggagtcgagttcgttttgggagagcgttgggggtttgggttttaggtgtggtaggtgagcgcggtcggttacgggcggtgtaggg

SEQ ID NO: 20248 - DNA, 519 bp, Artificial Sequence
  chemically treated genomic DNA (Homo sapiens) CpG-island No: 20248
ccctacaccgcccgtaaccgaccgcgctcacctaccacacctaaaacccaaacccccaacgctctcccaaaacgaactcgactcctcgattccacgaacgaaacctcactcgcctccccaaaccccccgccgacctcactcacctccaaatccacccaaaccatccgctaaaccatactctcccctaccgccataactacgccaccttcgcgaacacctcgaaccccgaaccgtccgtaactcccacctacaccccgcaacaacctaaaacccaaaaaaccgcctaacatcacccgaaaccaacaaccacgaccccaatctcgcaaccgacgctaacgcaaacgcaataatcgctaaacgtcgcaaacccacgaaaaaacgcacgaactaaaaccacacgtcccaacgtacgatacgccgactcgccctcaacaacctaacttaactaccgaaaaaaataataaaacttaaaatctcacctacgattacgaccaaataccccacccccgccacgtattt

SEQ ID NO: 20249 - DNA, 1042 bp, Artificial Sequence
  chemically treated genomic DNA (Homo sapiens) CpG-island No: 20249
agagttcgcgaggggcgagtggaagttttttgcgggtaggtattcgattatcgttttgttttgggcgtggcggtttcgggtttagggatcgtttcggcgttagacggtcgcgttcggaggaaacgggcgttggtgaaagtttaggtgttttggtttacgcgcgtagtcggacgtcgggtttagggagagacgcgggttggggcgggacgggattcggtttttgaagcgcgagggtgggagtgaaagtaaagaggagaaaagtagagagagaggatagtggggtttagcgtcgcgcgaaaggtaggaatcgattcgcggataggaacgggtgtaatgaggttttcggcgagcgtgggaatatagggtttagttttttgcggcgggcgagtacgcggattttaggggcgggcgggtgcgataggacgtgatttggaagcgcggcgcgtgttatcgttttggagtaggtattcggttttcgtggagcgggtaggcgggtttcgggtttggagtttgcgattggggagggcgtcgcgttaatagtagcggttgcggggcggggtcgagtgcgcgtgcgcggttttcgcgggcggggagtaggcgggggagcgggcgggaagtagtgggagcgcgcgtgcgcgcggtcgtgtagtttgggtagtgggttttgtttgtgacgcgcggcggcggtcggttttgtttgtaacggcggcggcggttgttgtttcggatatttgcggcggcggcggcgatttcgcggcgggcgcggagatgtggtttttggtagcggcgttgttgttgggttcggcgtgttgcggtgagtggtttttcgtttttagttttgcggttgttgtcgtttcgttttcgcgggcgtgtgggttgcgttttagttagttcggcggcgttttgaagagggtggtcggggcgtagaatattcgggttttgagcgttcgaagtgtagacgtgggagggttttacggggaatcgggcgttttttttttttttttttttttttttttggtcgtttttttttttttgggtgaga

SEQ ID NO: 20250 - DNA, 1042 bp, Artificial Sequence
  chemically treated genomic DNA (Homo sapiens) CpG-island No: 20250
tctcacccaaaaaaaaaaaaacgaccaaaaaaaaaaaaaaaaaaaaaaaaaaaacgcccgattccccgtaaaaccctcccacgtctacacttcgaacgctcaaaacccgaatattctacgccccgaccaccctcttcaaaacgccgccgaactaactaaaacgcaacccacacgcccgcgaaaacgaaacgacaacaaccgcaaaactaaaaacgaaaaaccactcaccgcaacacgccgaacccaacaacaacgccgctaccaaaaaccacatctccgcgcccgccgcgaaatcgccgccgccgccgcaaatatccgaaacaacaaccgccgccgccgttacaaacaaaaccgaccgccgccgcgcgtcacaaacaaaacccactacccaaactacacgaccgcgcgcacgcgcgctcccactacttcccgcccgctcccccgcctactccccgcccgcgaaaaccgcgcacgcgcactcgaccccgccccgcaaccgctactattaacgcgacgccctccccaatcgcaaactccaaacccgaaacccgcctacccgctccacgaaaaccgaatacctactccaaaacgataacacgcgccgcgcttccaaatcacgtcctatcgcacccgcccgcccctaaaatccgcgtactcgcccgccgcaaaaaactaaaccctatattcccacgctcgccgaaaacctcattacacccgttcctatccgcgaatcgattcctacctttcgcgcgacgctaaaccccactatcctctctctctacttttctcctctttactttcactcccaccctcgcgcttcaaaaaccgaatcccgtcccgccccaacccgcgtctctccctaaacccgacgtccgactacgcgcgtaaaccaaaacacctaaactttcaccaacgcccgtttcctccgaacgcgaccgtctaacgccgaaacgatccctaaacccgaaaccgccacgcccaaaacaaaacgataatcgaatacctacccgcaaaaaacttccactcgcccctcgcgaactct

SEQ ID NO: 20251 - DNA, 1042 bp, Artificial Sequence
  chemically treated genomic DNA (Homo sapiens) CpG-island No: 20251
ttttatttagggggaagaagacgattagggaaaggaagggaggaagaaggggggcgttcgatttttcgtggggtttttttacgtttgtatttcgggcgtttagggttcgagtgttttgcgtttcggttattttttttagggcgtcgtcgggttggttggggcgtagtttatacgttcgcgggggcgaagcgatagtagtcgtagggttgggagcgaggagttatttatcgtagtacgtcgagtttagtaatagcgtcgttattaggggttatattttcgcgttcgtcgcggggtcgtcgtcgtcgtcgtaggtgttcggagtagtagtcgtcgtcgtcgttataggtaggatcgatcgtcgtcgcgcgttataggtaggatttattgtttaggttgtacggtcgcgcgtacgcgcgtttttattgtttttcgttcgttttttcgtttgtttttcgttcgcgagagtcgcgtacgcgtattcggtttcgtttcgtaatcgttgttgttgacgcggcgttttttttagtcgtaggttttagattcggggttcgtttgttcgttttacggaggtcggatgtttgttttagggcggtggtacgcgtcgcgtttttaggttacgttttgtcgtattcgttcgtttttggggttcgcgtgttcgttcgtcgtaggaggttgaattttgtgtttttacgttcgtcggggattttattgtattcgtttttgttcgcgggtcggtttttgtttttcgcgcggcgttgggttttattgttttttttttttattttttttttttttgtttttatttttattttcgcgttttaggggtcgggtttcgtttcgttttagttcgcgtttttttttggattcgacgttcggttgcgcgcgtggattaggatatttaggtttttattagcgttcgtttttttcggacgcggtcgtttagcgtcgaagcggtttttgagttcgaggtcgttacgtttagggtagggcggtggtcgggtatttgttcgtagggagtttttattcgtttttcgcgggtttt

SEQ ID NO: 20252 - DNA, 1042 bp, Artificial Sequence
  chemically treated genomic DNA (Homo sapiens) CpG-island No: 20252
aaaacccgcgaaaaacgaataaaaactccctacgaacaaatacccgaccaccgccctaccctaaacgtaacgacctcgaactcaaaaaccgcttcgacgctaaacgaccgcgtccgaaaaaaacgaacgctaataaaaacctaaatatcctaatccacgcgcgcaaccgaacgtcgaatccaaaaaaaaacgcgaactaaaacgaaacgaaacccgacccctaaaacgcgaaaataaaaataaaaacaaaaaaaaaaaaaataaaaaaaaaaaacaataaaacccaacgccgcgcgaaaaacaaaaaccgacccgcgaacaaaaacgaatacaataaaatccccgacgaacgtaaaaacacaaaattcaacctcctacgacgaacgaacacgcgaaccccaaaaacgaacgaatacgacaaaacgtaacctaaaaacgcgacgcgtaccaccgccctaaaacaaacatccgacctccgtaaaacgaacaaacgaaccccgaatctaaaacctacgactaaaaaaaacgccgcgtcaacaacaacgattacgaaacgaaaccgaatacgcgtacgcgactctcgcgaacgaaaaacaaacgaaaaaacgaacgaaaaacaataaaaacgcgcgtacgcgcgaccgtacaacctaaacaataaatcctacctataacgcgcgacgacgatcgatcctacctataacgacgacgacgactactactccgaacacctacgacgacgacgacgaccccgcgacgaacgcgaaaatataacccctaataacgacgctattactaaactcgacgtactacgataaataactcctcgctcccaaccctacgactactatcgcttcgcccccgcgaacgtataaactacgccccaaccaacccgacgacgccctaaaaaaaataaccgaaacgcaaaacactcgaaccctaaacgcccgaaatacaaacgtaaaaaaaccccacgaaaaatcgaacgccccccttcttcctcccttcctttccctaatcgtcttcttccccctaaataaaa

SEQ ID NO: 20253 - DNA, 650 bp, Artificial Sequence
  chemically treated genomic DNA (Homo sapiens) CpG-island No: 20253
gcgggggcgcgtttttcggtcgcgtttttttagttacgttttttacgttcggtttttcgagagcgagttcggtcggacgtacggaaagggttgggttacgtgggcggttgttgagtggttcgttttcgttttttagcgcgtagttaggcggaggtaagtttagagcgtacggatagagcggtagcgcgcgttcgcgcgcgtttttagtatttttttcggtgacgtgtttgatcgaggtcgcgttagggcgttgttgttgttaatatagttgttatggcgtttaaggcgttggttgcggagaagtggtcgcggtttttatagagttgggggcgggcggttcggtatggagagtagtttcgagagtttgtagtcgttagaatacggggtggcggtcgggttagcgttagggataggtttttcgtaggaagggttataggagattaggttcgtcgttggtgatggttttggggtatgggcggcggagattagcggcgggaatgggttgggggcggcggtcgttaggaggagtttttcggattcggtttttttcgcgggtttttttgaggttttcggattttgtagttttttcgcgggtttggatttgaaggatagtggtttggagagttttgttgtcgtcgaggcgtttttga

SEQ ID NO: 20254 - DNA, 650 bp, Artificial Sequence
  chemically treated genomic DNA (Homo sapiens) CpG-island No: 20254
tcaaaaacgcctcgacgacaacaaaactctccaaaccactatccttcaaatccaaacccgcgaaaaaactacaaaatccgaaaacctcaaaaaaacccgcgaaaaaaaccgaatccgaaaaactcctcctaacgaccgccgcccccaacccattcccgccgctaatctccgccgcccataccccaaaaccatcaccaacgacgaacctaatctcctataacccttcctacgaaaaacctatccctaacgctaacccgaccgccaccccgtattctaacgactacaaactctcgaaactactctccataccgaaccgcccgcccccaactctataaaaaccgcgaccacttctccgcaaccaacgccttaaacgccataacaactatattaacaacaacaacgccctaacgcgacctcgatcaaacacgtcaccgaaaaaaatactaaaaacgcgcgcgaacgcgcgctaccgctctatccgtacgctctaaacttacctccgcctaactacgcgctaaaaaacgaaaacgaaccactcaacaaccgcccacgtaacccaaccctttccgtacgtccgaccgaactcgctctcgaaaaaccgaacgtaaaaaacgtaactaaaaaaacgcgaccgaaaaacgcgcccccgc

SEQ ID NO: 20255 - DNA, 650 bp, Artificial Sequence
  chemically treated genomic DNA (Homo sapiens) CpG-island No: 20255
ttagaggcgtttcggcggtagtaggattttttaaattattgttttttaagtttaaattcgcggaggagttgtagggttcgggaattttaggagagttcgcgggagaagtcgagttcgggaggttttttttggcggtcgtcgtttttagtttattttcgtcgttggttttcgtcgtttatattttaggattattattagcggcgagtttggttttttgtagttttttttgcgaagaatttgtttttgacgttggttcggtcgttatttcgtgttttagcggttgtaggttttcggggttgttttttatatcgggtcgttcgtttttagttttatggagatcgcggttattttttcgtagttagcgttttggacgttatgatagttgtattggtagtaatagcgttttggcgcggtttcggttaggtacgttatcggggagagtattaagaacgcgcgcgggcgcgcgttatcgttttgttcgtgcgttttgagtttgttttcgtttgattgcgcgttgagaggcgaaggcgaattatttagtagtcgtttacgtggtttagtttttttcgtgcgttcgatcgagttcgttttcggaaggtcgggcgtggagggcgtggttaggagggcgcggtcggggggcgcgttttcgt

SEQ ID NO: 20256 - DNA, 650 bp, Artificial Sequence
  chemically treated genomic DNA (Homo sapiens) CpG-island No: 20256
acgaaaacgcgccccccgaccgcgccctcctaaccacgccctccacgcccgaccttccgaaaacgaactcgatcgaacgcacgaaaaaaactaaaccacgtaaacgactactaaataattcgccttcgcctctcaacgcgcaatcaaacgaaaacaaactcaaaacgcacgaacaaaacgataacgcgcgcccgcgcgcgttcttaatactctccccgataacgtacctaaccgaaaccgcgccaaaacgctattactaccaatacaactatcataacgtccaaaacgctaactacgaaaaaataaccgcgatctccataaaactaaaaacgaacgacccgatataaaaaacaaccccgaaaacctacaaccgctaaaacacgaaataacgaccgaaccaacgtcaaaaacaaattcttcgcaaaaaaaactacaaaaaaccaaactcgccgctaataataatcctaaaatataaacgacgaaaaccaacgacgaaaataaactaaaaacgacgaccgccaaaaaaaacctcccgaactcgacttctcccgcgaactctcctaaaattcccgaaccctacaactcctccgcgaatttaaacttaaaaaacaataatttaaaaaatcctactaccgccgaaacgcctctaa

SEQ ID NO: 20257 - DNA, 773 bp, Artificial Sequence
  chemically treated genomic DNA (Homo sapiens) CpG-island No: 20257
gatcggcgcgtcgggtaaagaataatatacgagtttagttgtaaataatataattttttacgagtttgcgcggcgggtttcggcggcggagaggatttcggaattcgttatcgggtaggggttgggggaggaatggtgagtaggatgagcgttgaacgaggacggcgagatcgttagtttcgttgcggttgtttgtatcggcgttcgtcgagtagattggagggatgtagttattagtttgggttttatcgtttttattaggcgacgcggatgtttcgatttcgtttttttgggaggcgattttcgtttttcggggtcgttagggcggtggggggcggggaaggtttcgtcggaggtttgggagttttttcggttcgttatcgaagggaaagcggtcggggcgcgggggataatagggagcggggagcgcggttcgttagagtggcgtcgttggtcggttgggttgattgacgcgtacgtcgcgaggcgcgattgggtttcgttcggttcggtcgtcgtttcgtcgtggtcgcggcgttttcggcgttcgtagtcgtgttttattttttattttcgtcgtttaggagaggagtagaattaatatttttagtaatattatttttcgttgtcgttgtcgtcgtcgtcgtttttttacgggttaatagtagtatatcgattcggagggagaagttgaaggggtttggttcggagtttttacgggaagtcgggattttttttggtaggagaaacggcgaagtatttttttttcgttt

SEQ ID NO: 20258 - DNA, 773 bp, Artificial Sequence
  chemically treated genomic DNA (Homo sapiens) CpG-island No: 20258
aaacgaaaaaaaaatacttcgccgtttctcctaccaaaaaaaatcccgacttcccgtaaaaactccgaaccaaaccccttcaacttctccctccgaatcgatatactactattaacccgtaaaaaaacgacgacgacgacaacgacaacgaaaaataatattactaaaaatattaattctactcctctcctaaacgacgaaaataaaaaataaaacacgactacgaacgccgaaaacgccgcgaccacgacgaaacgacgaccgaaccgaacgaaacccaatcgcgcctcgcgacgtacgcgtcaatcaacccaaccgaccaacgacgccactctaacgaaccgcgctccccgctccctattatcccccgcgccccgaccgctttcccttcgataacgaaccgaaaaaactcccaaacctccgacgaaaccttccccgccccccaccgccctaacgaccccgaaaaacgaaaatcgcctcccaaaaaaacgaaatcgaaacatccgcgtcgcctaataaaaacgataaaacccaaactaataactacatccctccaatctactcgacgaacgccgatacaaacaaccgcaacgaaactaacgatctcgccgtcctcgttcaacgctcatcctactcaccattcctcccccaacccctacccgataacgaattccgaaatcctctccgccgccgaaacccgccgcgcaaactcgtaaaaaattatattatttacaactaaactcgtatattattctttacccgacgcgccgatc

SEQ ID NO: 20259 - DNA, 773 bp, Artificial Sequence
  chemically treated genomic DNA (Homo sapiens) CpG-island No: 20259
gagcgagagggaggtgtttcgtcgttttttttgttaggggaggtttcggtttttcgtggaggtttcggattaagtttttttagttttttttttcggatcgatgtgttgttgttaattcgtgaggaggcggcggcggcggtagcggtagcggaagatggtgttgttgagagtgttaattttgttttttttttgggcggcggggatgggaggtgaggtacgattgcgagcgtcgggggcgtcgcgattacggcggagcggcggtcgggtcgagcggagtttagtcgcgtttcgcggcgtgcgcgttagttagtttagtcggttagcggcgttattttggcgggtcgcgtttttcgttttttattgtttttcgcgtttcgatcgtttttttttcggtggcgggtcgaggaggtttttaagttttcggcgaggtttttttcgttttttatcgttttggcggtttcgggaggcgggggtcgttttttagagaagcgaagtcggggtattcgcgtcgtttggtgagagcggtggaatttaggttggtggttgtatttttttagtttgttcggcgggcgtcggtgtaggtagtcgtagcgaggttggcggtttcgtcgttttcgtttagcgtttattttgtttattattttttttttagtttttgttcggtggcggatttcgaagtttttttcgtcgtcgagattcgtcgcgtagattcgtgggaagttgtgttgtttgtagttgggttcgtgtattgttttttattcggcgcgtcggtt

SEQ ID NO: 20260 - DNA, 773 bp, Artificial Sequence
  chemically treated genomic DNA (Homo sapiens) CpG-island No: 20260
aaccgacgcgccgaataaaaaacaatacacgaacccaactacaaacaacacaacttcccacgaatctacgcgacgaatctcgacgacgaaaaaaacttcgaaatccgccaccgaacaaaaactaaaaaaaaaataataaacaaaataaacgctaaacgaaaacgacgaaaccgccaacctcgctacgactacctacaccgacgcccgccgaacaaactaaaaaaatacaaccaccaacctaaattccaccgctctcaccaaacgacgcgaataccccgacttcgcttctctaaaaaacgacccccgcctcccgaaaccgccaaaacgataaaaaacgaaaaaaacctcgccgaaaacttaaaaacctcctcgacccgccaccgaaaaaaaaacgatcgaaacgcgaaaaacaataaaaaacgaaaaacgcgacccgccaaaataacgccgctaaccgactaaactaactaacgcgcacgccgcgaaacgcgactaaactccgctcgacccgaccgccgctccgccgtaatcgcgacgcccccgacgctcgcaatcgtacctcacctcccatccccgccgcccaaaaaaaaaacaaaattaacactctcaacaacaccatcttccgctaccgctaccgccgccgccgcctcctcacgaattaacaacaacacatcgatccgaaaaaaaaaactaaaaaaacttaatccgaaacctccacgaaaaaccgaaacctcccctaacaaaaaaaacgacgaaacacctccctctcgctc

SEQ ID NO: 20261 - DNA, 1306 bp, Artificial Sequence
  chemically treated genomic DNA (Homo sapiens) CpG-island No: 20261
aattttacgttagttcggcgcgcgcgattttcgcggcgtagcggtagggttggcgggtggcgcgcgtaggtcgttttatatcggtcggcggagtttttcggtttgttcgcggacgcggcgttagtgtagcgcgaagtcggtttggggcggtggcggtggcggcggcgcgttcgcgttgtagggatttgtagttcgcgcgtttttcgggtatttttttcgggtaggtcggttagcgcgttttcgttcgtcgtaagtcgattttttgcggttgttaagattatatttttcgtcgtttttttcgttgtcgggtcgaaagcgaaaataaattttgggttgcgaggtgttgttttttttcgggcgtttttattcgttttttgttttttcggcgttttttagcgaggtggggaaacgaaaggtcgcgtttttttttttggttttttcggttttcggcgtggggagtgcgcgggggcgtaggtttcgttttatttgagtcggtttagcgtgcgcgttaggggcgggggttttttcgttttatatcggtacggaggaggaaatttgtgggggcggcgattttcggtttgggttttgagttaggtagcgaggtcgtcgggaagtgattatttattttcggggttttttttaatttcgtttttttcgtttgtcgtgggcgcgtgttcgtttcgaggaggcggtcgcgtgcggatagttatgtattaggtagggtttttttatgcgttcggagagcgcggatcgttgtttcgggtcgtcgtcgtttgtcgtcgttcgcggagttcgagttttagttcgagtcgtcgtttgttttaggtcggggcgtcgagtagtcggcggtttggttatgtggggttagttttcgtcgcgtttggtttgtagtaggattagtaatatggaggttgtcgtcggcgttttcgacggcggggattagggcggcgcggggtttcgcgaggacgcgacgtttatggacgtttatttgcggaaattgggtttgtatcggaaattggtcgttaaggacgggtcgtgtttgtttcgggtcgtggcggagtaggtaattgcgggggggcggggagggtttcgaggggaggcggggacggttcggcgggtttgggtggggaggtagttgcgggttgttcgggtcgtttacggtcggggttgcgcgtgttttggttgtcgttatagcgttttattgtaacgtcggagtgggacgttgttttgcgtttgaaaggtgtaaattgaaattcgaaagttcgtaaattaacggggtgttttttttttgatgaagaggtaatga

SEQ ID NO: 20262 - DNA, 1306 bp, Artificial Sequence
  chemically treated genomic DNA (Homo sapiens) CpG-island No: 20262
tcattacctcttcatcaaaaaaaaaacaccccgttaatttacgaactttcgaatttcaatttacacctttcaaacgcaaaacaacgtcccactccgacgttacaataaaacgctataacgacaaccaaaacacgcgcaaccccgaccgtaaacgacccgaacaacccgcaactacctccccacccaaacccgccgaaccgtccccgcctcccctcgaaaccctccccgcccccccgcaattacctactccgccacgacccgaaacaaacacgacccgtccttaacgaccaatttccgatacaaacccaatttccgcaaataaacgtccataaacgtcgcgtcctcgcgaaaccccgcgccgccctaatccccgccgtcgaaaacgccgacgacaacctccatattactaatcctactacaaaccaaacgcgacgaaaactaaccccacataaccaaaccgccgactactcgacgccccgacctaaaacaaacgacgactcgaactaaaactcgaactccgcgaacgacgacaaacgacgacgacccgaaacaacgatccgcgctctccgaacgcataaaaaaaccctacctaatacataactatccgcacgcgaccgcctcctcgaaacgaacacgcgcccacgacaaacgaaaaaaacgaaattaaaaaaaaccccgaaaataaataatcacttcccgacgacctcgctacctaactcaaaacccaaaccgaaaatcgccgcccccacaaatttcctcctccgtaccgatataaaacgaaaaaacccccgcccctaacgcgcacgctaaaccgactcaaataaaacgaaacctacgcccccgcgcactccccacgccgaaaaccgaaaaaaccaaaaaaaaaaacgcgacctttcgtttccccacctcgctaaaaaacgccgaaaaaacaaaaaacgaataaaaacgcccgaaaaaaaacaacacctcgcaacccaaaatttattttcgctttcgacccgacaacgaaaaaaacgacgaaaaatataatcttaacaaccgcaaaaaatcgacttacgacgaacgaaaacgcgctaaccgacctacccgaaaaaaatacccgaaaaacgcgcgaactacaaatccctacaacgcgaacgcgccgccgccaccgccaccgccccaaaccgacttcgcgctacactaacgccgcgtccgcgaacaaaccgaaaaactccgccgaccgatataaaacgacctacgcgcgccacccgccaaccctaccgctacgccgcgaaaatcgcgcgcgccgaactaacgtaaaatt

SEQ ID NO: 20263 - DNA, 1306 bp, Artificial Sequence
  chemically treated genomic DNA (Homo sapiens) CpG-island No: 20263
ttattatttttttattaggagagagatatttcgttaatttgcgggttttcgagttttaatttgtattttttagacgtaaagtagcgttttatttcggcgttataatggggcgttgtgacgatagttagggtacgcgtagtttcggtcgtgggcggttcggatagttcgtagttgtttttttatttagattcgtcgggtcgttttcgttttttttcgaagtttttttcgttttttcgtaattatttgtttcgttacggttcggaataggtacgattcgtttttggcgattagttttcgatataagtttagttttcgtagataggcgtttatgggcgtcgcgttttcgcggggtttcgcgtcgttttggttttcgtcgtcggggacgtcgacggtagtttttatgttgttggttttgttgtaggttaggcgcggcgagggttagttttatatggttaggtcgtcggttgttcgacgtttcggtttggggtaggcggcggttcgggttggggttcgggtttcgcgagcggcggtaggcggcggcggttcgaggtagcggttcgcgtttttcgggcgtatagggaagttttgtttaatgtatggttgttcgtacgcggtcgttttttcggagcgaatacgcgtttacgataaacggggggagcgggattaaggaaaatttcgagagtgagtagttatttttcgacggtttcgttgtttgatttaggatttaggtcgggggtcgtcgtttttataagttttttttttcgtatcggtgtgaagcgagaaaattttcgtttttggcgcgtacgttgggtcggtttaggtgaagcggggtttgcgttttcgcgtattttttacgtcgggagtcgaggaaattaaaaagaaagacgcggtttttcgtttttttatttcgttggagggcgtcggaggggtagggagcgggtgggggcgttcgggagagaatagtatttcgtagtttagaatttgttttcgttttcggttcgatagcggagaggacggcgggagatgtagttttggtagtcgtaggaagtcggtttgcggcgggcggggacgcgttggtcggtttattcgggggaggtgttcgggaggcgcgcggattataagtttttatagcgcgggcgcgtcgtcgttatcgttatcgttttaagtcggtttcgcgttgtattggcgtcgcgttcgcgagtaggtcgaggggtttcgtcggtcgatgtggggcgatttgcgcgcgttattcgttaattttgtcgttgcgtcgcgggaatcgcgcgcgtcgggttggcgtggagtt

SEQ ID NO: 20264 - DNA, 1306 bp, Artificial Sequence
  chemically treated genomic DNA (Homo sapiens) CpG-island No: 20264
aactccacgccaacccgacgcgcgcgattcccgcgacgcaacgacaaaattaacgaataacgcgcgcaaatcgccccacatcgaccgacgaaacccctcgacctactcgcgaacgcgacgccaatacaacgcgaaaccgacttaaaacgataacgataacgacgacgcgcccgcgctataaaaacttataatccgcgcgcctcccgaacacctcccccgaataaaccgaccaacgcgtccccgcccgccgcaaaccgacttcctacgactaccaaaactacatctcccgccgtcctctccgctatcgaaccgaaaacgaaaacaaattctaaactacgaaatactattctctcccgaacgcccccacccgctccctacccctccgacgccctccaacgaaataaaaaaacgaaaaaccgcgtctttctttttaatttcctcgactcccgacgtaaaaaatacgcgaaaacgcaaaccccgcttcacctaaaccgacccaacgtacgcgccaaaaacgaaaattttctcgcttcacaccgatacgaaaaaaaaaacttataaaaacgacgacccccgacctaaatcctaaatcaaacaacgaaaccgtcgaaaaataactactcactctcgaaattttccttaatcccgctccccccgtttatcgtaaacgcgtattcgctccgaaaaaacgaccgcgtacgaacaaccatacattaaacaaaacttccctatacgcccgaaaaacgcgaaccgctacctcgaaccgccgccgcctaccgccgctcgcgaaacccgaaccccaacccgaaccgccgcctaccccaaaccgaaacgtcgaacaaccgacgacctaaccatataaaactaaccctcgccgcgcctaacctacaacaaaaccaacaacataaaaactaccgtcgacgtccccgacgacgaaaaccaaaacgacgcgaaaccccgcgaaaacgcgacgcccataaacgcctatctacgaaaactaaacttatatcgaaaactaatcgccaaaaacgaatcgtacctattccgaaccgtaacgaaacaaataattacgaaaaaacgaaaaaaacttcgaaaaaaaacgaaaacgacccgacgaatctaaataaaaaaacaactacgaactatccgaaccgcccacgaccgaaactacgcgtaccctaactatcgtcacaacgccccattataacgccgaaataaaacgctactttacgtctaaaaaatacaaattaaaactcgaaaacccgcaaattaacgaaatatctctctcctaataaaaaaataataa

SEQ ID NO: 20265 - DNA, 639 bp, Artificial Sequence
  chemically treated genomic DNA (Homo sapiens) CpG-island No: 20265
taggaaatcgcgggtttcgtcgttttcgtttcgggtttgtttttttcgggatttattgaggagtcgtcgtcgtttcgttagttttcgagcgcgagttggaggaaaagttgggcggcgggaagagcggcgggacgagcgtagggagggggcgtaggagacgcggacggagggaagggaggggagatttaaggggcgcggatcgttcgggagggagttaggaggtgaaaggggcgggcggcgagcggagggaggcgtcggtttcggttgggttgcggcgggtaaagcgcgtagtcgggaggtttcggcgtcgggggtcgttcgggacgttaagttcgttttagattcgggggcgtcgcggtttttatttcgttcggcgtggaggtttcgtttcgggagagttcgtcgtggtttgtgcgagcgggcgtgtgttcgcgttttcggtttcggttcgtcgttttcgggttttgttcgggttttggcggggtcgtaagagtttcgcggtcggcgttcgattttcggcggcgttcggtgttcggcgtttttagttcgggcgggaataatggagtcggagttggtgtttcggaggcggggcggggggagggttttcgttcgttattcggggtttttagattttgtgtt

SEQ ID NO: 20266 - DNA, 639 bp, Artificial Sequence
  chemically treated genomic DNA (Homo sapiens) CpG-island No: 20266
aacacaaaatctaaaaaccccgaataacgaacgaaaaccctccccccgccccgcctccgaaacaccaactccgactccattattcccgcccgaactaaaaacgccgaacaccgaacgccgccgaaaatcgaacgccgaccgcgaaactcttacgaccccgccaaaacccgaacaaaacccgaaaacgacgaaccgaaaccgaaaacgcgaacacacgcccgctcgcacaaaccacgacgaactctcccgaaacgaaacctccacgccgaacgaaataaaaaccgcgacgcccccgaatctaaaacgaacttaacgtcccgaacgacccccgacgccgaaacctcccgactacgcgctttacccgccgcaacccaaccgaaaccgacgcctccctccgctcgccgcccgcccctttcacctcctaactccctcccgaacgatccgcgccccttaaatctcccctcccttccctccgtccgcgtctcctacgccccctccctacgctcgtcccgccgctcttcccgccgcccaacttttcctccaactcgcgctcgaaaactaacgaaacgacgacgactcctcaataaatcccgaaaaaaacaaacccgaaacgaaaacgacgaaacccgcgatttccta

SEQ ID NO: 20267 - DNA, 639 bp, Artificial Sequence
  chemically treated genomic DNA (Homo sapiens) CpG-island No: 20267
ggtataaggtttggagatttcgggtggcggacgggagtttttttttcgtttcgttttcggggtattagtttcggttttattgttttcgttcgggttggaggcgtcgagtatcgagcgtcgtcgggagtcgagcgtcggtcgcggagtttttgcgatttcgttaggattcgaatagagttcgggggcggcgggtcggagtcggggacgcgggtatacgttcgttcgtataagttacggcggattttttcgaggcggaatttttacgtcgagcgaggtaagagtcgcggcgttttcggatttggggcgggtttggcgtttcgagcggttttcggcgtcggagtttttcggttgcgcgttttgttcgtcgtagtttagtcggggtcggcgttttttttcgttcgtcgttcgttttttttattttttggttttttttcgggcgattcgcgttttttgggttttttttttttttttttcgttcgcgttttttgcgttttttttttgcgttcgtttcgtcgtttttttcgtcgtttaattttttttttaattcgcgttcgggagttggcgaggcggcggcggttttttagtgagtttcgggagggataggttcggggcgaaggcggcgaggttcgcggttttttg

SEQ ID NO: 20268 - DNA, 639 bp, Artificial Sequence
  chemically treated genomic DNA (Homo sapiens) CpG-island No: 20268
caaaaaaccgcgaacctcgccgccttcgccccgaacctatccctcccgaaactcactaaaaaaccgccgccgcctcgccaactcccgaacgcgaattaaaaaaaaaattaaacgacgaaaaaaacgacgaaacgaacgcaaaaaaaaaacgcaaaaaacgcgaacgaaaaaaaaaaaaaaaaaacccaaaaaacgcgaatcgcccgaaaaaaaaccaaaaaataaaaaaaacgaacgacgaacgaaaaaaaacgccgaccccgactaaactacgacgaacaaaacgcgcaaccgaaaaactccgacgccgaaaaccgctcgaaacgccaaacccgccccaaatccgaaaacgccgcgactcttacctcgctcgacgtaaaaattccgcctcgaaaaaatccgccgtaacttatacgaacgaacgtatacccgcgtccccgactccgacccgccgcccccgaactctattcgaatcctaacgaaatcgcaaaaactccgcgaccgacgctcgactcccgacgacgctcgatactcgacgcctccaacccgaacgaaaacaataaaaccgaaactaataccccgaaaacgaaacgaaaaaaaaactcccgtccgccacccgaaatctccaaaccttatacc

SEQ ID NO: 20269 - DNA, 520 bp, Artificial Sequence
  chemically treated genomic DNA (Homo sapiens) CpG-island No: 20269
gcggtggcgttttattttttttgtagatcgggttttatcgttttgcggaggtttcggcgtcgcggcgtgttcgattgtagtacgggtatcgtgcgttttgcggggcgtttcgagttcggatcggagaaaagtttttgggtttcgcggttttttaagtagcggcgcgttcgcggtcggggaaggcgaggtcgtcgtaatgcgttacgaggggtttcggtttcgttcggacgtggtcgtttagttttcggtatattcgggttttttcgcgcgttgcggttgtatcggcgtttcggttttcgttagttgtcgttcgtcgttaaggacgtcgcgtttgtggtcgtaagagcgtttcgagcgttatgcgtcggcgaggcgcgagggttcgtttttttatttttattcgcgttggtttttttttcgttttcgttttttgtagttgtttgttgggttttgtagttttttagtcgcggttttaaaggacggggagcgggtcgagttgttcggcgttttgttttttttt

SEQ ID NO: 20270 - DNA, 520 bp, Artificial Sequence
  chemically treated genomic DNA (Homo sapiens) CpG-island No: 20270
aaaaaaaaacaaaacgccgaacaactcgacccgctccccgtcctttaaaaccgcgactaaaaaactacaaaacccaacaaacaactacaaaaaacgaaaacgaaaaaaaaaccaacgcgaataaaaataaaaaaacgaaccctcgcgcctcgccgacgcataacgctcgaaacgctcttacgaccacaaacgcgacgtccttaacgacgaacgacaactaacgaaaaccgaaacgccgatacaaccgcaacgcgcgaaaaaacccgaatataccgaaaactaaacgaccacgtccgaacgaaaccgaaacccctcgtaacgcattacgacgacctcgccttccccgaccgcgaacgcgccgctacttaaaaaaccgcgaaacccaaaaacttttctccgatccgaactcgaaacgccccgcaaaacgcacgatacccgtactacaatcgaacacgccgcgacgccgaaacctccgcaaaacgataaaacccgatctacaaaaaaaataaaacgccaccgc

SEQ ID NO: 20271 - DNA, 520 bp, Artificial Sequence
  chemically treated genomic DNA (Homo sapiens) CpG-island No: 20271
agagaagggtagagcgtcggatagttcggttcgtttttcgttttttggggtcgcggttggggaattataaggtttagtaggtagttgtagggggcggaggcggaggagggattagcgcgggtgggagtgagagagcgagttttcgcgtttcgtcggcgtatagcgttcggagcgtttttgcggttataggcgcggcgtttttggcggcgggcggtagttagcgggagtcgggacgtcggtgtagtcgtagcgcgcggaggaattcgggtgtgtcgggagttgggcggttacgttcggacgggatcgagatttttcgtagcgtattgcggcgatttcgtttttttcggtcgcgagcgcgtcgttgtttgaaaagtcgcggaatttaaggattttttttcggttcgagttcggggcgtttcgtagggcgtacggtattcgtgttgtagtcgggtacgtcgcggcgtcggggttttcgtagggcgatggagttcggtttgtaaggaaagtgaggcgttatcgt

SEQ ID NO: 20272 - DNA, 520 bp, Artificial Sequence
  chemically treated genomic DNA (Homo sapiens) CpG-island No: 20272
acgataacgcctcactttccttacaaaccgaactccatcgccctacgaaaaccccgacgccgcgacgtacccgactacaacacgaataccgtacgccctacgaaacgccccgaactcgaaccgaaaaaaaatccttaaattccgcgacttttcaaacaacgacgcgctcgcgaccgaaaaaaacgaaatcgccgcaatacgctacgaaaaatctcgatcccgtccgaacgtaaccgcccaactcccgacacacccgaattcctccgcgcgctacgactacaccgacgtcccgactcccgctaactaccgcccgccgccaaaaacgccgcgcctataaccgcaaaaacgctccgaacgctatacgccgacgaaacgcgaaaactcgctctctcactcccacccgcgctaatccctcctccgcctccgccccctacaactacctactaaaccttataattccccaaccgcgaccccaaaaaacgaaaaacgaaccgaactatccgacgctctacccttctct

SEQ ID NO: 20273 - DNA, 730 bp, Artificial Sequence
  chemically treated genomic DNA (Homo sapiens) CpG-island No: 20273
gtagggttttttaaaatttaaacgtagcggtttacggtttgttacgttttttaggagaatggtagatatagagaggaaatgtggagagggtataaatcgtaaggtgaagaaaacgaataaatatcgagttgatacggatagttttcgtttttttgagggtcgatttcgtgattttcgatgagcgtttagttgcgtcgggtatttttgggttttttagcgtttttttcggaggtttatcgtcgtacggcggaaagcgttttcggtttcgtttttcggttttagtttttcgggcgttttcgcgcggcggttaacgttggttttcggtcgggcgcgttgacgttatcgtgcgttagagtgagttcggatggggcggcgggtttcgggagcgttcgggttgattcgagtcgagcgggtcgtatttttttgtcggcgtcgttgattttcggttttgcggaggtttttaggtagtcgcgtagttttcgtgtttgttgcgttcgtattgcggtgagtgttgtttttttcgggttcgggcggcgtggggcgggtggggacgcgagggttcgcgggggtttatttttttgatgtggcggtcgaacgaggaaggacggggtttgaggtttttcggttaagggtcgagggtcgtcgggggttttttgttttttattttcgttaaggttttattggattcggaagttttaatttcgagatttgtagttaaagcgatttttaa

SEQ ID NO: 20274 - DNA, 730 bp, Artificial Sequence
  chemically treated genomic DNA (Homo sapiens) CpG-island No: 20274
ttaaaaatcgctttaactacaaatctcgaaattaaaacttccgaatccaataaaaccttaacgaaaataaaaaacaaaaaacccccgacgaccctcgacccttaaccgaaaaacctcaaaccccgtccttcctcgttcgaccgccacatcaaaaaaataaacccccgcgaaccctcgcgtccccacccgccccacgccgcccgaacccgaaaaaaacaacactcaccgcaatacgaacgcaacaaacacgaaaactacgcgactacctaaaaacctccgcaaaaccgaaaatcaacgacgccgacaaaaaaatacgacccgctcgactcgaatcaacccgaacgctcccgaaacccgccgccccatccgaactcactctaacgcacgataacgtcaacgcgcccgaccgaaaaccaacgttaaccgccgcgcgaaaacgcccgaaaaactaaaaccgaaaaacgaaaccgaaaacgctttccgccgtacgacgataaacctccgaaaaaaacgctaaaaaacccaaaaatacccgacgcaactaaacgctcatcgaaaatcacgaaatcgaccctcaaaaaaacgaaaactatccgtatcaactcgatatttattcgttttcttcaccttacgatttataccctctccacatttcctctctatatctaccattctcctaaaaaacgtaacaaaccgtaaaccgctacgtttaaattttaaaaaaccctac

SEQ ID NO: 20275 - DNA, 730 bp, Artificial Sequence
  chemically treated genomic DNA (Homo sapiens) CpG-island No: 20275
ttaaaaatcgttttgattgtaagtttcgaagttggggttttcgaatttaataaaattttggcgagagtagaaagtagagagttttcggcgattttcgatttttggtcgaagggttttaggtttcgttttttttcgttcggtcgttatattagggaagtgggttttcgcgggttttcgcgtttttattcgttttacgtcgttcgagttcggaaggagtagtatttatcgtagtgcgggcgtagtaaatacggaagttgcgcggttgtttagaggttttcgtagagtcgggaattagcggcgtcgataaggagatacggttcgttcggttcggattagttcgggcgttttcgaagttcgtcgttttattcgggtttattttgacgtacgatgacgttagcgcgttcggtcgaggattagcgttagtcgtcgcgcgagggcgttcgggaggttggggtcggaaagcggaatcgagagcgtttttcgtcgtgcggcgatgaattttcgggaaagacgttgggaggtttagggatgttcggcgtaattggacgtttatcgggagttacggggtcggtttttaggggaacggggattattcgtattaattcggtgtttgttcgttttttttattttgcggtttgtgttttttttatattttttttttgtgtttattatttttttgggggacgtggtaaatcgtgagtcgttgcgtttgagttttgggaaattttgt

SEQ ID NO: 20276 - DNA, 730 bp, Artificial Sequence
  chemically treated genomic DNA (Homo sapiens) CpG-island No: 20276
acaaaatttcccaaaactcaaacgcaacgactcacgatttaccacgtcccccaaaaaaataataaacacaaaaaaaaaatataaaaaaaacacaaaccgcaaaataaaaaaaacgaacaaacaccgaattaatacgaataatccccgttcccctaaaaaccgaccccgtaactcccgataaacgtccaattacgccgaacatccctaaacctcccaacgtctttcccgaaaattcatcgccgcacgacgaaaaacgctctcgattccgctttccgaccccaacctcccgaacgccctcgcgcgacgactaacgctaatcctcgaccgaacgcgctaacgtcatcgtacgtcaaaataaacccgaataaaacgacgaacttcgaaaacgcccgaactaatccgaaccgaacgaaccgtatctccttatcgacgccgctaattcccgactctacgaaaacctctaaacaaccgcgcaacttccgtatttactacgcccgcactacgataaatactactccttccgaactcgaacgacgtaaaacgaataaaaacgcgaaaacccgcgaaaacccacttccctaatataacgaccgaacgaaaaaaaacgaaacctaaaacccttcgaccaaaaatcgaaaatcgccgaaaactctctactttctactctcgccaaaattttattaaattcgaaaaccccaacttcgaaacttacaatcaaaacgatttttaa

SEQ ID NO: 20277 - DNA, 526 bp, Artificial Sequence
  chemically treated genomic DNA (Homo sapiens) CpG-island No: 20277
ttaacgaaaagcgtttgtatggttgtttcgttaattttgtatttttcggggttgaggaagagtcgaggtgattagaagttagcgataagtgtcggttattttcgacgttaggcgtcgggtttggagttcgacgggtcgaattttcgcgagagcggtcgtcgttatttttttattgattgtagcgggttgggggaggggtcgacgacgaaggcggttgtggtagcggcggcggcggcggcggagttttgggtcggtgtttgcgcgttggtgtttgaggtttaggttgaggttttcgttattgttggagcgtaggcggcggagaggatgattgtcgttgttatttttttttgagttagcgagtcgtcgttattttttattttttttcggtagggcggagaggagcggtcggagttagcgatggtgttcggcgaggagaattaattggtttcgaaagaggtgaggggttttagaggaggttaggttttaggtttgcggtcgttcgaggtaatataggttcgggttcggg

SEQ ID NO: 20278 - DNA, 526 bp, Artificial Sequence
  chemically treated genomic DNA (Homo sapiens) CpG-island No: 20278
cccgaacccgaacctatattacctcgaacgaccgcaaacctaaaacctaacctcctctaaaacccctcacctctttcgaaaccaattaattctcctcgccgaacaccatcgctaactccgaccgctcctctccgccctaccgaaaaaaaataaaaaataacgacgactcgctaactcaaaaaaaaataacaacgacaatcatcctctccgccgcctacgctccaacaataacgaaaacctcaacctaaacctcaaacaccaacgcgcaaacaccgacccaaaactccgccgccgccgccgccgctaccacaaccgccttcgtcgtcgacccctcccccaacccgctacaatcaataaaaaaataacgacgaccgctctcgcgaaaattcgacccgtcgaactccaaacccgacgcctaacgtcgaaaataaccgacacttatcgctaacttctaatcacctcgactcttcctcaaccccgaaaaatacaaaattaacgaaacaaccatacaaacgcttttcgttaa

SEQ ID NO: 20279 - DNA, 526 bp, Artificial Sequence
  chemically treated genomic DNA (Homo sapiens) CpG-island No: 20279
ttcgggttcgggtttgtgttgtttcgagcggtcgtaggtttaaggtttaattttttttggggttttttatttttttcgggattagttggtttttttcgtcgggtattatcgttgatttcggtcgttttttttcgttttgtcgggggagggtggagggtggcggcggttcgttagtttaagagagaatggtagcggtagttatttttttcgtcgtttgcgttttagtaatagcggaggttttagtttgggttttagatattagcgcgtagatatcgatttagggtttcgtcgtcgtcgtcgtcgttattatagtcgttttcgtcgtcggttttttttttagttcgttgtaattaatggaaaaatggcggcggtcgttttcgcgagaattcggttcgtcgggttttaagttcggcgtttggcgtcggaggtggtcggtatttgtcgttagtttttagttatttcggtttttttttagtttcgggaggtatagaattggcgagatagttatgtaaacgtttttcgttag

SEQ ID NO: 20280 - DNA, 526 bp, Artificial Sequence
  chemically treated genomic DNA (Homo sapiens) CpG-island No: 20280
ctaacgaaaaacgtttacataactatctcgccaattctatacctcccgaaactaaaaaaaaaccgaaataactaaaaactaacgacaaataccgaccacctccgacgccaaacgccgaacttaaaacccgacgaaccgaattctcgcgaaaacgaccgccgccatttttccattaattacaacgaactaaaaaaaaaaccgacgacgaaaacgactataataacgacgacgacgacgacgaaaccctaaatcgatatctacgcgctaatatctaaaacccaaactaaaacctccgctattactaaaacgcaaacgacgaaaaaaataactaccgctaccattctctcttaaactaacgaaccgccgccaccctccaccctcccccgacaaaacgaaaaaaaacgaccgaaatcaacgataatacccgacgaaaaaaaccaactaatcccgaaaaaaataaaaaaccccaaaaaaaattaaaccttaaacctacgaccgctcgaaacaacacaaacccgaacccgaa

SEQ ID NO: 20281 - DNA, 1459 bp, Artificial Sequence
  chemically treated genomic DNA (Homo sapiens) CpG-island No: 20281
ggtgttttttttcgggttaggtagcgttgaattaaataattttgcgtttagacgcgttttttaaaagcgagttatttttgatcgtttttttcgttttcggttaagagttaggggaaagcggttttgggagcgttatttatttatttcgcgttgaacgttttaagttattatcgtaggttttggtatacgtttcggtttttagatggttcgaggataggtttgggttgcggggggaggggcgatgtgtgttcgagagtttgggaatttgttggcggcggcgaggagagtatttcggaagacgtcgcgagcgtatacgcgtttcggtcggtgtttagagttcggattttgaatttaggttcgcgtttagtttcggttttacgtttgtatttcgttttcggcgagtttttatattatcgtcgcgtgggcggttaagggttaatttttgtttcgcgttttgagattcggggcgtagcgggtcgggtagttcggggcgcgcgtttttcgcgagtttgggggcggcggggtcggcggtcggaaggggcgaggcgcggcggcggcgcggcgggttcgaggcgtttttttaggcgggggcgggggtaggggcgggggcgggcgtcggaggggtttgggcggtttgaaaagcgttcgagtatcgtttttttatcgcgcggtcgtcgcgttatttatacgttttttggttattcggcgcggcgcggcgcggcgcgggggcggggggcgtcgttttaatggggatttcgcggttcggcgtcggggtcgggggcgcggttcggtcgcgggagtcgttcgttgttacgcggtggcggtcggttcggcggttcgggttcggcggtcgtattatgcgggtaatgcggtgtgatatcgcgcgaataaaggcggattgagcggtttagcgggtttcgtcggacggggaaggtatagcggggttgttagcgtcgtttttaggttaattttcgtttcgttttcgtcgttttcgcgttttcggggttgggaatttagcgcggttcggggttcgggcgtcgttgtcgtcgcgagaggtcgtaggtcggtcggaaacgaggggcgttcgttttgtgaattcgttttcggtttttttttttcgaggcgtttttagggttggggcgtttaggattggggcgagtgagcggcgcggttgggatttcgaggtcgggagtataattggacgcgggacgtcgggtttttttgtcgtcgttttcggtcggttttggtagcgtaggcgcggggcgcgggcgggattagttttgtatttttcgttttttcgtcgttggaagtgggacgggtttttttgtaggtggcgtaggagggcgtgggggtcgcggagagcggtcgcgggagttaagaggggtttcgggttttttttttgtagtattcggtttatagtttaggaggggaggcgggcgtttggtttttaaataaattt

SEQ ID NO: 20282 - DNA, 1459 bp, Artificial Sequence
  chemically treated genomic DNA (Homo sapiens) CpG-island No: 20282
aaatttatttaaaaaccaaacgcccgcctcccctcctaaactataaaccgaatactacaaaaaaaaaacccgaaacccctcttaactcccgcgaccgctctccgcgacccccacgccctcctacgccacctacaaaaaaacccgtcccacttccaacgacgaaaaaacgaaaaatacaaaactaatcccgcccgcgccccgcgcctacgctaccaaaaccgaccgaaaacgacgacaaaaaaacccgacgtcccgcgtccaattatactcccgacctcgaaatcccaaccgcgccgctcactcgccccaatcctaaacgccccaaccctaaaaacgcctcgaaaaaaaaaaaccgaaaacgaattcacaaaacgaacgcccctcgtttccgaccgacctacgacctctcgcgacgacaacgacgcccgaaccccgaaccgcgctaaattcccaaccccgaaaacgcgaaaacgacgaaaacgaaacgaaaattaacctaaaaacgacgctaacaaccccgctataccttccccgtccgacgaaacccgctaaaccgctcaatccgcctttattcgcgcgatatcacaccgcattacccgcataatacgaccgccgaacccgaaccgccgaaccgaccgccaccgcgtaacaacgaacgactcccgcgaccgaaccgcgcccccgaccccgacgccgaaccgcgaaatccccattaaaacgacgccccccgcccccgcgccgcgccgcgccgcgccgaataaccaaaaaacgtataaataacgcgacgaccgcgcgataaaaaaacgatactcgaacgcttttcaaaccgcccaaacccctccgacgcccgcccccgcccctacccccgcccccgcctaaaaaaacgcctcgaacccgccgcgccgccgccgcgcctcgccccttccgaccgccgaccccgccgcccccaaactcgcgaaaaacgcgcgccccgaactacccgacccgctacgccccgaatctcaaaacgcgaaacaaaaattaacccttaaccgcccacgcgacgataatataaaaactcgccgaaaacgaaatacaaacgtaaaaccgaaactaaacgcgaacctaaattcaaaatccgaactctaaacaccgaccgaaacgcgtatacgctcgcgacgtcttccgaaatactctcctcgccgccgccaacaaattcccaaactctcgaacacacatcgcccctccccccgcaacccaaacctatcctcgaaccatctaaaaaccgaaacgtataccaaaacctacgataataacttaaaacgttcaacgcgaaataaataaataacgctcccaaaaccgctttcccctaactcttaaccgaaaacgaaaaaaacgatcaaaaataactcgcttttaaaaaacgcgtctaaacgcaaaattatttaattcaacgctacctaacccgaaaaaaaacacc

SEQ ID NO: 20283 - DNA, 1459 bp, Artificial Sequence
  chemically treated genomic DNA (Homo sapiens) CpG-island No: 20283
aaatttatttagaagttaggcgttcgtttttttttttgggttgtgggtcgagtgttgtaagaaggaagttcgggattttttttggttttcgcggtcgtttttcgcggtttttacgtttttttgcgttatttatagaggggttcgttttatttttaacgacgggagggcgaagagtgtagagttggtttcgttcgcgtttcgcgtttgcgttgttagggtcgatcgaggacggcggtaagggggttcgacgtttcgcgtttagttgtgttttcggtttcggggttttagtcgcgtcgtttattcgttttaattttagacgttttagttttgggggcgtttcggggaagaggggtcgagggcgggtttatagggcgggcgtttttcgttttcggtcggtttgcggtttttcgcggcggtagcggcgttcgggtttcgggtcgcgttgggtttttagtttcgggaacgcgggggcggcgggggcggggcggggattagtttgggagcggcgttgatagtttcgttgtgtttttttcgttcggcggggttcgttgggtcgtttaattcgtttttgttcgcgcggtgttatatcgtattattcgtataatgcggtcgtcgggttcgggtcgtcgggtcggtcgttatcgcgtagtaacgggcggttttcgcggtcgggtcgcgttttcggtttcggcgtcgggtcgcgaaatttttattgaagcggcgtttttcgttttcgcgtcgcgtcgcgtcgcgtcgaatggttagagggcgtgtgaatggcgcggcggtcgcgcggtgggggggcggtgttcgggcgttttttaggtcgtttaggttttttcggcgttcgttttcgtttttgttttcgttttcgtttggggaagcgtttcgggttcgtcgcgtcgtcgtcgcgtttcgtttttttcggtcgtcgatttcgtcgtttttagattcgcggaagacgcgcgtttcgggttgttcgattcgttgcgtttcgggttttaaagcgcggggtagagattaatttttggtcgtttacgcggcggtggtgtggggattcgtcgggggcggggtgtaaacgtggggtcggagttgggcgcgaatttgggtttaaggttcgggttttgggtatcgatcggggcgcgtatgcgttcgcggcgtttttcgggatgtttttttcgtcgtcgttagtaaatttttaaattttcgggtatatatcgttttttttttcgtaatttaaatttgttttcgggttatttagggatcggggcgtgtgttagaatttacggtggtgatttaaaacgtttaacgcggagtgaatgggtagcgtttttagagtcgtttttttttggtttttggtcggagacgggaagagcgattagaggtgattcgtttttggggagcgcgtttagacgtagggttgtttgatttagcgttatttggttcgaggaggggtatt

SEQ ID NO: 20284 - DNA, 1459 bp, Artificial Sequence
  chemically treated genomic DNA (Homo sapiens) CpG-island No: 20284
aatacccctcctcgaaccaaataacgctaaatcaaacaaccctacgtctaaacgcgctccccaaaaacgaatcacctctaatcgctcttcccgtctccgaccaaaaaccaaaaaaaaacgactctaaaaacgctacccattcactccgcgttaaacgttttaaatcaccaccgtaaattctaacacacgccccgatccctaaataacccgaaaacaaatttaaattacgaaaaaaaaaacgatatatacccgaaaatttaaaaatttactaacgacgacgaaaaaaacatcccgaaaaacgccgcgaacgcatacgcgccccgatcgatacccaaaacccgaaccttaaacccaaattcgcgcccaactccgaccccacgtttacaccccgcccccgacgaatccccacaccaccgccgcgtaaacgaccaaaaattaatctctaccccgcgctttaaaacccgaaacgcaacgaatcgaacaacccgaaacgcgcgtcttccgcgaatctaaaaacgacgaaatcgacgaccgaaaaaaacgaaacgcgacgacgacgcgacgaacccgaaacgcttccccaaacgaaaacgaaaacaaaaacgaaaacgaacgccgaaaaaacctaaacgacctaaaaaacgcccgaacaccgcccccccaccgcgcgaccgccgcgccattcacacgccctctaaccattcgacgcgacgcgacgcgacgcgaaaacgaaaaacgccgcttcaataaaaatttcgcgacccgacgccgaaaccgaaaacgcgacccgaccgcgaaaaccgcccgttactacgcgataacgaccgacccgacgacccgaacccgacgaccgcattatacgaataatacgatataacaccgcgcgaacaaaaacgaattaaacgacccaacgaaccccgccgaacgaaaaaaacacaacgaaactatcaacgccgctcccaaactaatccccgccccgcccccgccgcccccgcgttcccgaaactaaaaacccaacgcgacccgaaacccgaacgccgctaccgccgcgaaaaaccgcaaaccgaccgaaaacgaaaaacgcccgccctataaacccgccctcgacccctcttccccgaaacgcccccaaaactaaaacgtctaaaattaaaacgaataaacgacgcgactaaaaccccgaaaccgaaaacacaactaaacgcgaaacgtcgaacccccttaccgccgtcctcgatcgaccctaacaacgcaaacgcgaaacgcgaacgaaaccaactctacactcttcgccctcccgtcgttaaaaataaaacgaacccctctataaataacgcaaaaaaacgtaaaaaccgcgaaaaacgaccgcgaaaaccaaaaaaaatcccgaacttccttcttacaacactcgacccacaacccaaaaaaaaaaacgaacgcctaacttctaaataaattt

SEQ ID NO: 20285 - DNA, 920 bp, Artificial Sequence
  chemically treated genomic DNA (Homo sapiens) CpG-island No: 20285
acgcgggaggggtttttggacgtattttttttcgtaaacgttcggttagtttcggcggattcgtagtggagagcggttttaggaggcggcgggcggcggggcggtgggcgttagtgcgtaggcgcggcgcggtagggcggggcggcgggcgcggggcggggcggggcggagtcgggcggggcggggtcggcggtaggcgttgggcgttcggcgcggtggtttagagtgcgcggggcggcgcgcggcgtgtaggtcgtagttgtggttcgggtgttggtaggtgttggcgggattggcggggatcgtcgtggattgttttaggggcgtcgtagttcgttcggttcgagggttcgtttaatcgcgtcgttcgcgttcgttttttttcggttcgcgttcggagcgcgggggtcgtcggcgttgggtattcggcggttatcggggatcggggttgagcggtcggttttcgttttcgtgtcgtcgtcgtcgtttttcggtcgatcgttcggtttggtcgttgttgtcgcgtttggttttcgggttttcgtcgttgggggcgcgggcggggtcgggggttgtcgggcgtcgtttttcgtgcgtttggagtttatatttcgggttcggcggtcggcgagtatggaggagaagtatttgttcgagttgatggcggagaaggattttttggattttttttttacgtacgttttgcgtttggtgaattaaggtgaggcgtcggtcgttaattgtcggtcggcggcggttgggggtcgggtggaaacgcgggggtttagggggttttttcgtgttttttgttgttagcggacgcggcggagacggaggttcgggtggttttcggggtcgtttgtacggggatttgggaggttgtgggatatttaggggaagattttgatgtgaattttggg

SEQ ID NO: 20286 - DNA, 920 bp, Artificial Sequence
  chemically treated genomic DNA (Homo sapiens) CpG-island No: 20286
cccaaaattcacatcaaaatcttcccctaaatatcccacaacctcccaaatccccgtacaaacgaccccgaaaaccacccgaacctccgtctccgccgcgtccgctaacaacaaaaaacacgaaaaaaccccctaaacccccgcgtttccacccgacccccaaccgccgccgaccgacaattaacgaccgacgcctcaccttaattcaccaaacgcaaaacgtacgtaaaaaaaaaatccaaaaaatccttctccgccatcaactcgaacaaatacttctcctccatactcgccgaccgccgaacccgaaatataaactccaaacgcacgaaaaacgacgcccgacaacccccgaccccgcccgcgcccccaacgacgaaaacccgaaaaccaaacgcgacaacaacgaccaaaccgaacgatcgaccgaaaaacgacgacgacgacacgaaaacgaaaaccgaccgctcaaccccgatccccgataaccgccgaatacccaacgccgacgacccccgcgctccgaacgcgaaccgaaaaaaaacgaacgcgaacgacgcgattaaacgaaccctcgaaccgaacgaactacgacgcccctaaaacaatccacgacgatccccgccaatcccgccaacacctaccaacacccgaaccacaactacgacctacacgccgcgcgccgccccgcgcactctaaaccaccgcgccgaacgcccaacgcctaccgccgaccccgccccgcccgactccgccccgccccgccccgcgcccgccgccccgccctaccgcgccgcgcctacgcactaacgcccaccgccccgccgcccgccgcctcctaaaaccgctctccactacgaatccgccgaaactaaccgaacgtttacgaaaaaaaatacgtccaaaaacccctcccgcgt

SEQ ID NO: 20287 - DNA, 920 bp, Artificial Sequence
  chemically treated genomic DNA (Homo sapiens) CpG-island No: 20287
tttaaaatttatattagggtttttttttaggtgttttatagttttttaggttttcgtgtaaacgatttcgggggttattcgggttttcgttttcgtcgcgttcgttgatagtagagggtacggaggggttttttgggttttcgcgtttttattcggtttttaatcgtcgtcggtcggtagttaacggtcggcgttttattttggtttattaggcgtagggcgtgcgtgaaggaggggtttagggagttttttttcgttattagttcgggtaggtattttttttttatgttcgtcggtcgtcgggttcgggatgtggattttaggcgtacggggggcggcgttcggtaattttcgatttcgttcgcgtttttagcggcggggattcgggggttagacgcggtagtagcggttaagtcgggcggtcggtcggaaggcggcggcggcggtacgggggcgggaatcgatcgtttagtttcgattttcggtggtcgtcgagtatttagcgtcggcggttttcgcgtttcgggcgcgggtcgaggaggagcgggcgcgggcggcgcggttaggcgggttttcgggtcgagcgggttgcggcgtttttgaggtagtttacggcgattttcgttagtttcgttagtatttgttagtattcgagttatagttgcgatttgtacgtcgcgcgtcgtttcgcgtattttgagttatcgcgtcgagcgtttagcgtttgtcgtcggtttcgtttcgttcggtttcgtttcgtttcgtttcgcgttcgtcgtttcgttttgtcgcgtcgcgtttgcgtattggcgtttatcgtttcgtcgttcgtcgttttttggggtcgttttttattgcgagttcgtcgggattaatcgggcgtttgcgagagggggtgcgtttaagggtttttttcgcgt

SEQ ID NO: 20288 - DNA, 920 bp, Artificial Sequence
  chemically treated genomic DNA (Homo sapiens) CpG-island No: 20288
acgcgaaaaaaacccttaaacgcaccccctctcgcaaacgcccgattaatcccgacgaactcgcaataaaaaacgaccccaaaaaacgacgaacgacgaaacgataaacgccaatacgcaaacgcgacgcgacaaaacgaaacgacgaacgcgaaacgaaacgaaacgaaaccgaacgaaacgaaaccgacgacaaacgctaaacgctcgacgcgataactcaaaatacgcgaaacgacgcgcgacgtacaaatcgcaactataactcgaatactaacaaatactaacgaaactaacgaaaatcgccgtaaactacctcaaaaacgccgcaacccgctcgacccgaaaacccgcctaaccgcgccgcccgcgcccgctcctcctcgacccgcgcccgaaacgcgaaaaccgccgacgctaaatactcgacgaccaccgaaaatcgaaactaaacgatcgattcccgcccccgtaccgccgccgccgccttccgaccgaccgcccgacttaaccgctactaccgcgtctaacccccgaatccccgccgctaaaaacgcgaacgaaatcgaaaattaccgaacgccgccccccgtacgcctaaaatccacatcccgaacccgacgaccgacgaacataaaaaaaaaatacctacccgaactaataacgaaaaaaaactccctaaacccctccttcacgcacgccctacgcctaataaaccaaaataaaacgccgaccgttaactaccgaccgacgacgattaaaaaccgaataaaaacgcgaaaacccaaaaaacccctccgtaccctctactatcaacgaacgcgacgaaaacgaaaacccgaataacccccgaaatcgtttacacgaaaacctaaaaaactataaaacacctaaaaaaaaaccctaatataaattttaaa

SEQ ID NO: 20289 - DNA, 528 bp, Artificial Sequence
  chemically treated genomic DNA (Homo sapiens) CpG-island No: 20289
gcgtatattgggggtttttcgcgtcgggaatcggatgttagttaaatgtcggggttgggaagtaaaaaagtttttatttttcggttttcgttttttttcgagtttttcggcgtttcgtaaaagtagttggtttaggtagtttcggggatttttaggggtatttggttttttcgcggcggtttaataaaaaggggcgcgacgcgagcgtttttcgtcgacgttttaagttattagcgttcgggcgatataggtttcgagggtgcgcgtcgttagcggttggtgcgcgtcgattttcgtcgtcgtttttttcgtagggtttcgaggttcgggtagttttggtttttcgtttgttatcggtttatttggggttgttgttgttttagtagatagcgtaacggtcggcgacggttttggagttcgggttttggttgaatatatatatttagagtattagaaatattagcgtgaatatttttacgtgtaatattacgtttggtttagcgtcggagttttcgattcgttatttcg

SEQ ID NO: 20290 - DNA, 528 bp, Artificial Sequence
  chemically treated genomic DNA (Homo sapiens) CpG-island No: 20290
cgaaataacgaatcgaaaactccgacgctaaaccaaacgtaatattacacgtaaaaatattcacgctaatatttctaatactctaaatatatatattcaaccaaaacccgaactccaaaaccgtcgccgaccgttacgctatctactaaaacaacaacaaccccaaataaaccgataacaaacgaaaaaccaaaactacccgaacctcgaaaccctacgaaaaaaacgacgacgaaaatcgacgcgcaccaaccgctaacgacgcgcaccctcgaaacctatatcgcccgaacgctaataacttaaaacgtcgacgaaaaacgctcgcgtcgcgcccctttttattaaaccgccgcgaaaaaaccaaatacccctaaaaatccccgaaactacctaaaccaactacttttacgaaacgccgaaaaactcgaaaaaaaacgaaaaccgaaaaataaaaacttttttacttcccaaccccgacatttaactaacatccgattcccgacgcgaaaaacccccaatatacgc

SEQ ID NO: 20291 - DNA, 528 bp, Artificial Sequence
  chemically treated genomic DNA (Homo sapiens) CpG-island No: 20291
cggagtggcgggtcgggggtttcggcgttgggttaggcgtgatgttgtacgtggagatgtttacgttggtgtttttggtgttttggatgtgtgtgtttagttaggattcgggttttaaggtcgtcgtcgatcgttacgttgtttattggaatagtagtaattttaggtaagtcgataataggcggagagttagggttattcgggtttcggggttttgcggaaggagcggcggcggggatcggcgcgtattaatcgttggcggcgcgtattttcggagtttgtgtcgttcgggcgttgatggtttgaggcgtcggcgggaagcgttcgcgtcgcgtttttttttgttaagtcgtcgcggaaaggttaggtatttttgggagttttcggggttgtttagattaattgtttttgcggggcgtcgggagattcggaaaagggcgggagtcggggagtagggatttttttgttttttagtttcggtatttggttggtattcggttttcggcgcggggagtttttagtgtgcgt

SEQ ID NO: 20292 - DNA, 528 bp, Artificial Sequence
  chemically treated genomic DNA (Homo sapiens) CpG-island No: 20292
acgcacactaaaaactccccgcgccgaaaaccgaataccaaccaaataccgaaactaaaaaacaaaaaaatccctactccccgactcccgcccttttccgaatctcccgacgccccgcaaaaacaattaatctaaacaaccccgaaaactcccaaaaatacctaacctttccgcgacgacttaacaaaaaaaaacgcgacgcgaacgcttcccgccgacgcctcaaaccatcaacgcccgaacgacacaaactccgaaaatacgcgccgccaacgattaatacgcgccgatccccgccgccgctccttccgcaaaaccccgaaacccgaataaccctaactctccgcctattatcgacttacctaaaattactactattccaataaacaacgtaacgatcgacgacgaccttaaaacccgaatcctaactaaacacacacatccaaaacaccaaaaacaccaacgtaaacatctccacgtacaacatcacgcctaacccaacgccgaaacccccgacccgccactccg

SEQ ID NO: 20293 - DNA, 566 bp, Artificial Sequence
  chemically treated genomic DNA (Homo sapiens) CpG-island No: 20293
tcggttttcgttttttttcgagtttttcggcgtttcgtagaagtagttggtttaggtagtttcggggatttttaggggtatttggttttttcgcggcggtttaataaagaggggcgcgacgcgagcgtttttcgtcgacgttttaagttattagcgttcgggcgacgtaggtttcgagggtgcgcgtcgttagcggttggtgcgcgtcgattttcgtcgtcgtttttttcgtagggtttcgaggttcgggtagttttggtttttcgtttgttatcggtttatttggggttgttgttgttttagtagatagcgtagcggtcggcgacggttttggagttcgggttttggttgaatatatatatttagagtattagaaatattagcgttaatatttttacgtgtaatattacgtttggttagcggcggagttttcgacgcgttatttcggggagagagcggggattcggagggagggaggtaggtaaagggatagagagagagcgggcgttaaataaatatgaataaataaaaatgaaagtgggcgagaaaggaaagaggcgtttatt

SEQ ID NO: 20294 - DNA, 566 bp, Artificial Sequence
  chemically treated genomic DNA (Homo sapiens) CpG-island No: 20294
aataaacgcctctttcctttctcgcccactttcatttttatttattcatatttatttaacgcccgctctctctctatccctttacctacctccctccctccgaatccccgctctctccccgaaataacgcgtcgaaaactccgccgctaaccaaacgtaatattacacgtaaaaatattaacgctaatatttctaatactctaaatatatatattcaaccaaaacccgaactccaaaaccgtcgccgaccgctacgctatctactaaaacaacaacaaccccaaataaaccgataacaaacgaaaaaccaaaactacccgaacctcgaaaccctacgaaaaaaacgacgacgaaaatcgacgcgcaccaaccgctaacgacgcgcaccctcgaaacctacgtcgcccgaacgctaataacttaaaacgtcgacgaaaaacgctcgcgtcgcgcccctctttattaaaccgccgcgaaaaaaccaaatacccctaaaaatccccgaaactacctaaaccaactacttctacgaaacgccgaaaaactcgaaaaaaaacgaaaaccga

SEQ ID NO: 20295 - DNA, 566 bp, Artificial Sequence
  chemically treated genomic DNA (Homo sapiens) CpG-island No: 20295
ggtgggcgttttttttttttttcgtttatttttatttttatttatttatatttatttggcgttcgttttttttttgtttttttgtttgttttttttttttcggattttcgtttttttttcggagtggcgcgtcgggggtttcgtcgttggttaggcgtgatgttgtacgtggagatgttgacgttggtgtttttggtgttttggatgtgtgtgtttagttaggattcgggttttaaggtcgtcgtcgatcgttacgttgtttattggaatagtagtaattttaggtaagtcgataataggcggagagttagggttattcgggtttcggggttttgcggaaggagcggcggcggggatcggcgcgtattaatcgttggcggcgcgtattttcggagtttgcgtcgttcgggcgttgatggtttgaggcgtcggcgggaagcgttcgcgtcgcgtttttttttgttaagtcgtcgcggaaaggttaggtatttttgggagttttcggggttgtttagattaattgtttttgcggggcgtcgggagattcggaaaagggcgggagtcgg

SEQ ID NO: 20296 - DNA, 566 bp, Artificial Sequence
  chemically treated genomic DNA (Homo sapiens) CpG-island No: 20296
ccgactcccgcccttttccgaatctcccgacgccccgcaaaaacaattaatctaaacaaccccgaaaactcccaaaaatacctaacctttccgcgacgacttaacaaaaaaaaacgcgacgcgaacgcttcccgccgacgcctcaaaccatcaacgcccgaacgacgcaaactccgaaaatacgcgccgccaacgattaatacgcgccgatccccgccgccgctccttccgcaaaaccccgaaacccgaataaccctaactctccgcctattatcgacttacctaaaattactactattccaataaacaacgtaacgatcgacgacgaccttaaaacccgaatcctaactaaacacacacatccaaaacaccaaaaacaccaacgtcaacatctccacgtacaacatcacgcctaaccaacgacgaaacccccgacgcgccactccgaaaaaaaaacgaaaatccgaaaaaaaaaaaacaaacaaaaaaacaaaaaaaaaacgaacgccaaataaatataaataaataaaaataaaaataaacgaaaaaaaaaaaaaacgcccacc

SEQ ID NO: 20297 - DNA, 848 bp, Artificial Sequence
  chemically treated genomic DNA (Homo sapiens) CpG-island No: 20297
cgattcgcgcggggttggttcgagggcggaggtaattcgtcggcgacgtcgtaggtttcgggtggttgacgtcgttcgggggcgtttttgggagttgggggtcggcgaggttggattcgacgcgttcgggaggagtcggtcggcggttacgtgatttatcgcggcggggtcggcggtttagaaatagtagcggcggcggtttcgttcgcgggcggcgcgagcgaggggtagaggcgagagacgtcggcggggcgcgggcgcggcggtttcggaggatgttgttgagtttcggtattgtttggttgcgagtatatgatggcgatacgggagtttaaagtgtgttttttcggggtgagttttggtcgttattcgtcggcggatttcggttcgcgttttcgcgttttttcgtttttttattttttgcgcgtttagttttcgtgattttttcgtttttcgtatttttttcgtagttttcgtttttttcgttcgcgcgttttttggtttttcgggtttttttggtttttttagttcgtgcgtttttcgtttttcgcgtttttcgtttttcgtatttcgtttgtttttcgttttttcgtcgttcgtgcgttttttttggttcgttttcgtttttattttgtcggggttcgggttcgagtttgtttcgggtttatttcgtttttttttttcggttcgcgagttttcggattcgcggcgatttcgcggggatttttagcggggacggggtagtggcggcgagtttggggtttcgagggttttttttttcgtttttgatagttttttttcggtagaaagtttaagttgtttagttaagtcgttgagtgtttttttgt

SEQ ID NO: 20298 - DNA, 848 bp, Artificial Sequence
  chemically treated genomic DNA (Homo sapiens) CpG-island No: 20298
acaaaaaaacactcaacgacttaactaaacaacttaaactttctaccgaaaaaaaactatcaaaaacgaaaaaaaaaaccctcgaaaccccaaactcgccgccactaccccgtccccgctaaaaatccccgcgaaatcgccgcgaatccgaaaactcgcgaaccgaaaaaaaaaaacgaaataaacccgaaacaaactcgaacccgaaccccgacaaaataaaaacgaaaacgaaccaaaaaaaacgcacgaacgacgaaaaaacgaaaaacaaacgaaatacgaaaaacgaaaaacgcgaaaaacgaaaaacgcacgaactaaaaaaaccaaaaaaacccgaaaaaccaaaaaacgcgcgaacgaaaaaaacgaaaactacgaaaaaaatacgaaaaacgaaaaaatcacgaaaactaaacgcgcaaaaaataaaaaaacgaaaaaacgcgaaaacgcgaaccgaaatccgccgacgaataacgaccaaaactcaccccgaaaaaacacactttaaactcccgtatcgccatcatatactcgcaaccaaacaataccgaaactcaacaacatcctccgaaaccgccgcgcccgcgccccgccgacgtctctcgcctctacccctcgctcgcgccgcccgcgaacgaaaccgccgccgctactatttctaaaccgccgaccccgccgcgataaatcacgtaaccgccgaccgactcctcccgaacgcgtcgaatccaacctcgccgacccccaactcccaaaaacgcccccgaacgacgtcaaccacccgaaacctacgacgtcgccgacgaattacctccgccctcgaaccaaccccgcgcgaatcg

SEQ ID NO: 20299 - DNA, 848 bp, Artificial Sequence
  chemically treated genomic DNA (Homo sapiens) CpG-island No: 20299
gtaaaagagtatttagcgatttggttgagtaatttaaattttttgtcggaaggaaattattaaaagcggaggagaaagttttcggggttttagattcgtcgttattgtttcgttttcgttgggggttttcgcgaggtcgtcgcggattcggggattcgcgggtcgggaggaaagagcggagtaagttcggggtaggttcggattcggatttcggtagggtgagagcgggggcggattagagggggcgtacggacggcggggaggcggagaataggcggggtgcggagagcgaggggcgcggagagcgaggggcgtacggattaggggagttagggggattcggggaattagggggcgcgcggacgagggggacgggggttacgagaggggtgcggagagcgaggggattacggggattgagcgcgtagggaataggggagcgaaggggcgcgagagcgcgggtcggggttcgtcggcgggtggcggttaggatttatttcgagaaggtatattttgagttttcgtatcgttattatgtgttcgtagttaggtagtgtcggggtttagtagtatttttcggggtcgtcgcgttcgcgtttcgtcggcgtttttcgtttttgtttttcgttcgcgtcgttcgcgggcggaatcgtcgtcgttgttatttttgggtcgtcggtttcgtcgcggtgggttacgtggtcgtcggtcggtttttttcgggcgcgtcgggtttagtttcgtcggtttttagtttttaggaacgttttcggacggcgttagttattcgggatttgcggcgtcgtcggcggattgttttcgttttcggattagtttcgcgcgggtcg

SEQ ID NO: 20300 - DNA, 848 bp, Artificial Sequence
  chemically treated genomic DNA (Homo sapiens) CpG-island No: 20300
cgacccgcgcgaaactaatccgaaaacgaaaacaatccgccgacgacgccgcaaatcccgaataactaacgccgtccgaaaacgttcctaaaaactaaaaaccgacgaaactaaacccgacgcgcccgaaaaaaaccgaccgacgaccacgtaacccaccgcgacgaaaccgacgacccaaaaataacaacgacgacgattccgcccgcgaacgacgcgaacgaaaaacaaaaacgaaaaacgccgacgaaacgcgaacgcgacgaccccgaaaaatactactaaaccccgacactacctaactacgaacacataataacgatacgaaaactcaaaatataccttctcgaaataaatcctaaccgccacccgccgacgaaccccgacccgcgctctcgcgccccttcgctcccctattccctacgcgctcaatccccgtaatcccctcgctctccgcacccctctcgtaacccccgtccccctcgtccgcgcgccccctaattccccgaatccccctaactcccctaatccgtacgcccctcgctctccgcgcccctcgctctccgcaccccgcctattctccgcctccccgccgtccgtacgccccctctaatccgcccccgctctcaccctaccgaaatccgaatccgaacctaccccgaacttactccgctctttcctcccgacccgcgaatccccgaatccgcgacgacctcgcgaaaacccccaacgaaaacgaaacaataacgacgaatctaaaaccccgaaaactttctcctccgcttttaataatttccttccgacaaaaaatttaaattactcaaccaaatcgctaaatactcttttac

SEQ ID NO: 20301 - DNA, 696 bp, Artificial Sequence
  chemically treated genomic DNA (Homo sapiens) CpG-island No: 20301
cgtaggttcgtttttatcgtttttgggtttagattcgtcggttggtttcgtcgaggcggagcggggcggttgttgttttttgttgttgttcgaagaggcggaggagttgttggagtcgttgtttttgtttatgtcggaggcggtggcggcggcgttgggggagtttagcggtattaacgggggtttcggcggcgacggtagtcggagcggagcgggcgcggcggggatttaggtttatggcgtttagggtcggcgggggtcggcggcggtagcggttttcggtttttatggcgatatttttttttgtttttttttttggttttttaaattaggaagagaagcggcggacggggttgttaagttcggcggtagcggcgatcgaggacgaggaggtcggggttcgggagttcgggtcgggtttggcggggcggaggttgcgggggaaggggaggcgagggaggttgcgcgagtttcgtcggtcggtcggtcggatacgttttttcgtcgcgaggtaggggagagggttggttgtttcggtgtcggggattagtgttttcgatatagtaacggatattcgtttttgggtcgaggtcgatttgtttcgggaatggcgacgagtcgttaaatagtattttaaagaattcggatggattgtatatatagtggagagggggtgaggtattttgggaaatgtag

SEQ ID NO: 20302 - DNA, 696 bp, Artificial Sequence
  chemically treated genomic DNA (Homo sapiens) CpG-island No: 20302
ctacatttcccaaaatacctcaccccctctccactatatatacaatccatccgaattctttaaaatactatttaacgactcgtcgccattcccgaaacaaatcgacctcgacccaaaaacgaatatccgttactatatcgaaaacactaatccccgacaccgaaacaaccaaccctctcccctacctcgcgacgaaaaaacgtatccgaccgaccgaccgacgaaactcgcgcaacctccctcgcctccccttcccccgcaacctccgccccgccaaacccgacccgaactcccgaaccccgacctcctcgtcctcgatcgccgctaccgccgaacttaacaaccccgtccgccgcttctcttcctaatttaaaaaaccaaaaaaaaaaacaaaaaaaaatatcgccataaaaaccgaaaaccgctaccgccgccgacccccgccgaccctaaacgccataaacctaaatccccgccgcgcccgctccgctccgactaccgtcgccgccgaaacccccgttaataccgctaaactcccccaacgccgccgccaccgcctccgacataaacaaaaacaacgactccaacaactcctccgcctcttcgaacaacaacaaaaaacaacaaccgccccgctccgcctcgacgaaaccaaccgacgaatctaaacccaaaaacgataaaaacgaacctacg

SEQ ID NO: 20303 - DNA, 696 bp, Artificial Sequence
  chemically treated genomic DNA (Homo sapiens) CpG-island No: 20303
ttatattttttagaatattttattttttttttattatatatatagtttattcgggttttttgagatgttgtttggcgattcgtcgttattttcggagtaggtcggtttcggtttaggggcgagtattcgttgttgtgtcggagatattagttttcgatatcgagatagttagtttttttttttgtttcgcggcgggagagcgtgttcggtcggtcggtcggcggggttcgcgtaatttttttcgtttttttttttttcgtagttttcgtttcgttaggttcggttcggattttcgagtttcggttttttcgttttcggtcgtcgttgtcgtcgggtttaatagtttcgttcgtcgtttttttttttagtttgagaagttaaggaaggaaatagggaaaaatgtcgttatgaaggtcgagaatcgttgtcgtcgtcgattttcgtcggttttgaacgttatgagtttgggttttcgtcgcgttcgtttcgtttcgattgtcgtcgtcgtcgaggttttcgttgatgtcgttgagtttttttaacgtcgtcgttatcgttttcgatatggataagaatagcggttttaatagttttttcgttttttcgggtagtagtaaagggtaatagtcgtttcgtttcgtttcggcggggttagtcggcgagtttaaatttaagagcggtaaggacgggtttgcg

SEQ ID NO: 20304 - DNA, 696 bp, Artificial Sequence
  chemically treated genomic DNA (Homo sapiens) CpG-island No: 20304
cgcaaacccgtccttaccgctcttaaatttaaactcgccgactaaccccgccgaaacgaaacgaaacgactattaccctttactactacccgaaaaaacgaaaaaactattaaaaccgctattcttatccatatcgaaaacgataacgacgacgttaaaaaaactcaacgacatcaacgaaaacctcgacgacgacgacaatcgaaacgaaacgaacgcgacgaaaacccaaactcataacgttcaaaaccgacgaaaatcgacgacgacaacgattctcgaccttcataacgacatttttccctatttccttccttaacttctcaaactaaaaaaaaaaacgacgaacgaaactattaaacccgacgacaacgacgaccgaaaacgaaaaaaccgaaactcgaaaatccgaaccgaacctaacgaaacgaaaactacgaaaaaaaaaaaaacgaaaaaaattacgcgaaccccgccgaccgaccgaccgaacacgctctcccgccgcgaaacaaaaaaaaaaactaactatctcgatatcgaaaactaatatctccgacacaacaacgaatactcgcccctaaaccgaaaccgacctactccgaaaataacgacgaatcgccaaacaacatctcaaaaaacccgaataaactatatatataataaaaaaaaaataaaatattctaaaaaatataa

SEQ ID NO: 20305 - DNA, 687 bp, Artificial Sequence
  chemically treated genomic DNA (Homo sapiens) CpG-island No: 20305
ttgcgtttcgtaggttttgggcgttatttacgttagtgagtgtttataagtttgtgaggtaggcggcgttatagagagaaattgaggcgcgggagtttaagttatttgtttagcgttttagtcgagcgcgaatcgcgttcggggatggtatttatacggttcggttttaggttttttttgttagcgttcgaaggtttttcgtatttttagggggcgtcggtttgcgcgtacgcgtaatggtcgtagtcgcgttttttttaagaggattttttttgttttcgtcgattttttcgttttcgtttcgcgtttttataatgtagtgcggttgagcgtttcggagttcgcggggacgttgcggggggattcgtgttgaggcggcggcggcgacgtgggttgcggcgggttcgcggcgtcgggcggtgcggatgtcgggttgggcggacgagcgcggcggcgagggcgacgggcgtatttacgtggggaatttttcgatcgacgtgcgcgagaaggatttggaggatttgttttataagtacggtcgtattcgcgagatcgagtttaagaatcggtacggtttcgtgtttttcgttttcgtgcgtttcgaggattttcggtgaggttttcgcgtttttgttttttttttttcggtgtttgaggttttcgttttttttgttgttttttttttta

SEQ ID NO: 20306 - DNA, 687 bp, Artificial Sequence
  chemically treated genomic DNA (Homo sapiens) CpG-island No: 20306
taaaaaaaaaaacaacaaaaaaaacgaaaacctcaaacaccgaaaaaaaaaaaacaaaaacgcgaaaacctcaccgaaaatcctcgaaacgcacgaaaacgaaaaacacgaaaccgtaccgattcttaaactcgatctcgcgaatacgaccgtacttataaaacaaatcctccaaatccttctcgcgcacgtcgatcgaaaaattccccacgtaaatacgcccgtcgccctcgccgccgcgctcgtccgcccaacccgacatccgcaccgcccgacgccgcgaacccgccgcaacccacgtcgccgccgccgcctcaacacgaatccccccgcaacgtccccgcgaactccgaaacgctcaaccgcactacattataaaaacgcgaaacgaaaacgaaaaaatcgacgaaaacaaaaaaaatcctcttaaaaaaaacgcgactacgaccattacgcgtacgcgcaaaccgacgccccctaaaaatacgaaaaaccttcgaacgctaacaaaaaaaacctaaaaccgaaccgtataaataccatccccgaacgcgattcgcgctcgactaaaacgctaaacaaataacttaaactcccgcgcctcaatttctctctataacgccgcctacctcacaaacttataaacactcactaacgtaaataacgcccaaaacctacgaaacgcaa

SEQ ID NO: 20307 - DNA, 687 bp, Artificial Sequence
  chemically treated genomic DNA (Homo sapiens) CpG-island No: 20307
tgggggaggggatagtagggaaggcgggggttttaggtatcgaggaggagagggtaggggcgcgggggttttatcgggggttttcgaagcgtacgaaggcgaagggtacgaggtcgtgtcggtttttgagttcgatttcgcggatgcggtcgtatttgtagaataggttttttaagtttttttcgcgtacgtcggtcggaaggttttttacgtagatgcgttcgtcgttttcgtcgtcgcgttcgttcgtttagttcgatattcgtatcgttcgacgtcgcgggttcgtcgtagtttacgtcgtcgtcgtcgttttagtacgggttttttcgtagcgttttcgcgggtttcgaggcgtttagtcgtattgtattgtgggaacgcggagcggaagcgaaggggtcggcggaggtaaaaggagtttttttaaagagaacgcggttgcgattattgcgcgtgcgcgtaggtcggcgttttttggaggtgcgaagggttttcgggcgttgatagggagagtttggggtcgggtcgtgtggatgttattttcgagcgcggttcgcgttcggttgaggcgttggataagtggtttgggttttcgcgttttagtttttttttgtggcgtcgtttattttatagatttgtgagtatttattgacgtgggtagcgtttagggtttgcggggcgtag

SEQ ID NO: 20308 - DNA, 687 bp, Artificial Sequence
  chemically treated genomic DNA (Homo sapiens) CpG-island No: 20308
ctacgccccgcaaaccctaaacgctacccacgtcaataaatactcacaaatctataaaataaacgacgccacaaaaaaaaactaaaacgcgaaaacccaaaccacttatccaacgcctcaaccgaacgcgaaccgcgctcgaaaataacatccacacgacccgaccccaaactctccctatcaacgcccgaaaacccttcgcacctccaaaaaacgccgacctacgcgcacgcgcaataatcgcaaccgcgttctctttaaaaaaactccttttacctccgccgaccccttcgcttccgctccgcgttcccacaatacaatacgactaaacgcctcgaaacccgcgaaaacgctacgaaaaaacccgtactaaaacgacgacgacgacgtaaactacgacgaacccgcgacgtcgaacgatacgaatatcgaactaaacgaacgaacgcgacgacgaaaacgacgaacgcatctacgtaaaaaaccttccgaccgacgtacgcgaaaaaaacttaaaaaacctattctacaaatacgaccgcatccgcgaaatcgaactcaaaaaccgacacgacctcgtacccttcgccttcgtacgcttcgaaaacccccgataaaacccccgcgcccctaccctctcctcctcgatacctaaaacccccgccttccctactatcccctccccca

SEQ ID NO: 20309 - DNA, 609 bp, Artificial Sequence
  chemically treated genomic DNA (Homo sapiens) CpG-island No: 20309
acgcgggcgcgttgtcggggttggagacgtttgaaattggagagcgtattcggattttatttttcgtttttagggagcgtgtgcgggtggaataattgtgtgtgagtgcgtgattttttgtatttcgagtggtagtttttagttaggttgagcgtttttaattcgcggtacgtatatttttttttttaaattattttttattcgtttttcgttgttatttttagttcgcgcgtggtttagttttgcgtttatggggttttaattttttttattttggatcgatgggggtagtttttagtttttttcgacgaggtcgaggtttcgttagtttttaaggagtcgagggtatcgattcggttgggggcggagggcggggagagaagattgcgattttgggattggttcggttgggtgtatgtggttttcggcgagtagttttcgttttcgtttcgtaatcgtcgtcgtatttttaggggagcgcggaggaggaatcgtttttttatttcgtggtttacgaaggggtgggggttaggagcggtttttttcgtttcgttcgtttttgttttgacggcgtagttcgtttttaggatagttattgttatggagatt

SEQ ID NO: 20310 - DNA, 609 bp, Artificial Sequence
  chemically treated genomic DNA (Homo sapiens) CpG-island No: 20310
aatctccataacaataactatcctaaaaacgaactacgccgtcaaaacaaaaacgaacgaaacgaaaaaaaccgctcctaacccccaccccttcgtaaaccacgaaataaaaaaacgattcctcctccgcgctcccctaaaaatacgacgacgattacgaaacgaaaacgaaaactactcgccgaaaaccacatacacccaaccgaaccaatcccaaaatcgcaatcttctctccccgccctccgcccccaaccgaatcgataccctcgactccttaaaaactaacgaaacctcgacctcgtcgaaaaaaactaaaaactacccccatcgatccaaaataaaaaaaattaaaaccccataaacgcaaaactaaaccacgcgcgaactaaaaataacaacgaaaaacgaataaaaaataatttaaaaaaaaaaatatacgtaccgcgaattaaaaacgctcaacctaactaaaaactaccactcgaaatacaaaaaatcacgcactcacacacaattattccacccgcacacgctccctaaaaacgaaaaataaaatccgaatacgctctccaatttcaaacgtctccaaccccgacaacgcgcccgcgt

SEQ ID NO: 20311 - DNA, 609 bp, Artificial Sequence
  chemically treated genomic DNA (Homo sapiens) CpG-island No: 20311
ggtttttatggtaatggttgttttgggagcggattgcgtcgttagggtagagacggacggggcgggggagatcgtttttgatttttattttttcgtgggttacgaagtaggggagcggtttttttttcgcgtttttttgggaatgcggcggcggttgcggggcgggggcgggggttgttcgtcgggggttatatgtatttaatcgggttaattttaaagtcgtagtttttttttttcgtttttcgtttttaatcgagtcggtgttttcggttttttagaaattggcgggatttcggtttcgtcggggaagattgaaagttgtttttatcggtttagggtgaaaggaattgggattttatgagcgtagaattggattacgcgcgagttaggggtggtagcgaaaggcggatgaggagtaatttgggggagggggtatacgtgtcgcggattgggggcgtttagtttggttgggaattgttattcgaagtgtagagaattacgtatttatatataattgttttattcgtatacgttttttgggaacgaggggtggggttcgagtgcgttttttaattttagacgtttttaatttcgataacgcgttcgcgt

SEQ ID NO: 20312 - DNA, 609 bp, Artificial Sequence
  chemically treated genomic DNA (Homo sapiens) CpG-island No: 20312
acgcgaacgcgttatcgaaattaaaaacgtctaaaattaaaaaacgcactcgaaccccacccctcgttcccaaaaaacgtatacgaataaaacaattatatataaatacgtaattctctacacttcgaataacaattcccaaccaaactaaacgcccccaatccgcgacacgtataccccctcccccaaattactcctcatccgcctttcgctaccacccctaactcgcgcgtaatccaattctacgctcataaaatcccaattcctttcaccctaaaccgataaaaacaactttcaatcttccccgacgaaaccgaaatcccgccaatttctaaaaaaccgaaaacaccgactcgattaaaaacgaaaaacgaaaaaaaaaaactacgactttaaaattaacccgattaaatacatataacccccgacgaacaacccccgcccccgccccgcaaccgccgccgcattcccaaaaaaacgcgaaaaaaaaaccgctcccctacttcgtaacccacgaaaaaataaaaatcaaaaacgatctcccccgccccgtccgtctctaccctaacgacgcaatccgctcccaaaacaaccattaccataaaaacc

SEQ ID NO: 20313 - DNA, 1383 bp, Artificial Sequence
  chemically treated genomic DNA (Homo sapiens) CpG-island No: 20313
  unsure (1195, 1229)
gttttggcgtggttcggttttcgcgagaggggaggaggcggaggaacggcgttagtagtttgaggagcggcgcgtttcgttagggttggaggtaggcgtgtacggcgggcgttatcgtcgttgcgggggagcggggggttgttttgggtgcgggtgagtggtacggcggttttaaattacgaggattgaggggcgtcggatatcgggaaagcggcgagagattcgggagagggtcgagtttttgttttcgacgtttggtggcgggttaggagcggagttcggagtagcgagtaattaatatttttaggcgggaggttcggggaaggagcggcgatacgttaggcgtgcggtttaggagcggcggggtagtcggagttttcgggatagcggagtaggaatttcgggattttcggttgtagtcgtttacgcgcggagggagaggtattagagcgcgggcggaggtcggagtttcgcggggcgcgagaataggggcgttttcgtgcggaattgttaggttgttcgggcgcggcggtcggggttatgtttaaatttaaggatttgtgttttcgagcggggacgcgtatttttttggaggttatgtaggcgggtaaagtgtatttggttcgtttcgtgttggatgcgttggatcgtagtattatcgattgtcgcgcggagtagggtcgtacgtcgtttatggtggtcgtggggttgtcggatttcgcgttgcgcgcgcgtttcgtgcggttgttgttcgagtagggtgttgtagtgaatttgcgagacgagcgcggtcgtatcgtatttagtttggcgtgcgagcgaggttatttggacgtcgtgtagttgttggtgtagtttagcggtgatttcgaggcggtcgattttgcgggtaatagttcggtgatgtgggcggcggtttgcggttacggggcggtgttcgagtttttggtgcggttttttcgtcgtttaggtttgcgtttcgatcgtattaatcgtgcggggtttatcgagttgtaattggtcgttttttcggggttacgggatttgtgtgtaggtttttatcgggttttggggtcgcgtcggcgtcgtcgttgtagttcggggttttaatttcgatagtttttttggtcgatcggttttcgcggttagtttcgagtatcgacgatttagttttcgtcgtttttcgcgggttttnttggcgcgttttgcgcgagcggcgggcggttatngcggcgaggtttgtttaacgggtaagaatttcgggtcgtatcgggcgtagggtagcgaacgggtcgagtttgggtcggagtatgaatttggttttaggtgcggtattcgaggaggaggttgtttcgtttgtcgggttggggtttttaatggttt

SEQ ID NO: 20314 - DNA, 1383 bp, Artificial Sequence
  chemically treated genomic DNA (Homo sapiens) CpG-island No: 20314
  unsure (155, 189)
aaaccattaaaaaccccaacccgacaaacgaaacaacctcctcctcgaataccgcacctaaaaccaaattcatactccgacccaaactcgacccgttcgctaccctacgcccgatacgacccgaaattcttacccgttaaacaaacctcgccgcnataaccgcccgccgctcgcgcaaaacgcgccaanaaaacccgcgaaaaacgacgaaaactaaatcgtcgatactcgaaactaaccgcgaaaaccgatcgaccaaaaaaactatcgaaattaaaaccccgaactacaacgacgacgccgacgcgaccccaaaacccgataaaaacctacacacaaatcccgtaaccccgaaaaaacgaccaattacaactcgataaaccccgcacgattaatacgatcgaaacgcaaacctaaacgacgaaaaaaccgcaccaaaaactcgaacaccgccccgtaaccgcaaaccgccgcccacatcaccgaactattacccgcaaaatcgaccgcctcgaaatcaccgctaaactacaccaacaactacacgacgtccaaataacctcgctcgcacgccaaactaaatacgatacgaccgcgctcgtctcgcaaattcactacaacaccctactcgaacaacaaccgcacgaaacgcgcgcgcaacgcgaaatccgacaaccccacgaccaccataaacgacgtacgaccctactccgcgcgacaatcgataatactacgatccaacgcatccaacacgaaacgaaccaaatacactttacccgcctacataacctccaaaaaaatacgcgtccccgctcgaaaacacaaatccttaaatttaaacataaccccgaccgccgcgcccgaacaacctaacaattccgcacgaaaacgcccctattctcgcgccccgcgaaactccgacctccgcccgcgctctaatacctctccctccgcgcgtaaacgactacaaccgaaaatcccgaaattcctactccgctatcccgaaaactccgactaccccgccgctcctaaaccgcacgcctaacgtatcgccgctccttccccgaacctcccgcctaaaaatattaattactcgctactccgaactccgctcctaacccgccaccaaacgtcgaaaacaaaaactcgaccctctcccgaatctctcgccgctttcccgatatccgacgcccctcaatcctcgtaatttaaaaccgccgtaccactcacccgcacccaaaacaaccccccgctcccccgcaacgacgataacgcccgccgtacacgcctacctccaaccctaacgaaacgcgccgctcctcaaactactaacgccgttcctccgcctcctcccctctcgcgaaaaccgaaccacgccaaaac

SEQ ID NO: 20315 - DNA, 1383 bp, Artificial Sequence
  chemically treated genomic DNA (Homo sapiens) CpG-island No: 20315
  unsure (155, 189)
gggttattaagggttttagttcggtaggcggggtagtttttttttcggatatcgtatttagagttaggtttatgtttcgatttaagttcggttcgttcgttgttttgcgttcggtgcggttcgaaatttttgttcgttgagtaagtttcgtcgtngtggtcgttcgtcgttcgcgtaaagcgcgttagnaaagttcgcgggaggcggcgggggttgggtcgtcgatgttcggggttgatcgcgggggtcggtcgattagggggattatcggagttggagtttcgggttgtagcggcggcgtcggcgcggttttagggttcggtgagggtttgtatataggtttcgtgatttcgaaaaaacggttagttgtagttcggtgagtttcgtacggttggtgcggtcgaggcgtaggtttaggcggcggaaggatcgtattaggaattcgagtatcgtttcgtggtcgtaggtcgtcgtttatattatcgggttgttgttcgtagagtcggtcgtttcggggttatcgttgaattgtattagtagttgtacggcgtttaggtggtttcgttcgtacgttaggttgagtgcggtgcggtcgcgttcgtttcgtaggtttattgtagtattttgttcgagtagtagtcgtacgaagcgcgcgcgtagcgcggggttcggtagttttacggttattatgagcggcgtacggttttgtttcgcgcggtagtcgatgatgttgcggtttagcgtatttaatacgaagcgggttaagtgtattttgttcgtttgtatggtttttaggaaggtgcgcgttttcgttcgggggtataggtttttgggtttgagtatggtttcggtcgtcgcgttcgggtagtttggtagtttcgtacgggggcgtttttgttttcgcgtttcgcggggtttcggttttcgttcgcgttttgatattttttttttcgcgcgtgggcggttgtagtcgagggtttcgaggtttttatttcgttgtttcggaggtttcgattgtttcgtcgtttttgggtcgtacgtttggcgtgtcgtcgtttttttttcgggtttttcgtttggaggtgttgattgttcgttatttcgggtttcgtttttggttcgttattagacgtcgggagtagagattcgattttttttcgagtttttcgtcgttttttcggtgttcggcgttttttagttttcgtggtttggagtcgtcgtgttatttattcgtatttagggtagtttttcgttttttcgtagcgacggtggcgttcgtcgtgtacgtttgtttttagttttggcggggcgcgtcgttttttaagttgttggcgtcgttttttcgtttttttttttttcgcgggggtcgggttacgttagggt

SEQ ID NO: 20316 - DNA, 1383 bp, Artificial Sequence
  chemically treated genomic DNA (Homo sapiens) CpG-island No: 20316
  unsure (1195, 1229)
accctaacgtaacccgacccccgcgaaaaaaaaaaaaacgaaaaaacgacgccaacaacttaaaaaacgacgcgccccgccaaaactaaaaacaaacgtacacgacgaacgccaccgtcgctacgaaaaaacgaaaaactaccctaaatacgaataaataacacgacgactccaaaccacgaaaactaaaaaacgccgaacaccgaaaaaacgacgaaaaactcgaaaaaaaatcgaatctctactcccgacgtctaataacgaaccaaaaacgaaacccgaaataacgaacaatcaacacctccaaacgaaaaacccgaaaaaaaaacgacgacacgccaaacgtacgacccaaaaacgacgaaacaatcgaaacctccgaaacaacgaaataaaaacctcgaaaccctcgactacaaccgcccacgcgcgaaaaaaaaaatatcaaaacgcgaacgaaaaccgaaaccccgcgaaacgcgaaaacaaaaacgcccccgtacgaaactaccaaactacccgaacgcgacgaccgaaaccatactcaaacccaaaaacctatacccccgaacgaaaacgcgcaccttcctaaaaaccatacaaacgaacaaaatacacttaacccgcttcgtattaaatacgctaaaccgcaacatcatcgactaccgcgcgaaacaaaaccgtacgccgctcataataaccgtaaaactaccgaaccccgcgctacgcgcgcgcttcgtacgactactactcgaacaaaatactacaataaacctacgaaacgaacgcgaccgcaccgcactcaacctaacgtacgaacgaaaccacctaaacgccgtacaactactaatacaattcaacgataaccccgaaacgaccgactctacgaacaacaacccgataatataaacgacgacctacgaccacgaaacgatactcgaattcctaatacgatccttccgccgcctaaacctacgcctcgaccgcaccaaccgtacgaaactcaccgaactacaactaaccgttttttcgaaatcacgaaacctatatacaaaccctcaccgaaccctaaaaccgcgccgacgccgccgctacaacccgaaactccaactccgataatccccctaatcgaccgacccccgcgatcaaccccgaacatcgacgacccaacccccgccgcctcccgcgaactttnctaacgcgctttacgcgaacgacgaacgaccacnacgacgaaacttactcaacgaacaaaaatttcgaaccgcaccgaacgcaaaacaacgaacgaaccgaacttaaatcgaaacataaacctaactctaaatacgatatccgaaaaaaaaactaccccgcctaccgaactaaaacccttaataaccc

SEQ ID NO: 20317 - DNA, 708 bp, Artificial Sequence
  chemically treated genomic DNA (Homo sapiens) CpG-island No: 20317
gttcgtcgtcgcgttttatttgaggttatattttgaaattaaaatcgcggttaggtgaagtcggcgttgtattaacgtgtaagcgcggttttttttcggcgttttcgcgtcgaggtttttttcgcggagggcgggttcggtttttacgattttttcgagcgtttttgggtttttcgtttcgtaggtgggtttttcggttgtttcggaggttcgcggcgagaggacgggttttttaatacgcgtagttttttttttgggtgtttatgtttcgaagttcgggattagtcggcgttaggcgaggggttttgggcgtaggtatttggagtttcgcgtttttggagcgggattttttttcgcgggcgttcgttcggcgcggggtattcgcgttttcgagagggcgtagtagtggggtttgcgagttggggtcgggtggtcgcgtcgggtcggagtgtggttggagaggggtcgtttcggaagcggtgttgcgtttaacgttttttttttttcgtaagtttcgtaaggagtttgtcgttttttgtatttgagttaggagtttagtcgggaggcgggcgcggagcggtttttagcgtttggacgttagttagtcgtaatattcgcgggaatatttgttatatttgttataatgtatttttgatttgttttcgcgtaggtttgcggaggattggtttagtaaggttttaggttttt

SEQ ID NO: 20318 - DNA, 708 bp, Artificial Sequence
  chemically treated genomic DNA (Homo sapiens) CpG-island No: 20318
aaaaacctaaaaccttactaaaccaatcctccgcaaacctacgcgaaaacaaatcaaaaatacattataacaaatataacaaatattcccgcgaatattacgactaactaacgtccaaacgctaaaaaccgctccgcgcccgcctcccgactaaactcctaactcaaatacaaaaaacgacaaactccttacgaaacttacgaaaaaaaaaaaacgttaaacgcaacaccgcttccgaaacgacccctctccaaccacactccgacccgacgcgaccacccgaccccaactcgcaaaccccactactacgccctctcgaaaacgcgaataccccgcgccgaacgaacgcccgcgaaaaaaaatcccgctccaaaaacgcgaaactccaaatacctacgcccaaaacccctcgcctaacgccgactaatcccgaacttcgaaacataaacacccaaaaaaaaaactacgcgtattaaaaaacccgtcctctcgccgcgaacctccgaaacaaccgaaaaacccacctacgaaacgaaaaacccaaaaacgctcgaaaaaatcgtaaaaaccgaacccgccctccgcgaaaaaaacctcgacgcgaaaacgccgaaaaaaaaccgcgcttacacgttaatacaacgccgacttcacctaaccgcgattttaatttcaaaatataacctcaaataaaacgcgacgacgaac

SEQ ID NO: 20319 - DNA, 708 bp, Artificial Sequence
  chemically treated genomic DNA (Homo sapiens) CpG-island No: 20319
gaagatttgggattttgttgggttagtttttcgtaggtttgcgcggaaatagattagaaatgtattatggtaaatgtagtaagtgttttcgcgggtgttgcgattggttgacgtttaggcgttgggaatcgtttcgcgttcgtttttcgattgaatttttggtttaggtgtaagaggcggtaggttttttgcggggtttacggggagaaggggacgttgggcgtagtatcgttttcggggcggtttttttttagttatatttcgattcggcgcggttattcggttttagttcgtaggttttattgttgcgttttttcggggacgcgaatgtttcgcgtcgggcgggcgttcgcggagggaggtttcgttttagggacgcggagttttagatgtttgcgtttaaggtttttcgtttggcgtcggttggtttcgaatttcggggtatgggtatttaggaagggggttgcgcgtgttgggaggttcgttttttcgtcgcgaattttcggggtagtcggggaatttatttgcggagcgggaagtttaggaacgttcgaagaggtcgtgggagtcgggttcgtttttcgcgggagggatttcggcgcgggaacgtcgaggaggggtcgcgtttatacgttggtgtagcgtcggttttatttgatcgcgattttgattttagggtgtggttttaggtaggacgcggcggcgaat

SEQ ID NO: 20320 - DNA, 708 bp, Artificial Sequence
  chemically treated genomic DNA (Homo sapiens) CpG-island No: 20320
attcgccgccgcgtcctacctaaaaccacaccctaaaatcaaaatcgcgatcaaataaaaccgacgctacaccaacgtataaacgcgacccctcctcgacgttcccgcgccgaaatccctcccgcgaaaaacgaacccgactcccacgacctcttcgaacgttcctaaacttcccgctccgcaaataaattccccgactaccccgaaaattcgcgacgaaaaaacgaacctcccaacacgcgcaacccccttcctaaatacccataccccgaaattcgaaaccaaccgacgccaaacgaaaaaccttaaacgcaaacatctaaaactccgcgtccctaaaacgaaacctccctccgcgaacgcccgcccgacgcgaaacattcgcgtccccgaaaaaacgcaacaataaaacctacgaactaaaaccgaataaccgcgccgaatcgaaatataactaaaaaaaaaccgccccgaaaacgatactacgcccaacgtccccttctccccgtaaaccccgcaaaaaacctaccgcctcttacacctaaaccaaaaattcaatcgaaaaacgaacgcgaaacgattcccaacgcctaaacgtcaaccaatcgcaacacccgcgaaaacacttactacatttaccataatacatttctaatctatttccgcgcaaacctacgaaaaactaacccaacaaaatcccaaatcttc

SEQ ID NO: 20321 - DNA, 555 bp, Artificial Sequence
  chemically treated genomic DNA (Homo sapiens) CpG-island No: 20321
gataaattcgtaatttatagtagtgacgtttttcgacgtttttcggttatatttttataggaacgttacggcgtatagggtattattgtgtttttattataattatataaagaaaatgtgggggttcggttttttagttacgcggcgagtaagtgtagcgcgggacgttcgagcgtcgggtttaggcgggttgtaggtgtcggtaagtgttggggtcgggtcgtcgcggaatttatttgtgttgggttttaggttttgcgtcgttttcgggttgtcgtcgttaattttttttaaatagttcgtcgttacgttttttcgtcggggtatcgttttcggtattcgtttcggaagtagttgcgggagggcgcggagtacgtcgggaagttcgcgggtcggtatcgggatagttttcgggcgtcgtggaatgtatacgtttcgtattcggatttttcggttagtttttcggttcgttgtttgatgttcgcggtagttaatgagttagtggtgtttgttttgtttcgttttcgttttttaggggaattaattttattgtag

SEQ ID NO: 20322 - DNA, 555 bp, Artificial Sequence
  chemically treated genomic DNA (Homo sapiens) CpG-island No: 20322
ctacaataaaattaattcccctaaaaaacgaaaacgaaacaaaacaaacaccactaactcattaactaccgcgaacatcaaacaacgaaccgaaaaactaaccgaaaaatccgaatacgaaacgtatacattccacgacgcccgaaaactatcccgataccgacccgcgaacttcccgacgtactccgcgccctcccgcaactacttccgaaacgaataccgaaaacgataccccgacgaaaaaacgtaacgacgaactatttaaaaaaaattaacgacgacaacccgaaaacgacgcaaaacctaaaacccaacacaaataaattccgcgacgacccgaccccaacacttaccgacacctacaacccgcctaaacccgacgctcgaacgtcccgcgctacacttactcgccgcgtaactaaaaaaccgaacccccacattttctttatataattataataaaaacacaataataccctatacgccgtaacgttcctataaaaatataaccgaaaaacgtcgaaaaacgtcactactataaattacgaatttatc

SEQ ID NO: 20323 - DNA, 555 bp, Artificial Sequence
  chemically treated genomic DNA (Homo sapiens) CpG-island No: 20323
ttgtaatgggattggtttttttggagggcggggacggagtaggataaatattattagtttattggttatcgcgggtattagatagcgagtcgggaagttgatcggaaggttcgggtgcgggacgtgtgtattttacggcgttcgggagttgtttcggtgtcgattcgcgagtttttcggcgtgtttcgcgttttttcgtaattattttcggggcgggtgtcgggggcggtgtttcggcgagggagcgtggcggcgagttgtttggggggggttggcgacggtagttcgagggcggcgtaaggtttgaggtttagtataggtgggtttcgcggcggttcggttttagtatttgtcggtatttgtagttcgtttagattcggcgttcgggcgtttcgcgttgtatttgttcgtcgcgtgattggaggatcgagtttttatattttttttatgtggttgtggtgggggtatagtaatgttttgtgcgtcgtagcgtttttgtggggatgtggtcggggggcgtcgggaagcgttattgttgtgagttacgggtttgtt

SEQ ID NO: 20324 - DNA, 555 bp, Artificial Sequence
  chemically treated genomic DNA (Homo sapiens) CpG-island No: 20324
aacaaacccgtaactcacaacaataacgcttcccgacgccccccgaccacatccccacaaaaacgctacgacgcacaaaacattactatacccccaccacaaccacataaaaaaaatataaaaactcgatcctccaatcacgcgacgaacaaatacaacgcgaaacgcccgaacgccgaatctaaacgaactacaaataccgacaaatactaaaaccgaaccgccgcgaaacccacctatactaaacctcaaaccttacgccgccctcgaactaccgtcgccaaccccccccaaacaactcgccgccacgctccctcgccgaaacaccgcccccgacacccgccccgaaaataattacgaaaaaacgcgaaacacgccgaaaaactcgcgaatcgacaccgaaacaactcccgaacgccgtaaaatacacacgtcccgcacccgaaccttccgatcaacttcccgactcgctatctaatacccgcgataaccaataaactaataatatttatcctactccgtccccgccctccaaaaaaaccaatcccattacaa

SEQ ID NO: 20325 - DNA, 1079 bp, Artificial Sequence
  chemically treated genomic DNA (Homo sapiens) CpG-island No: 20325
atttaggtttttgttagtattttcgtcgggattcgtttttgttcgtatataggtatttatataatgaggtcggttcgagttcgcggaggcggggttttgtttgaaagtcgcggtagtcgtatattgtaggcgtttaggacgtagtcgcgcggttttaggtggagttagggaaatgaggagggagggtcgttacgttcggcggggtagggcgcgggtcgttattttgaggatgttttgtagttgttttaatatagcgtgtatttcgtcgtgtagtagttagcggaatttttttttttgcgggatagattcggcggtcgcgttcggtttcgtcgtttcgtcggttcgttcgttggttcgcgcgttttattagtatcgttcgtttcgtcgtcgtcgttgttattacggtggttatggtcgtaggtcgtcgtcgagcgttttttttatcggtcgttgtttttgtttattaatttttttgttttcggtttttcggttttttcgttcgttttcggcgtttggtttcgtttttattcgattggcggagcgggtattatttcgtttttaggtcggtttcgtgttcgcgattggttggcgtttgtcggttcgtttcggttttcgaaatttgcgggagttttggaattagattggcggttgcgggagtgaggttcgtttcgtttggttagggacgcggtcggcggttgtacgagttaggtttgtttcggttggttagggacgcggtcggtattagtttggggcgttcgtttgggggcggagttttcggggcgtttttaggatatgatagggcgttttgttttattcgcgtttatttattggtcggtaggatagtttgttttcgttttttttttttattggttcgtttggttttattggtcgtggttttaattttgtcgcggatttcgtcgttatttttaagttcgttttatttcggacgcggaggtttcgaaaatttatttcggtttcgtcgttgttttttttttttatttatttcgtcgaggacgagggaagtaggatttttgcggtatagttgtgttattaagaagtgttttattttttttgtagta

SEQ ID NO: 20326 - DNA, 1079 bp, Artificial Sequence
  chemically treated genomic DNA (Homo sapiens) CpG-island No: 20326
tactacaaaaaaaataaaacacttcttaataacacaactataccgcaaaaatcctacttccctcgtcctcgacgaaataaataaaaaaaaaaaacaacgacgaaaccgaaataaattttcgaaacctccgcgtccgaaataaaacgaacttaaaaataacgacgaaatccgcgacaaaattaaaaccacgaccaataaaaccaaacgaaccaataaaaaaaaaaaacgaaaacaaactatcctaccgaccaataaataaacgcgaataaaacaaaacgccctatcatatcctaaaaacgccccgaaaactccgcccccaaacgaacgccccaaactaataccgaccgcgtccctaaccaaccgaaacaaacctaactcgtacaaccgccgaccgcgtccctaaccaaacgaaacgaacctcactcccgcaaccgccaatctaattccaaaactcccgcaaatttcgaaaaccgaaacgaaccgacaaacgccaaccaatcgcgaacacgaaaccgacctaaaaacgaaataatacccgctccgccaatcgaataaaaacgaaaccaaacgccgaaaacgaacgaaaaaaccgaaaaaccgaaaacaaaaaaattaataaacaaaaacaacgaccgataaaaaaaacgctcgacgacgacctacgaccataaccaccgtaataacaacgacgacgacgaaacgaacgatactaataaaacgcgcgaaccaacgaacgaaccgacgaaacgacgaaaccgaacgcgaccgccgaatctatcccgcaaaaaaaaaaattccgctaactactacacgacgaaatacacgctatattaaaacaactacaaaacatcctcaaaataacgacccgcgccctaccccgccgaacgtaacgaccctccctcctcatttccctaactccacctaaaaccgcgcgactacgtcctaaacgcctacaatatacgactaccgcgactttcaaacaaaaccccgcctccgcgaactcgaaccgacctcattatataaatacctatatacgaacaaaaacgaatcccgacgaaaatactaacaaaaacctaaat

SEQ ID NO: 20327 - DNA, 1079 bp, Artificial Sequence
  chemically treated genomic DNA (Homo sapiens) CpG-island No: 20327
tattgtaagaaaaataaaatattttttggtaatatagttgtgtcgtaggagttttgtttttttcgttttcggcgagatgggtgggaggagaaggtagcggcggggtcggggtgggttttcgggattttcgcgttcggggtgagacggatttgggagtggcggcgaggttcgcggtagggttggaattacgattaatggagttaagcgggttaatagggaggaggagcggggatagattgttttgtcggttaatgagtgagcgcgagtggagtagagcgttttattatattttgggggcgtttcgggagtttcgtttttaagcgggcgttttaggttggtgtcggtcgcgtttttggttagtcggagtaagtttgattcgtgtagtcgtcggtcgcgtttttggttaggcggagcgagttttattttcgtagtcgttagtttggttttagggttttcgtaggtttcgggggtcgaggcggatcgataggcgttagttaatcgcgagtacggagtcggtttgggggcggggtggtattcgtttcgttaatcgggtgggggcggagttagacgtcgggggcggacgggaggatcggaggatcgaggatagaaagattggtggataggagtagcggtcggtggggagggcgttcggcggcggtttgcggttatggttatcgtgatggtagcgacggcggcggagcgggcggtgttggtaaggcgcgcgggttagcgggcgggtcggcggggcggcggggtcgggcgcgatcgtcgggtttgtttcgtaggaggaggagtttcgttggttgttgtacgacgaggtgtacgttgtgttgaagtagttgtaggatatttttaaggtaacgattcgcgttttgtttcgtcgggcgtggcggttttttttttttatttttttggttttatttggggtcgcgcggttgcgttttgagcgtttatagtgtgcggttgtcgcggtttttaggtagggtttcgttttcgcgaattcgagtcgattttattatataagtatttgtgtgcgggtaggggcgggtttcgacgagggtgttagtaagggtttgagt

SEQ ID NO: 20328 - DNA, 1079 bp, Artificial Sequence
  chemically treated genomic DNA (Homo sapiens) CpG-island No: 20328
actcaaacccttactaacaccctcgtcgaaacccgcccctacccgcacacaaatacttatataataaaatcgactcgaattcgcgaaaacgaaaccctacctaaaaaccgcgacaaccgcacactataaacgctcaaaacgcaaccgcgcgaccccaaataaaaccaaaaaaataaaaaaaaaaaaccgccacgcccgacgaaacaaaacgcgaatcgttaccttaaaaatatcctacaactacttcaacacaacgtacacctcgtcgtacaacaaccaacgaaactcctcctcctacgaaacaaacccgacgatcgcgcccgaccccgccgccccgccgacccgcccgctaacccgcgcgccttaccaacaccgcccgctccgccgccgtcgctaccatcacgataaccataaccgcaaaccgccgccgaacgccctccccaccgaccgctactcctatccaccaatctttctatcctcgatcctccgatcctcccgtccgcccccgacgtctaactccgcccccacccgattaacgaaacgaataccaccccgcccccaaaccgactccgtactcgcgattaactaacgcctatcgatccgcctcgacccccgaaacctacgaaaaccctaaaaccaaactaacgactacgaaaataaaactcgctccgcctaaccaaaaacgcgaccgacgactacacgaatcaaacttactccgactaaccaaaaacgcgaccgacaccaacctaaaacgcccgcttaaaaacgaaactcccgaaacgcccccaaaatataataaaacgctctactccactcgcgctcactcattaaccgacaaaacaatctatccccgctcctcctccctattaacccgcttaactccattaatcgtaattccaaccctaccgcgaacctcgccgccactcccaaatccgtctcaccccgaacgcgaaaatcccgaaaacccaccccgaccccgccgctaccttctcctcccacccatctcgccgaaaacgaaaaaaacaaaactcctacgacacaactatattaccaaaaaatattttatttttcttacaata

SEQ ID NO: 20329 - DNA, 1681 bp, Artificial Sequence
  chemically treated genomic DNA (Homo sapiens) CpG-island No: 20329
ggttcgggcggttgtttgggatatagaagtagatcgcgggaggtatttaagcgtgtattggttattgttaagttatcggttgtaaaggagaagttttttcgtcgttttttcgcggggtaacgttagtagttcggtttagataatttcggttgagtcggtcgtataggtcggttgtatcgtaatttgggttttgatcgaatggtatcggttagatttcgtaggttcggttttcggcgtttttgttttttgggaagttttaataagatttcggggatcggtcgttcggggaagtttcgcggtatcggcggttttttttacgggggtcgttagtatttgggtttcgagtgtagattttattcggtcggtttcggggattaaagtcggtgttcgacgtggttattttcggtttcggtttttcgggattggattgtttttttcgtttggcgtcgttcgtaagcgtcggtatttttttttttttttttttcgcgatttggagcgtataaaaaggtagttttagggtcggtagcgaatttcgcgtttaggcgggtagtttttcggcgcgtttcggttggttcggtcgttcggatttattatattaagtcgtcgagtcgtagatttatagtcgttattttattatttaattatcgtcgacgtacgggtcgtcgggaatagtaagtcgtttcggcgtcgtttattggagtgggttcgattacgtgacgggggtcggttgttattggttacgtcgttattttgacgttatcgcgttcgtcggggattattggtcgatcgaggggtacgtgacgcgagcgtcgcggttttcgcgcgtcggagcgtagagattttcggtttttttttttttttttcggttcgtgataacgaagcgttcgcggtttgaggcggcggcggcggcgacggtgcgatcggttgagcgcgagagggagtcggtttcgcggttcgtttcgttttcgggttttggatttcgcgttttttttttttcggcgttttcgttacgttcgttggttcggcgcgggtttcggggttattttcgagttcgaggcgttggtcggtttcgtcgtagcgttagtgagttattttgacggagttcggcgcggtttggaatttagttttcgtcgggtttgggttttcgcgttcggtaattttgtttggtcgtaggtcgggaggtttcggtgttcgcgttcgttcgttttcgtcgttcgtgttttttggagcgtttttttcgacggtcgttttcggaggcgtcgtttgagcgcggggtttcgcgtcgtaagtttttttggggcgatcggaggttgttttttcgattttttggtgttttcggagtggttgcgcggacgtcgagttggtattttttcgtttttttttgggtcggcgcgcggcgcggtatattaggtttttttgggttcggggattcggttatgggtcgaggcgcgggtcgttcgttcgttgggagttacggtttagtagtcgatcgttagttgcgtcgtcgttcggggatcggtatgaggatcgtcgcggggggacgtttgcggttcgcgtcggcgttggggataaaggtgcgtgtcgttgtcgggttcgggttttttcgttagttttgttttagttttgtatttttgaaaaagttgtgataataggaagatagatgtcgggcgtagtttggata

SEQ ID NO: 20330 - DNA, 1681 bp, Artificial Sequence
  chemically treated genomic DNA (Homo sapiens) CpG-island No: 20330
tatccaaactacgcccgacatctatcttcctattatcacaactttttcaaaaatacaaaactaaaacaaaactaacgaaaaaacccgaacccgacaacgacacgcacctttatccccaacgccgacgcgaaccgcaaacgtccccccgcgacgatcctcataccgatccccgaacgacgacgcaactaacgatcgactactaaaccgtaactcccaacgaacgaacgacccgcgcctcgacccataaccgaatccccgaacccaaaaaaacctaatataccgcgccgcgcgccgacccaaaaaaaaacgaaaaaataccaactcgacgtccgcgcaaccactccgaaaacaccaaaaaatcgaaaaaacaacctccgatcgccccaaaaaaacttacgacgcgaaaccccgcgctcaaacgacgcctccgaaaacgaccgtcgaaaaaaacgctccaaaaaacacgaacgacgaaaacgaacgaacgcgaacaccgaaacctcccgacctacgaccaaacaaaattaccgaacgcgaaaacccaaacccgacgaaaactaaattccaaaccgcgccgaactccgtcaaaataactcactaacgctacgacgaaaccgaccaacgcctcgaactcgaaaataaccccgaaacccgcgccgaaccaacgaacgtaacgaaaacgccgaaaaaaaaaaaacgcgaaatccaaaacccgaaaacgaaacgaaccgcgaaaccgactccctctcgcgctcaaccgatcgcaccgtcgccgccgccgccgcctcaaaccgcgaacgcttcgttatcacgaaccgaaaaaaaaaaaaaaaaaccgaaaatctctacgctccgacgcgcgaaaaccgcgacgctcgcgtcacgtacccctcgatcgaccaataatccccgacgaacgcgataacgtcaaaataacgacgtaaccaataacaaccgacccccgtcacgtaatcgaacccactccaataaacgacgccgaaacgacttactattcccgacgacccgtacgtcgacgataattaaataataaaataacgactataaatctacgactcgacgacttaatataataaatccgaacgaccgaaccaaccgaaacgcgccgaaaaactacccgcctaaacgcgaaattcgctaccgaccctaaaactacctttttatacgctccaaatcgcgaaaaaaaaaaaaaaaaaaataccgacgcttacgaacgacgccaaacgaaaaaaacaatccaatcccgaaaaaccgaaaccgaaaataaccacgtcgaacaccgactttaatccccgaaaccgaccgaataaaatctacactcgaaacccaaatactaacgacccccgtaaaaaaaaccgccgataccgcgaaacttccccgaacgaccgatccccgaaatcttattaaaacttcccaaaaaacaaaaacgccgaaaaccgaacctacgaaatctaaccgataccattcgatcaaaacccaaattacgatacaaccgacctatacgaccgactcaaccgaaattatctaaaccgaactactaacgttaccccgcgaaaaaacgacgaaaaaacttctcctttacaaccgataacttaacaataaccaatacacgcttaaatacctcccgcgatctacttctatatcccaaacaaccgcccgaacc

SEQ ID NO: 20331 - DNA, 1681 bp, Artificial Sequence
  chemically treated genomic DNA (Homo sapiens) CpG-island No: 20331
tgtttaaattacgttcggtatttgtttttttgttgttataatttttttaaaagtgtaaaattagggtaaggttaacgagagagttcggattcgataacgatacgtatttttgtttttagcgtcgacgcgggtcgtagacgttttttcgcggcggtttttatgtcggttttcgggcggcggcgtagttagcggtcggttgttaagtcgtggtttttagcgggcgggcggttcgcgtttcggtttatggtcgggttttcgagtttaggggagtttggtgtgtcgcgtcgcgcgtcggtttaggaggaagcgaagaaatgttaattcgacgttcgcgtagttatttcggggatattagggggtcgggggagtagttttcggtcgttttaggagaatttgcggcgcgggatttcgcgtttagacggcgttttcgaaagcggtcgtcgggaggagcgttttaaagaatacgggcggcgggagcggacgggcgcggatatcggggtttttcggtttgcggttaagtagagttgtcgggcgcgggagtttagattcggcggaggttgagttttaggtcgcgtcgagtttcgttagggtagtttattggcgttgcgacggggtcgattagcgtttcgggttcgggaatggtttcggggttcgcgtcggattaacgggcgtaacggaagcgtcgagaggggaggggcgcggagtttaagattcgggggcggggcgagtcgcgaggtcggttttttttcgcgtttagtcggtcgtatcgtcgtcgtcgtcgtcgttttagatcgcgggcgtttcgttgttacgagtcgaagggagggggaaggagtcgggagtttttgcgtttcggcgcgcggagatcgcggcgttcgcgttacgtgtttttcggtcgattaatgattttcggcgggcgcggtgacgttagagtagcggcgtggttagtgatagtcggttttcgttacgtggtcgggtttattttaatgggcggcgtcggggcgatttgttgttttcggcggttcgtgcgtcggcggtggttgggtggtaagatggcggttgtgagtttgcggttcggcgatttggtgtggtgagttcgagcggtcgggttaatcgagacgcgtcggggagttattcgtttgggcgcggggttcgttgtcggttttggagttgtttttttatgcgttttaggtcgcggagagaggggaagagaaggtgtcggcgtttgcgagcggcgttaggcggaaggggtagtttagtttcgggggatcgaggtcgagggtggttacgtcgggtatcggttttgattttcgaggtcggtcgggtggggtttgtattcggggtttagatattggcggttttcgtgaagggagtcgtcggtgtcgcgaggttttttcggacgatcggttttcggggttttgttggggttttttagaaagtagaagcgtcggggatcggatttgcgagatttggtcggtgttattcggttaaagtttaggttgcgatgtagtcgatttgtgcggtcggtttagtcggggttgtttaaatcggattgttggcgttgtttcgcgaagaaacggcggggggattttttttttataatcgatggtttggtagtgattagtgtacgtttgggtgtttttcgcggtttgtttttgtgttttagataatcgttcgaatt

SEQ ID NO: 20332 - DNA, 1681 bp, Artificial Sequence
  chemically treated genomic DNA (Homo sapiens) CpG-island No: 20332
aattcgaacgattatctaaaacacaaaaacaaaccgcgaaaaacacccaaacgtacactaatcactaccaaaccatcgattataaaaaaaaaatccccccgccgtttcttcgcgaaacaacgccaacaatccgatttaaacaaccccgactaaaccgaccgcacaaatcgactacatcgcaacctaaactttaaccgaataacaccgaccaaatctcgcaaatccgatccccgacgcttctactttctaaaaaaccccaacaaaaccccgaaaaccgatcgtccgaaaaaacctcgcgacaccgacgactcccttcacgaaaaccgccaatatctaaaccccgaatacaaaccccacccgaccgacctcgaaaatcaaaaccgatacccgacgtaaccaccctcgacctcgatcccccgaaactaaactaccccttccgcctaacgccgctcgcaaacgccgacaccttctcttcccctctctccgcgacctaaaacgcataaaaaaacaactccaaaaccgacaacgaaccccgcgcccaaacgaataactccccgacgcgtctcgattaacccgaccgctcgaactcaccacaccaaatcgccgaaccgcaaactcacaaccgccatcttaccacccaaccaccgccgacgcacgaaccgccgaaaacaacaaatcgccccgacgccgcccattaaaataaacccgaccacgtaacgaaaaccgactatcactaaccacgccgctactctaacgtcaccgcgcccgccgaaaatcattaatcgaccgaaaaacacgtaacgcgaacgccgcgatctccgcgcgccgaaacgcaaaaactcccgactccttccccctcccttcgactcgtaacaacgaaacgcccgcgatctaaaacgacgacgacgacgacgatacgaccgactaaacgcgaaaaaaaaccgacctcgcgactcgccccgcccccgaatcttaaactccgcgcccctcccctctcgacgcttccgttacgcccgttaatccgacgcgaaccccgaaaccattcccgaacccgaaacgctaatcgaccccgtcgcaacgccaataaactaccctaacgaaactcgacgcgacctaaaactcaacctccgccgaatctaaactcccgcgcccgacaactctacttaaccgcaaaccgaaaaaccccgatatccgcgcccgtccgctcccgccgcccgtattctttaaaacgctcctcccgacgaccgctttcgaaaacgccgtctaaacgcgaaatcccgcgccgcaaattctcctaaaacgaccgaaaactactcccccgaccccctaatatccccgaaataactacgcgaacgtcgaattaacatttcttcgcttcctcctaaaccgacgcgcgacgcgacacaccaaactcccctaaactcgaaaacccgaccataaaccgaaacgcgaaccgcccgcccgctaaaaaccacgacttaacaaccgaccgctaactacgccgccgcccgaaaaccgacataaaaaccgccgcgaaaaaacgtctacgacccgcgtcgacgctaaaaacaaaaatacgtatcgttatcgaatccgaactctctcgttaaccttaccctaattttacacttttaaaaaaattataacaacaaaaaaacaaataccgaacgtaatttaaaca

SEQ ID NO: 20333 - DNA, 512 bp, Artificial Sequence
  chemically treated genomic DNA (Homo sapiens) CpG-island No: 20333
gttttgcgtcgtttttgtttttattttcgtttttattttcgttttttgcgcggtttcgacgttgttttgttttttttgtttagtttttagtttttttttttacgtattggtagtttttttcggcgttgtagattttttcgttaagtcgcgttcggttttagttgcgttttcgaggtcggtttcgcgggagtttgggggtcgcgcggcgtcgttttaggtacggaggcggtaggtttaggcgcgtttcggatattaggcgcgggaggcggtcggtattaacgcgagttaagaagcgagcgggagggacgttttagtttcgtttggcgtttttttttcgttatatcggtagtttttttcgttttttttttttatcggggcggggcggtcgcggtgtacggattcgcgttaaagatcgcgtcgttagttttcgtttgtaggtggagaacgttaggttttattattgcgttgtttatttaacgtaggggttgtatttaggaaaatgttgttttgtt

SEQ ID NO: 20334 - DNA, 512 bp, Artificial Sequence
  chemically treated genomic DNA (Homo sapiens) CpG-island No: 20334
aacaaaacaacattttcctaaatacaacccctacgttaaataaacaacgcaataataaaacctaacgttctccacctacaaacgaaaactaacgacgcgatctttaacgcgaatccgtacaccgcgaccgccccgccccgataaaaaaaaaaaacgaaaaaaactaccgatataacgaaaaaaaaacgccaaacgaaactaaaacgtccctcccgctcgcttcttaactcgcgttaataccgaccgcctcccgcgcctaatatccgaaacgcgcctaaacctaccgcctccgtacctaaaacgacgccgcgcgacccccaaactcccgcgaaaccgacctcgaaaacgcaactaaaaccgaacgcgacttaacgaaaaaatctacaacgccgaaaaaaactaccaatacgtaaaaaaaaaaactaaaaactaaacaaaaaaaacaaaacaacgtcgaaaccgcgcaaaaaacgaaaataaaaacgaaaataaaaacaaaaacgacgcaaaac

SEQ ID NO: 20335 - DNA, 512 bp, Artificial Sequence
  chemically treated genomic DNA (Homo sapiens) CpG-island No: 20335
aataggatagtatttttttgggtgtagtttttgcgttgggtgaatagcgtagtgataaagtttggcgttttttatttgtaggcggaggttgacggcgcggtttttggcgcgagttcgtgtatcgcggtcgtttcgtttcggtgggagagagggacggaggaagttgtcggtataacgggaggagagcgttaggcggagttggggcgtttttttcgttcgttttttgattcgcgttggtgtcggtcgtttttcgcgtttagtgttcgggacgcgtttgaatttgtcgttttcgtgtttggggcggcgtcgcgcggtttttaggttttcgcggggtcgatttcggagacgtagttggggtcgggcgcggtttggcgggagggtttgtagcgtcgagggaggttgttagtgcgtgaggaagagagttagagattggataggggagatagagtagcgtcggagtcgcgtaggggacgggagtgagagcgggagtgagagtaggaacgacgtagagt

SEQ ID NO: 20336 - DNA, 512 bp, Artificial Sequence
  chemically treated genomic DNA (Homo sapiens) CpG-island No: 20336
actctacgtcgttcctactctcactcccgctctcactcccgtcccctacgcgactccgacgctactctatctcccctatccaatctctaactctcttcctcacgcactaacaacctccctcgacgctacaaaccctcccgccaaaccgcgcccgaccccaactacgtctccgaaatcgaccccgcgaaaacctaaaaaccgcgcgacgccgccccaaacacgaaaacgacaaattcaaacgcgtcccgaacactaaacgcgaaaaacgaccgacaccaacgcgaatcaaaaaacgaacgaaaaaaacgccccaactccgcctaacgctctcctcccgttataccgacaacttcctccgtccctctctcccaccgaaacgaaacgaccgcgatacacgaactcgcgccaaaaaccgcgccgtcaacctccgcctacaaataaaaaacgccaaactttatcactacgctattcacccaacgcaaaaactacacccaaaaaaatactatcctatt

SEQ ID NO: 20337 - DNA, 570 bp, Artificial Sequence
  chemically treated genomic DNA (Homo sapiens) CpG-island No: 20337
cgcgtttcgattcgttgtttatttattcgttagatttttagttcgggttcggtggttcgtttaggagtcggcgagattttaaacggaggaattgtcgtttggtagttcgatttttatttttttttttagttttcgtttatattcgagcgtattacgttcgttggttcgagagcgtgtttcgggtttttcgttacgttcgttttttttttcgtcgtttaatttttttttcgatgaggtttttaattattttttatttcggaaggtttcgggcgaggtttcgggcgaggttttgggcgaggcgtagtttttttagcgttatttaatatttattcgtttttttagtttttagggacgtcggggtgttgttttgtagcgcgtaataaatattttcggaaaaggtatcgtttagtaatcgggagtttcgtttttagtaggagttaataggtcgtcggttgagagttgtgataatggattggttcgaagttttttcggtgtacgtaggagttttgttcgtttttcgttgtacgatgggagtgtagtttaagatagataatgggaattcgtaagaag

SEQ ID NO: 20338 - DNA, 570 bp, Artificial Sequence
  chemically treated genomic DNA (Homo sapiens) CpG-island No: 20338
cttcttacgaattcccattatctatcttaaactacactcccatcgtacaacgaaaaacgaacaaaactcctacgtacaccgaaaaaacttcgaaccaatccattatcacaactctcaaccgacgacctattaactcctactaaaaacgaaactcccgattactaaacgataccttttccgaaaatatttattacgcgctacaaaacaacaccccgacgtccctaaaaactaaaaaaacgaataaatattaaataacgctaaaaaaactacgcctcgcccaaaacctcgcccgaaacctcgcccgaaaccttccgaaataaaaaataattaaaaacctcatcgaaaaaaaaattaaacgacgaaaaaaaaaacgaacgtaacgaaaaacccgaaacacgctctcgaaccaacgaacgtaatacgctcgaatataaacgaaaactaaaaaaaaaaataaaaatcgaactaccaaacgacaattcctccgtttaaaatctcgccgactcctaaacgaaccaccgaacccgaactaaaaatctaacgaataaataaacaacgaatcgaaacgcg

SEQ ID NO: 20339 - DNA, 570 bp, Artificial Sequence
  chemically treated genomic DNA (Homo sapiens) CpG-island No: 20339
ttttttgcggatttttattatttattttaaattatatttttatcgtgtaacggaaaacggatagagtttttgcgtgtatcgaagggatttcgagttaatttattgttatagtttttagtcggcgatttattggtttttgttggaggcgggattttcggttgttaggcggtatttttttcggaagtgtttgttgcgcgttgtagggtaatatttcggcgtttttggaagttgggggagcgggtgggtgttgggtggcgttgggggagttgcgtttcgtttagagtttcgttcggagtttcgttcggagtttttcggggtgggggatagttgaggattttatcgagggaggggttgggcggcggggaagggagcgagcgtggcgggggattcgaggtacgttttcgagttaacgagcgtgatgcgttcgagtgtgggcggggattgagggaagaagtgaaaatcggattgttaggcgatagttttttcgtttgaaatttcgtcggtttttgagcgggttatcgggttcgggttgggggtttggcgggtgagtgagtagcgggtcgggacgcg

SEQ ID NO: 20340 - DNA, 570 bp, Artificial Sequence
  chemically treated genomic DNA (Homo sapiens) CpG-island No: 20340
cgcgtcccgacccgctactcactcacccgccaaacccccaacccgaacccgataacccgctcaaaaaccgacgaaatttcaaacgaaaaaactatcgcctaacaatccgattttcacttcttccctcaatccccgcccacactcgaacgcatcacgctcgttaactcgaaaacgtacctcgaatcccccgccacgctcgctcccttccccgccgcccaacccctccctcgataaaatcctcaactatcccccaccccgaaaaactccgaacgaaactccgaacgaaactctaaacgaaacgcaactcccccaacgccacccaacacccacccgctcccccaacttccaaaaacgccgaaatattaccctacaacgcgcaacaaacacttccgaaaaaaataccgcctaacaaccgaaaatcccgcctccaacaaaaaccaataaatcgccgactaaaaactataacaataaattaactcgaaatcccttcgatacacgcaaaaactctatccgttttccgttacacgataaaaatataatttaaaataaataataaaaatccgcaaaaaa

SEQ ID NO: 20341 - DNA, 512 bp, Artificial Sequence
  chemically treated genomic DNA (Homo sapiens) CpG-island No: 20341
gtttggtagggtcgtttatagcgttgtgcgtttcgggtttcgttttttattaggttaggtgacgttcgggtgttcgtcgttttttatcgcgtcgtatgttgagtattagcgaacgttaggttcgtgtacgtttaagcgcggtttttgttcggattttttatggtttttaggtttcgttttttgttttcggtttcggacgttcgcggttagtttttcgcgattttgagaattaagagttaagtatcgggtaggagttgtttattttggtttgggtttggcggcgttcgtagagtcggttttggatcgagcgaggaggaggggttaataatagaggcggagggcggttgttaggaaatagcgttttcgggaggaagtgatttttttatcgtcgggtttttcgggtatttaatatcgtttttcggtttaacgtgtcgttggggtaattatttagacgaaggaagtgatattatttttttgggtttttggagaggggtttattattggtcgtttgt

SEQ ID NO: 20342 - DNA, 512 bp, Artificial Sequence
  chemically treated genomic DNA (Homo sapiens) CpG-island No: 20342
acaaacgaccaataataaacccctctccaaaaacccaaaaaaataatatcacttccttcgtctaaataattaccccaacgacacgttaaaccgaaaaacgatattaaatacccgaaaaacccgacgataaaaaaatcacttcctcccgaaaacgctatttcctaacaaccgccctccgcctctattattaacccctcctcctcgctcgatccaaaaccgactctacgaacgccgccaaacccaaaccaaaataaacaactcctacccgatacttaactcttaattctcaaaatcgcgaaaaactaaccgcgaacgtccgaaaccgaaaacaaaaaacgaaacctaaaaaccataaaaaatccgaacaaaaaccgcgcttaaacgtacacgaacctaacgttcgctaatactcaacatacgacgcgataaaaaacgacgaacacccgaacgtcacctaacctaataaaaaacgaaacccgaaacgcacaacgctataaacgaccctaccaaac

SEQ ID NO: 20343 - DNA, 512 bp, Artificial Sequence
  chemically treated genomic DNA (Homo sapiens) CpG-island No: 20343
ataagcgattaataatgagtttttttttaaagatttaggaaggtgatgttatttttttcgtttgggtggttgttttagcgatacgttgggtcgaagagcggtgttgggtattcgagagattcggcggtggggaagttattttttttcgaagacgttgttttttagtaatcgtttttcgtttttgttattagtttttttttttcgttcggtttaggatcggttttgcgggcgtcgttaggtttagattaaggtgagtagtttttattcgatgtttggtttttgatttttagggtcgcggagaattggtcgcgggcgttcggggtcgggaatagaaagcgggatttgggggttatgggggattcggatagagatcgcgtttggacgtgtacgggtttggcgttcgttggtgtttagtatacggcgcggtgaggagcggcgagtattcggacgttatttggtttggtagggaacggaattcggggcgtataacgttatgggcggttttgttaggt

SEQ ID NO: 20344 - DNA, 512 bp, Artificial Sequence
  chemically treated genomic DNA (Homo sapiens) CpG-island No: 20344
acctaacaaaaccgcccataacgttatacgccccgaattccgttccctaccaaaccaaataacgtccgaatactcgccgctcctcaccgcgccgtatactaaacaccaacgaacgccaaacccgtacacgtccaaacgcgatctctatccgaatcccccataacccccaaatcccgctttctattcccgaccccgaacgcccgcgaccaattctccgcgaccctaaaaatcaaaaaccaaacatcgaataaaaactactcaccttaatctaaacctaacgacgcccgcaaaaccgatcctaaaccgaacgaaaaaaaaaaactaataacaaaaacgaaaaacgattactaaaaaacaacgtcttcgaaaaaaaataacttccccaccgccgaatctctcgaatacccaacaccgctcttcgacccaacgtatcgctaaaacaaccacccaaacgaaaaaaataacatcaccttcctaaatctttaaaaaaaaactcattattaatcgcttat

SEQ ID NO: 20345 - DNA, 594 bp, Artificial Sequence
  chemically treated genomic DNA (Homo sapiens) CpG-island No: 20345
acggtaatcgatgtggtagtcgcgtaatttttcgaaatttaaaggttagagggcgtgtttagtggttaggtgtaggcggtggggtaagtaacggtttttggtagtttcgttttttcgattcgtttttttcgcgtttgtttattttcgttttttcgggtttgtaattttttttcgggtcgttttttttttaaggcggagttcggcgtggatttcgcgagattcggtttggcgtcgtgatttttatgtgggagttttagttttataagtaaatattttgcgcggcgtagatatggtttttttttatttttgaggcggtgtttgcggtagcgttttagagtggtttcggtcgtttttttttaagtcggttagtcgggcgcgcgcgttgagagtcgtcgtcgtttgtcgggttcggcgttcggtcggttcggtgggcgcgttcgttcgtttgtcgttgagggttcgagtcgtagggaaagcggcgcgggtcgggcggggcgcggcgtttagagtttagggggagataaaggggatcggtttttttttaggcgttaagatgtggatataggttcgtattattgatggttttaagacgtg

SEQ ID NO: 20346 - DNA, 594 bp, Artificial Sequence
  chemically treated genomic DNA (Homo sapiens) CpG-island No: 20346
cacgtcttaaaaccatcaataatacgaacctatatccacatcttaacgcctaaaaaaaaaccgatcccctttatctccccctaaactctaaacgccgcgccccgcccgacccgcgccgctttccctacgactcgaaccctcaacgacaaacgaacgaacgcgcccaccgaaccgaccgaacgccgaacccgacaaacgacgacgactctcaacgcgcgcgcccgactaaccgacttaaaaaaaaacgaccgaaaccactctaaaacgctaccgcaaacaccgcctcaaaaataaaaaaaaaccatatctacgccgcgcaaaatatttacttataaaactaaaactcccacataaaaatcacgacgccaaaccgaatctcgcgaaatccacgccgaactccgccttaaaaaaaaaacgacccgaaaaaaaattacaaacccgaaaaaacgaaaataaacaaacgcgaaaaaaacgaatcgaaaaaacgaaactaccaaaaaccgttacttaccccaccgcctacacctaaccactaaacacgccctctaacctttaaatttcgaaaaattacgcgactaccacatcgattaccgt

SEQ ID NO: 20347 - DNA, 594 bp, Artificial Sequence
  chemically treated genomic DNA (Homo sapiens) CpG-island No: 20347
tacgttttggagttattaatggtgcgaatttgtatttatattttggcgtttagagaggaatcggttttttttgtttttttttgagttttgggcgtcgcgtttcgttcggttcgcgtcgttttttttgcggttcgggtttttagcggtaggcgggcgagcgcgtttatcggatcgatcggacgtcgggttcgataggcggcgacgatttttagcgcgcgcgttcgattagtcgatttgaggagagacgatcggaattattttgaggcgttgtcgtagatatcgttttaaagataggaagaggttatgtttgcgtcgcgtagagtgtttatttatagagttggagtttttatatggaggttacggcgttaagtcggatttcgcgagatttacgtcgggtttcgttttaaagaggaagcggttcgggagagggttatagattcgagggaacgaaaatgggtaggcgcggagagggcgggtcggaggggcggggttattaaaagtcgttatttgttttatcgtttgtatttggttattgggtacgttttttagtttttgggtttcggaagattgcgcggttattatatcggttgtcgt

SEQ ID NO: 20348 - DNA, 594 bp, Artificial Sequence
  chemically treated genomic DNA (Homo sapiens) CpG-island No: 20348
acgacaaccgatataataaccgcgcaatcttccgaaacccaaaaactaaaaaacgtacccaataaccaaatacaaacgataaaacaaataacgacttttaataaccccgcccctccgacccgccctctccgcgcctacccattttcgttccctcgaatctataaccctctcccgaaccgcttcctctttaaaacgaaacccgacgtaaatctcgcgaaatccgacttaacgccgtaacctccatataaaaactccaactctataaataaacactctacgcgacgcaaacataacctcttcctatctttaaaacgatatctacgacaacgcctcaaaataattccgatcgtctctcctcaaatcgactaatcgaacgcgcgcgctaaaaatcgtcgccgcctatcgaacccgacgtccgatcgatccgataaacgcgctcgcccgcctaccgctaaaaacccgaaccgcaaaaaaaacgacgcgaaccgaacgaaacgcgacgcccaaaactcaaaaaaaaacaaaaaaaaccgattcctctctaaacgccaaaatataaatacaaattcgcaccattaataactccaaaacgta

SEQ ID NO: 20349 - DNA, 520 bp, Artificial Sequence
  chemically treated genomic DNA (Homo sapiens) CpG-island No: 20349
  unsure (236, 482, 519)
tttcggaacgttttagaagataattcgggcgtttcgtttattttggttttttttggttttgtaacgcgattcgcgcgttcgcgtttcggcggattggagttatagaaagcgtatcgggcgtttttaaatgttaatgagagtttagggttcgattttcgagttaagtttttttatttttttttttcgttcgtttttttttttcgggtcggtgcgtcgtttagaaaaatttgtgcggngttatttttggggtagtaagatcgagcgaggagtttaagagagagcgcgtagtacgaagttcgagtcgttttcgtcgcgcgattttatttcggtcgtcgtcgtttgcgtcgcgagattcgtttcggttttttcgagagcgagtttcggtcgtcgcgattattagtcgcgttaatcgtcgattaatcgttatcgaggcgtttgagcgagagtagaggaggaggaggtatgagtgagggcggcgaggntattattattattattattattttttcgtagttcgang

SEQ ID NO: 20350 - DNA, 520 bp, Artificial Sequence
  chemically treated genomic DNA (Homo sapiens) CpG-island No: 20350
  unsure (2, 39, 285)
cntcgaactacgaaaaaataataataataataataatancctcgccgccctcactcatacctcctcctcctctactctcgctcaaacgcctcgataacgattaatcgacgattaacgcgactaataatcgcgacgaccgaaactcgctctcgaaaaaaccgaaacgaatctcgcgacgcaaacgacgacgaccgaaataaaatcgcgcgacgaaaacgactcgaacttcgtactacgcgctctctcttaaactcctcgctcgatcttactaccccaaaaataacnccgcacaaatttttctaaacgacgcaccgacccgaaaaaaaaaaacgaacgaaaaaaaaaaataaaaaaacttaactcgaaaatcgaaccctaaactctcattaacatttaaaaacgcccgatacgctttctataactccaatccgccgaaacgcgaacgcgcgaatcgcgttacaaaaccaaaaaaaaccaaaataaacgaaacgcccgaattatcttctaaaacgttccgaaa

SEQ ID NO: 20351 - DNA, 520 bp, Artificial Sequence
  chemically treated genomic DNA (Homo sapiens) CpG-island No: 20351
  unsure (2, 39, 285)
tntcgagttgcgggagggtggtggtggtggtggtggtgntttcgtcgtttttatttatgttttttttttttttgttttcgtttaggcgtttcggtggcggttggtcggcggttagcgcggttggtggtcgcggcggtcggggttcgttttcggggaggtcggggcggatttcgcggcgtaggcggcggcggtcgaggtggggtcgcgcggcggaggcggttcgagtttcgtgttgcgcgtttttttttgggtttttcgttcgattttattgttttaaaaatggtntcgtataagtttttttaggcggcgtatcggttcgggagggaagggcgggcgaggggagagggtggggaaatttggttcgggagtcgggttttggatttttattagtatttaaaggcgttcggtgcgttttttatggttttaattcgtcgggacgcgagcgcgcgggtcgcgttgtagaattaaggaaagttagggtgaacggggcgttcgggttgttttttggagcgtttcgagg

SEQ ID NO: 20352 - DNA, 520 bp, Artificial Sequence
  chemically treated genomic DNA (Homo sapiens) CpG-island No: 20352
  unsure (236, 482, 519)
cctcgaaacgctccaaaaaacaacccgaacgccccgttcaccctaactttccttaattctacaacgcgacccgcgcgctcgcgtcccgacgaattaaaaccataaaaaacgcaccgaacgcctttaaatactaataaaaatccaaaacccgactcccgaaccaaatttccccaccctctcccctcgcccgcccttccctcccgaaccgatacgccgcctaaaaaaacttatacganaccatttttaaaacaataaaatcgaacgaaaaacccaaaaaaaaacgcgcaacacgaaactcgaaccgcctccgccgcgcgaccccacctcgaccgccgccgcctacgccgcgaaatccgccccgacctccccgaaaacgaaccccgaccgccgcgaccaccaaccgcgctaaccgccgaccaaccgccaccgaaacgcctaaacgaaaacaaaaaaaaaaaaaacataaataaaaacgacgaaancaccaccaccaccaccaccaccctcccgcaactcgana

SEQ ID NO: 20353 - DNA, 536 bp, Artificial Sequence
  chemically treated genomic DNA (Homo sapiens) CpG-island No: 20353
cggaacgcgtcgttttcggaaacgtttagatttcggtagttaggtcgggaggtatcgtttatttttttagagcggagcgtggtttaggttgagtcgtcgtatcgtgggtttcgggtttcggtgacgagtagttgttcgttttcggtgagcgcgggagaaggggtttagtggggtagtgggcgacgcggagggtttaggtttaggtcgcggtcgcgtcgtattcgttggttgtttattttgttttgttttagggtgtaatatttgttttgcgtcgttcgtgtcgttttagttatcgttaaattcgggtagcgattcggggcgtttgtagcggtgtcgaggaagaggacgggaacggtgttacggtattggtgggtttttaataggtttgcggcgaacgttttttcggagcgttagggaagggtttcggcgtagggatgtcggagggattgggaaggaatgtgaaattaagtggggaatgtggagaacgggcggagagagaaggaaattttacggggttagggttataggatttttat

SEQ ID NO: 20354 - DNA, 536 bp, Artificial Sequence
  chemically treated genomic DNA (Homo sapiens) CpG-island No: 20354
ataaaaatcctataaccctaaccccgtaaaatttccttctctctccgcccgttctccacattccccacttaatttcacattccttcccaatccctccgacatccctacgccgaaacccttccctaacgctccgaaaaaacgttcgccgcaaacctattaaaaacccaccaataccgtaacaccgttcccgtcctcttcctcgacaccgctacaaacgccccgaatcgctacccgaatttaacgataactaaaacgacacgaacgacgcaaaacaaatattacaccctaaaacaaaacaaaataaacaaccaacgaatacgacgcgaccgcgacctaaacctaaaccctccgcgtcgcccactaccccactaaaccccttctcccgcgctcaccgaaaacgaacaactactcgtcaccgaaacccgaaacccacgatacgacgactcaacctaaaccacgctccgctctaaaaaaataaacgatacctcccgacctaactaccgaaatctaaacgtttccgaaaacgacgcgttccg

SEQ ID NO: 20355 - DNA, 536 bp, Artificial Sequence
  chemically treated genomic DNA (Homo sapiens) CpG-island No: 20355
gtaggaattttgtagttttagtttcgtgggattttttttttttttcgttcgttttttatattttttatttagttttatatttttttttaattttttcgatatttttgcgtcggggtttttttttagcgtttcgggaaagcgttcgtcgtaggtttgttaggggtttattaatatcgtaatatcgttttcgttttttttttcggtatcgttgtaaacgtttcgggtcgttattcggatttgacggtggttggagcggtacgggcgacgtaaggtaggtattgtattttggggtaaggtaaggtggataattagcggatgcggcgcggtcgcggtttgggtttgggtttttcgcgtcgtttattgttttattgggttttttttttcgcgtttatcggaggcgggtagttgttcgttatcgagattcgagatttacggtgcggcggtttaatttgggttacgtttcgttttagaggagtgggcggtgtttttcggtttagttgtcggggtttaggcgttttcgaggacggcgcgtttcg

SEQ ID NO: 20356 - DNA, 536 bp, Artificial Sequence
  chemically treated genomic DNA (Homo sapiens) CpG-island No: 20356
cgaaacgcgccgtcctcgaaaacgcctaaaccccgacaactaaaccgaaaaacaccgcccactcctctaaaacgaaacgtaacccaaattaaaccgccgcaccgtaaatctcgaatctcgataacgaacaactacccgcctccgataaacgcgaaaaaaaaaacccaataaaacaataaacgacgcgaaaaacccaaacccaaaccgcgaccgcgccgcatccgctaattatccaccttaccttaccccaaaatacaatacctaccttacgtcgcccgtaccgctccaaccaccgtcaaatccgaataacgacccgaaacgtttacaacgataccgaaaaaaaaaacgaaaacgatattacgatattaataaacccctaacaaacctacgacgaacgctttcccgaaacgctaaaaaaaaaccccgacgcaaaaatatcgaaaaaattaaaaaaaaatataaaactaaataaaaaatataaaaaacgaacgaaaaaaaaaaaaaatcccacgaaactaaaactacaaaattcctac

SEQ ID NO: 20357 - DNA, 562 bp, Artificial Sequence
  chemically treated genomic DNA (Homo sapiens) CpG-island No: 20357
gaaattttatttgtgcgtttagagttcggttatcgacggatacgttaggggagtcggtcgagtttagcgtcgcgttgtagggtcgggcgggtaggagttttttagcgtttcgggttttcggttcgcgtttatttcgtgtcgggagttgtatttgagtttcgcgtcgaagtttttcgggtttttttcgtttttgcgggttcgatcgttttttatggttttcgaggtcgttcgcgggttttataggcgtcgtttttgtcggcggtcggtttttatggttcgtagggcgcggggcgcggggcgtaggcggcgggatttcgggtaggtttagcgcgttcgatcggcggcggtgttttcgttttggcgcgtttttttttttttttttttttttttcggttgtagtttcgtttttatatttcggttcggtttacgtaggtagttttagggtgtggtttcggttcgtttagttcgtcgcgttcgtttgcgtatttgttcggtttatttgttcgttttcgtcggttttgggggaggttttttttttcggttttgggtttgaaggtgaggg

SEQ ID NO: 20358 - DNA, 562 bp, Artificial Sequence
  chemically treated genomic DNA (Homo sapiens) CpG-island No: 20358
ccctcaccttcaaacccaaaaccgaaaaaaaaaacctcccccaaaaccgacgaaaacgaacaaataaaccgaacaaatacgcaaacgaacgcgacgaactaaacgaaccgaaaccacaccctaaaactacctacgtaaaccgaaccgaaatataaaaacgaaactacaaccgaaaaaaaaaaaaaaaaaaaaaaaaacgcgccaaaacgaaaacaccgccgccgatcgaacgcgctaaacctacccgaaatcccgccgcctacgccccgcgccccgcgccctacgaaccataaaaaccgaccgccgacaaaaacgacgcctataaaacccgcgaacgacctcgaaaaccataaaaaacgatcgaacccgcaaaaacgaaaaaaacccgaaaaacttcgacgcgaaactcaaatacaactcccgacacgaaataaacgcgaaccgaaaacccgaaacgctaaaaaactcctacccgcccgaccctacaacgcgacgctaaactcgaccgactcccctaacgtatccgtcgataaccgaactctaaacgcacaaataaaatttc

SEQ ID NO: 20359 - DNA, 562 bp, Artificial Sequence
  chemically treated genomic DNA (Homo sapiens) CpG-island No: 20359
tttttatttttaggtttagagtcgaggggaggagttttttttagggtcggcgggggcgggtaggtgagtcgggtaggtgcgtaggcgagcgcggcgggttgggcgggtcgaggttatattttgaaattatttgcgtgggtcgggtcggagtgtgagagcggagttgtagtcggagaaagaggaagagggagagagagcgcgttagggcgagggtatcgtcgtcggtcgggcgcgttgggtttgttcggaatttcgtcgtttgcgtttcgcgtttcgcgttttgcgggttatgggagtcggtcgtcggtagggacgacgtttgtgagattcgcgagcggtttcggggattatggggagcgatcgggttcgtaagggcggagggggttcgaaggatttcggcgcgggatttaagtataattttcggtacgaggtgagcgcgggtcggggattcggggcgttgggaagtttttgttcgttcgattttgtagcgcggcgttgggttcggtcggtttttttggcgtgttcgtcggtggtcgagttttgggcgtataggtggaatttt

SEQ ID NO: 20360 - DNA, 562 bp, Artificial Sequence
  chemically treated genomic DNA (Homo sapiens) CpG-island No: 20360
aaaattccacctatacgcccaaaactcgaccaccgacgaacacgccaaaaaaaccgaccgaacccaacgccgcgctacaaaatcgaacgaacaaaaacttcccaacgccccgaatccccgacccgcgctcacctcgtaccgaaaattatacttaaatcccgcgccgaaatccttcgaaccccctccgcccttacgaacccgatcgctccccataatccccgaaaccgctcgcgaatctcacaaacgtcgtccctaccgacgaccgactcccataacccgcaaaacgcgaaacgcgaaacgcaaacgacgaaattccgaacaaacccaacgcgcccgaccgacgacgataccctcgccctaacgcgctctctctccctcttcctctttctccgactacaactccgctctcacactccgacccgacccacgcaaataatttcaaaatataacctcgacccgcccaacccgccgcgctcgcctacgcacctacccgactcacctacccgcccccgccgaccctaaaaaaaactcctcccctcgactctaaacctaaaaataaaaa

SEQ ID NO: 20361 - DNA, 732 bp, Artificial Sequence
  chemically treated genomic DNA (Homo sapiens) CpG-island No: 20361
agggcggcgattagcgtatcgattttttttttgtttgtcgcgattcgcggtggggttcgtacgaagtagtcgcggtacgcggggcggggcgacgttaaagtaatttcggagtaacgcgcggggtcgtcggttcgatatacgtttttttttgagcggtcgtcgtcgggcgtacgcgtttcgtagttcgaacgtcgttttatttttagagaaattaggcggcggttgtttgggtttttgtgtttgtagaaaaacgcgtaaatgcgtgaaagatttcgagaaaaatcggtttattttttttcgttatttatttaggtatagttagtagttcgtgtttttaaatattgttgatttttagtaggttcgtttttttttcggttcggtcgatttcgggttcggttttttttttcgcgtttgttttttttagaggcggtaagggtttggtattcgtaatttcgcgcggttttattttttgaatcgtagcgggagtgattttttttttgtttcgttgtttcggggtcgcgaaagttatagatatgttgtcgtcgttattattatcggtaagtttcgagcgtttcgggtgaacggtaaattgggggagagacgtcggtttttcgggttgaattatttcgggaatgcggggaggggggatgtttcggggttaagcggacgggcggcggggtaggtttgaaggaggtattttggttagggatgtttcgtttttgcgtattttgg

SEQ ID NO: 20362 - DNA, 732 bp, Artificial Sequence
  chemically treated genomic DNA (Homo sapiens) CpG-island No: 20362
ccaaaatacgcaaaaacgaaacatccctaaccaaaatacctccttcaaacctaccccgccgcccgtccgcttaaccccgaaacatcccccctccccgcattcccgaaataattcaacccgaaaaaccgacgtctctcccccaatttaccgttcacccgaaacgctcgaaacttaccgataataataacgacgacaacatatctataactttcgcgaccccgaaacaacgaaacaaaaaaaaaatcactcccgctacgattcaaaaaataaaaccgcgcgaaattacgaataccaaacccttaccgcctctaaaaaaaacaaacgcgaaaaaaaaaaccgaacccgaaatcgaccgaaccgaaaaaaaaacgaacctactaaaaatcaacaatatttaaaaacacgaactactaactatacctaaataaataacgaaaaaaaataaaccgatttttctcgaaatctttcacgcatttacgcgtttttctacaaacacaaaaacccaaacaaccgccgcctaatttctctaaaaataaaacgacgttcgaactacgaaacgcgtacgcccgacgacgaccgctcaaaaaaaaacgtatatcgaaccgacgaccccgcgcgttactccgaaattactttaacgtcgccccgccccgcgtaccgcgactacttcgtacgaaccccaccgcgaatcgcgacaaacaaaaaaaaaatcgatacgctaatcgccgccct

SEQ ID NO: 20363 - DNA, 732 bp, Artificial Sequence
  chemically treated genomic DNA (Homo sapiens) CpG-island No: 20363
ttagagtgcgtagaagcgagatatttttggttagagtgttttttttaggtttgtttcgtcgttcgttcgtttggtttcggagtatttttttttttcgtattttcgaggtggtttagttcgagaggtcggcgttttttttttagtttgtcgtttattcggagcgttcgggatttgtcgatagtggtgacggcggtaatatgtttgtggttttcgcggtttcgaggtagcgaggtaagggggagattattttcgttgcgatttagaaggtgaaatcgcgcggggttgcggatgttaggtttttatcgtttttgggagagatagacgcggggggaagggtcgggttcggagtcgatcgggtcgaggaggaggcgggtttgttgggaattagtagtgtttgggaatacggattgttggttgtgtttgagtgggtggcggaagagggtgaatcggtttttttcggagttttttacgtatttacgcgtttttttatagatataaaagtttaaatagtcgtcgtttgatttttttagggatggggcggcgttcgggttgcggggcgcgtgcgttcggcggcggtcgtttagggaagggcgtgtgtcggatcggcggtttcgcgcgttgtttcggagttattttggcgtcgtttcgtttcgcgtgtcgcggttgtttcgtgcggattttatcgcgggtcgcggtaggtagaggggaagtcggtgcgttggtcgtcgtttt

SEQ ID NO: 20364 - DNA, 732 bp, Artificial Sequence
  chemically treated genomic DNA (Homo sapiens) CpG-island No: 20364
aaaacgacgaccaacgcaccgacttcccctctacctaccgcgacccgcgataaaatccgcacgaaacaaccgcgacacgcgaaacgaaacgacgccaaaataactccgaaacaacgcgcgaaaccgccgatccgacacacgcccttccctaaacgaccgccgccgaacgcacgcgccccgcaacccgaacgccgccccatccctaaaaaaatcaaacgacgactatttaaacttttatatctataaaaaaacgcgtaaatacgtaaaaaactccgaaaaaaaccgattcaccctcttccgccacccactcaaacacaaccaacaatccgtattcccaaacactactaattcccaacaaacccgcctcctcctcgacccgatcgactccgaacccgacccttccccccgcgtctatctctcccaaaaacgataaaaacctaacatccgcaaccccgcgcgatttcaccttctaaatcgcaacgaaaataatctcccccttacctcgctacctcgaaaccgcgaaaaccacaaacatattaccgccgtcaccactatcgacaaatcccgaacgctccgaataaacgacaaactaaaaaaaaaacgccgacctctcgaactaaaccacctcgaaaatacgaaaaaaaaaaatactccgaaaccaaacgaacgaacgacgaaacaaacctaaaaaaaacactctaaccaaaaatatctcgcttctacgcactctaa

SEQ ID NO: 20365 - DNA, 795 bp, Artificial Sequence
  chemically treated genomic DNA (Homo sapiens) CpG-island No: 20365
cggcgttttttgggaaggaggtggttttagagtgggggtttcgcgggcgcgtagggattggggaggtttcgagggagtaagatatttaaattcgggcggtgggggggcgggcggtgttagacgtttaacgattatttttttttcggttcgcgtcgagttcggttatatttttttcgcgatattcgcgatcgttttttaggattggcggtttcgggtttcgtttttatttatttatttacgtaggggggcgttttgtttaggtaatttttttcgcgcgtttcgtcggggatcgggcggggacgggagaaggaaaagggtttttggtttcgggattagggtttcggagggtgtcgggcggggagcggaatagggaacgggttggtggcggttttaagcgggagggacggatcgatacgcggttttttggcggttttgcgattcgtcgatttgcggaatttcgtcgtcgtttttatagtttcgcggttatcgtcgattcgggtcggttttcggggcgtcgcgggtgttaaagggcgagtttacgcggatgttacggtcgtcgcgggtaaggatcgcgaggttgcggttttgtttcgaatttcggttgcgttggttacgtttttttacgcgcggggcggtcgtttcgttattcgtacggcgtttcgtagttgtttcggttggggattcgcggggtgtagtcgttcgggtcgtaggaggttgatgttagcgtttcgtcgtgatcgcgtttgttttttagataattttaaattattttatttttttttttgttatttttta

SEQ ID NO: 20366 - DNA, 795 bp, Artificial Sequence
  chemically treated genomic DNA (Homo sapiens) CpG-island No: 20366
taaaaaataacaaaaaaaaaaataaaataatttaaaattatctaaaaaacaaacgcgatcacgacgaaacgctaacatcaacctcctacgacccgaacgactacaccccgcgaatccccaaccgaaacaactacgaaacgccgtacgaataacgaaacgaccgccccgcgcgtaaaaaaacgtaaccaacgcaaccgaaattcgaaacaaaaccgcaacctcgcgatccttacccgcgacgaccgtaacatccgcgtaaactcgccctttaacacccgcgacgccccgaaaaccgacccgaatcgacgataaccgcgaaactataaaaacgacgacgaaattccgcaaatcgacgaatcgcaaaaccgccaaaaaaccgcgtatcgatccgtccctcccgcttaaaaccgccaccaacccgttccctattccgctccccgcccgacaccctccgaaaccctaatcccgaaaccaaaaacccttttccttctcccgtccccgcccgatccccgacgaaacgcgcgaaaaaaattacctaaacaaaacgcccccctacgtaaataaataaataaaaacgaaacccgaaaccgccaatcctaaaaaacgatcgcgaatatcgcgaaaaaaatataaccgaactcgacgcgaaccgaaaaaaaaataatcgttaaacgtctaacaccgcccgcccccccaccgcccgaatttaaatatcttactccctcgaaacctccccaatccctacgcgcccgcgaaacccccactctaaaaccacctccttcccaaaaaacgccg

SEQ ID NO: 20367 - DNA, 795 bp, Artificial Sequence
  chemically treated genomic DNA (Homo sapiens) CpG-island No: 20367
taaagggtaatagaggagaaaatggaatgatttaaaattatttggagaataggcgcggttacggcggaacgttgatattagttttttgcggttcgggcggttgtatttcgcgaatttttagtcggagtagttgcggggcgtcgtgcgggtggcggagcggtcgtttcgcgcgtggaggagcgtggttagcgtagtcgggattcggagtagggtcgtaatttcgcggtttttgttcgcggcgatcgtgatattcgcgtagattcgttttttaatattcgcgacgtttcggggatcggttcgggtcggcggtggtcgcggggttgtgagggcggcgacgaggtttcgtaggtcggcgagtcgtaaggtcgttagggggtcgcgtgtcggttcgtttttttcgtttggggtcgttattagttcgttttttgtttcgtttttcgttcggtatttttcggagttttggtttcggagttaggggtttttttttttttttcgttttcgttcggttttcgacggggcgcgcgggaggaattgtttgagtaggacgtttttttgcgtaggtgggtgggtgggagcggggttcggggtcgttagttttggggggcgatcgcgggtgtcgcggggagggtgtggtcgggttcggcgcgggtcgggagggaggtggtcgttgggcgtttgatatcgttcgtttttttatcgttcgggtttaaatgttttgttttttcggagtttttttagtttttgcgcgttcgcgggatttttattttggagttattttttttttagaagacgtcg

SEQ ID NO: 20368 - DNA, 795 bp, Artificial Sequence
  chemically treated genomic DNA (Homo sapiens) CpG-island No: 20368
cgacgtcttctaaaaaaaaaataactccaaaataaaaatcccgcgaacgcgcaaaaactaaaaaaactccgaaaaaacaaaacatttaaacccgaacgataaaaaaacgaacgatatcaaacgcccaacgaccacctccctcccgacccgcgccgaacccgaccacaccctccccgcgacacccgcgatcgccccccaaaactaacgaccccgaaccccgctcccacccacccacctacgcaaaaaaacgtcctactcaaacaattcctcccgcgcgccccgtcgaaaaccgaacgaaaacgaaaaaaaaaaaaaaacccctaactccgaaaccaaaactccgaaaaataccgaacgaaaaacgaaacaaaaaacgaactaataacgaccccaaacgaaaaaaacgaaccgacacgcgaccccctaacgaccttacgactcgccgacctacgaaacctcgtcgccgccctcacaaccccgcgaccaccgccgacccgaaccgatccccgaaacgtcgcgaatattaaaaaacgaatctacgcgaatatcacgatcgccgcgaacaaaaaccgcgaaattacgaccctactccgaatcccgactacgctaaccacgctcctccacgcgcgaaacgaccgctccgccacccgcacgacgccccgcaactactccgactaaaaattcgcgaaatacaaccgcccgaaccgcaaaaaactaatatcaacgttccgccgtaaccgcgcctattctccaaataattttaaatcattccattttctcctctattacccttta

SEQ ID NO: 20369 - DNA, 538 bp, Artificial Sequence
  chemically treated genomic DNA (Homo sapiens) CpG-island No: 20369
cgagttttcgaagagcgagttttcgtagtttttttcggcgcgttcgtatttggcgttgttcggagttcgttcgcgacgtatagggacgggaggttcggtttttacgggagaggttgcggattgcgggtttcgtttcgaggtcgggggagtgggagatattcggcgattttcgagaggcgattttggtagtggtggcggtggcggtggcggtggcggtttattcgttttttggaagtatcgtttcgtttgggtggcgcgcgcgtcggtttttttttttttttttcgtcgcggttcgtttcggttcgtaaatttaaatattttaggcgttcgttcgtcgcgcgtgattttcgtttcgtcgtcgtttagttttgcgcgttttgttcggcggttttcgttcggtcgtttcgggtttttggtttcgcggagcgatgttgttgttggttgtcgtttttttcgtggttttcgtgttgttgttgtatatggtgttttcgtttattagttttaagtttttcgttttgttcggggcgtatgtggtggt

SEQ ID NO: 20370 - DNA, 538 bp, Artificial Sequence
  chemically treated genomic DNA (Homo sapiens) CpG-island No: 20370
accaccacatacgccccgaacaaaacgaaaaacttaaaactaataaacgaaaacaccatatacaacaacaacacgaaaaccacgaaaaaaacgacaaccaacaacaacatcgctccgcgaaaccaaaaacccgaaacgaccgaacgaaaaccgccgaacaaaacgcgcaaaactaaacgacgacgaaacgaaaatcacgcgcgacgaacgaacgcctaaaatatttaaatttacgaaccgaaacgaaccgcgacgaaaaaaaaaaaaaaaaaccgacgcgcgcgccacccaaacgaaacgatacttccaaaaaacgaataaaccgccaccgccaccgccaccgccaccactaccaaaatcgcctctcgaaaatcgccgaatatctcccactcccccgacctcgaaacgaaacccgcaatccgcaacctctcccgtaaaaaccgaacctcccgtccctatacgtcgcgaacgaactccgaacaacgccaaatacgaacgcgccgaaaaaaactacgaaaactcgctcttcgaaaactcg

SEQ ID NO: 20371 - DNA, 538 bp, Artificial Sequence
  chemically treated genomic DNA (Homo sapiens) CpG-island No: 20371
attattatatgcgtttcgggtagggcgaggggtttggggttgatgagcggagatattatgtatagtagtagtacgaaggttacgaggaaggcggtagttagtagtagtatcgtttcgcggggttaggggttcggagcggtcgggcgggggtcgtcgggtaaggcgcgtagggttgggcggcggcgaggcgagaattacgcgcggcgggcgggcgtttggagtgtttgggtttgcgggtcggggcgggtcgcggcggaggggaagaggaggagtcggcgcgcgcgttatttaggcggggcggtgtttttagggggcgagtaggtcgttatcgttatcgttatcgttattattgttagaatcgtttttcgggggtcgtcgggtgttttttattttttcggtttcgggacggggttcgtagttcgtagtttttttcgtggaaatcgggtttttcgtttttgtgcgtcgcgagcgggtttcggatagcgttagatgcgagcgcgtcgggaagggttgcgaagattcgtttttcgggagttcg

SEQ ID NO: 20372 - DNA, 538 bp, Artificial Sequence
  chemically treated genomic DNA (Homo sapiens) CpG-island No: 20372
cgaactcccgaaaaacgaatcttcgcaacccttcccgacgcgctcgcatctaacgctatccgaaacccgctcgcgacgcacaaaaacgaaaaacccgatttccacgaaaaaaactacgaactacgaaccccgtcccgaaaccgaaaaaataaaaaacacccgacgacccccgaaaaacgattctaacaataataacgataacgataacgataacgacctactcgccccctaaaaacaccgccccgcctaaataacgcgcgcgccgactcctcctcttcccctccgccgcgacccgccccgacccgcaaacccaaacactccaaacgcccgcccgccgcgcgtaattctcgcctcgccgccgcccaaccctacgcgccttacccgacgacccccgcccgaccgctccgaacccctaaccccgcgaaacgatactactactaactaccgccttcctcgtaaccttcgtactactactatacataatatctccgctcatcaaccccaaacccctcgccctacccgaaacgcatataataat

SEQ ID NO: 20373 - DNA, 537 bp, Artificial Sequence
  chemically treated genomic DNA (Homo sapiens) CpG-island No: 20373
atagggtacgataatcgggagatagtgatgaagtatatttattataagttgtcgtagaggggttacgagtgggatgcgggagatgtgggcgtcgcgttttcgggggtcgttttcgtatcgggtattttttttttttagttcgggtatacgttttatttagtcgtatttcgggattcggtcgttaggatttcgtcgttgtagatttcggttgttttcggcgtcgtcgcggggtttgcgtttagttcggtgttatttgtggtttatttgatttttcgttaggtcggcgacgatttttttcgtcgttatcgtcgcgatttcgtcgagatgtttagttagttgtatttgacgttttttatcgcgcggggacgttttgttacggtggtggaggagttttttagggacggggtgaattgggggaggattgtggttttttttgagttcggtggggttatgtgtgtggagagcgttaatcgggagatgtcgtttttggtggataatatcgttttgtggatgattgagtatttgaatcggtatttg

SEQ ID NO: 20374 - DNA, 537 bp, Artificial Sequence
  chemically treated genomic DNA (Homo sapiens) CpG-island No: 20374
caaataccgattcaaatactcaatcatccacaaaacgatattatccaccaaaaacgacatctcccgattaacgctctccacacacataaccccaccgaactcaaaaaaaaccacaatcctcccccaattcaccccgtccctaaaaaactcctccaccaccgtaacaaaacgtccccgcgcgataaaaaacgtcaaatacaactaactaaacatctcgacgaaatcgcgacgataacgacgaaaaaaatcgtcgccgacctaacgaaaaatcaaataaaccacaaataacaccgaactaaacgcaaaccccgcgacgacgccgaaaacaaccgaaatctacaacgacgaaatcctaacgaccgaatcccgaaatacgactaaataaaacgtatacccgaactaaaaaaaaaaaatacccgatacgaaaacgacccccgaaaacgcgacgcccacatctcccgcatcccactcgtaacccctctacgacaacttataataaatatacttcatcactatctcccgattatcgtaccctat

SEQ ID NO: 20375 - DNA, 537 bp, Artificial Sequence
  chemically treated genomic DNA (Homo sapiens) CpG-island No: 20375
taggtgtcggtttaggtatttagttatttatagggcgatgttgtttattaggggcgatatttttcggttgacgttttttatatatatgattttatcgaatttaaagaaggttataatttttttttagtttatttcgtttttgaagagtttttttattatcgtggtaaagcgttttcgcgcggtgaagggcgttaggtgtagttggttggatatttcggcgaagtcgcggcggtagcggcgggagaagtcgtcgtcggtttggcggagggttaggtggattataggtggtatcgggttgagcgtaggtttcgcggcggcgtcgggggtagtcggggtttgtagcggcgaggttttggcgatcgggtttcgggatgcggttggatggggcgtgtgttcgggttgggaggagaagatgttcggtgcgggggcggttttcgggggcgcggcgtttatatttttcgtattttattcgtagtttttttgcgatagtttataatggatgtattttattattatttttcggttatcgtattttgt

SEQ ID NO: 20376 - DNA, 537 bp, Artificial Sequence
  chemically treated genomic DNA (Homo sapiens) CpG-island No: 20376
acaaaatacgataaccgaaaaataataataaaatacatccattataaactatcgcaaaaaaactacgaataaaatacgaaaaatataaacgccgcgcccccgaaaaccgcccccgcaccgaacatcttctcctcccaacccgaacacacgccccatccaaccgcatcccgaaacccgatcgccaaaacctcgccgctacaaaccccgactacccccgacgccgccgcgaaacctacgctcaacccgataccacctataatccacctaaccctccgccaaaccgacgacgacttctcccgccgctaccgccgcgacttcgccgaaatatccaaccaactacacctaacgcccttcaccgcgcgaaaacgctttaccacgataataaaaaaactcttcaaaaacgaaataaactaaaaaaaaattataaccttctttaaattcgataaaatcatatatataaaaaacgtcaaccgaaaaatatcgcccctaataaacaacatcgccctataaataactaaatacctaaaccgacaccta

SEQ ID NO: 20377 - DNA, 588 bp, Artificial Sequence
  chemically treated genomic DNA (Homo sapiens) CpG-island No: 20377
ggattttagcgaggagttcggtatagatagcgaatgatcgtagttagatagtcgtttttgttttttttcggttttgcggtaggattcgtcggtgtaggggttttttttcggattttacgcgtgtttggagggttttcgggttagggaagggggttttggagacgtttcgggcggtcgggcggtggcgggacgcgggttttttaagaaggagcgaggggcgcggttaggtaggggcgggtttagggcggattagcgttgcgtcggcgtcggttcgggagtcggatttggagcgcgaggcgtcggtgggggcggagggggttgcgcggcggaggttttcgtggtttcggacgttttttttagttagcggtcgtcgttcgtcgtcgtttgcgtttttagttttttcgtttcggcgggttcggtcgtcgttttcggtagtttatttgggaagcgtttatttgggacgcgtttatttgggacgcgttatttgttttcgggcgtttgggttttaggatgaaggatcgtttggagtagttgaaggtcgtgagtttcgtcgtaggcggggtgttgttaggaggggtgttgtatggg

SEQ ID NO: 20378 - DNA, 588 bp, Artificial Sequence
  chemically treated genomic DNA (Homo sapiens) CpG-island No: 20378
cccatacaacacccctcctaacaacaccccgcctacgacgaaactcacgaccttcaactactccaaacgatccttcatcctaaaacccaaacgcccgaaaacaaataacgcgtcccaaataaacgcgtcccaaataaacgcttcccaaataaactaccgaaaacgacgaccgaacccgccgaaacgaaaaaactaaaaacgcaaacgacgacgaacgacgaccgctaactaaaaaaaacgtccgaaaccacgaaaacctccgccgcgcaaccccctccgcccccaccgacgcctcgcgctccaaatccgactcccgaaccgacgccgacgcaacgctaatccgccctaaacccgcccctacctaaccgcgcccctcgctccttcttaaaaaacccgcgtcccgccaccgcccgaccgcccgaaacgtctccaaaacccccttccctaacccgaaaaccctccaaacacgcgtaaaatccgaaaaaaaacccctacaccgacgaatcctaccgcaaaaccgaaaaaaaacaaaaacgactatctaactacgatcattcgctatctataccgaactcctcgctaaaatcc

SEQ ID NO: 20379 - DNA, 588 bp, Artificial Sequence
  chemically treated genomic DNA (Homo sapiens) CpG-island No: 20379
tttatgtagtattttttttggtagtatttcgtttgcggcgaaatttacggtttttagttgttttagacggttttttattttgaagtttaggcgttcggaggtaggtagcgcgttttaggtgagcgcgttttaggtgagcgttttttaggtgagttgtcggaagcggcggtcgggttcgtcggggcgaaggagttggaggcgtaggcggcggcgggcggcggtcgttagttaggaggagcgttcgaggttacgggagttttcgtcgcgtagtttttttcgtttttatcggcgtttcgcgttttaaattcggttttcgggtcggcgtcggcgtagcgttgattcgttttggattcgtttttatttggtcgcgtttttcgtttttttttaaagggttcgcgtttcgttatcgttcggtcgttcggggcgtttttaaagtttttttttttaattcgagagttttttagatacgcgtggagttcggggagaggtttttgtatcggcggattttgtcgtagggtcgaggaagagtaagagcgattgtttggttgcggttattcgttgtttgtgtcgggtttttcgttaggattt

SEQ ID NO: 20380 - DNA, 588 bp, Artificial Sequence
  chemically treated genomic DNA (Homo sapiens) CpG-island No: 20380
aaatcctaacgaaaaacccgacacaaacaacgaataaccgcaaccaaacaatcgctcttactcttcctcgaccctacgacaaaatccgccgatacaaaaacctctccccgaactccacgcgtatctaaaaaactctcgaattaaaaaaaaaaactttaaaaacgccccgaacgaccgaacgataacgaaacgcgaaccctttaaaaaaaaacgaaaaacgcgaccaaataaaaacgaatccaaaacgaatcaacgctacgccgacgccgacccgaaaaccgaatttaaaacgcgaaacgccgataaaaacgaaaaaaactacgcgacgaaaactcccgtaacctcgaacgctcctcctaactaacgaccgccgcccgccgccgcctacgcctccaactccttcgccccgacgaacccgaccgccgcttccgacaactcacctaaaaaacgctcacctaaaacgcgctcacctaaaacgcgctacctacctccgaacgcctaaacttcaaaataaaaaaccgtctaaaacaactaaaaaccgtaaatttcgccgcaaacgaaatactaccaaaaaaaatactacataaa

SEQ ID NO: 20381 - DNA, 579 bp, Artificial Sequence
  chemically treated genomic DNA (Homo sapiens) CpG-island No: 20381
cgtagtgcggtgtagttttagtggaagttttggcgaatttggcgcgcgttgcggtgtatagagggttaattggagttggcgttgggtggagaggaggagacgcgtttttattggcggaaagttatttaggggcggggttagtgaattttcgtattttattttttttttcgtaatttttttttttattttgtattttttttttttcgattgtgaagcgggtcgggatttgttaggttagattaaatcggatttcgggggcgatgcggttgttgtttttgttgcggattgttttttgggtcgcgtttttcggtttttttttgcgcgggggttttagttttcgttacgtagtttattggaattttagtaattttaggtagtcgggtcgaatcgggcgagcgtatagttaagtttgcgcgttttcgggttttgcgcgcgttcgttattcgttttttgcgcggcgtcgtttgagtttggtcgcgcgtcggggtttttttgtttgagtcggcgggggaggggggaggggcgaggggcgaggcgcgtttttgggttttttatagttcgtatgtgttggggggtagg

SEQ ID NO: 20382 - DNA, 579 bp, Artificial Sequence
  chemically treated genomic DNA (Homo sapiens) CpG-island No: 20382
cctaccccccaacacatacgaactataaaaaacccaaaaacgcgcctcgcccctcgcccctcccccctcccccgccgactcaaacaaaaaaaccccgacgcgcgaccaaactcaaacgacgccgcgcaaaaaacgaataacgaacgcgcgcaaaacccgaaaacgcgcaaacttaactatacgctcgcccgattcgacccgactacctaaaattactaaaattccaataaactacgtaacgaaaactaaaacccccgcgcaaaaaaaaaccgaaaaacgcgacccaaaaaacaatccgcaacaaaaacaacaaccgcatcgcccccgaaatccgatttaatctaacctaacaaatcccgacccgcttcacaatcgaaaaaaaaaaaatacaaaataaaaaaaaaaattacgaaaaaaaaaataaaatacgaaaattcactaaccccgcccctaaataactttccgccaataaaaacgcgtctcctcctctccacccaacgccaactccaattaaccctctatacaccgcaacgcgcgccaaattcgccaaaacttccactaaaactacaccgcactacg

SEQ ID NO: 20383 - DNA, 579 bp, Artificial Sequence
  chemically treated genomic DNA (Homo sapiens) CpG-island No: 20383
tttgttttttaatatatgcgggttgtgggagatttaggggcgcgtttcgtttttcgttttttttttttttttcgtcggtttaaataaaggagtttcggcgcgcggttaggtttaggcggcgtcgcgtaaagagcgggtggcgggcgcgcgtaaagttcgggagcgcgtagatttggttgtgcgttcgttcggttcggttcggttatttggggttattggagttttagtagattacgtggcggaggttggagttttcgcgtagaggggagtcgaggaacgcggtttagaggatagttcgtagtaggggtagtagtcgtatcgttttcgaggttcggtttggtttggtttggtaggtttcggttcgttttatagtcgaggagagaaaggtataaagtgaagagggaagttgcggaaaggggagtggggtacggagatttattgatttcgtttttgaataatttttcgttaatgggagcgcgtttttttttttttatttagcgttaattttagttaattttttgtgtatcgtagcgcgcgttaggttcgttaaagtttttattgaggttgtatcgtattgcg

SEQ ID NO: 20384 - DNA, 579 bp, Artificial Sequence
  chemically treated genomic DNA (Homo sapiens) CpG-island No: 20384
cgcaatacgatacaacctcaataaaaactttaacgaacctaacgcgcgctacgatacacaaaaaattaactaaaattaacgctaaataaaaaaaaaaaaacgcgctcccattaacgaaaaattattcaaaaacgaaatcaataaatctccgtaccccactcccctttccgcaacttccctcttcactttatacctttctctcctcgactataaaacgaaccgaaacctaccaaaccaaaccaaaccgaacctcgaaaacgatacgactactacccctactacgaactatcctctaaaccgcgttcctcgactcccctctacgcgaaaactccaacctccgccacgtaatctactaaaactccaataaccccaaataaccgaaccgaaccgaacgaacgcacaaccaaatctacgcgctcccgaactttacgcgcgcccgccacccgctctttacgcgacgccgcctaaacctaaccgcgcgccgaaactcctttatttaaaccgacgaaaaaaaaaaaaaaaacgaaaaacgaaacgcgcccctaaatctcccacaacccgcatatattaaaaaacaaa

SEQ ID NO: 20385 - DNA, 511 bp, Artificial Sequence
  chemically treated genomic DNA (Homo sapiens) CpG-island No: 20385
gttatatcgtgtaggtgaacgtgaacgattatttggatatttattgttcgtattataatagttcgggggtgggtttcggggcgggatcggggttcggaggcggggtagagtagtacgtgttgtatatggtgagtcgtaacggttatcgtatttgtaacgttagttagggttttaagcgttgggagtgtaatcggtcgtacgtttcgtatagttttattaagttttcggagaagttttagcgttatagcgttttttttttgggttacgagttttacgtcggttacgagtattattatatttgtgagtgacggcggtcgggcgggcgggtttgaacgcgagagtttgagtgatagtcggggggtggagtttttaggtttcggggcggggtcggcgcggcgggcgttaggtttcgcggttgagattagggaggaggcgtgggtacgggacgtttgaggggtttagtttagacgaggtcgtggggttaagagaggagtttggtgatagttttaag

SEQ ID NO: 20386 - DNA, 511 bp, Artificial Sequence
  chemically treated genomic DNA (Homo sapiens) CpG-island No: 20386
cttaaaactatcaccaaactcctctcttaaccccacgacctcgtctaaactaaacccctcaaacgtcccgtacccacgcctcctccctaatctcaaccgcgaaacctaacgcccgccgcgccgaccccgccccgaaacctaaaaactccaccccccgactatcactcaaactctcgcgttcaaacccgcccgcccgaccgccgtcactcacaaatataataatactcgtaaccgacgtaaaactcgtaacccaaaaaaaaaacgctataacgctaaaacttctccgaaaacttaataaaactatacgaaacgtacgaccgattacactcccaacgcttaaaaccctaactaacgttacaaatacgataaccgttacgactcaccatatacaacacgtactactctaccccgcctccgaaccccgatcccgccccgaaacccacccccgaactattataatacgaacaataaatatccaaataatcgttcacgttcacctacacgatataac

SEQ ID NO: 20387 - DNA, 511 bp, Artificial Sequence
  chemically treated genomic DNA (Homo sapiens) CpG-island No: 20387
tttgggattgttattaaattttttttttggttttacgatttcgtttgagttgaattttttaggcgtttcgtgtttacgttttttttttggttttagtcgcgagatttggcgttcgtcgcgtcggtttcgtttcggagtttaggggttttatttttcggttgttatttagattttcgcgtttagattcgttcgttcggtcgtcgttatttatagatgtagtagtattcgtggtcggcgtggaattcgtagtttagagagaaggcgttgtagcgttggaattttttcgagaatttgatggggttgtgcggggcgtgcggtcggttgtatttttagcgtttgaagttttggttggcgttgtaggtgcggtagtcgttgcggtttattatgtatagtacgtattgttttgtttcgttttcgggtttcggtttcgtttcggggtttattttcgagttgttgtagtgcgggtagtaaatatttagatagtcgtttacgtttatttgtacggtgtagt

SEQ ID NO: 20388 - DNA, 511 bp, Artificial Sequence
  chemically treated genomic DNA (Homo sapiens) CpG-island No: 20388
actacaccgtacaaataaacgtaaacgactatctaaatatttactacccgcactacaacaactcgaaaataaaccccgaaacgaaaccgaaacccgaaaacgaaacaaaacaatacgtactatacataataaaccgcaacgactaccgcacctacaacgccaaccaaaacttcaaacgctaaaaatacaaccgaccgcacgccccgcacaaccccatcaaattctcgaaaaaattccaacgctacaacgccttctctctaaactacgaattccacgccgaccacgaatactactacatctataaataacgacgaccgaacgaacgaatctaaacgcgaaaatctaaataacaaccgaaaaataaaacccctaaactccgaaacgaaaccgacgcgacgaacgccaaatctcgcgactaaaaccaaaaaaaaaacgtaaacacgaaacgcctaaaaaattcaactcaaacgaaatcgtaaaaccaaaaaaaaaatttaataacaatcccaaa

SEQ ID NO: 20389 - DNA, 668 bp, Artificial Sequence
  chemically treated genomic DNA (Homo sapiens) CpG-island No: 20389
  unsure (566, 629, 636)
ttcgtttcgttttcgggttggcgttaacgtttattttttaatagcgttattcgttggcggatattttgtatcgcggttgttcgtttttgcgtcgttggttgtgtcggcgttgcgtggtgtgttaggtattcgagacgttcgagttttacgtgtgtcggacgttggattgcgaggtcgtgtattgttggtcgtgttgggacgatatgcggtagcggtgttcggtttgtacgtttcgcgaagagtttttttttttcgtttttagtgatagtaacgacgatattgtttacgcggggtgaagaggcgttttgttcgttttttcgtatcgtttttttcggttaataaaatgttttgtacgttttacgtgggtcggggattggggtgagtcgcgtattgtttcgtttgtagtcgggaaagtttgttcgttcgattttttcgagttaggtcgcgtataggaggtagggaggtcgcgaagttattagggaggggttcggatttggcgtcgggtgaaggcgcgtcgtttaagtcggttcggatcgggtatcggtttttatttcgtatagttgcgnggaaagcggtagcgttgaatagcgcgggcgtagtgggcggtgtttcgttttcgaggtatcggngcgtagnggggcggtttttgtcgggggcggaatttggtt

SEQ ID NO: 20390 - DNA, 668 bp, Artificial Sequence
  chemically treated genomic DNA (Homo sapiens) CpG-island No: 20390
  unsure (33, 40, 103)
aaccaaattccgcccccgacaaaaaccgccccnctacgcnccgatacctcgaaaacgaaacaccgcccactacgcccgcgctattcaacgctaccgctttccncgcaactatacgaaataaaaaccgatacccgatccgaaccgacttaaacgacgcgccttcacccgacgccaaatccgaacccctccctaataacttcgcgacctccctacctcctatacgcgacctaactcgaaaaaatcgaacgaacaaactttcccgactacaaacgaaacaatacgcgactcaccccaatccccgacccacgtaaaacgtacaaaacattttattaaccgaaaaaaacgatacgaaaaaacgaacaaaacgcctcttcaccccgcgtaaacaatatcgtcgttactatcactaaaaacgaaaaaaaaaaactcttcgcgaaacgtacaaaccgaacaccgctaccgcatatcgtcccaacacgaccaacaatacacgacctcgcaatccaacgtccgacacacgtaaaactcgaacgtctcgaatacctaacacaccacgcaacgccgacacaaccaacgacgcaaaaacgaacaaccgcgatacaaaatatccgccaacgaataacgctattaaaaaataaacgttaacgccaacccgaaaacgaaacgaa

SEQ ID NO: 20391 - DNA, 668 bp, Artificial Sequence
  chemically treated genomic DNA (Homo sapiens) CpG-island No: 20391
  unsure (33, 40, 103)
agttaagtttcgttttcggtaaaggtcgttttnttgcgtntcggtgtttcgggagcgggatatcgtttattacgttcgcgttgtttagcgttatcgttttttncgtaattgtgcggaatgggagtcggtgttcggttcggatcggtttgggcggcgcgtttttattcggcgttaagttcggatttttttttagtagtttcgcggtttttttgttttttgtgcgcggtttggttcggagaggtcgggcgggtaggttttttcgattgtaggcgaggtagtgcgcggtttattttagttttcgatttacgtgaagcgtatagggtattttattaatcgggaaggacggtgcggaagagcgagtaggacgtttttttatttcgcgtaggtagtgtcgtcgttgttgttattaaaggcggaggaagagagtttttcgcggggcgtgtagatcgggtatcgttgtcgtatgtcgttttagtacgattagtagtatacggtttcgtagtttagcgttcggtatacgtaggattcgggcgtttcgggtgtttggtatattacgtagcgtcggtatagttagcggcgtaggagcgggtagtcgcggtgtaggatattcgttagcgggtggcgttgttgggaggtgggcgttagcgttagttcgggagcgaggcggg

SEQ ID NO: 20392 - DNA, 668 bp, Artificial Sequence
  chemically treated genomic DNA (Homo sapiens) CpG-island No: 20392
  unsure (566, 629, 636)
cccgcctcgctcccgaactaacgctaacgcccacctcccaacaacgccacccgctaacgaatatcctacaccgcgactacccgctcctacgccgctaactataccgacgctacgtaatataccaaacacccgaaacgcccgaatcctacgtataccgaacgctaaactacgaaaccgtatactactaatcgtactaaaacgacatacgacaacgatacccgatctacacgccccgcgaaaaactctcttcctccgcctttaataacaacaacgacgacactacctacgcgaaataaaaaaacgtcctactcgctcttccgcaccgtccttcccgattaataaaataccctatacgcttcacgtaaatcgaaaactaaaataaaccgcgcactacctcgcctacaatcgaaaaaacctacccgcccgacctctccgaaccaaaccgcgcacaaaaaacaaaaaaaccgcgaaactactaaaaaaaaatccgaacttaacgccgaataaaaacgcgccgcccaaaccgatccgaaccgaacaccgactcccattccgcacaattacgnaaaaaacgataacgctaaacaacgcgaacgtaataaacgatatcccgctcccgaaacaccganacgcaanaaaacgacctttaccgaaaacgaaacttaact

SEQ ID NO: 20393 - DNA, 703 bp, Artificial Sequence
  chemically treated genomic DNA (Homo sapiens) CpG-island No: 20393
tgtcgattttagtgttatttttcgcgtcgttaatacgcgggaaattttaaatgttggttttcgggagatgataggtttagtttcgtacgtttttcgttattagttttatcgcgtcgaggggggttttaatttaggttttggagaagcgtcgggtcggatttttggttgcggagtttcgggcgagtgagtgggcgggcgtttatcgcgatgatattgacgaaggtggttttgttcgagtattgtagttttacgagcgttagttttattttttttttttagaagagcgaacggaattagtttagtaggcgggagatgagcgttagtatgatggcggtcgggagcgagaacggacgggaggacggacgagcggcggcgtcgacgatttttatacgagcgggttttcgttcggattttttaacggttttttggtgtttcggcgcgatacgggcggatatcggcgggcggtagtagttagatttaggaagtcgagcggattatatgattcgttttattttttacgttcgtttcggcgtcgtcgtcggtatttacggtaagagcggcgcggttaattcggttaggttcgttcgtcgttggtatcgttatttggtgggtatgtttcgtagtatagcgtattttcgggtttttttgaggttttttttatatttatttattgttggtttattcgttatttatttatttatat

SEQ ID NO: 20394 - DNA, 703 bp, Artificial Sequence
  chemically treated genomic DNA (Homo sapiens) CpG-island No: 20394
atataaataaataaataacgaataaaccaacaataaataaatataaaaaaaacctcaaaaaaacccgaaaatacgctatactacgaaacatacccaccaaataacgataccaacgacgaacgaacctaaccgaattaaccgcgccgctcttaccgtaaataccgacgacgacgccgaaacgaacgtaaaaaataaaacgaatcatataatccgctcgacttcctaaatctaactactaccgcccgccgatatccgcccgtatcgcgccgaaacaccaaaaaaccgttaaaaaatccgaacgaaaacccgctcgtataaaaatcgtcgacgccgccgctcgtccgtcctcccgtccgttctcgctcccgaccgccatcatactaacgctcatctcccgcctactaaactaattccgttcgctcttctaaaaaaaaaaaataaaactaacgctcgtaaaactacaatactcgaacaaaaccaccttcgtcaatatcatcgcgataaacgcccgcccactcactcgcccgaaactccgcaaccaaaaatccgacccgacgcttctccaaaacctaaattaaaacccccctcgacgcgataaaactaataacgaaaaacgtacgaaactaaacctatcatctcccgaaaaccaacatttaaaatttcccgcgtattaacgacgcgaaaaataacactaaaatcgaca

SEQ ID NO: 20395 - DNA, 703 bp, Artificial Sequence
  chemically treated genomic DNA (Homo sapiens) CpG-island No: 20395
gtataagtggatgaatgacgaatgaattaataatgaatgaatgtagagaaagttttaagggggttcgagggtacgttgtgttgcggagtatgtttattaggtggcgatgttagcggcgggcgggtttggtcggattggtcgcgtcgtttttgtcgtgggtgtcgacggcggcgtcgggacgggcgtggggggtagggcgagttatatgattcgttcggttttttgggtttggttgttgtcgttcgtcggtgttcgttcgtgtcgcgtcggggtattaaggagtcgttggagggttcgggcggaggttcgttcgtgtggaagtcgtcgacgtcgtcgttcgttcgttttttcgttcgttttcgttttcggtcgttattatgttggcgtttatttttcgtttgttggattggtttcgttcgtttttttggaaggaagagatggagttgacgttcgtggggttgtagtattcgggtaagattattttcgttaatgttatcgcggtgagcgttcgtttatttattcgttcggggtttcgtagttaggagttcggttcggcgtttttttaaggtttgagttggggtttttttcggcgcgatgggattgatggcggggggcgtgcgaagttgggtttgttatttttcgagggttagtatttggaatttttcgcgtgttggcggcgcggggagtagtattgagatcggta

SEQ ID NO: 20396 - DNA, 703 bp, Artificial Sequence
  chemically treated genomic DNA (Homo sapiens) CpG-island No: 20396
taccgatctcaatactactccccgcgccgccaacacgcgaaaaattccaaatactaaccctcgaaaaataacaaacccaacttcgcacgccccccgccatcaatcccatcgcgccgaaaaaaaccccaactcaaaccttaaaaaaacgccgaaccgaactcctaactacgaaaccccgaacgaataaataaacgaacgctcaccgcgataacattaacgaaaataatcttacccgaatactacaaccccacgaacgtcaactccatctcttccttccaaaaaaacgaacgaaaccaatccaacaaacgaaaaataaacgccaacataataacgaccgaaaacgaaaacgaacgaaaaaacgaacgaacgacgacgtcgacgacttccacacgaacgaacctccgcccgaaccctccaacgactccttaataccccgacgcgacacgaacgaacaccgacgaacgacaacaaccaaacccaaaaaaccgaacgaatcatataactcgccctaccccccacgcccgtcccgacgccgccgtcgacacccacgacaaaaacgacgcgaccaatccgaccaaacccgcccgccgctaacatcgccacctaataaacatactccgcaacacaacgtaccctcgaacccccttaaaactttctctacattcattcattattaattcattcgtcattcatccacttatac

SEQ ID NO: 20397 - DNA, 559 bp, Artificial Sequence
  chemically treated genomic DNA (Homo sapiens) CpG-island No: 20397
tcgaggtcggtttgggttcgggtagttaggtttgacgcggtttcgcgttttttttcggtagagaagttcgggacggttatgtgcgtgggttgcgggagttagatttacgattagtttattttgcgggtgtcgttcgatttcgagtggtacgcggtttgttttaagtgtgtcgagtgtagttagtatttggacgagacgtgtacgtgtttcgtgagagacgggaagatttattgtaagcgggattatgttaggtgaggtcggcgggaacgcgggttgggttatcgcgcgtaggggtcggggtcgggattggggatggcggtttgttcgcgcgtttcggttttgtttagggagaaggttattcgtatttcgtacgggtgtcgtagcgttttttcgggttcgggaatgttcgtaggcgggttatcggagttttttggtggttataaagtgttttgagcgcgcgtcggagtcggattttttatggagatgagggcgggcgtaggtttaacgttgatatttgttaattttgggttagtaggttgttaggtattaagtgcgttaa

SEQ ID NO: 20398 - DNA, 559 bp, Artificial Sequence
  chemically treated genomic DNA (Homo sapiens) CpG-island No: 20398
ttaacgcacttaatacctaacaacctactaacccaaaattaacaaatatcaacgttaaacctacgcccgccctcatctccataaaaaatccgactccgacgcgcgctcaaaacactttataaccaccaaaaaactccgataacccgcctacgaacattcccgaacccgaaaaaacgctacgacacccgtacgaaatacgaataaccttctccctaaacaaaaccgaaacgcgcgaacaaaccgccatccccaatcccgaccccgacccctacgcgcgataacccaacccgcgttcccgccgacctcacctaacataatcccgcttacaataaatcttcccgtctctcacgaaacacgtacacgtctcgtccaaatactaactacactcgacacacttaaaacaaaccgcgtaccactcgaaatcgaacgacacccgcaaaataaactaatcgtaaatctaactcccgcaacccacgcacataaccgtcccgaacttctctaccgaaaaaaaacgcgaaaccgcgtcaaacctaactacccgaacccaaaccgacctcga

SEQ ID NO: 20399 - DNA, 559 bp, Artificial Sequence
  chemically treated genomic DNA (Homo sapiens) CpG-island No: 20399
ttggcgtatttgatatttaatagtttattggtttaaggttagtaggtgttagcgttggatttgcgttcgtttttatttttatggaagattcggtttcggcgcgcgtttagaatattttgtggttattagaagatttcggtgattcgtttgcgggtattttcgggttcgggggagcgttgcggtattcgtgcgggatgcggatggttttttttttgggtagggtcggggcgcgcgggtaggtcgttatttttagtttcggtttcggtttttgcgcgcggtggtttagttcgcgttttcgtcggttttatttgatatagtttcgtttgtagtaggttttttcgttttttacgaagtacgtgtacgtttcgtttaggtattggttgtattcggtatatttgaggtaggtcgcgtgttattcgaggtcgggcgatattcgtaggataaattggtcgtggatttgattttcgtagtttacgtatatggtcgtttcgggtttttttgtcggggaagggcgcggggtcgcgttaggtttgattgttcggatttaggtcggtttcgg

SEQ ID NO: 20400 - DNA, 559 bp, Artificial Sequence
  chemically treated genomic DNA (Homo sapiens) CpG-island No: 20400
ccgaaaccgacctaaatccgaacaatcaaacctaacgcgaccccgcgcccttccccgacaaaaaaacccgaaacgaccatatacgtaaactacgaaaatcaaatccacgaccaatttatcctacgaatatcgcccgacctcgaataacacgcgacctacctcaaatataccgaatacaaccaatacctaaacgaaacgtacacgtacttcgtaaaaaacgaaaaaacctactacaaacgaaactatatcaaataaaaccgacgaaaacgcgaactaaaccaccgcgcgcaaaaaccgaaaccgaaactaaaaataacgacctacccgcgcgccccgaccctacccaaaaaaaaaaccatccgcatcccgcacgaataccgcaacgctcccccgaacccgaaaatacccgcaaacgaatcaccgaaatcttctaataaccacaaaatattctaaacgcgcgccgaaaccgaatcttccataaaaataaaaacgaacgcaaatccaacgctaacacctactaaccttaaaccaataaactattaaatatcaaatacgccaa

SEQ ID NO: 20401 - DNA, 848 bp, Artificial Sequence
  chemically treated genomic DNA (Homo sapiens) CpG-island No: 20401
gtcgcgcggttttgtttttttatttagtcgatgattcgggtttcgagcgtttggtgggcgttttggcgtcggttttgtgttagttgtcgttgcgcgtggtcgtagatttgtggagtcgtcgtgaattgagcgcgtaggggttcgtggtttggttttacgcgtagcggcgttagattttgtaggagggcggcgtggtggttttgtttttttttttcggtgcggtggcgttgtgtagcgagtggttataggatggggtgttcgggttcggggcgtacggttcgtacgacgtttttcgcgtttcgtttagttgcgtgttgttcgattttttgtagggtcgggcgttcggtagttacgtgggggtttgtttcgataggttgttttattcggacgtcgtattcgttttttttcgtatcgtgttcgtttttatattgtttttttaattgttagattttttgggggttttgtagtagtttcgcgtttcgcgtttcgggcggttttaagagagagcggagtaagtgtttcgggttttttagttagttttggatagttatttttatttttcggggattttcgcgtcgggacgcggggtgggattaggggcgggatttggggcgggggacgggatttaaataaaggtagacgttgtttttttatttatgtggtttatacgcgttttcgttttagtggcggggttggtaaacgtcgttttttagtttcgcggttttataaagttcggataggtgtagttcggtgtcgtttttggttggttggcgtggggtgacgtaatgggatatggttcgttgttattggtttggtcgggaagtttcgtttttttggatatgaggttt

SEQ ID NO: 20402 - DNA, 848 bp, Artificial Sequence
  chemically treated genomic DNA (Homo sapiens) CpG-island No: 20402
aaacctcatatccaaaaaaacgaaacttcccgaccaaaccaataacaacgaaccatatcccattacgtcaccccacgccaaccaaccaaaaacgacaccgaactacacctatccgaactttataaaaccgcgaaactaaaaaacgacgtttaccaaccccgccactaaaacgaaaacgcgtataaaccacataaataaaaaaacaacgtctacctttatttaaatcccgtcccccgccccaaatcccgcccctaatcccaccccgcgtcccgacgcgaaaatccccgaaaaataaaaataactatccaaaactaactaaaaaacccgaaacacttactccgctctctcttaaaaccgcccgaaacgcgaaacgcgaaactactacaaaacccccaaaaaatctaacaattaaaaaaacaatataaaaacgaacacgatacgaaaaaaaacgaatacgacgtccgaataaaacaacctatcgaaacaaacccccacgtaactaccgaacgcccgaccctacaaaaaatcgaacaacacgcaactaaacgaaacgcgaaaaacgtcgtacgaaccgtacgccccgaacccgaacaccccatcctataaccactcgctacacaacgccaccgcaccgaaaaaaaaaaacaaaaccaccacgccgccctcctacaaaatctaacgccgctacgcgtaaaaccaaaccacgaacccctacgcgctcaattcacgacgactccacaaatctacgaccacgcgcaacgacaactaacacaaaaccgacgccaaaacgcccaccaaacgctcgaaacccgaatcatcgactaaataaaaaaacaaaaccgcgcgac

SEQ ID NO: 20403 - DNA, 848 bp, Artificial Sequence
  chemically treated genomic DNA (Homo sapiens) CpG-island No: 20403
gggttttatgtttaagggggcggagtttttcggttaagttaatggtaacgggttatgttttattacgttattttacgttagttaattagaggcggtatcgagttgtatttgttcgggttttatagggtcgcggggttagggaacgacgtttgttagtttcgttattgaaacgaagacgcgtgtgggttatatgggtagaaaaatagcgtttgtttttatttaagtttcgtttttcgttttaggtttcgtttttggttttatttcgcgtttcggcgcgggagttttcgggggatggaagtagttatttagggttggttgaagggttcgggatatttgtttcgtttttttttggagtcgttcggaacgcggggcgcgaggttgttgtagggtttttaggaagtttggtagttgggagggtagtgtgaagacgggtacggtgcggaaaagggcgggtacggcgttcgggtggagtagtttgtcgaagtaggtttttacgtagttgtcgggcgttcggttttgtaagaagtcgggtagtacgtagttgagcgaggcgcggaaggcgtcgtgcgggtcgtgcgtttcgggttcggatattttattttgtagttattcgttgtatagcgttatcgtatcgggagagaagagtaagattattacgtcgtttttttgtagggtttggcgtcgttgcgcgtgaaattaagttacgggtttttgcgcgtttagtttacgacggttttataggtttacggttacgcgtagcggtagttggtatagggtcgacgttagggcgtttattaggcgttcgaaattcgagttatcggttgagtagaggagtagagtcgcgcggt

SEQ ID NO: 20404 - DNA, 848 bp, Artificial Sequence
  chemically treated genomic DNA (Homo sapiens) CpG-island No: 20404
accgcgcgactctactcctctactcaaccgataactcgaatttcgaacgcctaataaacgccctaacgtcgaccctataccaactaccgctacgcgtaaccgtaaacctataaaaccgtcgtaaactaaacgcgcaaaaacccgtaacttaatttcacgcgcaacgacgccaaaccctacaaaaaaacgacgtaataatcttactcttctctcccgatacgataacgctatacaacgaataactacaaaataaaatatccgaacccgaaacgcacgacccgcacgacgccttccgcgcctcgctcaactacgtactacccgacttcttacaaaaccgaacgcccgacaactacgtaaaaacctacttcgacaaactactccacccgaacgccgtacccgcccttttccgcaccgtacccgtcttcacactaccctcccaactaccaaacttcctaaaaaccctacaacaacctcgcgccccgcgttccgaacgactccaaaaaaaaacgaaacaaatatcccgaacccttcaaccaaccctaaataactacttccatcccccgaaaactcccgcgccgaaacgcgaaataaaaccaaaaacgaaacctaaaacgaaaaacgaaacttaaataaaaacaaacgctatttttctacccatataacccacacgcgtcttcgtttcaataacgaaactaacaaacgtcgttccctaaccccgcgaccctataaaacccgaacaaatacaactcgataccgcctctaattaactaacgtaaaataacgtaataaaacataacccgttaccattaacttaaccgaaaaactccgcccccttaaacataaaaccc

SEQ ID NO: 20405 - DNA, 534 bp, Artificial Sequence
  chemically treated genomic DNA (Homo sapiens) CpG-island No: 20405
agggagggaggagggaggagtgggggaggcggtcggcggttcgcgtcgttcgttcgtttcgtttcgttttttttgtttttttatcgtttttttcgtttttttttttttttcgtcgagtttcgttgtttgttttgcgcgtttttttttttttttttttttttttttttttttttgcgtttttcggtcggtttttttttttttttttttttttttttttttttcgttcgtttttgcgttcgtgtgtttttttttttttttttcgtttgtttttttttttttttttattttttttttttttcgattgttttcgttgtttttttcgttttttttttcgggcgcgtttaatcgtttcgttttttcgtttaggcgttttattgtttatcgtttcgtcgttttttttttttcgcggtttttttggttacgcgtttgtttttttttagttcgcgttttttaaatttttattttttattttttattttttgttatttttatacgaattttttaattgtttttttattttgtttttatattttt

SEQ ID NO: 20406 - DNA, 534 bp, Artificial Sequence
  chemically treated genomic DNA (Homo sapiens) CpG-island No: 20406
aaaaatataaaaacaaaataaaaaaacaattaaaaaattcgtataaaaataacaaaaaataaaaaataaaaaataaaaatttaaaaaacgcgaactaaaaaaaaacaaacgcgtaaccaaaaaaaccgcgaaaaaaaaaaaacgacgaaacgataaacaataaaacgcctaaacgaaaaaacgaaacgattaaacgcgcccgaaaaaaaaaacgaaaaaaacaacgaaaacaatcgaaaaaaaaaaaaaataaaaaaaaaaaaaaaaacaaacgaaaaaaaaaaaaaaaaacacacgaacgcaaaaacgaacgaaaaaaaaaaaaaaaaaaaaaaaaaaaaaaaaaccgaccgaaaaacgcaaaaaaaaaaaaaaaaaaaaaaaaaaaaaaaaaaacgcgcaaaacaaacaacgaaactcgacgaaaaaaaaaaaaaaacgaaaaaaacgataaaaaaacaaaaaaaacgaaacgaaacgaacgaacgacgcgaaccgccgaccgcctcccccactcctccctcctccctccct

SEQ ID NO: 20407 - DNA, 534 bp, Artificial Sequence
  chemically treated genomic DNA (Homo sapiens) CpG-island No: 20407
aggagtgtgaggataggatggaaaagtagttgagaggttcgtgtggaagtagtaaggaatgggagatggagaatagaagtttagaggacgcgggttagggagagataggcgcgtaattaggagagtcgcgggggagggggggcggcggggcggtgggtagtgaagcgtttgagcgggggagcgaggcggttgggcgcgttcggaaggaggggcgagggaggtagcgggggtagtcgaggagagaggggggtgagaagagagagagaggtaagcgaaaggagaaagaagaggtatacggacgtaagagcgggcgagaaaagaggaagagagagagggggagggaaggtcggtcgggagacgtaagagagagaggagaagaggaaggaagagaggagacgcgtaaggtagataacggagttcggcgaggaggggggggaggcgagggggacggtggagaagtagggggggcgaggcggggcgggcgggcggcgcgggtcgtcggtcgttttttttatttttttttttttttttttt

SEQ ID NO: 20408 - DNA, 534 bp, Artificial Sequence
  chemically treated genomic DNA (Homo sapiens) CpG-island No: 20408
aaaaaaaaaaaaaaaaaaaataaaaaaaacgaccgacgacccgcgccgcccgcccgccccgcctcgccccccctacttctccaccgtccccctcgcctcccccccctcctcgccgaactccgttatctaccttacgcgtctcctctcttccttcctcttctcctctctctcttacgtctcccgaccgaccttccctccccctctctctcttcctcttttctcgcccgctcttacgtccgtatacctcttctttctcctttcgcttacctctctctctcttctcacccccctctctcctcgactacccccgctacctccctcgcccctccttccgaacgcgcccaaccgcctcgctcccccgctcaaacgcttcactacccaccgccccgccgccccccctcccccgcgactctcctaattacgcgcctatctctccctaacccgcgtcctctaaacttctattctccatctcccattccttactacttccacacgaacctctcaactacttttccatcctatcctcacactcct

SEQ ID NO: 20409 - DNA, 809 bp, Artificial Sequence
  chemically treated genomic DNA (Homo sapiens) CpG-island No: 20409
ttttttcgtcgttttcggttgtcgtttttttcgtttttttttttttttttcgttttttcgtgtttttttcgttttcgtttttcgttttttcgttcgtcgcgtttcggttttttttttcgttttgtcgtttttttcgttttgtttatttttttatttttttttatttttttttttttttttttttatttttttttatatttttcgtttttttttttcgtcgtatttttaattttttttttttcgtttttttttttttattttatagcgtttttcgtatttttttttttttcggtttttttttcgtcgtcgtttttttttttttttttttttcgtcgttttttttttttttttttttttttttttcgtttcgtttcgtttttgttcgttcggcgcgtcgcgtttttcgtttatttttttttcgtgcggttgcgttttttttttatttatatcgtattattattcgttttttttgtatttttttatgtttagtttattttgattttcgatttcgcgttttttttttgtttttttttttttttcgtttttttttttttttttcgttttcgtgtttatttcgttcgtttgtttatttatattattttaacgtttcgttttttttttttttttttttttttcgagtttttttttgatttttatattttttttttattttcgttgtcgcgcgttcgtcgttatcgttttttttttttcgcgtcgttttttttttttttttcggtttttttttttcgtttttggtttttttttttttttttttttttttttcgttcgttttttttgtttttttttcg

SEQ ID NO: 20410 - DNA, 809 bp, Artificial Sequence
  chemically treated genomic DNA (Homo sapiens) CpG-island No: 20410
cgaaaaaaaaacaaaaaaaacgaacgaaaaaaaaaaaaaaaaaaaaaaaaaaaccaaaaacgaaaaaaaaaaaccgaaaaaaaaaaaaaaaacgacgcgaaaaaaaaaaaacgataacgacgaacgcgcgacaacgaaaataaaaaaaaaatataaaaatcaaaaaaaaactcgaaaaaaaaaaaaaaaaaaaaaaaacgaaacgttaaaataatataaataaacaaacgaacgaaataaacacgaaaacgaaaaaaaaaaaaaaaaacgaaaaaaaaaaaaaaacaaaaaaaaaacgcgaaatcgaaaatcaaaataaactaaacataaaaaaatacaaaaaaaacgaataataatacgatataaataaaaaaaaaacgcaaccgcacgaaaaaaaaataaacgaaaaacgcgacgcgccgaacgaacaaaaacgaaacgaaacgaaaaaaaaaaaaaaaaaaaaaaaaaaaacgacgaaaaaaaaaaaaaaaaaaaaacgacgacgaaaaaaaaaccgaaaaaaaaaaaaatacgaaaaacgctataaaataaaaaaaaaaaaacgaaaaaaaaaaaattaaaaatacgacgaaaaaaaaaaacgaaaaatataaaaaaaaataaaaaaaaaaaaaaaaaaaaataaaaaaaaataaaaaaataaacaaaacgaaaaaaacgacaaaacgaaaaaaaaaaccgaaacgcgacgaacgaaaaaacgaaaaacgaaaacgaaaaaaacacgaaaaaacgaaaaaaaaaaaaaaaaacgaaaaaaacgacaaccgaaaacgacgaaaaaa

SEQ ID NO: 20411 - DNA, 809 bp, Artificial Sequence
  chemically treated genomic DNA (Homo sapiens) CpG-island No: 20411
cgggagggaggtaggggagacgagcggaggggagagagagaaggaggaaggggttagaagcggaggagggaggtcgaggggggagggggaggcgacgcgagggggggggggcggtgacgacgggcgcgcgataacgagagtgagagggagatgtgaaggttagaggagagttcgggaggaagaagagaggaggggggacgaggcgttggagtggtgtgggtgggtagacgagcgaggtgggtacggggacgaggagggagggggggggcgaaggagaaggaggggtaggagaggggcgcgggatcggaggttaagatgagttaggtatgaagaggtgtagggggagcgagtaatggtgcggtgtgagtagagagaggacgtagtcgtacgagaaggaggtggacgggaagcgcggcgcgtcgagcgagtaggggcggggcggggcgagagaggagaggggagaggggggaggggcggcgaagaagaagggaggggggggacggcggcggagagggggtcgagagagggggaggtgcgaagagcgttgtagagtggagaggggagggcgagaagggaggagttggaggtacggcggaggaggggggcgagggatgtagagagaggtaggaagggaaggggagaggagtagaggaaagtgagggagtgagtaaggcggggggagcgataggacggagggagaggtcgggacgcgacgagcgagaaggcgagaggcgagggcgggagagatacgagagggcgaagaggaggagagggagcggaggagacggtagtcggaggcgacgaaaaga

SEQ ID NO: 20412 - DNA, 809 bp, Artificial Sequence
  chemically treated genomic DNA (Homo sapiens) CpG-island No: 20412
tcttttcgtcgcctccgactaccgtctcctccgctccctctcctcctcttcgccctctcgtatctctcccgccctcgcctctcgccttctcgctcgtcgcgtcccgacctctccctccgtcctatcgctccccccgccttactcactccctcactttcctctactcctctccccttcccttcctacctctctctacatccctcgcccccctcctccgccgtacctccaactcctcccttctcgccctcccctctccactctacaacgctcttcgcacctccccctctctcgaccccctctccgccgccgtcccccccctcccttcttcttcgccgcccctcccccctctcccctctcctctctcgccccgccccgcccctactcgctcgacgcgccgcgcttcccgtccacctccttctcgtacgactacgtcctctctctactcacaccgcaccattactcgctccccctacacctcttcatacctaactcatcttaacctccgatcccgcgcccctctcctacccctccttctccttcgccccccccctccctcctcgtccccgtacccacctcgctcgtctacccacccacaccactccaacgcctcgtcccccctcctctcttcttcctcccgaactctcctctaaccttcacatctccctctcactctcgttatcgcgcgcccgtcgtcaccgccccccccccctcgcgtcgcctccccctcccccctcgacctccctcctccgcttctaaccccttcctccttctctctctcccctccgctcgtctcccctacctccctcccg

SEQ ID NO: 20413 - DNA, 573 bp, Artificial Sequence
  chemically treated genomic DNA (Homo sapiens) CpG-island No: 20413
tttgaaaagtttatcgcgtttcgtagggcgtttcggcggggttaatttgttcggttgcggggtatagttttaggggaattgggttagtaggtaggggtcggagttgcgcgttcgcggtggttagggcggtcgtcgggtcgtggggcgcgggcggttgtagtttgggcgttggggcgttttcgattcgtagtaaattttcgattaggaaatttttgtttaggttgttaaagtcgggcgtagcggggaggttgaggagcgcggaggaagttataacgttttagtacgtatcggcgtgggttgcgatcgcgttggggagtatagtgcggcgttaatcggtttgttgcgcgttcgttttgcgttcgtttgtcgttcgggcgtttcgtatcgtatttagagtcgtagtttttcgtcgtcgtttttcgtagggttggagcgcgcggagttaggtagggaggaaaggttattcgggacggcggcggatttggaacgatattatttatttgcgttgggcgtttttttaagggatgggaggagtgagtgtgggagggggaagttgtgagtttttttggtcga

SEQ ID NO: 20414 - DNA, 573 bp, Artificial Sequence
  chemically treated genomic DNA (Homo sapiens) CpG-island No: 20414
tcgaccaaaaaaactcacaacttccccctcccacactcactcctcccatcccttaaaaaaacgcccaacgcaaataaataatatcgttccaaatccgccgccgtcccgaataacctttcctccctacctaactccgcgcgctccaaccctacgaaaaacgacgacgaaaaactacgactctaaatacgatacgaaacgcccgaacgacaaacgaacgcaaaacgaacgcgcaacaaaccgattaacgccgcactatactccccaacgcgatcgcaacccacgccgatacgtactaaaacgttataacttcctccgcgctcctcaacctccccgctacgcccgactttaacaacctaaacaaaaatttcctaatcgaaaatttactacgaatcgaaaacgccccaacgcccaaactacaaccgcccgcgccccacgacccgacgaccgccctaaccaccgcgaacgcgcaactccgacccctacctactaacccaattcccctaaaactataccccgcaaccgaacaaattaaccccgccgaaacgccctacgaaacgcgataaacttttcaaa

SEQ ID NO: 20415 - DNA, 573 bp, Artificial Sequence
  chemically treated genomic DNA (Homo sapiens) CpG-island No: 20415
tcggttagagaaatttatagttttttttttttatatttattttttttattttttaaaaaaacgtttaacgtaaataaataatatcgttttaagttcgtcgtcgtttcgggtggttttttttttttgtttggtttcgcgcgttttagttttgcgggaggcggcggcgagaagttgcggttttgggtgcggtgcggggcgttcgggcgataggcgggcgtaaggcgggcgcgtagtagatcggttggcgtcgtattatgttttttagcgcggtcgtagtttacgtcggtgcgtattgggacgttgtggtttttttcgcgttttttaattttttcgttgcgttcggttttggtaatttgggtaagagttttttgatcgagaatttgttgcgggtcgggggcgttttaacgtttaggttgtagtcgttcgcgttttacgattcggcgatcgttttggttatcgcgggcgcgtagtttcggtttttgtttgttagtttagtttttttaaagttgtgtttcgtagtcgaataagttagtttcgtcggggcgttttacggaacgcggtgggttttttaag

SEQ ID NO: 20416 - DNA, 573 bp, Artificial Sequence
  chemically treated genomic DNA (Homo sapiens) CpG-island No: 20416
cttaaaaaacccaccgcgttccgtaaaacgccccgacgaaactaacttattcgactacgaaacacaactttaaaaaaactaaactaacaaacaaaaaccgaaactacgcgcccgcgataaccaaaacgatcgccgaatcgtaaaacgcgaacgactacaacctaaacgttaaaacgcccccgacccgcaacaaattctcgatcaaaaaactcttacccaaattaccaaaaccgaacgcaacgaaaaaattaaaaaacgcgaaaaaaaccacaacgtcccaatacgcaccgacgtaaactacgaccgcgctaaaaaacataatacgacgccaaccgatctactacgcgcccgccttacgcccgcctatcgcccgaacgccccgcaccgcacccaaaaccgcaacttctcgccgccgcctcccgcaaaactaaaacgcgcgaaaccaaacaaaaaaaaaaaaccacccgaaacgacgacgaacttaaaacgatattatttatttacgttaaacgtttttttaaaaaataaaaaaaataaatataaaaaaaaaaaactataaatttctctaaccga

SEQ ID NO: 20417 - DNA, 687 bp, Artificial Sequence
  chemically treated genomic DNA (Homo sapiens) CpG-island No: 20417
ttaggacgcgagttttgcgtagtcgaggttttttagcgttttttgtagtcgcgcgtaggtagagacggagttcggttttgcgttttcgtattacgttcgggattttatttagcggttcgtattcggagaagtagcgcgagtattcgaagttttcggttggcggtagaaatcgggagtggggtcgggcgagtgcgcggtattttaggtcggttcgaacgtttcgttcgcggtgggtcgatttttttttttttttttttttttttttttttagttcgttggcgtcggatacgttgcgttttattttttggggcgttttttttcgttggttaatcgtcgtatttcgtgtaattttggggtagtggtcgtttagtgttgaatgttttttatcgagagcgtatggtttgggaagcgaggcgcgaattcggttttcgaagggtcgtcgttcgggagacggtgatgttgttgttgtgtttgggggtttcgatcggtcgtttttataacgtggatattgagagcgcgttgttttattagggtttttataatacgttgttcggttattcggtcgtgttgtatagttacggggcgaatcgatggtgagtagagttggattgatgcgtttttagtagtttagagcggcgtgagaatggcgttttagggattttttgttcgatttaaattttttttttt

SEQ ID NO: 20418 - DNA, 687 bp, Artificial Sequence
  chemically treated genomic DNA (Homo sapiens) CpG-island No: 20418
aaaaaaaaaaatttaaatcgaacaaaaaatccctaaaacgccattctcacgccgctctaaactactaaaaacgcatcaatccaactctactcaccatcgattcgccccgtaactatacaacacgaccgaataaccgaacaacgtattataaaaaccctaataaaacaacgcgctctcaatatccacgttataaaaacgaccgatcgaaacccccaaacacaacaacaacatcaccgtctcccgaacgacgacccttcgaaaaccgaattcgcgcctcgcttcccaaaccatacgctctcgataaaaaacattcaacactaaacgaccactaccccaaaattacacgaaatacgacgattaaccaacgaaaaaaaacgccccaaaaaataaaacgcaacgtatccgacgccaacgaactaaaaaaaaaaaaaaaaaaaaaaaaaaaaaaatcgacccaccgcgaacgaaacgttcgaaccgacctaaaataccgcgcactcgcccgaccccactcccgatttctaccgccaaccgaaaacttcgaatactcgcgctacttctccgaatacgaaccgctaaataaaatcccgaacgtaatacgaaaacgcaaaaccgaactccgtctctacctacgcgcgactacaaaaaacgctaaaaaacctcgactacgcaaaactcgcgtcctaa

SEQ ID NO: 20419 - DNA, 687 bp, Artificial Sequence
  chemically treated genomic DNA (Homo sapiens) CpG-island No: 20419
agggaggaaagtttgaatcgggtagggaatttttagggcgttatttttacgtcgttttgagttgttgagggcgtattagtttaattttatttattatcggttcgtttcgtggttgtgtagtacgatcgagtagtcgaatagcgtgttgtgggggttttggtaaagtagcgcgtttttagtgtttacgttgtaggggcggtcggtcgggatttttaggtatagtaatagtattatcgtttttcggacggcggtttttcgggggtcgggttcgcgtttcgttttttaagttatgcgttttcggtggggaatatttaatattaaacggttattattttaaagttgtacgggatgcgacggttggttaacggggaagaacgttttaagagatgaggcgtagcgtgttcggcgttagcgggttaaaggaaggagagagggaagaggaggggaagtcggtttatcgcgggcggagcgttcgggtcggtttgggatgtcgcgtattcgttcggttttattttcggtttttgtcgttagtcgggagtttcgggtgttcgcgttgttttttcgggtacgggtcgttgggtggggtttcgggcgtggtgcggaggcgtagggtcgggtttcgtttttgtttacgcgcggttgtagggggcgttggggaatttcggttgcgtaggattcgcgttttgg

SEQ ID NO: 20420 - DNA, 687 bp, Artificial Sequence
  chemically treated genomic DNA (Homo sapiens) CpG-island No: 20420
ccaaaacgcgaatcctacgcaaccgaaattccccaacgccccctacaaccgcgcgtaaacaaaaacgaaacccgaccctacgcctccgcaccacgcccgaaaccccacccaacgacccgtacccgaaaaaacaacgcgaacacccgaaactcccgactaacgacaaaaaccgaaaataaaaccgaacgaatacgcgacatcccaaaccgacccgaacgctccgcccgcgataaaccgacttcccctcctcttccctctctccttcctttaacccgctaacgccgaacacgctacgcctcatctcttaaaacgttcttccccgttaaccaaccgtcgcatcccgtacaactttaaaataataaccgtttaatattaaatattccccaccgaaaacgcataacttaaaaaacgaaacgcgaacccgacccccgaaaaaccgccgtccgaaaaacgataatactattactatacctaaaaatcccgaccgaccgcccctacaacgtaaacactaaaaacgcgctactttaccaaaacccccacaacacgctattcgactactcgatcgtactacacaaccacgaaacgaaccgataataaataaaattaaactaatacgccctcaacaactcaaaacgacgtaaaaataacgccctaaaaattccctacccgattcaaactttcctccct

SEQ ID NO: 20421 - DNA, 1859 bp, Artificial Sequence
  chemically treated genomic DNA (Homo sapiens) CpG-island No: 20421
gaagagaaagcgtagtagtcgatagttttgattttcgggagttttttatttcgttttttacggcgaggagggcgcggagatttcgttgggggcggaggacgagatcgggaggcggggaggggggaggtaaattttgtttattcggttcggagttcggagcggtcgcggaagtcggaggtcggcgcgtagggcgagggtatcgggggcggggggtttcgtttttcgtttgattttttttgttttcggttagttagttagtaagtgcggttttttagattttcgagatagcgaacggatcgatcgggattgttagtcgtttcgggttaaggattcgttttattcgtgttttttattaggcgtttttaatttattggtgagcgcggcggttcgggcgttggatgcgggggcggtcgcgatggtttcgcgcgcgggatagtcggggttttaggggttgttgttcgtggcggcggcgttgagttagttcgcggtattttgttttttttagtgttattgtttcggcggttttaagttgttgttgcgttgcgcgtcgggagtcgagtttcgttagttttcgcgggacgtgtcgttcgacgcgcgtaattttattatcgtaggcgttaatttgacggtgttgcgcgcggtcgttttcgtcggcggggacggggacggcgattaggcggcgggcgtgcgtttgtcgtttttgagcgcgttgcgttttacgtataattatatcgaggtggtggaggacggcgttttcgacgggttgtttagtttggcggcgttcgattttagttataattcgttgcgcgttttgggcggcggcgtttttcgcgggttgttcgcgttgcgttcgttgtagtttaattacgcgttggtgcgcggcggtttcgcgttgttggtcgcgttggacgttgcgttggtatcgttggtcgagtttcgtttgttgggtttagcgggtaacgcgttgagtcgtttgtcgttagtcgttttgcgtttggcgcgtttggagtagttggacgtgcgttttaacgcgttggtcggtttggatttcgacgagttgcgcgcgttggagcgcgatggcggttttttcgggtcgcgtttgttgttcgtcgataattttttgcgttgcggttgtgtcgtacgttttttgttggtttggttgcgtaacgttacggagcgcgtgttcgattcgcggcgtttgcgttgcgtcgtttcgcgggcgttgttagatcggtcgttattggatttggacggggcgcggtttcgttgcgcggatagcggcgtcgacgttcgcggagaggaggcggaggtcgtcggttcggagttggaagttttttacgtgtttttcgggttggtgttggtatttatcggttttattttttttatggtgttttatttaaatcgtcgcggtatttagcgttggatgcgtaatttgcgcgaggcgtgtcgggattagatggagggttattattatcgttacgagtaggacgtcgattcgcgtcgcgcgttcgcgttcgtcgcgttcgcgggttttcgcgttattttttcgggttcggggttttgagcggcgttttcgggttcggggttttttttgtttggttcgaagtcgtggagatgagatattcgcgagtttcgagttttgagatttttttttgattcggaggcgttaagtcgtattttttcgttttcgttttcgagagtttttatcgttaaagatttagagatagtcggttcgaatttagaaatttcgtttgtttattttagttttcgaaattttttttttgaattattgaaagttcgtttttcgtttcggagtttatatagagaatttgttttttaaggttaaagttttgagattt

SEQ ID NO: 20422 - DNA, 1859 bp, Artificial Sequence
  chemically treated genomic DNA (Homo sapiens) CpG-island No: 20422
aaatctcaaaactttaaccttaaaaaacaaattctctatataaactccgaaacgaaaaacgaactttcaataattcaaaaaaaaaatttcgaaaactaaaataaacaaacgaaatttctaaattcgaaccgactatctctaaatctttaacgataaaaactctcgaaaacgaaaacgaaaaaatacgacttaacgcctccgaatcaaaaaaaaatctcaaaactcgaaactcgcgaatatctcatctccacgacttcgaaccaaacaaaaaaaaccccgaacccgaaaacgccgctcaaaaccccgaacccgaaaaaataacgcgaaaacccgcgaacgcgacgaacgcgaacgcgcgacgcgaatcgacgtcctactcgtaacgataataataaccctccatctaatcccgacacgcctcgcgcaaattacgcatccaacgctaaataccgcgacgatttaaataaaacaccataaaaaaaataaaaccgataaataccaacaccaacccgaaaaacacgtaaaaaacttccaactccgaaccgacgacctccgcctcctctccgcgaacgtcgacgccgctatccgcgcaacgaaaccgcgccccgtccaaatccaataacgaccgatctaacaacgcccgcgaaacgacgcaacgcaaacgccgcgaatcgaacacgcgctccgtaacgttacgcaaccaaaccaacaaaaaacgtacgacacaaccgcaacgcaaaaaattatcgacgaacaacaaacgcgacccgaaaaaaccgccatcgcgctccaacgcgcgcaactcgtcgaaatccaaaccgaccaacgcgttaaaacgcacgtccaactactccaaacgcgccaaacgcaaaacgactaacgacaaacgactcaacgcgttacccgctaaacccaacaaacgaaactcgaccaacgataccaacgcaacgtccaacgcgaccaacaacgcgaaaccgccgcgcaccaacgcgtaattaaactacaacgaacgcaacgcgaacaacccgcgaaaaacgccgccgcccaaaacgcgcaacgaattataactaaaatcgaacgccgccaaactaaacaacccgtcgaaaacgccgtcctccaccacctcgatataattatacgtaaaacgcaacgcgctcaaaaacgacaaacgcacgcccgccgcctaatcgccgtccccgtccccgccgacgaaaacgaccgcgcgcaacaccgtcaaattaacgcctacgataataaaattacgcgcgtcgaacgacacgtcccgcgaaaactaacgaaactcgactcccgacgcgcaacgcaacaacaacttaaaaccgccgaaacaataacactaaaaaaaacaaaataccgcgaactaactcaacgccgccgccacgaacaacaacccctaaaaccccgactatcccgcgcgcgaaaccatcgcgaccgcccccgcatccaacgcccgaaccgccgcgctcaccaataaattaaaaacgcctaataaaaaacacgaataaaacgaatccttaacccgaaacgactaacaatcccgatcgatccgttcgctatctcgaaaatctaaaaaaccgcacttactaactaactaaccgaaaacaaaaaaaatcaaacgaaaaacgaaaccccccgcccccgataccctcgccctacgcgccgacctccgacttccgcgaccgctccgaactccgaaccgaataaacaaaatttacctcccccctccccgcctcccgatctcgtcctccgcccccaacgaaatctccgcgccctcctcgccgtaaaaaacgaaataaaaaactcccgaaaatcaaaactatcgactactacgctttctcttc

SEQ ID NO: 20423 - DNA, 1859 bp, Artificial Sequence
  chemically treated genomic DNA (Homo sapiens) CpG-island No: 20423
aagttttagagttttggttttgaaggatagattttttgtgtgagtttcgagacggggaacggatttttagtggtttaggagggaggtttcggaaattagggtgggtaggcggggtttttggattcggatcggttatttttgggtttttgacggtgggagttttcggaggcgggaacgagagggtacggtttagcgttttcgagttaggggaaggttttagagttcggggttcgcgggtgttttatttttacggtttcgggttaggtaagggaagtttcgagttcgggggcgtcgtttagagtttcgagttcggggaggtggcgcgggagttcgcgggcgcggcgggcgcgggcgcgcggcgcgggtcggcgttttgttcgtagcggtagtggtagttttttatttggtttcggtacgtttcgcgtaggttgcgtatttagcgttggatgtcgcggcggtttaggtagagtattatgaggaagatgaggtcgatgagtgttagtattagttcgaagaatacgtaggaggtttttagtttcgggtcggcggttttcgtttttttttcgcgagcgtcggcgtcgttgttcgcgtagcgaagtcgcgtttcgtttaggtttagtagcggtcggtttagtagcgttcgcggggcggcgtagcgtaggcgtcgcgagtcgggtacgcgtttcgtggcgttgcgtagttaggttagtagggggcgtgcggtatagtcgtagcgtagggggttgtcggcgagtagtaggcgcggttcggggaggtcgttatcgcgttttagcgcgcgtagttcgtcggggtttaggtcggttagcgcgttgaggcgtacgtttagttgttttaggcgcgttaggcgtagggcggttggcggtagacggtttagcgcgttgttcgttaggtttagtaggcgaagttcggttagcggtgttagcgtagcgtttagcgcggttagtagcgcggggtcgtcgcgtattagcgcgtggttgagttgtagcgagcgtagcgcgggtagttcgcggaaggcgtcgtcgtttagggcgcgtagcgggttgtggttgaggtcgagcgtcgttaggttgggtagttcgtcgaaggcgtcgttttttattatttcgatgtggttgtgcgtgaggcgtagcgcgtttaggagcggtaggcgtacgttcgtcgtttggtcgtcgttttcgttttcgtcggcgaaggcggtcgcgcgtagtatcgttaggttggcgtttacgatggtgaggttgcgcgcgtcgggcggtacgtttcgcggaggttggcggagttcggttttcgacgcgtagcgtagtagtagtttggggtcgtcgaagtagtagtattggaaggggtagggtgtcgcgggttggtttagcgtcgtcgttacgagtagtagtttttggagtttcggttgtttcgcgcgcggggttatcgcggtcgttttcgtatttagcgttcgggtcgtcgcgtttattagtgagttgggagcgtttggtggggggtacgggtggggcgagtttttgattcggagcggttggtagtttcggtcggttcgttcgttgtttcgaaagtttgaggagtcgtatttattggttgattggtcgggggtaagaggggttagacggggagcggagtttttcgttttcggtgttttcgttttgcgcgtcggttttcggttttcgcggtcgtttcgggtttcgagtcgagtgggtagggtttgtttttttttttttcgtttttcggtttcgtttttcgtttttagcggagttttcgcgtttttttcgtcgtgggaggcggggtgggaggttttcgagaattagggttgtcggttgttgcgtttttttttt

SEQ ID NO: 20424 - DNA, 1859 bp, Artificial Sequence
  chemically treated genomic DNA (Homo sapiens) CpG-island No: 20424
aaaaaaaaaacgcaacaaccgacaaccctaattctcgaaaacctcccaccccgcctcccacgacgaaaaaaacgcgaaaactccgctaaaaacgaaaaacgaaaccgaaaaacgaaaaaaaaaaaaacaaaccctacccactcgactcgaaacccgaaacgaccgcgaaaaccgaaaaccgacgcgcaaaacgaaaacaccgaaaacgaaaaactccgctccccgtctaacccctcttacccccgaccaatcaaccaataaatacgactcctcaaactttcgaaacaacgaacgaaccgaccgaaactaccaaccgctccgaatcaaaaactcgccccacccgtaccccccaccaaacgctcccaactcactaataaacgcgacgacccgaacgctaaatacgaaaacgaccgcgataaccccgcgcgcgaaacaaccgaaactccaaaaactactactcgtaacgacgacgctaaaccaacccgcgacaccctaccccttccaatactactacttcgacgaccccaaactactactacgctacgcgtcgaaaaccgaactccgccaacctccgcgaaacgtaccgcccgacgcgcgcaacctcaccatcgtaaacgccaacctaacgatactacgcgcgaccgccttcgccgacgaaaacgaaaacgacgaccaaacgacgaacgtacgcctaccgctcctaaacgcgctacgcctcacgcacaaccacatcgaaataataaaaaacgacgccttcgacgaactacccaacctaacgacgctcgacctcaaccacaacccgctacgcgccctaaacgacgacgccttccgcgaactacccgcgctacgctcgctacaactcaaccacgcgctaatacgcgacgaccccgcgctactaaccgcgctaaacgctacgctaacaccgctaaccgaacttcgcctactaaacctaacgaacaacgcgctaaaccgtctaccgccaaccgccctacgcctaacgcgcctaaaacaactaaacgtacgcctcaacgcgctaaccgacctaaaccccgacgaactacgcgcgctaaaacgcgataacgacctccccgaaccgcgcctactactcgccgacaaccccctacgctacgactataccgcacgccccctactaacctaactacgcaacgccacgaaacgcgtacccgactcgcgacgcctacgctacgccgccccgcgaacgctactaaaccgaccgctactaaacctaaacgaaacgcgacttcgctacgcgaacaacgacgccgacgctcgcgaaaaaaaaacgaaaaccgccgacccgaaactaaaaacctcctacgtattcttcgaactaatactaacactcatcgacctcatcttcctcataatactctacctaaaccgccgcgacatccaacgctaaatacgcaacctacgcgaaacgtaccgaaaccaaataaaaaactaccactaccgctacgaacaaaacgccgacccgcgccgcgcgcccgcgcccgccgcgcccgcgaactcccgcgccacctccccgaactcgaaactctaaacgacgcccccgaactcgaaacttcccttacctaacccgaaaccgtaaaaataaaacacccgcgaaccccgaactctaaaaccttcccctaactcgaaaacgctaaaccgtaccctctcgttcccgcctccgaaaactcccaccgtcaaaaacccaaaaataaccgatccgaatccaaaaaccccgcctacccaccctaatttccgaaacctccctcctaaaccactaaaaatccgttccccgtctcgaaactcacacaaaaaatctatccttcaaaaccaaaactctaaaactt

SEQ ID NO: 20425 - DNA, 605 bp, Artificial Sequence
  chemically treated genomic DNA (Homo sapiens) CpG-island No: 20425
ggtttatcgcgcgcgtcggtttttattgtttttttcgaggtcggtttaggaatttttcgggaaattgttttttatttcgttttcgtacgtacgcgttacgtttgtttattttgaagtttcgttttcggttattttttggttttttttatttttttttggaatgtcgttatgtcggcgatgaatatttatgaggtatacgcggttttttcgttttgttagtttttcgttttttcgttttcggcgtatgattaatatttaatgagtttagattcgcggttggttcgtcgggttgaggcgggggtagcgggcggggtcggcgttggggagttcgcgattcgggcggggagggcgtgtgtcgggggggcggtggcggcgaggcgggcgcgcgggatggaatattgagatatcgacggaatgtttcgaatcgttatataattttttggaacggtcgcgtataacgttattggtttttttttttttcgcgcgtcgtcgtcgttttttattttcgttttatcgttttttttttcgttcgttgttttcggagttgggggggaaacgcgaagttttattgtaatggagttcgtcgtcgcggttacggtatagcg

SEQ ID NO: 20426 - DNA, 605 bp, Artificial Sequence
  chemically treated genomic DNA (Homo sapiens) CpG-island No: 20426
cgctataccgtaaccgcgacgacgaactccattacaataaaacttcgcgtttcccccccaactccgaaaacaacgaacgaaaaaaaaaacgataaaacgaaaataaaaaacgacgacgacgcgcgaaaaaaaaaaaaaccaataacgttatacgcgaccgttccaaaaaattatataacgattcgaaacattccgtcgatatctcaatattccatcccgcgcgcccgcctcgccgccaccgcccccccgacacacgccctccccgcccgaatcgcgaactccccaacgccgaccccgcccgctacccccgcctcaacccgacgaaccaaccgcgaatctaaactcattaaatattaatcatacgccgaaaacgaaaaaacgaaaaactaacaaaacgaaaaaaccgcgtatacctcataaatattcatcgccgacataacgacattccaaaaaaaaataaaaaaaaccaaaaaataaccgaaaacgaaacttcaaaataaacaaacgtaacgcgtacgtacgaaaacgaaataaaaaacaatttcccgaaaaattcctaaaccgacctcgaaaaaaacaataaaaaccgacgcgcgcgataaacc

SEQ ID NO: 20427 - DNA, 605 bp, Artificial Sequence
  chemically treated genomic DNA (Homo sapiens) CpG-island No: 20427
cgttgtatcgtggtcgcggcggcgggttttattgtagtggggtttcgcgttttttttttagtttcggaggtagcgggcggagagggaggcgatgaggcggaggtgggagacggcggcggcgcgcggagaagggagaagttaatggcgttgtgcgcggtcgttttaggggattatgtggcgattcggagtatttcgtcggtgttttagtgttttatttcgcgcgttcgtttcgtcgttatcgttttttcgatatacgtttttttcgttcgggtcgcgggttttttagcgtcggtttcgttcgttattttcgttttaattcggcgaattagtcgcggatttgggtttattgaatattaattatgcgtcgggagcgggaaggcgggaggttggtagggcgggagggtcgcgtgtgttttataaatatttatcgtcggtatgacggtattttagggaggagtggggagagttaggggatggtcggaggcggagttttagggtaaataaacgtgacgcgtgcgtacgagggcggggtggggggtagtttttcgggaggtttttgagtcggtttcggagagggtagtgaagatcgacgcgcgcggtaaatt

SEQ ID NO: 20428 - DNA, 605 bp, Artificial Sequence
  chemically treated genomic DNA (Homo sapiens) CpG-island No: 20428
aatttaccgcgcgcgtcgatcttcactaccctctccgaaaccgactcaaaaacctcccgaaaaactaccccccaccccgccctcgtacgcacgcgtcacgtttatttaccctaaaactccgcctccgaccatcccctaactctccccactcctccctaaaataccgtcataccgacgataaatatttataaaacacacgcgaccctcccgccctaccaacctcccgccttcccgctcccgacgcataattaatattcaataaacccaaatccgcgactaattcgccgaattaaaacgaaaataacgaacgaaaccgacgctaaaaaacccgcgacccgaacgaaaaaaacgtatatcgaaaaaacgataacgacgaaacgaacgcgcgaaataaaacactaaaacaccgacgaaatactccgaatcgccacataatcccctaaaacgaccgcgcacaacgccattaacttctcccttctccgcgcgccgccgccgtctcccacctccgcctcatcgcctccctctccgcccgctacctccgaaactaaaaaaaaaacgcgaaaccccactacaataaaacccgccgccgcgaccacgatacaacg

SEQ ID NO: 20429 - DNA, 768 bp, Artificial Sequence
  chemically treated genomic DNA (Homo sapiens) CpG-island No: 20429
gtgtgtattttttattatttgtattttgcgtagtaattcgggttgggtacgtacgagagggtggcgttttacgcggttttttagaaaggcgcgcggtagtaagcggtagcgtacgttttcgaagacggtgggtagcgcgcgttggcgtttagtttgcgtttcggcgtcgtcgttattcgtttatcgtattatcgtttcgaatattgttttttttttttttacgttaaggtcgtcgttggagatgatggcgatgagttcgtcggtcgagagttcgaggaagttagcgtcgcgcgttattagcgtgaagtgagcgtagatgaagtcgcgggtagttacggcgagacgcgcgtagtcgagtaggaggtcgagacggaagacggttaagtagttggagaggtataggcgtttttgtaggaaggatacgtagatggtgaagatggaagggatttggaagcggtgtgtcgcggcgaataaattttgtacgttcgttttatttagcgcgatttttgatgtgtataggtagtgtagtatttgggttattacgttcggggatattttttttaggtgtagttcgttcgcgcgtttcggttcggttagaaagcgcgttcggaagtaggggttgtaggcggttagtattaggcgatggtacgggaattcgcgttcgttcgttcgtattatatagtcgaggaatttgttatggtttagtatgtttttgagttcgttttgtaggagcgtttgttggtataatcgttgttttttcgtttgttt

SEQ ID NO: 20430 - DNA, 768 bp, Artificial Sequence
  chemically treated genomic DNA (Homo sapiens) CpG-island No: 20430
aaacaaacgaaaaaacaacgattataccaacaaacgctcctacaaaacgaactcaaaaacatactaaaccataacaaattcctcgactatataatacgaacgaacgaacgcgaattcccgtaccatcgcctaatactaaccgcctacaacccctacttccgaacgcgctttctaaccgaaccgaaacgcgcgaacgaactacacctaaaaaaaatatccccgaacgtaataacccaaatactacactacctatacacatcaaaaatcgcgctaaataaaacgaacgtacaaaatttattcgccgcgacacaccgcttccaaatcccttccatcttcaccatctacgtatccttcctacaaaaacgcctatacctctccaactacttaaccgtcttccgtctcgacctcctactcgactacgcgcgtctcgccgtaactacccgcgacttcatctacgctcacttcacgctaataacgcgcgacgctaacttcctcgaactctcgaccgacgaactcatcgccatcatctccaacgacgaccttaacgtaaaaaaaaaaaaaacaatattcgaaacgataatacgataaacgaataacgacgacgccgaaacgcaaactaaacgccaacgcgcgctacccaccgtcttcgaaaacgtacgctaccgcttactaccgcgcgcctttctaaaaaaccgcgtaaaacgccaccctctcgtacgtacccaacccgaattactacgcaaaatacaaataataaaaaatacacac

SEQ ID NO: 20431 - DNA, 768 bp, Artificial Sequence
  chemically treated genomic DNA (Homo sapiens) CpG-island No: 20431
gagtaggcggaggagtagcggttgtattagtagacgtttttgtaagacgggtttaaagatatgttggattatggtaagtttttcgattgtgtggtgcgggcgggcgagcgcgagttttcgtgttatcgtttggtgttggtcgtttgtagtttttattttcgggcgcgttttttagtcgagtcggagcgcgcgggcgagttgtatttggaggaggtgttttcggacgtggtggtttaggtgttgtattatttgtatatattagagatcgcgttggatgaggcgagcgtgtaggatttgttcgtcgcggtatatcgtttttagattttttttatttttattatttgcgtgttttttttgtagaagcgtttgtgtttttttaattgtttggtcgtttttcgtttcggttttttgttcgattgcgcgcgtttcgtcgtggttgttcgcgattttatttgcgtttattttacgttggtggcgcgcgacgttgattttttcggattttcggtcgacgagtttatcgttattatttttagcgacggttttaacgtggagaaggaggaggtagtgttcgaggcggtgatgcggtgggcgggtagcggcgacgtcgaggcgtaggttgagcgttagcgcgcgttgtttatcgttttcgagagcgtgcgttgtcgtttgttgtcgcgcgtttttttggaaagtcgcgtggagcgttattttttcgtgcgtgtttagttcgagttgttgcgtaaggtgtagatggtgaaggatgtatat

SEQ ID NO: 20432 - DNA, 768 bp, Artificial Sequence
  chemically treated genomic DNA (Homo sapiens) CpG-island No: 20432
atatacatccttcaccatctacaccttacgcaacaactcgaactaaacacgcacgaaaaaataacgctccacgcgactttccaaaaaaacgcgcgacaacaaacgacaacgcacgctctcgaaaacgataaacaacgcgcgctaacgctcaacctacgcctcgacgtcgccgctacccgcccaccgcatcaccgcctcgaacactacctcctccttctccacgttaaaaccgtcgctaaaaataataacgataaactcgtcgaccgaaaatccgaaaaaatcaacgtcgcgcgccaccaacgtaaaataaacgcaaataaaatcgcgaacaaccacgacgaaacgcgcgcaatcgaacaaaaaaccgaaacgaaaaacgaccaaacaattaaaaaaacacaaacgcttctacaaaaaaaacacgcaaataataaaaataaaaaaaatctaaaaacgatataccgcgacgaacaaatcctacacgctcgcctcatccaacgcgatctctaatatatacaaataatacaacacctaaaccaccacgtccgaaaacacctcctccaaatacaactcgcccgcgcgctccgactcgactaaaaaacgcgcccgaaaataaaaactacaaacgaccaacaccaaacgataacacgaaaactcgcgctcgcccgcccgcaccacacaatcgaaaaacttaccataatccaacatatctttaaacccgtcttacaaaaacgtctactaatacaaccgctactcctccgcctactc

SEQ ID NO: 20433 - DNA, 2345 bp, Artificial Sequence
  chemically treated genomic DNA (Homo sapiens) CpG-island No: 20433
tatcgtagtttcggatattatatcgtagtttcggatattatatcgtagttacggatattatatcgtagttacggatattatatcgtagttacggatattatatcgtagtttcggatattatatcgtagtttcggatattatatcgtagttacggatattatatcgtagttacggatattatatcgtagtttcggatattatatcgtagttacggatattatatcgtagtttcggatattatatcgtagtttcggatattatatcgtagtttcggatattatatcgtagttacggatattatatcgtagtttcggatattatatcgtagtttcggatattatatcgtagtttcggatattatatcgtagttacggatattatatcgtagttacggatattatatcgtagtttcgtaaattatatcgtagttacggatattatatcgtagtttcggatattatatcgtagttacggatattatatcgtagttacggatattatatcgtagttacggatattatatcgtagtttcggatattatatcgtagttacggatattatatcgtagtttcggatattatatcgtagttacggatattatatcgtagttacggatattatatcgtagtttcggatattatatcgtagtttcggatattatatcgtagttacggatattatatcgtagttacggatattatatcgtagttacggatattatatcgtagttacggatattatatcgtagtttcggatattatatcgtagtttcggatattatatcgtagtttcggatattatatcgtagttacggatattatatcgtagtttcggatattatatcgtagtttcggatattatatcgtagttacggatattatatcgtagtttcggatattatatcgtagtttcggatattatatcgtagtttcggatattatatcgtagtttcgggaagtatatcgtagtttcgggaagtatatcgtagtttcgggaagtatatcgtagttacggatattatatcgtagtttcggatattatatcgtagtttcggatattatatcgtagttacggatattatatcgtagttacggatattatatcgtagtttcgtaaattatatcgtagttacggatattatatcgtagtttcggatattatatcgtagtttcggatattatatcgtagtttcggatattatatcgtagttacggatattatatcgtagttacggatattatatcgtagttacggatattatatcgtaatttgggatattatatcgtagtttcggagagagatcgtagtttcggaaattatatcggtagttacggatattatatcgtagtttcggatattatatcgtagtttcggatattatatcgtagttacggatattatatcgtagttacggatattatatcgtagttacggatattatatcgtagtttcggatattatatcgtagtttcggatattatatcgtagtttcggatattatatcgtagttacggatattatatcgtagtttcggatattatatcgtagtttcggatattatatcgtagttacggatattatatcgtagttacggatattatatcgtagtttcggatattatatcgtagtttcggatattatatcgtagtttcggatattatatcgtagtttcgggaagtatatcgtagtttcgggaagtatatcgtagtttcgggaagtatatcgtagttacggatattatatcgtagtttcggatattatatcgtagtttcggatattatatcgtagttacggatattatatcgtagttacggatattatatcgtagtttcggatattatatcgtagttacggaaattatatcgtagttacggatattatatcgtagttacggatattatatcgtagtttcggatattatatcgtagtttcggatattatatcgtagtttcggatattatatcgtagtttcggatattatatcgtagttacggaaattatatcgtagttacggaaattatatcgtagttacggatattatatcgtagtttcgtaaattttatcgtagtttcggaaattttatcgtagttacggaaattatatcgtagtttcgggaaattatatcgtagtttcggaaattatatcgtagttatggaaattatatcgcggttacggaaattatatcgcggttacggaaattatatcgcggttacggaaattatatcgcggttacggaaattatatcgcggttacggaaattatatcgtagtttcggaaattatatcgtagttacggaaattatatcgtagtttcggaaattatatcgtagttttggaaattatatt

SEQ ID NO: 20434 - DNA, 2345 bp, Artificial Sequence
  chemically treated genomic DNA (Homo sapiens) CpG-island No: 20434
aatataatttccaaaactacgatataatttccgaaactacgatataatttccgtaactacgatataatttccgaaactacgatataatttccgtaaccgcgatataatttccgtaaccgcgatataatttccgtaaccgcgatataatttccgtaaccgcgatataatttccgtaaccgcgatataatttccataactacgatataatttccgaaactacgatataatttcccgaaactacgatataatttccgtaactacgataaaatttccgaaactacgataaaatttacgaaactacgatataatatccgtaactacgatataatttccgtaactacgatataatttccgtaactacgatataatatccgaaactacgatataatatccgaaactacgatataatatccgaaactacgatataatatccgaaactacgatataatatccgtaactacgatataatatccgtaactacgatataatttccgtaactacgatataatatccgaaactacgatataatatccgtaactacgatataatatccgtaactacgatataatatccgaaactacgatataatatccgaaactacgatataatatccgtaactacgatatacttcccgaaactacgatatacttcccgaaactacgatatacttcccgaaactacgatataatatccgaaactacgatataatatccgaaactacgatataatatccgaaactacgatataatatccgtaactacgatataatatccgtaactacgatataatatccgaaactacgatataatatccgaaactacgatataatatccgtaactacgatataatatccgaaactacgatataatatccgaaactacgatataatatccgaaactacgatataatatccgtaactacgatataatatccgtaactacgatataatatccgtaactacgatataatatccgaaactacgatataatatccgaaactacgatataatatccgtaactaccgatataatttccgaaactacgatctctctccgaaactacgatataatatcccaaattacgatataatatccgtaactacgatataatatccgtaactacgatataatatccgtaactacgatataatatccgaaactacgatataatatccgaaactacgatataatatccgaaactacgatataatatccgtaactacgatataatttacgaaactacgatataatatccgtaactacgatataatatccgtaactacgatataatatccgaaactacgatataatatccgaaactacgatataatatccgtaactacgatatacttcccgaaactacgatatacttcccgaaactacgatatacttcccgaaactacgatataatatccgaaactacgatataatatccgaaactacgatataatatccgaaactacgatataatatccgtaactacgatataatatccgaaactacgatataatatccgaaactacgatataatatccgtaactacgatataatatccgaaactacgatataatatccgaaactacgatataatatccgaaactacgatataatatccgtaactacgatataatatccgtaactacgatataatatccgtaactacgatataatatccgtaactacgatataatatccgaaactacgatataatatccgaaactacgatataatatccgtaactacgatataatatccgtaactacgatataatatccgaaactacgatataatatccgtaactacgatataatatccgaaactacgatataatatccgtaactacgatataatatccgtaactacgatataatatccgtaactacgatataatatccgaaactacgatataatatccgtaactacgatataatttacgaaactacgatataatatccgtaactacgatataatatccgtaactacgatataatatccgaaactacgatataatatccgaaactacgatataatatccgaaactacgatataatatccgtaactacgatataatatccgaaactacgatataatatccgaaactacgatataatatccgaaactacgatataatatccgtaactacgatataatatccgaaactacgatataatatccgtaactacgatataatatccgtaactacgatataatatccgaaactacgatataatatccgaaactacgatataatatccgtaactacgatataatatccgtaactacgatataatatccgtaactacgatataatatccgaaactacgatataatatccgaaactacgata

SEQ ID NO: 20435 - DNA, 2345 bp, Artificial Sequence
  chemically treated genomic DNA (Homo sapiens) CpG-island No: 20435
ggtgtaatttttaaagttgcggtgtaattttcgaagttgcggtgtaattttcgtagttgcggtgtaattttcgagattgcggtgtaattttcgtggtcgcggtgtaattttcgtagtcgcggtgtaattttcgtagtcgcggtgtaattttcgtagtcgcggtgtaattttcgtagtcgcggtgtaatttttatagttgcggtgtaattttcgagattgcggtgtgatttttcgagattgcggtgtgattttcgtagttgcggtgggattttcgagattgcggtggaatttacgaggttgcggtgtaatgttcgtggttgcggtgtaattttcgtggttgcggtgtaattttcgtggttgcggtgtaatgttcgaggttgcggtgtaatgttcgaggttgcggtgtaatgttcgaggttgcggtgtaatgttcgaggttgcggtgtaatgttcgtggttgcggtgtaatgttcgtggttgcggtgtaattttcgtggttgcggtgtaatgttcgaggttgcggtgtaatgttcgtggttgcggtgtaatgttcgtggttgcggtgtaatgttcgaggttgcggtgtaatgttcgaggttgcggtgtaatgttcgtggttgcggtgtatttttcgaggttgcggtgtatttttcgaggttgcggtgtatttttcgaggttgcggtgtaatgttcgaggttgcggtgtaatgttcgaggttgcggtgtaatgttcgaggttgcggtgtaatgttcgtggttgcggtgtaatgttcgtggttgcggtgtaatgttcgaggttgcggtgtaatgttcgaggttgcggtgtaatgttcgtggttgcggtgtaatgttcgaggttgcggtgtaatgttcgaggttgcggtgtaatgttcgaggttgcggtgtaatgttcgtggttgcggtgtaatgttcgtggttgcggtgtaatgttcgtggttgcggtgtaatgttcgaggttgcggtgtaatgttcgaggttgcggtgtaatgttcgtggttgtcggtgtaattttcgaggttgcggttttttttcgaggttgcggtgtaatgttttaggttgcggtgtaatgttcgtggttgcggtgtaatgttcgtggttgcggtgtaatgttcgtggttgcggtgtaatgttcgaggttgcggtgtaatgttcgaggttgcggtgtaatgttcgaggttgcggtgtaatgttcgtggttgcggtgtaatttacgaggttgcggtgtaatgttcgtggttgcggtgtaatgttcgtggttgcggtgtaatgttcgaggttgcggtgtaatgttcgaggttgcggtgtaatgttcgtggttgcggtgtatttttcgaggttgcggtgtatttttcgaggttgcggtgtatttttcgaggttgcggtgtaatgttcgaggttgcggtgtaatgttcgaggttgcggtgtaatgttcgaggttgcggtgtaatgttcgtggttgcggtgtaatgttcgaggttgcggtgtaatgttcgaggttgcggtgtaatgttcgtggttgcggtgtaatgttcgaggttgcggtgtaatgttcgaggttgcggtgtaatgttcgaggttgcggtgtaatgttcgtggttgcggtgtaatgttcgtggttgcggtgtaatgttcgtggttgcggtgtaatgttcgtggttgcggtgtaatgttcgaggttgcggtgtaatgttcgaggttgcggtgtaatgttcgtggttgcggtgtaatgttcgtggttgcggtgtaatgttcgaggttgcggtgtaatgttcgtggttgcggtgtaatgttcgaggttgcggtgtaatgttcgtggttgcggtgtaatgttcgtggttgcggtgtaatgttcgtggttgcggtgtaatgttcgaggttgcggtgtaatgttcgtggttgcggtgtaatttacgaggttgcggtgtaatgttcgtggttgcggtgtaatgttcgtggttgcggtgtaatgttcgaggttgcggtgtaatgttcgaggttgcggtgtaatgttcgaggttgcggtgtaatgttcgtggttgcggtgtaatgttcgaggttgcggtgtaatgttcgaggttgcggtgtaatgttcgaggttgcggtgtaatgttcgtggttgcggtgtaatgttcgaggttgcggtgtaatgttcgtggttgcggtgtaatgttcgtggttgcggtgtaatgttcgaggttgcggtgtaatgttcgaggttgcggtgtaatgttcgtggttgcggtgtaatgttcgtggttgcggtgtaatgttcgtggttgcggtgtaatgttcgaggttgcggtgtaatgttcgaggttgcggtg

SEQ ID NO: 20436 - DNA, 2345 bp, Artificial Sequence
  chemically treated genomic DNA (Homo sapiens) CpG-island No: 20436
caccgcaacctcgaacattacaccgcaacctcgaacattacaccgcaaccacgaacattacaccgcaaccacgaacattacaccgcaaccacgaacattacaccgcaacctcgaacattacaccgcaacctcgaacattacaccgcaaccacgaacattacaccgcaaccacgaacattacaccgcaacctcgaacattacaccgcaaccacgaacattacaccgcaacctcgaacattacaccgcaacctcgaacattacaccgcaacctcgaacattacaccgcaaccacgaacattacaccgcaacctcgaacattacaccgcaacctcgaacattacaccgcaacctcgaacattacaccgcaaccacgaacattacaccgcaaccacgaacattacaccgcaacctcgtaaattacaccgcaaccacgaacattacaccgcaacctcgaacattacaccgcaaccacgaacattacaccgcaaccacgaacattacaccgcaaccacgaacattacaccgcaacctcgaacattacaccgcaaccacgaacattacaccgcaacctcgaacattacaccgcaaccacgaacattacaccgcaaccacgaacattacaccgcaacctcgaacattacaccgcaacctcgaacattacaccgcaaccacgaacattacaccgcaaccacgaacattacaccgcaaccacgaacattacaccgcaaccacgaacattacaccgcaacctcgaacattacaccgcaacctcgaacattacaccgcaacctcgaacattacaccgcaaccacgaacattacaccgcaacctcgaacattacaccgcaacctcgaacattacaccgcaaccacgaacattacaccgcaacctcgaacattacaccgcaacctcgaacattacaccgcaacctcgaacattacaccgcaacctcgaaaaatacaccgcaacctcgaaaaatacaccgcaacctcgaaaaatacaccgcaaccacgaacattacaccgcaacctcgaacattacaccgcaacctcgaacattacaccgcaaccacgaacattacaccgcaaccacgaacattacaccgcaacctcgtaaattacaccgcaaccacgaacattacaccgcaacctcgaacattacaccgcaacctcgaacattacaccgcaacctcgaacattacaccgcaaccacgaacattacaccgcaaccacgaacattacaccgcaaccacgaacattacaccgcaacctaaaacattacaccgcaacctcgaaaaaaaaccgcaacctcgaaaattacaccgacaaccacgaacattacaccgcaacctcgaacattacaccgcaacctcgaacattacaccgcaaccacgaacattacaccgcaaccacgaacattacaccgcaaccacgaacattacaccgcaacctcgaacattacaccgcaacctcgaacattacaccgcaacctcgaacattacaccgcaaccacgaacattacaccgcaacctcgaacattacaccgcaacctcgaacattacaccgcaaccacgaacattacaccgcaaccacgaacattacaccgcaacctcgaacattacaccgcaacctcgaacattacaccgcaacctcgaacattacaccgcaacctcgaaaaatacaccgcaacctcgaaaaatacaccgcaacctcgaaaaatacaccgcaaccacgaacattacaccgcaacctcgaacattacaccgcaacctcgaacattacaccgcaaccacgaacattacaccgcaaccacgaacattacaccgcaacctcgaacattacaccgcaaccacgaaaattacaccgcaaccacgaacattacaccgcaaccacgaacattacaccgcaacctcgaacattacaccgcaacctcgaacattacaccgcaacctcgaacattacaccgcaacctcgaacattacaccgcaaccacgaaaattacaccgcaaccacgaaaattacaccgcaaccacgaacattacaccgcaacctcgtaaattccaccgcaatctcgaaaatcccaccgcaactacgaaaatcacaccgcaatctcgaaaaatcacaccgcaatctcgaaaattacaccgcaactataaaaattacaccgcgactacgaaaattacaccgcgactacgaaaattacaccgcgactacgaaaattacaccgcgactacgaaaattacaccgcgaccacgaaaattacaccgcaatctcgaaaattacaccgcaactacgaaaattacaccgcaacttcgaaaattacaccgcaactttaaaaattacacc

SEQ ID NO: 20437 - DNA, 660 bp, Artificial Sequence
  chemically treated genomic DNA (Homo sapiens) CpG-island No: 20437
cgtatttattttttttcgcgtatagattcgtttttatacgttcgggcgggtgatttcggagggtcgcgcggggttgtgtgcgcgggcgggggcgggatgtgtttggagggggtagagcgttttttttcggtttcggagggtttacgcggatcggttgagcgttttattagtcggttttgtatttattatttagatttgcgcgttttggtgggagtatcgtagtttcgggtcggtttttcgaacgtcgagcgtttattcgcggagattagcgtaggaggcgggttcgcgcgtaaggaggcgggcgatagggtggagtcgtcgtagttggtagtcgtacggttttatttgttgtagcgtcggagcgcgttcgtttgagaaggtagagcgcggtgcggatttgtgtttcgcgcgtcggttggtagggtagggtcgcggttgttaggaggttcgggaatagtttcgacggagcggcgcggagagggcgtttttcggaaggtgagatttgagcgcggtagcggcgttagcgttcgttataaggcggggtttcggggagggggtttcggcggtttgttggagagttttgttattgttttgtatgaggtgggggatgttttttgcgcggatttcgcgtttaggtaaaattttggaacgtattaggta

SEQ ID NO: 20438 - DNA, 660 bp, Artificial Sequence
  chemically treated genomic DNA (Homo sapiens) CpG-island No: 20438
tacctaatacgttccaaaattttacctaaacgcgaaatccgcgcaaaaaacatcccccacctcatacaaaacaataacaaaactctccaacaaaccgccgaaaccccctccccgaaaccccgccttataacgaacgctaacgccgctaccgcgctcaaatctcaccttccgaaaaacgccctctccgcgccgctccgtcgaaactattcccgaacctcctaacaaccgcgaccctaccctaccaaccgacgcgcgaaacacaaatccgcaccgcgctctaccttctcaaacgaacgcgctccgacgctacaacaaataaaaccgtacgactaccaactacgacgactccaccctatcgcccgcctccttacgcgcgaacccgcctcctacgctaatctccgcgaataaacgctcgacgttcgaaaaaccgacccgaaactacgatactcccaccaaaacgcgcaaatctaaataataaatacaaaaccgactaataaaacgctcaaccgatccgcgtaaaccctccgaaaccgaaaaaaaacgctctaccccctccaaacacatcccgcccccgcccgcgcacacaaccccgcgcgaccctccgaaatcacccgcccgaacgtataaaaacgaatctatacgcgaaaaaaaataaatacg

SEQ ID NO: 20439 - DNA, 660 bp, Artificial Sequence
  chemically treated genomic DNA (Homo sapiens) CpG-island No: 20439
tgtttagtgcgttttagagttttgtttggacgcggggttcgcgtagaaggtattttttattttatgtagaatagtagtaaggttttttagtaaatcgtcggggtttttttttcgagatttcgttttgtagcgggcgttggcgtcgttgtcgcgtttagattttatttttcggggagcgtttttttcgcgtcgtttcgtcgggattgttttcgggttttttggtagtcgcggttttgttttgttagtcggcgcgcggagtataggttcgtatcgcgttttgtttttttaggcgggcgcgtttcgacgttgtaataggtagagtcgtgcggttgttagttgcggcgattttattttgtcgttcgtttttttgcgcgcgggttcgttttttgcgttggttttcgcgggtagacgttcggcgttcgaagggtcgattcggggttgcggtgtttttattagggcgcgtagatttgggtagtggatgtagaatcggttggtgggacgtttagtcggttcgcgtgggtttttcggggtcgggagagggcgttttgttttttttagatatatttcgttttcgttcgcgtatatagtttcgcgcggtttttcggaattattcgttcgggcgtgtgggagcgaatttgtacgcggagaggaatggatacg

SEQ ID NO: 20440 - DNA, 660 bp, Artificial Sequence
  chemically treated genomic DNA (Homo sapiens) CpG-island No: 20440
cgtatccattcctctccgcgtacaaattcgctcccacacgcccgaacgaataattccgaaaaaccgcgcgaaactatatacgcgaacgaaaacgaaatatatctaaaaaaaacaaaacgccctctcccgaccccgaaaaacccacgcgaaccgactaaacgtcccaccaaccgattctacatccactacccaaatctacgcgccctaataaaaacaccgcaaccccgaatcgacccttcgaacgccgaacgtctacccgcgaaaaccaacgcaaaaaacgaacccgcgcgcaaaaaaacgaacgacaaaataaaatcgccgcaactaacaaccgcacgactctacctattacaacgtcgaaacgcgcccgcctaaaaaaacaaaacgcgatacgaacctatactccgcgcgccgactaacaaaacaaaaccgcgactaccaaaaaacccgaaaacaatcccgacgaaacgacgcgaaaaaaacgctccccgaaaaataaaatctaaacgcgacaacgacgccaacgcccgctacaaaacgaaatctcgaaaaaaaaaccccgacgatttactaaaaaaccttactactattctacataaaataaaaaataccttctacgcgaaccccgcgtccaaacaaaactctaaaacgcactaaaca

SEQ ID NO: 20441 - DNA, 882 bp, Artificial Sequence
  chemically treated genomic DNA (Homo sapiens) CpG-island No: 20441
agcgttggggttcggtcggaggtcggagttttcggacgtcgtagttttcggacgtcgtttagtatagttttttttttcgtgcgttcgttttggattttttttatttttaagtttcggtagtcgattcggagattcgggaggttataggtttagcgcgatattacgattataattaggaggtattatcgtcgatttatttggggaggtatttataaagttagtagattgatattcgtgttttagtcgtcggcggtttgcgaagcgatagttaaaggaattaggatttaggatttcggcgttttgtttattcgtagattttcggatcgcgtttttttttcgtcgtttcgtttcgtttcgtttcgtttcgcgatcgtttttttgcgggaaattcgagttggttcgagtttgttttgaagacgcgttacgtttttttttttatttgagtcggatagggagtcggggtggaaattgcgttcgtattttagcgttaagtagacgtgaattttgcgttcgtttttcgggatttttagcgttaaggagaatttcgaggagagtagggggagtggaggggaacggcggcgataaagcggatttgaaattaggagttaaggaggacgtggggagtggcgttataggagttatcgaggcggcggtcgggggagtttcgcggttgcgggagagttcggcggttatgggcgagtcggcggtggggcgttcgggagttggttgagcgtcggggtttttatttttcgggggtgtgggcgagatttcgtcgacgttcggtgtcgtgggtttgggggttgttttcgggggttcggttatggttggtcggggttttagttggggttcgggttatttgaacgaggataacgcgcgtttttt

SEQ ID NO: 20442 - DNA, 882 bp, Artificial Sequence
  chemically treated genomic DNA (Homo sapiens) CpG-island No: 20442
aaaaaacgcgcgttatcctcgttcaaataacccgaaccccaactaaaaccccgaccaaccataaccgaacccccgaaaacaacccccaaacccacgacaccgaacgtcgacgaaatctcgcccacacccccgaaaaataaaaaccccgacgctcaaccaactcccgaacgccccaccgccgactcgcccataaccgccgaactctcccgcaaccgcgaaactcccccgaccgccgcctcgataactcctataacgccactccccacgtcctccttaactcctaatttcaaatccgctttatcgccgccgttcccctccactccccctactctcctcgaaattctccttaacgctaaaaatcccgaaaaacgaacgcaaaattcacgtctacttaacgctaaaatacgaacgcaatttccaccccgactccctatccgactcaaataaaaaaaaaaacgtaacgcgtcttcaaaacaaactcgaaccaactcgaatttcccgcaaaaaaacgatcgcgaaacgaaacgaaacgaaacgaaacgacgaaaaaaaaacgcgatccgaaaatctacgaataaacaaaacgccgaaatcctaaatcctaattcctttaactatcgcttcgcaaaccgccgacgactaaaacacgaatatcaatctactaactttataaatacctccccaaataaatcgacgataatacctcctaattataatcgtaatatcgcgctaaacctataacctcccgaatctccgaatcgactaccgaaacttaaaaataaaaaaaatccaaaacgaacgcacgaaaaaaaaaactatactaaacgacgtccgaaaactacgacgtccgaaaactccgacctccgaccgaaccccaacgct

SEQ ID NO: 20443 - DNA, 882 bp, Artificial Sequence
  chemically treated genomic DNA (Homo sapiens) CpG-island No: 20443
agaaagcgcgcgttgttttcgtttaggtggttcgggttttagttgaaatttcggttagttatggtcgggttttcgggggtagtttttaggtttacggtatcgggcgtcggcggagtttcgtttatattttcgggaaataagggtttcggcgtttagttagttttcgggcgttttatcgtcggttcgtttatgatcgtcgggttttttcgtagtcgcgaggttttttcggtcgtcgtttcggtagtttttgtggcgttattttttacgttttttttgatttttagttttaaattcgttttgtcgtcgtcgtttttttttattttttttgtttttttcggagttttttttaacgttgaaggtttcggggaacgggcgtagagtttacgtttgtttggcgttgggatgcgggcgtagtttttatttcggttttttgttcggtttagataggggagggggcgtggcgcgtttttagggtaagttcgagttaattcgagtttttcgtaaagagacggtcgcggggcggggcggggcggggcggggcggcggggggggggcgcggttcggaggtttgcgggtaagtagagcgtcggggttttgggttttggtttttttgattatcgtttcgtaggtcgtcgacggttaggatacgggtgttagtttgttggttttgtaggtgtttttttaggtagatcgacgatggtgttttttagttgtggtcgtggtgtcgcgttgagtttgtggtttttcgagttttcgaatcggttgtcggggtttagggatggagggggtttagggcgggcgtacggagagaggggttgtgttgagcggcgttcgagggttgcggcgttcgagggtttcgattttcggtcgggttttaacgtt

SEQ ID NO: 20444 - DNA, 882 bp, Artificial Sequence
  chemically treated genomic DNA (Homo sapiens) CpG-island No: 20444
aacgttaaaacccgaccgaaaatcgaaaccctcgaacgccgcaaccctcgaacgccgctcaacacaacccctctctccgtacgcccgccctaaaccccctccatccctaaaccccgacaaccgattcgaaaactcgaaaaaccacaaactcaacgcgacaccacgaccacaactaaaaaacaccatcgtcgatctacctaaaaaaacacctacaaaaccaacaaactaacacccgtatcctaaccgtcgacgacctacgaaacgataatcaaaaaaaccaaaacccaaaaccccgacgctctacttacccgcaaacctccgaaccgcgccccccccccgccgccccgccccgccccgccccgccccgcgaccgtctctttacgaaaaactcgaattaactcgaacttaccctaaaaacgcgccacgccccctcccctatctaaaccgaacaaaaaaccgaaataaaaactacgcccgcatcccaacgccaaacaaacgtaaactctacgcccgttccccgaaaccttcaacgttaaaaaaaactccgaaaaaaacaaaaaaaataaaaaaaaacgacgacgacaaaacgaatttaaaactaaaaatcaaaaaaaacgtaaaaaataacgccacaaaaactaccgaaacgacgaccgaaaaaacctcgcgactacgaaaaaacccgacgatcataaacgaaccgacgataaaacgcccgaaaactaactaaacgccgaaacccttatttcccgaaaatataaacgaaactccgccgacgcccgataccgtaaacctaaaaactacccccgaaaacccgaccataactaaccgaaatttcaactaaaacccgaaccacctaaacgaaaacaacgcgcgctttct

SEQ ID NO: 20445 - DNA, 634 bp, Artificial Sequence
  chemically treated genomic DNA (Homo sapiens) CpG-island No: 20445
gagtcgcgggggtgcggggcgcgtagttcgttttatttcgggagagtcgcgatcgtcgttttcgacgcgtgtattaagtgggggtgttcggttcgggataaaggatcgggacgcggatcgcgggcgggcgttattgtttagttttagcgtggagggcgagatcgtggtttcgaatttttttaaatttggcggttcggggcgcgtgggggggacgtttcgttatttgcgcggttataaaggagagatttatggtgtcgttgtagttagcgttcgagttttcgttgttgtcgttgtcgttgcgggttagtcgtttgtatagttggcggggatcgggttgagtagcgagcgttcggagatcgtacggcgtattcggttgtttttgggtttttggttttagatttttattaggcggagggtttcgagcgcgggggcgggcggggcggggtggggcggggttcggcggacggggcgtttttttacgtgattatttttcgttttattttcggggcggggttcgttagaaattttaagcgttcgtaatcgttttttttcgtgggcgggatggggaaattgaggttcgaggtcgtttcgttggttggtgtaagaattagtttgtaatttaagttttgagttg

SEQ ID NO: 20446 - DNA, 634 bp, Artificial Sequence
  chemically treated genomic DNA (Homo sapiens) CpG-island No: 20446
caactcaaaacttaaattacaaactaattcttacaccaaccaacgaaacgacctcgaacctcaatttccccatcccgcccacgaaaaaaaacgattacgaacgcttaaaatttctaacgaaccccgccccgaaaataaaacgaaaaataatcacgtaaaaaaacgccccgtccgccgaaccccgccccaccccgccccgcccgcccccgcgctcgaaaccctccgcctaataaaaatctaaaaccaaaaacccaaaaacaaccgaatacgccgtacgatctccgaacgctcgctactcaacccgatccccgccaactatacaaacgactaacccgcaacgacaacgacaacaacgaaaactcgaacgctaactacaacgacaccataaatctctcctttataaccgcgcaaataacgaaacgtcccccccacgcgccccgaaccgccaaatttaaaaaaattcgaaaccacgatctcgccctccacgctaaaactaaacaataacgcccgcccgcgatccgcgtcccgatcctttatcccgaaccgaacacccccacttaatacacgcgtcgaaaacgacgatcgcgactctcccgaaataaaacgaactacgcgccccgcacccccgcgactc

SEQ ID NO: 20447 - DNA, 634 bp, Artificial Sequence
  chemically treated genomic DNA (Homo sapiens) CpG-island No: 20447
tagtttaggatttgggttgtaggttggtttttgtattaattagcggggcggtttcgggttttagtttttttatttcgtttacgaagggaggcgattgcgagcgtttggggtttttgacggatttcgtttcgggggtggggcggggagtggttacgtggaggggcgtttcgttcgtcgagtttcgttttatttcgtttcgttcgttttcgcgttcggggtttttcgtttagtagagatttggagttagaagtttagagatagtcgagtgcgtcgtgcggttttcggacgttcgttgtttagttcgattttcgttaattgtgtaggcggttgattcgtagcggtagcggtagtagcgaggattcgagcgttggttgtagcgatattatggattttttttttatggtcgcgtaggtaacggggcgttttttttacgcgtttcgggtcgttaagtttggggaggttcggggttacggtttcgttttttacgttggggttgggtagtggcgttcgttcgcgattcgcgtttcggttttttgtttcgagtcggatatttttatttggtgtacgcgtcgggggcggcgatcgcggttttttcggggtggggcgggttgcgcgtttcgtattttcgcggttt

SEQ ID NO: 20448 - DNA, 634 bp, Artificial Sequence
  chemically treated genomic DNA (Homo sapiens) CpG-island No: 20448
aaaccgcgaaaatacgaaacgcgcaacccgccccaccccgaaaaaaccgcgatcgccgcccccgacgcgtacaccaaataaaaatatccgactcgaaacaaaaaaccgaaacgcgaatcgcgaacgaacgccactacccaaccccaacgtaaaaaacgaaaccgtaaccccgaacctccccaaacttaacgacccgaaacgcgtaaaaaaaacgccccgttacctacgcgaccataaaaaaaaaatccataatatcgctacaaccaacgctcgaatcctcgctactaccgctaccgctacgaatcaaccgcctacacaattaacgaaaatcgaactaaacaacgaacgtccgaaaaccgcacgacgcactcgactatctctaaacttctaactccaaatctctactaaacgaaaaaccccgaacgcgaaaacgaacgaaacgaaataaaacgaaactcgacgaacgaaacgcccctccacgtaaccactccccgccccacccccgaaacgaaatccgtcaaaaaccccaaacgctcgcaatcgcctcccttcgtaaacgaaataaaaaaactaaaacccgaaaccgccccgctaattaatacaaaaaccaacctacaacccaaatcctaaacta

SEQ ID NO: 20449 - DNA, 565 bp, Artificial Sequence
  chemically treated genomic DNA (Homo sapiens) CpG-island No: 20449
agttttcgcggttcggagtttatttcgtttttttcggttcgcggggtcgacgagttcggaggggtgtcgcgggaggtgagttcggcgacgtcgtaagcggtttcgacgttttcgacgttttcgacgtttggtttcgagttttttttcggtttttttcgggttattttttttttgttttagtttcgtagggtttttatgttcgttcgtttcgtttttttcgttcgcggtttcgttcgcgcggagtggcggatattaaatgttataatatacggagcgtttggttcgtcgttcgtagaattcggcggttcgtagcggggaataggggtcgttcgtttttttttaggttttcgttcggtttcgcgttttcggttttcggttttattttgtatttcggttgtcggtttggtcgcgggttttgttttttcgttttaagattgacgtcgtgttttgttttttattcgtagttcgcgttttttatattcgtttatcggcgtttggttttaggttttgatatttatttagttggtgtttagtgttcgatgagtggataagtgaatgatttttt

SEQ ID NO: 20450 - DNA, 565 bp, Artificial Sequence
  chemically treated genomic DNA (Homo sapiens) CpG-island No: 20450
aaaaaatcattcacttatccactcatcgaacactaaacaccaactaaataaatatcaaaacctaaaaccaaacgccgataaacgaatataaaaaacgcgaactacgaataaaaaacaaaacacgacgtcaatcttaaaacgaaaaaacaaaacccgcgaccaaaccgacaaccgaaatacaaaataaaaccgaaaaccgaaaacgcgaaaccgaacgaaaacctaaaaaaaaacgaacgacccctattccccgctacgaaccgccgaattctacgaacgacgaaccaaacgctccgtatattataacatttaatatccgccactccgcgcgaacgaaaccgcgaacgaaaaaaacgaaacgaacgaacataaaaaccctacgaaactaaaacaaaaaaaaaataacccgaaaaaaaccgaaaaaaaactcgaaaccaaacgtcgaaaacgtcgaaaacgtcgaaaccgcttacgacgtcgccgaactcacctcccgcgacacccctccgaactcgtcgaccccgcgaaccgaaaaaaacgaaataaactccgaaccgcgaaaact

SEQ ID NO: 20451 - DNA, 565 bp, Artificial Sequence
  chemically treated genomic DNA (Homo sapiens) CpG-island No: 20451
aaggagttatttatttatttatttatcgaatattgaatattaattggatgagtgttaaggtttggggttaggcgtcggtgggcggatgtaagggacgcgggttgcgagtgggggatagaatacgacgttaattttaaggcgaaggagtagagttcgcggttagatcggtagtcgggatgtagggtggggtcgggggtcgagggcgcgggatcgagcggaggtttgaggaggggcgggcggtttttgtttttcgttgcggatcgtcggattttgcgggcggcgagttaggcgtttcgtgtgttgtggtatttagtgttcgttatttcgcgcgggcgagatcgcgggcgagggagacggggcggacgggtatggagattttgcggggttgaggtaagggaagagtggttcgggggaggtcgaggaggggttcggggttaggcgtcgggggcgtcgggggcgtcggggtcgtttgcggcgtcgtcggatttatttttcgcggtattttttcggattcgtcggtttcgcgggtcggaggaggcgggatggatttcgggtcgcgggggtt

SEQ ID NO: 20452 - DNA, 565 bp, Artificial Sequence
  chemically treated genomic DNA (Homo sapiens) CpG-island No: 20452
aacccccgcgacccgaaatccatcccgcctcctccgacccgcgaaaccgacgaatccgaaaaaataccgcgaaaaataaatccgacgacgccgcaaacgaccccgacgcccccgacgcccccgacgcctaaccccgaacccctcctcgacctcccccgaaccactcttcccttacctcaaccccgcaaaatctccatacccgtccgccccgtctccctcgcccgcgatctcgcccgcgcgaaataacgaacactaaataccacaacacacgaaacgcctaactcgccgcccgcaaaatccgacgatccgcaacgaaaaacaaaaaccgcccgcccctcctcaaacctccgctcgatcccgcgccctcgacccccgaccccaccctacatcccgactaccgatctaaccgcgaactctactccttcgccttaaaattaacgtcgtattctatcccccactcgcaacccgcgtcccttacatccgcccaccgacgcctaaccccaaaccttaacactcatccaattaatattcaatattcgataaataaataaataaataactcctt

SEQ ID NO: 20453 - DNA, 590 bp, Artificial Sequence
  chemically treated genomic DNA (Homo sapiens) CpG-island No: 20453
ttcggcgaggtttcggtggggaggggtagggatggtttagtttcgtttcgttagggcggggtttgcgtttgcgcgtttagcggtcgggcgtgtaatttacgggtgcgcgtttacgatcgttagattcgagtagtttttggaatacgttgcggggttttcgggtttgagttaggtttgttttttacgtaggtgtttcgcgcgtttcgtttagttatgtcgttcggtatttatgtagcgttggtgattggaggtaataagggtatcggtttggttatcgtgcgcgatttgtgtcggttgttttcgggggacgtggtgtttacggcgcgggacgtgacgcggggttaggcggtcgtatagtagttgtaggcggagggtttgagttcgcgtttttattagttggatatcgacgatttgtagagtattcgcgttttgcgcgattttttgcgtaaggagtacgggggtttggacgtgttggttaataacgcgggtatcgtttttaagggtatggggaggggacgtggttttttcgaagaagaatcgatgtattggggtttttggcgtttgcggggtttataacgtttttttaggga

SEQ ID NO: 20454 - DNA, 590 bp, Artificial Sequence
  chemically treated genomic DNA (Homo sapiens) CpG-island No: 20454
tccctaaaaaaacgttataaaccccgcaaacgccaaaaaccccaatacatcgattcttcttcgaaaaaaccacgtcccctccccatacccttaaaaacgatacccgcgttattaaccaacacgtccaaacccccgtactccttacgcaaaaaatcgcgcaaaacgcgaatactctacaaatcgtcgatatccaactaataaaaacgcgaactcaaaccctccgcctacaactactatacgaccgcctaaccccgcgtcacgtcccgcgccgtaaacaccacgtcccccgaaaacaaccgacacaaatcgcgcacgataaccaaaccgatacccttattacctccaatcaccaacgctacataaataccgaacgacataactaaacgaaacgcgcgaaacacctacgtaaaaaacaaacctaactcaaacccgaaaaccccgcaacgtattccaaaaactactcgaatctaacgatcgtaaacgcgcacccgtaaattacacgcccgaccgctaaacgcgcaaacgcaaaccccgccctaacgaaacgaaactaaaccatccctacccctccccaccgaaacctcgccgaa

SEQ ID NO: 20455 - DNA, 590 bp, Artificial Sequence
  chemically treated genomic DNA (Homo sapiens) CpG-island No: 20455
tttttagggaggcgttatggatttcgtagacgttaggagttttagtgtatcggttttttttcggggaggttacgttttttttttatatttttgaaggcgatgttcgcgttgttgattagtacgtttaggttttcgtattttttgcgtaggaagtcgcgtagggcgcggatgttttgtagatcgtcgatgtttagttggtggaagcgcgggtttaggtttttcgtttgtagttgttgtacggtcgtttggtttcgcgttacgtttcgcgtcgtgagtattacgtttttcgagaatagtcggtataggtcgcgtacgatggttaagtcgatgtttttgttgtttttagttattagcgttatatggatgtcggacgatatggttgaacggggcgcgcggaatatttgcgtggagaatagatttggtttaggttcgggagtttcgtagcgtgttttagagattgttcgagtttggcggtcgtgggcgcgtattcgtgggttatacgttcggtcgttgagcgcgtaggcgtaggtttcgttttagcggggcggggttgaattatttttatttttttttatcggaatttcgtcggg

SEQ ID NO: 20456 - DNA, 590 bp, Artificial Sequence
  chemically treated genomic DNA (Homo sapiens) CpG-island No: 20456
cccgacgaaattccgataaaaaaaaataaaaataattcaaccccgccccgctaaaacgaaacctacgcctacgcgctcaacgaccgaacgtataacccacgaatacgcgcccacgaccgccaaactcgaacaatctctaaaacacgctacgaaactcccgaacctaaaccaaatctattctccacgcaaatattccgcgcgccccgttcaaccatatcgtccgacatccatataacgctaataactaaaaacaacaaaaacatcgacttaaccatcgtacgcgacctataccgactattctcgaaaaacgtaatactcacgacgcgaaacgtaacgcgaaaccaaacgaccgtacaacaactacaaacgaaaaacctaaacccgcgcttccaccaactaaacatcgacgatctacaaaacatccgcgccctacgcgacttcctacgcaaaaaatacgaaaacctaaacgtactaatcaacaacgcgaacatcgccttcaaaaatataaaaaaaaaacgtaacctccccgaaaaaaaaccgatacactaaaactcctaacgtctacgaaatccataacgcctccctaaaaa

SEQ ID NO: 20457 - DNA, 762 bp, Artificial Sequence
  chemically treated genomic DNA (Homo sapiens) CpG-island No: 20457
ttcgttttttagtttcgtttcgttcgcggaaatttcgttttcgcgcgtttatggtttatttttaggtttcgtttttgagttcgtttttaggcgtttagtttcgttttttagtttcgttttaagcgtcgaggttcggtttttaggtttcgtttcgattcgcgcggtggggaagagtcgttgtcgttggtttttcggttttttttcggcggttttggttttcggtcgcgtcgtagttttgtttagttttttttttttagttcggagggttttttcgcgtcgtacgtgagcgcgttcgttaatagggttattgtcgcggtaagtcgtgtttgcgttttgttcggcgtttagtttttagtcgttgggcgaagtcggaggagtcgggtatttttttttcgtcggttcgcgggttttttttcgggtttagagggtttgggcggcgtcgtggggcggttcggggtgtaggtggtttatcggcgcgcggttcgggtttgcggcgcgttttgttgtagtgcgggggcggagagttcggggtcggagatcgggagggtagcggggagattgggtggggttttttagggttattcgattttggcgcggaggatatgatgtcggttacgttttcgtcgagcggggcggtaggtgtaggtttaggggtgggtcgcggttcgcgcgttttttcggggtcggtttacgaagagacgtttagtttttgtttgttggtgttttggttggggaggaggttggggacgtagatttgtgaga

SEQ ID NO: 20458 - DNA, 762 bp, Artificial Sequence
  chemically treated genomic DNA (Homo sapiens) CpG-island No: 20458
tctcacaaatctacgtccccaacctcctccccaaccaaaacaccaacaaacaaaaactaaacgtctcttcgtaaaccgaccccgaaaaaacgcgcgaaccgcgacccacccctaaacctacacctaccgccccgctcgacgaaaacgtaaccgacatcatatcctccgcgccaaaatcgaataaccctaaaaaaccccacccaatctccccgctaccctcccgatctccgaccccgaactctccgcccccgcactacaacaaaacgcgccgcaaacccgaaccgcgcgccgataaaccacctacaccccgaaccgccccacgacgccgcccaaaccctctaaacccgaaaaaaaacccgcgaaccgacgaaaaaaaaatacccgactcctccgacttcgcccaacgactaaaaactaaacgccgaacaaaacgcaaacacgacttaccgcgacaataaccctattaacgaacgcgctcacgtacgacgcgaaaaaaccctccgaactaaaaaaaaaaaactaaacaaaactacgacgcgaccgaaaaccaaaaccgccgaaaaaaaaccgaaaaaccaacgacaacgactcttccccaccgcgcgaatcgaaacgaaacctaaaaaccgaacctcgacgcttaaaacgaaactaaaaaacgaaactaaacgcctaaaaacgaactcaaaaacgaaacctaaaaataaaccataaacgcgcgaaaacgaaatttccgcgaacgaaacgaaactaaaaaacgaa

SEQ ID NO: 20459 - DNA, 762 bp, Artificial Sequence
  chemically treated genomic DNA (Homo sapiens) CpG-island No: 20459
ttttataggtttgcgtttttagttttttttttagttagggtattagtaaataaaggttgagcgttttttcgtgggtcggtttcgggagggcgcgcgggtcgcgatttatttttggatttgtatttgtcgtttcgttcggcgagggcgtggtcggtattatatttttcgcgttagggtcgggtaattttaggggattttatttagttttttcgttgttttttcggttttcggtttcgagtttttcgttttcgtattgtagtagagcgcgtcgtaggttcgggtcgcgcgtcggtaagttatttgtatttcgggtcgttttacggcgtcgtttaagttttttggattcggagaaggattcgcgggtcggcggggaggagatgttcggttttttcggtttcgtttagcggttgaggattggacgtcggatagggcgtaggtacgatttatcgcggtagtggttttgttggcgggcgcgtttacgtgcggcgcggaggagtttttcgggttgggggagagagattgggtagggttgcggcgcggtcgggagttagaatcgtcgaggaagagtcggagaattagcggtagcggtttttttttatcgcgcgggtcggggcggagtttggaagtcgggtttcggcgtttggggcggggttggaaggcggggttggacgtttggaggcgggtttaggggcgggatttggaggtgggttataggcgcgcgggggcggggttttcgcgggcggggcggaattagaagacggg

SEQ ID NO: 20460 - DNA, 762 bp, Artificial Sequence
  chemically treated genomic DNA (Homo sapiens) CpG-island No: 20460
cccgtcttctaattccgccccgcccgcgaaaaccccgcccccgcgcgcctataacccacctccaaatcccgcccctaaacccgcctccaaacgtccaaccccgccttccaaccccgccccaaacgccgaaacccgacttccaaactccgccccgacccgcgcgataaaaaaaaaccgctaccgctaattctccgactcttcctcgacgattctaactcccgaccgcgccgcaaccctacccaatctctctcccccaacccgaaaaactcctccgcgccgcacgtaaacgcgcccgccaacaaaaccactaccgcgataaatcgtacctacgccctatccgacgtccaatcctcaaccgctaaacgaaaccgaaaaaaccgaacatctcctccccgccgacccgcgaatccttctccgaatccaaaaaacttaaacgacgccgtaaaacgacccgaaatacaaataacttaccgacgcgcgacccgaacctacgacgcgctctactacaatacgaaaacgaaaaactcgaaaccgaaaaccgaaaaaacaacgaaaaaactaaataaaatcccctaaaattacccgaccctaacgcgaaaaatataataccgaccacgccctcgccgaacgaaacgacaaatacaaatccaaaaataaatcgcgacccgcgcgccctcccgaaaccgacccacgaaaaaacgctcaacctttatttactaataccctaactaaaaaaaaaactaaaaacgcaaacctataaaa

SEQ ID NO: 20461 - DNA, 611 bp, Artificial Sequence
  chemically treated genomic DNA (Homo sapiens) CpG-island No: 20461
gtcgtttcgttattttttagtcgggttgcggcggaggtcgtttttggttttgtagttcgtttaagatggcggcgtagttatttcgcgggatacgttttagcgcggtgagtagtcgcgaggggtggagcgggtcgtgttttaggagggcgggcgggtaagcgaaggggggtcggtagtgggcggtggcggtttgtggggtcgacgcggcggcgggggttgcggcggggttcggggagggggcggttatttcgttttcgtcggcggaatagttcggttgcgggtcgggttgcgtttcgtcgtttttgtattgtgtttttgttttgtttcggggcgggttagggtcgcggtttttttttttagtttttttttagttttttagtagttgtcgttcgcgggcgaggtttcggcgggagatcggtttgttttcggggtcgcggggtttttgatttttttttgttcgttgggcgtcgtggtgggagggagcgggtttcgcgtttagaaacgtcggcggtttcgacgtttcgggggcggggggacggggttgcgggtttgtttgcgggcgagtggagttaggatgagtgtgtttgatgtttgttagtgtttgtagtttt

SEQ ID NO: 20462 - DNA, 611 bp, Artificial Sequence
  chemically treated genomic DNA (Homo sapiens) CpG-island No: 20462
aaaactacaaacactaacaaacatcaaacacactcatcctaactccactcgcccgcaaacaaacccgcaaccccgtccccccgcccccgaaacgtcgaaaccgccgacgtttctaaacgcgaaacccgctccctcccaccacgacgcccaacgaacaaaaaaaaatcaaaaaccccgcgaccccgaaaacaaaccgatctcccgccgaaacctcgcccgcgaacgacaactactaaaaaactaaaaaaaaactaaaaaaaaaaaccgcgaccctaacccgccccgaaacaaaacaaaaacacaatacaaaaacgacgaaacgcaacccgacccgcaaccgaactattccgccgacgaaaacgaaataaccgccccctccccgaaccccgccgcaacccccgccgccgcgtcgaccccacaaaccgccaccgcccactaccgaccccccttcgcttacccgcccgccctcctaaaacacgacccgctccacccctcgcgactactcaccgcgctaaaacgtatcccgcgaaataactacgccgccatcttaaacgaactacaaaaccaaaaacgacctccgccgcaacccgactaaaaaataacgaaacgac

SEQ ID NO: 20463 - DNA, 611 bp, Artificial Sequence
  chemically treated genomic DNA (Homo sapiens) CpG-island No: 20463
gaagttgtaggtattgataggtattaggtatatttattttgattttattcgttcgtaggtaggttcgtagtttcgttttttcgttttcgggacgtcgaggtcgtcggcgtttttggacgcggaattcgtttttttttattacgacgtttagcggatagaagagggttaggggtttcgcggtttcgagagtagatcgatttttcgtcgaggtttcgttcgcggacgatagttgttgggagattaggagggagttgggaggaggagtcgcgattttggttcgtttcgaagtaaaatagaaatataatgtagaggcgacggaacgtagttcggttcgtagtcgagttgtttcgtcgacgggagcgagatggtcgtttttttttcgggtttcgtcgtagttttcgtcgtcgcgtcggttttataagtcgttatcgtttattgtcggttttttttcgtttgttcgttcgtttttttgggatacggttcgttttatttttcgcggttgtttatcgcgttgaggcgtatttcgcggggtggttgcgtcgttattttgagcgagttataaagttaggaacggttttcgtcgtaattcgattgggaggtggcggaacgat

SEQ ID NO: 20464 - DNA, 611 bp, Artificial Sequence
  chemically treated genomic DNA (Homo sapiens) CpG-island No: 20464
atcgttccgccacctcccaatcgaattacgacgaaaaccgttcctaactttataactcgctcaaaataacgacgcaaccaccccgcgaaatacgcctcaacgcgataaacaaccgcgaaaaataaaacgaaccgtatcccaaaaaaacgaacgaacaaacgaaaaaaaaccgacaataaacgataacgacttataaaaccgacgcgacgacgaaaactacgacgaaacccgaaaaaaaaacgaccatctcgctcccgtcgacgaaacaactcgactacgaaccgaactacgttccgtcgcctctacattatatttctattttacttcgaaacgaaccaaaatcgcgactcctcctcccaactccctcctaatctcccaacaactatcgtccgcgaacgaaacctcgacgaaaaatcgatctactctcgaaaccgcgaaacccctaaccctcttctatccgctaaacgtcgtaataaaaaaaaacgaattccgcgtccaaaaacgccgacgacctcgacgtcccgaaaacgaaaaaacgaaactacgaacctacctacgaacgaataaaatcaaaataaatatacctaatacctatcaatacctacaacttc

SEQ ID NO: 20465 - DNA, 532 bp, Artificial Sequence
  chemically treated genomic DNA (Homo sapiens) CpG-island No: 20465
ttcgttttggcgtttatgagtgggcggggtttttttggggtatcgtttacgtcgggcgggatttgagggtcgttggaggggcggggcgtttatgaggtttcgtttatgcgggggcggggtttgcggcgcgcgggaagcggcgcgcgttgcgcgggaggtgacggtgtttttgattgttcgggtttttttaggtacggtttttttggttcgggtagtttcgcggtttttttggtcgcgtcggttcgggttagaggttttcgtcgagggcgggtttttgggtttcgggatagtttcggagcggcgcgcgttggggcggcggggtttcgtttattttcggtttcgcgcggttttttttcggcggttttagttttagtttttcgggtttagcgttcggtttttgggaaaggcggggtttttttttcgtttcgtcgtttcggttttttatttcgtttggttttttttttcgggaggtttttttcggggcgggttttttttcgggtttttagggcgcgtttttagtttttattaagcg

SEQ ID NO: 20466 - DNA, 532 bp, Artificial Sequence
  chemically treated genomic DNA (Homo sapiens) CpG-island No: 20466
cgcttaataaaaactaaaaacgcgccctaaaaacccgaaaaaaaacccgccccgaaaaaaacctcccgaaaaaaaaaaccaaacgaaataaaaaaccgaaacgacgaaacgaaaaaaaaaccccgcctttcccaaaaaccgaacgctaaacccgaaaaactaaaactaaaaccgccgaaaaaaaaccgcgcgaaaccgaaaataaacgaaaccccgccgccccaacgcgcgccgctccgaaactatcccgaaacccaaaaacccgccctcgacgaaaacctctaacccgaaccgacgcgaccaaaaaaaccgcgaaactacccgaaccaaaaaaaccgtacctaaaaaaacccgaacaatcaaaaacaccgtcacctcccgcgcaacgcgcgccgcttcccgcgcgccgcaaaccccgcccccgcataaacgaaacctcataaacgccccgcccctccaacgaccctcaaatcccgcccgacgtaaacgataccccaaaaaaaccccgcccactcataaacgccaaaacgaa

SEQ ID NO: 20467 - DNA, 532 bp, Artificial Sequence
  chemically treated genomic DNA (Homo sapiens) CpG-island No: 20467
cgtttagtaggggttaggggcgcgttttgagagttcggggaggggttcgtttcgggaggagtttttcggaagagggggttaaacggggtaggggatcggggcggcggggcgagaggagaatttcgttttttttagggatcgggcgttgggttcgggaagttgggattgaggtcgtcgggaggaggtcgcgcggggtcgggggtggacggggtttcgtcgttttaacgcgcgtcgtttcggagttatttcggggtttaggggttcgttttcggcgagggtttttggttcggatcgacgcgattaaaagagtcgcggagttgttcgggttagggaagtcgtatttggagggattcggatagttagaggtatcgttatttttcgcgtagcgcgcgtcgtttttcgcgcgtcgtaggtttcgttttcgtatgggcgggattttatagacgtttcgtttttttagcggtttttaggtttcgttcgacgtgggcggtattttagggaagtttcgtttatttatagacgttaaggcgag

SEQ ID NO: 20468 - DNA, 532 bp, Artificial Sequence
  chemically treated genomic DNA (Homo sapiens) CpG-island No: 20468
ctcgccttaacgtctataaataaacgaaacttccctaaaataccgcccacgtcgaacgaaacctaaaaaccgctaaaaaaacgaaacgtctataaaatcccgcccatacgaaaacgaaacctacgacgcgcgaaaaacgacgcgcgctacgcgaaaaataacgatacctctaactatccgaatccctccaaatacgacttccctaacccgaacaactccgcgactcttttaatcgcgtcgatccgaaccaaaaaccctcgccgaaaacgaacccctaaaccccgaaataactccgaaacgacgcgcgttaaaacgacgaaaccccgtccacccccgaccccgcgcgacctcctcccgacgacctcaatcccaacttcccgaacccaacgcccgatccctaaaaaaaacgaaattctcctctcgccccgccgccccgatcccctaccccgtttaaccccctcttccgaaaaactcctcccgaaacgaacccctccccgaactctcaaaacgcgcccctaacccctactaaacg

SEQ ID NO: 20469 - DNA, 780 bp, Artificial Sequence
  chemically treated genomic DNA (Homo sapiens) CpG-island No: 20469
ttcgattgtacgcgtttttttgggatttcgtattggcgagtcgtttttttcggcgttggacgttttatttgtttcggcgtcgtcggaagagttttgtagagtgagtttttagggttatttcgttgttttttttttcgttttcgtagtcgttgtagttagcgtgggagtcgggtaggtcgcgtggggcgttggatttatcgagaggttagcgtcgtcgtcgggggagggcgtgtttcgtacgtgtgtgttcgcgcgtgttcgcgttcgcgtgtgttagcgcgcgtgttttggtcgtgcgcgtcgagtcgggtcgtattaattttttcggcgtcgacgggtttagtttatggtgtgggcgtcgggtttagggaggtttcggttttcgttaatcgcggagtagggcggtcgtttcgacgcgcgatttgcgaattcggagtgcgcgtcgggggcggggtagggacgcgtgggcgggaatgtacgcgcgtggttaggtgcgcgtgggtgcgagcgcgcgggagttttcgagtgcgcgcgtgttcgtgtgcgcgtgggtgtgggtgtgttcgcgtgttcgtgcgcgcgttttcggggttaagagcgcgggtcgcgcgggtaggtttggatattacgcgttttgttcgggtttaggacgcggttggcggtttcgggaggaagaggaggaggaagaggaggaggcggaggaggaggaagaggaggagggaggcggaggagtagaggttgggacggtcggaggagagagttcggttttagtaggaaagg

SEQ ID NO: 20470 - DNA, 780 bp, Artificial Sequence
  chemically treated genomic DNA (Homo sapiens) CpG-island No: 20470
cctttcctactaaaaccgaactctctcctccgaccgtcccaacctctactcctccgcctccctcctcctcttcctcctcctccgcctcctcctcttcctcctcctcttcctcccgaaaccgccaaccgcgtcctaaacccgaacaaaacgcgtaatatccaaacctacccgcgcgacccgcgctcttaaccccgaaaacgcgcgcacgaacacgcgaacacacccacacccacgcgcacacgaacacgcgcgcactcgaaaactcccgcgcgctcgcacccacgcgcacctaaccacgcgcgtacattcccgcccacgcgtccctaccccgcccccgacgcgcactccgaattcgcaaatcgcgcgtcgaaacgaccgccctactccgcgattaacgaaaaccgaaacctccctaaacccgacgcccacaccataaactaaacccgtcgacgccgaaaaaattaatacgacccgactcgacgcgcacgaccaaaacacgcgcgctaacacacgcgaacgcgaacacgcgcgaacacacacgtacgaaacacgccctcccccgacgacgacgctaacctctcgataaatccaacgccccacgcgacctacccgactcccacgctaactacaacgactacgaaaacgaaaaaaaaaacaacgaaataaccctaaaaactcactctacaaaactcttccgacgacgccgaaacaaataaaacgtccaacgccgaaaaaaacgactcgccaatacgaaatcccaaaaaaacgcgtacaatcgaa

SEQ ID NO: 20471 - DNA, 780 bp, Artificial Sequence
  chemically treated genomic DNA (Homo sapiens) CpG-island No: 20471
ttttttttgttggggtcggattttttttttcggtcgttttagtttttgttttttcgttttttttttttttttttttttttttcgtttttttttttttttttttttttttttttcggagtcgttagtcgcgttttaaattcgagtagggcgcgtagtgtttaaatttgttcgcgcggttcgcgtttttggtttcgagggcgcgcgtacggatacgcgagtatatttatatttacgcgtatacggatacgcgcgtattcgaagattttcgcgcgttcgtatttacgcgtatttggttacgcgcgtgtattttcgtttacgcgtttttgtttcgttttcggcgcgtatttcgggttcgtaagtcgcgcgtcggggcggtcgttttgtttcgcgattggcgggagtcggagtttttttgaattcggcgtttatattatgggttgagttcgtcggcgtcgagggagttagtgcgattcggttcggcgcgtacggttaaggtacgcgcgttggtatacgcgggcgcggatacgcgcggatatatacgtgcgggatacgttttttttcgacggcggcgttaatttttcggtaagtttagcgttttacgcgatttgttcggtttttacgttggttatagcggttgcggggacggggaggaaggtagcggggtggttttaggggtttattttgtagggttttttcgacggcgtcgggataggtggggcgtttagcgtcgggagggacggttcgttagtgcggggttttagggaggcgcgtgtagtcggg

SEQ ID NO: 20472 - DNA, 780 bp, Artificial Sequence
  chemically treated genomic DNA (Homo sapiens) CpG-island No: 20472
cccgactacacgcgcctccctaaaaccccgcactaacgaaccgtccctcccgacgctaaacgccccacctatcccgacgccgtcgaaaaaaccctacaaaataaacccctaaaaccaccccgctaccttcctccccgtccccgcaaccgctataaccaacgtaaaaaccgaacaaatcgcgtaaaacgctaaacttaccgaaaaattaacgccgccgtcgaaaaaaaacgtatcccgcacgtatatatccgcgcgtatccgcgcccgcgtataccaacgcgcgtaccttaaccgtacgcgccgaaccgaatcgcactaactccctcgacgccgacgaactcaacccataatataaacgccgaattcaaaaaaactccgactcccgccaatcgcgaaacaaaacgaccgccccgacgcgcgacttacgaacccgaaatacgcgccgaaaacgaaacaaaaacgcgtaaacgaaaatacacgcgcgtaaccaaatacgcgtaaatacgaacgcgcgaaaatcttcgaatacgcgcgtatccgtatacgcgtaaatataaatatactcgcgtatccgtacgcgcgccctcgaaaccaaaaacgcgaaccgcgcgaacaaatttaaacactacgcgccctactcgaatttaaaacgcgactaacgactccgaaaaaaaaaaaaaaaaaaaaaaaaaaaaacgaaaaaaaaaaaaaaaaaaaaaaaaaacgaaaaaacaaaaactaaaacgaccgaaaaaaaaaatccgaccccaacaaaaaaaa

SEQ ID NO: 20473 - DNA, 609 bp, Artificial Sequence
  chemically treated genomic DNA (Homo sapiens) CpG-island No: 20473
gaaaggtagcgtcggcgttacgtgtatacgggttgggtcgtttcgttagttgttagggttattgtcgcgtttatttttagagcgcgttgcgagtcgcggcgtttttgtgacgttattagttcgcgcgtcgtcgtcgtcgttttttgtgtagtcgcggttcgggcggacggtggttggttgtttcgtagcgttcggttggttgtagcggtatcgcgggttgcgcggtcggggatgttttagcgggcgcgatggttttcgttatgtagtcggtcgagatttaatttgtttagcggttggcgtttagcgagaagggtattcgggatcgagcggtgaagaagttgcgttagtatattagcgtgaagacgtagagggagataggtgggcgtacggtcgcggttagtcgcgttatatggcgggtcgggggtcggggttggggttagggttagggtttcggtacggaatgcggtttttacgtgttgtcgtgatatttagcgtgtgtttcggttttcgcgttgtcggaatcgttttttgttgtgtttagtgtttttttatatttaaggaaacgggttgagggggtttcgttatttatgaaagttatagtaagcgggg

SEQ ID NO: 20474 - DNA, 609 bp, Artificial Sequence
  chemically treated genomic DNA (Homo sapiens) CpG-island No: 20474
ccccgcttactataactttcataaataacgaaaccccctcaacccgtttccttaaatataaaaaaacactaaacacaacaaaaaacgattccgacaacgcgaaaaccgaaacacacgctaaatatcacgacaacacgtaaaaaccgcattccgtaccgaaaccctaaccctaaccccaaccccgacccccgacccgccatataacgcgactaaccgcgaccgtacgcccacctatctccctctacgtcttcacgctaatatactaacgcaacttcttcaccgctcgatcccgaatacccttctcgctaaacgccaaccgctaaacaaattaaatctcgaccgactacataacgaaaaccatcgcgcccgctaaaacatccccgaccgcgcaacccgcgataccgctacaaccaaccgaacgctacgaaacaaccaaccaccgtccgcccgaaccgcgactacacaaaaaacgacgacgacgacgcgcgaactaataacgtcacaaaaacgccgcgactcgcaacgcgctctaaaaataaacgcgacaataaccctaacaactaacgaaacgacccaacccgtatacacgtaacgccgacgctacctttc

SEQ ID NO: 20475 - DNA, 609 bp, Artificial Sequence
  chemically treated genomic DNA (Homo sapiens) CpG-island No: 20475
tttcgtttattgtgatttttataagtaacggaatttttttaattcgtttttttaagtgtaaaaaggtattagatatagtaagaagcggtttcggtagcgcggaaatcgaagtatacgttgggtgttacgataatacgtggaagtcgtatttcgtgtcggggttttggttttagttttagtttcggttttcggttcgttatgtggcgcggttgatcgcggtcgtgcgtttatttgtttttttttgcgtttttacgttgatgtattggcgtagtttttttatcgttcggtttcggatgtttttttcgttggacgttagtcgttgggtaaattggatttcggtcggttgtatggcgggggttatcgcgttcgttggagtattttcggtcgcgtaattcgcggtgtcgttgtagttagtcgagcgttgcggagtagttagttatcgttcgttcgggtcgcgattgtatagaaggcggcggcggcggcgcgcgggttgatggcgttataaaggcgtcgcggttcgtagcgcgttttgggagtgagcgcggtagtggttttggtagttggcggagcggtttagttcgtgtgtacgtggcgtcggcgttgtttttt

SEQ ID NO: 20476 - DNA, 609 bp, Artificial Sequence
  chemically treated genomic DNA (Homo sapiens) CpG-island No: 20476
aaaaaacaacgccgacgccacgtacacacgaactaaaccgctccgccaactaccaaaaccactaccgcgctcactcccaaaacgcgctacgaaccgcgacgcctttataacgccatcaacccgcgcgccgccgccgccgccttctatacaatcgcgacccgaacgaacgataactaactactccgcaacgctcgactaactacaacgacaccgcgaattacgcgaccgaaaatactccaacgaacgcgataacccccgccatacaaccgaccgaaatccaatttacccaacgactaacgtccaacgaaaaaaacatccgaaaccgaacgataaaaaaactacgccaatacatcaacgtaaaaacgcaaaaaaaaacaaataaacgcacgaccgcgatcaaccgcgccacataacgaaccgaaaaccgaaactaaaactaaaaccaaaaccccgacacgaaatacgacttccacgtattatcgtaacacccaacgtatacttcgatttccgcgctaccgaaaccgcttcttactatatctaatacctttttacacttaaaaaaacgaattaaaaaaattccgttacttataaaaatcacaataaacgaaa

SEQ ID NO: 20477 - DNA, 1372 bp, Artificial Sequence
  chemically treated genomic DNA (Homo sapiens) CpG-island No: 20477
gttttcgcgcggtttttgggaagggacgcggatcggatgcgggtttcgggttttgtaggtagttgagagcgcggtttttttgggtattcggggttcggggttattttcgcgttttcgtattatttttacgttcgcgcgtattttcgtggttattcgcgttgcgagagtgtcgcgttcggaggttaggggcgtggagttcgggttttcgagttttttttgcgtgcggcggggcgcggggcgcggggcgcggggcgtagggttgaggcggagtataatggttgaatgaatgaatgaacgaacgaatgaacggcgttgtagagttttttttaggcggaatgaaagtgtaaatttagcgtttcgggcggtagagtggcgggggttatttggcgcggtcgcgcggttagggttcggtttcgtttttttttagttcgggggcggggtttgcgtggttgttttcgtttcggttcgttttcggttagttttcggcgtcgcgcggaattcgcgggttcggagtcgttcgttgaggttagaaggaggcgtttgcgttgatcgggttcgtcgcgcgttagagttagagtcgtagtcgaggggagtcggggtcggagttcgagttcgagtcgagtcggagttcgagcgagcggcggagatcgtgttttcgtttcggtttcgcgtcgtcgcggttaggttcggtatggaggaggagtgtcgggtgttttttatatagagttacgttattcgcggttacgtgggtaatcgggcggttacgttttcgttgtaggtacgtattcgttcgtagttcgggtttacgtaattcgagttcgtgattttggcggggttgttcgagacgagttttagtttttcgagggaggttcgggagttgcgggtagagtttggcgcgggcgttttggaggtaggcgcgggatgagtttttcgttttgtttggtttgcgggggcggaagcggagggttgagcgttttgcgggtttttgcgggtgggacgggttcggcgtcggggtacgcgggtaggagggagttttgtgtattagttatggcgtagtcgttcgttttcgttttttttcgtcgatcgggttaattgtcgcgggggcgggcgggcggtgcggttttcggaggcgaggaaatgtcgtagagtttcgaggagtttcggagtagttacgcgagtcgggattttgtttcgttggaacgtagaagcggtcgtggagttcgagacgttcgcgcgtttattttttgggtttttgtgcgtggggaagttaggaagaagacgtcgagtgaggttacggtgtttacgagggtggatttttttcggtttgattacgttaggaggtggtcgaagggaagagggtggggtaggggtt

SEQ ID NO: 20478 - DNA, 1372 bp, Artificial Sequence
  chemically treated genomic DNA (Homo sapiens) CpG-island No: 20478
aacccctaccccaccctcttcccttcgaccacctcctaacgtaatcaaaccgaaaaaaatccaccctcgtaaacaccgtaacctcactcgacgtcttcttcctaacttccccacgcacaaaaacccaaaaaataaacgcgcgaacgtctcgaactccacgaccgcttctacgttccaacgaaacaaaatcccgactcgcgtaactactccgaaactcctcgaaactctacgacatttcctcgcctccgaaaaccgcaccgcccgcccgcccccgcgacaattaacccgatcgacgaaaaaaaacgaaaacgaacgactacgccataactaatacacaaaactccctcctacccgcgtaccccgacgccgaacccgtcccacccgcaaaaacccgcaaaacgctcaaccctccgcttccgcccccgcaaaccaaacaaaacgaaaaactcatcccgcgcctacctccaaaacgcccgcgccaaactctacccgcaactcccgaacctccctcgaaaaactaaaactcgtctcgaacaaccccgccaaaatcacgaactcgaattacgtaaacccgaactacgaacgaatacgtacctacaacgaaaacgtaaccgcccgattacccacgtaaccgcgaataacgtaactctatataaaaaacacccgacactcctcctccataccgaacctaaccgcgacgacgcgaaaccgaaacgaaaacacgatctccgccgctcgctcgaactccgactcgactcgaactcgaactccgaccccgactcccctcgactacgactctaactctaacgcgcgacgaacccgatcaacgcaaacgcctccttctaacctcaacgaacgactccgaacccgcgaattccgcgcgacgccgaaaactaaccgaaaacgaaccgaaacgaaaacaaccacgcaaaccccgcccccgaactaaaaaaaaacgaaaccgaaccctaaccgcgcgaccgcgccaaataacccccgccactctaccgcccgaaacgctaaatttacactttcattccgcctaaaaaaaactctacaacgccgttcattcgttcgttcattcattcattcaaccattatactccgcctcaaccctacgccccgcgccccgcgccccgcgccccgccgcacgcaaaaaaaactcgaaaacccgaactccacgcccctaacctccgaacgcgacactctcgcaacgcgaataaccacgaaaatacgcgcgaacgtaaaaataatacgaaaacgcgaaaataaccccgaaccccgaatacccaaaaaaaccgcgctctcaactacctacaaaacccgaaacccgcatccgatccgcgtcccttcccaaaaaccgcgcgaaaac

SEQ ID NO: 20479 - DNA, 1372 bp, Artificial Sequence
  chemically treated genomic DNA (Homo sapiens) CpG-island No: 20479
agtttttgttttattttttttttttcggttattttttggcgtggttaggtcgaggggaatttattttcgtgggtatcgtgattttattcggcgttttttttttgatttttttacgtataggggtttaggaggtgagcgcgcgagcgtttcgagttttacggtcgtttttgcgttttagcggggtaaggtttcggttcgcgtgattgtttcgggatttttcggggttttgcgatattttttcgttttcgggagtcgtatcgttcgttcgttttcgcggtagttggttcggtcggcgggaaggggcgaggacgagcggttgcgttatagttggtgtatagggtttttttttattcgcgtatttcgacgtcggattcgttttattcgtaggggttcgtagagcgtttagtttttcgttttcgttttcgtaagttaagtagagcgggaggtttatttcgcgtttgtttttagggcgttcgcgttaggttttgttcgtagttttcgagtttttttcggggaattgaggttcgtttcgggtagtttcgttaaggttacgggttcgggttacgtaagttcgggttgcgggcggatgcgtatttgtagcgggaacgtggtcgttcggttgtttacgtagtcgcggatgacgtggttttgtatggagagtattcggtattttttttttatgtcgggtttggtcgcggcggcgcggggtcgaggcgggggtacggttttcgtcgttcgttcgggtttcggttcggttcgggttcgggtttcggtttcggtttttttcggttgcgattttggttttggcgcgcggcggattcgattagcgtagacgtttttttttgattttagcgggcggtttcgaattcgcgagtttcgcgcggcgtcgggggttggtcgggggcggatcggggcggggatagttacgtaggtttcgttttcgggttgggaggaagcgaaatcggattttggtcgcgcggtcgcgttaggtggttttcgttattttgtcgttcgaaacgttgggtttgtatttttatttcgtttggagagggttttgtagcgtcgtttattcgttcgtttatttatttatttaattattgtgtttcgttttagttttgcgtttcgcgtttcgcgtttcgcgtttcgtcgtacgtaggggagattcgggggttcgggttttacgtttttgattttcgggcgcgatattttcgtaacgcggatggttacgagagtgcgcgcgggcgtgggaatagtgcggaggcgcgaaagtgatttcggatttcggatatttaagggaatcgcgtttttaattgtttgtagggttcggagttcgtattcgattcgcgtttttttttaggggtcgcgcgggagt

SEQ ID NO: 20480 - DNA, 1372 bp, Artificial Sequence
  chemically treated genomic DNA (Homo sapiens) CpG-island No: 20480
actcccgcgcgacccctaaaaaaaaacgcgaatcgaatacgaactccgaaccctacaaacaattaaaaacgcgattcccttaaatatccgaaatccgaaatcactttcgcgcctccgcactattcccacgcccgcgcgcactctcgtaaccatccgcgttacgaaaatatcgcgcccgaaaatcaaaaacgtaaaacccgaacccccgaatctcccctacgtacgacgaaacgcgaaacgcgaaacgcgaaacgcaaaactaaaacgaaacacaataattaaataaataaataaacgaacgaataaacgacgctacaaaaccctctccaaacgaaataaaaatacaaacccaacgtttcgaacgacaaaataacgaaaaccacctaacgcgaccgcgcgaccaaaatccgatttcgcttcctcccaacccgaaaacgaaacctacgtaactatccccgccccgatccgcccccgaccaacccccgacgccgcgcgaaactcgcgaattcgaaaccgcccgctaaaatcaaaaaaaaacgtctacgctaatcgaatccgccgcgcgccaaaaccaaaatcgcaaccgaaaaaaaccgaaaccgaaacccgaacccgaaccgaaccgaaacccgaacgaacgacgaaaaccgtacccccgcctcgaccccgcgccgccgcgaccaaacccgacataaaaaaaaaataccgaatactctccatacaaaaccacgtcatccgcgactacgtaaacaaccgaacgaccacgttcccgctacaaatacgcatccgcccgcaacccgaacttacgtaacccgaacccgtaaccttaacgaaactacccgaaacgaacctcaattccccgaaaaaaactcgaaaactacgaacaaaacctaacgcgaacgccctaaaaacaaacgcgaaataaacctcccgctctacttaacttacgaaaacgaaaacgaaaaactaaacgctctacgaacccctacgaataaaacgaatccgacgtcgaaatacgcgaataaaaaaaaaccctatacaccaactataacgcaaccgctcgtcctcgccccttcccgccgaccgaaccaactaccgcgaaaacgaacgaacgatacgactcccgaaaacgaaaaaatatcgcaaaaccccgaaaaatcccgaaacaatcacgcgaaccgaaaccttaccccgctaaaacgcaaaaacgaccgtaaaactcgaaacgctcgcgcgctcacctcctaaacccctatacgtaaaaaaatcaaaaaaaaaacgccgaataaaatcacgatacccacgaaaataaattcccctcgacctaaccacgccaaaaaataaccgaaaaaaaaaaaataaaacaaaaact

SEQ ID NO: 20481 - DNA, 764 bp, Artificial Sequence
  chemically treated genomic DNA (Homo sapiens) CpG-island No: 20481
agggaggttttttacggttatagttcgggttagtttaggggtgcgtagcggggttaaagcggtttttttcgttttaggagtcgcggtcgcgttttgaggttaaggtaggatttcgggtcggtttcgttttcgcggtttatttatttggtcggcgatgtgttgggtttcggcggtggtcggttgcgtggcggagggcgtttcgtatattattttggcggcgacggagggaatttggcgaggggattcggcgaggggacgcggcggttttttagtttaagtaggcgttggggttacgtgacgcgcgggcggaattaaggggcggggaggaggtattttggtttcggagttttttgcggggtcgcggtggtttcgtaagaagggacgcgcggggcggggcgcggggcggggcgcggggcggggaatttggttattattcgtcgtaggttgggttttcgcgtttagcgttggtgtcgggagggagcgtttttttttcggggttggtatcgttttttcgggcgtcgagttatacggatcggggcgggggcgcggtcgggtgtcgtcggtgggttgggcgcgtagggtgggacgatagggaaggggtagtcggagtaggcgtaattttgtagggtggcggggttcgggtcgcgtacgagggagggcggggcgtagcgttgtaggggttaggggttaggggtttcggtttcgcgggagtaggtgtgcgggttgtagtggatattatcgtttgtgatcgagaatattgaagg

SEQ ID NO: 20482 - DNA, 764 bp, Artificial Sequence
  chemically treated genomic DNA (Homo sapiens) CpG-island No: 20482
ccttcaatattctcgatcacaaacgataatatccactacaacccgcacacctactcccgcgaaaccgaaacccctaacccctaacccctacaacgctacgccccgccctccctcgtacgcgacccgaaccccgccaccctacaaaattacgcctactccgactaccccttccctatcgtcccaccctacgcgcccaacccaccgacgacacccgaccgcgcccccgccccgatccgtataactcgacgcccgaaaaaacgataccaaccccgaaaaaaaaacgctccctcccgacaccaacgctaaacgcgaaaacccaacctacgacgaataataaccaaattccccgccccgcgccccgccccgcgccccgccccgcgcgtcccttcttacgaaaccaccgcgaccccgcaaaaaactccgaaaccaaaatacctcctccccgccccttaattccgcccgcgcgtcacgtaaccccaacgcctacttaaactaaaaaaccgccgcgtcccctcgccgaatcccctcgccaaattccctccgtcgccgccaaaataatatacgaaacgccctccgccacgcaaccgaccaccgccgaaacccaacacatcgccgaccaaataaataaaccgcgaaaacgaaaccgacccgaaatcctaccttaacctcaaaacgcgaccgcgactcctaaaacgaaaaaaaccgctttaaccccgctacgcacccctaaactaacccgaactataaccgtaaaaaacctccct

SEQ ID NO: 20483 - DNA, 764 bp, Artificial Sequence
  chemically treated genomic DNA (Homo sapiens) CpG-island No: 20483
tttttagtgttttcggttataagcggtgatgtttattgtagttcgtatatttgttttcgcggggtcgggatttttgatttttgatttttgtagcgttgcgtttcgttttttttcgtgcgcggttcggatttcgttattttgtaggattgcgtttatttcgattgttttttttttatcgttttattttgcgcgtttaatttatcggcgatattcggtcgcgttttcgtttcggttcgtgtgattcggcgttcggaaagacgatattagtttcgggaggggggcgttttttttcgatattagcgttgggcgcggagatttagtttgcggcgagtggtggttaggtttttcgtttcgcgtttcgtttcgcgtttcgtttcgcgcgtttttttttgcggggttatcgcgatttcgtaggggatttcgaagttaaagtgtttttttttcgttttttggtttcgttcgcgcgttacgtgattttagcgtttatttgggttgaggagtcgtcgcgttttttcgtcgagttttttcgttagatttttttcgtcgtcgttaagatgatgtgcggggcgtttttcgttacgtagtcggttatcgtcgagatttagtatatcgtcgattaggtgggtgggtcgcggggacggggtcggttcggagttttgttttagttttagggcgcggtcgcggtttttggagcgaaagaagtcgttttggtttcgttgcgtatttttgggttggttcgggttgtggtcgtgagaggttttttt

SEQ ID NO: 20484 - DNA, 764 bp, Artificial Sequence
  chemically treated genomic DNA (Homo sapiens) CpG-island No: 20484
aaaaaaacctctcacgaccacaacccgaaccaacccaaaaatacgcaacgaaaccaaaacgacttctttcgctccaaaaaccgcgaccgcgccctaaaactaaaacaaaactccgaaccgaccccgtccccgcgacccacccacctaatcgacgatatactaaatctcgacgataaccgactacgtaacgaaaaacgccccgcacatcatcttaacgacgacgaaaaaaatctaacgaaaaaactcgacgaaaaaacgcgacgactcctcaacccaaataaacgctaaaatcacgtaacgcgcgaacgaaaccaaaaaacgaaaaaaaaacactttaacttcgaaatcccctacgaaatcgcgataaccccgcaaaaaaaaacgcgcgaaacgaaacgcgaaacgaaacgcgaaacgaaaaacctaaccaccactcgccgcaaactaaatctccgcgcccaacgctaatatcgaaaaaaaacgcccccctcccgaaactaatatcgtctttccgaacgccgaatcacacgaaccgaaacgaaaacgcgaccgaatatcgccgataaattaaacgcgcaaaataaaacgataaaaaaaaaacaatcgaaataaacgcaatcctacaaaataacgaaatccgaaccgcgcacgaaaaaaaacgaaacgcaacgctacaaaaatcaaaaatcaaaaatcccgaccccgcgaaaacaaatatacgaactacaataaacatcaccgcttataaccgaaaacactaaaaa

SEQ ID NO: 20485 - DNA, 671 bp, Artificial Sequence
  chemically treated genomic DNA (Homo sapiens) CpG-island No: 20485
gcgtaggcgcgcgttcgttggtttcgtttatgcgtataggtagggagcgcgcgttttttttgtagttttcggttttcgggggttgtagttgcgcggttcggttattgcgcggcggtggcgtgcgtttgggcggtgtcgcgggttgtgacgttacgttacgcgtcggggttaggaggaggcgggcgtaggaggcgcgtgtttagtgtgttgggtattaggcgatttcgggatagggggtttcggtcgtcggcgttatggtttcgcgcgtgtagttttcgtttgagatttagttggtttagcgtttggcggggaatgagtaggtgattcgggatcgggcggtgaggaagtttcggaaatatatcgtcgttaggatttagcgggtcgtaggttggcgggggtgtgggcggttggcgtttcgggggtcggttgggttggtgcgggtgtgggcggcggcggtcggagttgggggtttttcgagttttgtggaatttttacgtggtcgggtcgggtaggcggggtttattggtttgttttcgttgttatcggtttacggttttcgtcgtcgttttttttcgtggtgcggtgattttggtttttttgcgagaacgtttttttttagtttcgtaattttttttttagtttaggcgttttttttttttagtagattatgt

SEQ ID NO: 20486 - DNA, 671 bp, Artificial Sequence
  chemically treated genomic DNA (Homo sapiens) CpG-island No: 20486
acataatctactaaaaaaaaaaaacgcctaaactaaaaaaaaaattacgaaactaaaaaaaaacgttctcgcaaaaaaaccaaaatcaccgcaccacgaaaaaaaacgacgacgaaaaccgtaaaccgataacaacgaaaacaaaccaataaaccccgcctacccgacccgaccacgtaaaaattccacaaaactcgaaaaacccccaactccgaccgccgccgcccacacccgcaccaacccaaccgacccccgaaacgccaaccgcccacacccccgccaacctacgacccgctaaatcctaacgacgatatatttccgaaacttcctcaccgcccgatcccgaatcacctactcattccccgccaaacgctaaaccaactaaatctcaaacgaaaactacacgcgcgaaaccataacgccgacgaccgaaaccccctatcccgaaatcgcctaatacccaacacactaaacacgcgcctcctacgcccgcctcctcctaaccccgacgcgtaacgtaacgtcacaacccgcgacaccgcccaaacgcacgccaccgccgcgcaataaccgaaccgcgcaactacaacccccgaaaaccgaaaactacaaaaaaaacgcgcgctccctacctatacgcataaacgaaaccaacgaacgcgcgcctacgc

SEQ ID NO: 20487 - DNA, 671 bp, Artificial Sequence
  chemically treated genomic DNA (Homo sapiens) CpG-island No: 20487
atatggtttattggagggaggggacgtttgagttaggaaaggggttacggggttggggaggagcgttttcgtagagggattagagttatcgtattacgagggaaagcggcggcgggggtcgtgggtcggtaatagcgggaataggttagtggatttcgtttgttcggttcggttacgtggaggttttatagggttcggagggtttttagtttcggtcgtcgtcgtttatattcgtattagtttagtcggttttcgagacgttagtcgtttatattttcgttaatttgcggttcgttgagttttggcgacgatgtattttcggagtttttttatcgttcggtttcgggttatttgtttatttttcgttaggcgttgagttagttggattttaggcgggagttgtacgcgcgaaattatgacgtcgacggtcgagattttttgtttcggagtcgtttggtatttagtatattgagtacgcgttttttgcgttcgtttttttttggtttcggcgcgtggcgtgacgttatagttcgcgatatcgtttaggcgtacgttatcgtcgcgtagtggtcgagtcgcgtaattgtagttttcggaggtcgaaggttatagagggggcgcgcgttttttgtttgtgcgtatgggcggaattagcgagcgcgcgtttgcgt

SEQ ID NO: 20488 - DNA, 671 bp, Artificial Sequence
  chemically treated genomic DNA (Homo sapiens) CpG-island No: 20488
acgcaaacgcgcgctcgctaattccgcccatacgcacaaacaaaaaacgcgcgccccctctataaccttcgacctccgaaaactacaattacgcgactcgaccactacgcgacgataacgtacgcctaaacgatatcgcgaactataacgtcacgccacgcgccgaaaccaaaaaaaaacgaacgcaaaaaacgcgtactcaatatactaaataccaaacgactccgaaacaaaaaatctcgaccgtcgacgtcataatttcgcgcgtacaactcccgcctaaaatccaactaactcaacgcctaacgaaaaataaacaaataacccgaaaccgaacgataaaaaaactccgaaaatacatcgtcgccaaaactcaacgaaccgcaaattaacgaaaatataaacgactaacgtctcgaaaaccgactaaactaatacgaatataaacgacgacgaccgaaactaaaaaccctccgaaccctataaaacctccacgtaaccgaaccgaacaaacgaaatccactaacctattcccgctattaccgacccacgacccccgccgccgctttccctcgtaatacgataactctaatccctctacgaaaacgctcctccccaaccccgtaacccctttcctaactcaaacgtcccctccctccaataaaccatat

SEQ ID NO: 20489 - DNA, 1247 bp, Artificial Sequence
  chemically treated genomic DNA (Homo sapiens) CpG-island No: 20489
ttcgcgggattttagtttggtttttcgtcgttttttttcgtttagtttcgatttttttgattttcgcgtttttcgcggtttcggttcgtttttttttttagttcgggttttagtttcgttcgttagcggattttacgtaggtttcgcgttcggtttcgtcggcgttttcggtttatattttttttcgcgcgcgtgtttcgtcgtgtcgttttcgtgtttttttcgcgttttttttcgcgtcgttttttcgcgttttttttcgcgtttttttttcgtgtttttttagcgtgtttttcggtcgtttcgcgcgcgtcggcggaattgtgggatcgtcgcgtataggaagtggcggcggcggcgcggtcgagggcggagggcggagggcggcgggatgggggtcgggggcggcgggcgtcgtattcgttgaggtttcgacgtagggtcgggtcgggtttagggtcgaggagcgcggcggttagagcggggtcgcggaggcgacgtcggggacgttcgcgcgacgagtaggtggcggcggttgtaggtgagtatcgaggtttttattcgaggtcgggtcgtttttttttttttttacgtttcgtcgtcgttcgaggtcgttttttcgtcgtcggaggtcgtttttgttttagtcgttcgatttcgggtcgttcggggtttcgcgtcgtaatgggtcggtcgcgtttcgcggggcgcggggtttgggaaggcgcggggtcgggaggaggtttgggttcgggttttgtgcgtttttcgtaatttcggttttttcggcggtttggtttagcgcgaggtttcggtcgtttttcgtagtagtttcggtggcgttgggtttagcggggaggttcgggggttcggggcgttcgggaggggttcgggtcgggtcgagggagggcgagtgggttttcgcggggacgttttattttttcgttttggattttgtttcgggtttcgttcggttttttcgtggataggacgcgttcgtcgtttggtttcggggcgcggcggattcgggattttttttaggggtttttttttcgcgcgtttaggttaagggagtagttttatttttgtcgtttcgcgcggggagggttgcggggttcggggttggttgtgggttcggttcggagatcggcggcgcgtttgtatcgggcgggttaggggatggggttagttcgggggtaagagtcgtgggggcgaaaatttatttttggttattttaggatttttgg

SEQ ID NO: 20490 - DNA, 1247 bp, Artificial Sequence
  chemically treated genomic DNA (Homo sapiens) CpG-island No: 20490
ccaaaaatcctaaaataaccaaaaataaattttcgcccccacgactcttacccccgaactaaccccatcccctaacccgcccgatacaaacgcgccgccgatctccgaaccgaacccacaaccaaccccgaaccccgcaaccctccccgcgcgaaacgacaaaaataaaactactcccttaacctaaacgcgcgaaaaaaaaacccctaaaaaaaatcccgaatccgccgcgccccgaaaccaaacgacgaacgcgtcctatccacgaaaaaaccgaacgaaacccgaaacaaaatccaaaacgaaaaaataaaacgtccccgcgaaaacccactcgccctccctcgacccgacccgaacccctcccgaacgccccgaacccccgaacctccccgctaaacccaacgccaccgaaactactacgaaaaacgaccgaaacctcgcgctaaaccaaaccgccgaaaaaaccgaaattacgaaaaacgcacaaaacccgaacccaaacctcctcccgaccccgcgccttcccaaaccccgcgccccgcgaaacgcgaccgacccattacgacgcgaaaccccgaacgacccgaaatcgaacgactaaaacaaaaacgacctccgacgacgaaaaaacgacctcgaacgacgacgaaacgtaaaaaaaaaaaaaaacgacccgacctcgaataaaaacctcgatactcacctacaaccgccgccacctactcgtcgcgcgaacgtccccgacgtcgcctccgcgaccccgctctaaccgccgcgctcctcgaccctaaacccgacccgaccctacgtcgaaacctcaacgaatacgacgcccgccgcccccgacccccatcccgccgccctccgccctccgccctcgaccgcgccgccgccgccacttcctatacgcgacgatcccacaattccgccgacgcgcgcgaaacgaccgaaaaacacgctaaaaaaacacgaaaaaaaaacgcgaaaaaaaacgcgaaaaaacgacgcgaaaaaaaacgcgaaaaaaacacgaaaacgacacgacgaaacacgcgcgcgaaaaaaaatataaaccgaaaacgccgacgaaaccgaacgcgaaacctacgtaaaatccgctaacgaacgaaactaaaacccgaactaaaaaaaaaaacgaaccgaaaccgcgaaaaacgcgaaaatcaaaaaaatcgaaactaaacgaaaaaaaacgacgaaaaaccaaactaaaatcccgcgaa

SEQ ID NO: 20491 - DNA, 1247 bp, Artificial Sequence
  chemically treated genomic DNA (Homo sapiens) CpG-island No: 20491
ttaagggttttggggtggttaggagtgggttttcgtttttacggtttttgttttcggattgattttattttttgattcgttcggtgtaaacgcgtcgtcggttttcgggtcgaatttatagttaatttcgggtttcgtagtttttttcgcgcggagcggtaaaagtgaaattgtttttttggtttgggcgcgcgaggaggaggtttttggggggggtttcgggttcgtcgcgtttcgaaattaggcggcgggcgcgttttgtttacgggggagtcgagcggggttcggagtagagtttaggacggagggatgggacgttttcgcgggaatttattcgttttttttcggttcggttcgggtttttttcgggcgtttcgaattttcgggttttttcgttgggtttagcgttatcgaggttgttgcgggaagcggtcggggtttcgcgttggattaggtcgtcggggaggtcggggttgcggggggcgtataggattcgggtttagattttttttcggtttcgcgtttttttaggtttcgcgtttcgcggagcgcggtcggtttattgcggcgcggggtttcgggcggttcgaggtcggacggttggggtaggggcgattttcggcggcgggagggcgatttcgggcggcggcggggcgtgggggaagaggggggcggttcgatttcgggtgggggtttcggtgtttatttgtagtcgtcgttatttgttcgtcgcgcgggcgttttcggcgtcgttttcgcggtttcgttttggtcgtcgcgtttttcggttttgggttcggttcggttttgcgtcggggttttagcgagtgcggcgttcgtcgttttcggtttttatttcgtcgtttttcgtttttcgttttcggtcgcgtcgtcgtcgttattttttgtgcgcggcgattttatagtttcgtcggcgcgcgcggggcggtcgagggatacgttggggggatacgggggaaggacgcggggggggacgcggggggacggcgcggggggggacgcggaggggatacgggggcgatacggcgggatacgcgcgcggagagaggtgtgggtcgagggcgtcggcggggtcgggcgcggagtttgcgtgggattcgttaacggacggggttggggttcgggttgggggagggggcgggtcgggatcgcggggggcgcggggattaggggggtcggggttgaacggggggaggcggcgaaggattaggttggggtttcgcgag

SEQ ID NO: 20492 - DNA, 1247 bp, Artificial Sequence
  chemically treated genomic DNA (Homo sapiens) CpG-island No: 20492
ctcgcgaaaccccaacctaatccttcgccgcctccccccgttcaaccccgacccccctaatccccgcgccccccgcgatcccgacccgccccctcccccaacccgaaccccaaccccgtccgttaacgaatcccacgcaaactccgcgcccgaccccgccgacgccctcgacccacacctctctccgcgcgcgtatcccgccgtatcgcccccgtatcccctccgcgtccccccccgcgccgtccccccgcgtccccccccgcgtccttcccccgtatccccccaacgtatccctcgaccgccccgcgcgcgccgacgaaactataaaatcgccgcgcacaaaaaataacgacgacgacgcgaccgaaaacgaaaaacgaaaaacgacgaaataaaaaccgaaaacgacgaacgccgcactcgctaaaaccccgacgcaaaaccgaaccgaacccaaaaccgaaaaacgcgacgaccaaaacgaaaccgcgaaaacgacgccgaaaacgcccgcgcgacgaacaaataacgacgactacaaataaacaccgaaacccccacccgaaatcgaaccgcccccctcttcccccacgccccgccgccgcccgaaatcgccctcccgccgccgaaaatcgcccctaccccaaccgtccgacctcgaaccgcccgaaaccccgcgccgcaataaaccgaccgcgctccgcgaaacgcgaaacctaaaaaaacgcgaaaccgaaaaaaaatctaaacccgaatcctatacgccccccgcaaccccgacctccccgacgacctaatccaacgcgaaaccccgaccgcttcccgcaacaacctcgataacgctaaacccaacgaaaaaacccgaaaattcgaaacgcccgaaaaaaacccgaaccgaaccgaaaaaaaacgaataaattcccgcgaaaacgtcccatccctccgtcctaaactctactccgaaccccgctcgactcccccgtaaacaaaacgcgcccgccgcctaatttcgaaacgcgacgaacccgaaaccccccccaaaaacctcctcctcgcgcgcccaaaccaaaaaaacaatttcacttttaccgctccgcgcgaaaaaaactacgaaacccgaaattaactataaattcgacccgaaaaccgacgacgcgtttacaccgaacgaatcaaaaaataaaatcaatccgaaaacaaaaaccgtaaaaacgaaaacccactcctaaccaccccaaaacccttaa

SEQ ID NO: 20493 - DNA, 880 bp, Artificial Sequence
  chemically treated genomic DNA (Homo sapiens) CpG-island No: 20493
ggaaacgggaagagtttagcggtaggcggaaggtacgcgtcggggatatttagcggcgagggtttgcgggagtttttagcgcgataaggagttcggtcggggagtagcggttcgtcgcgggacgttcgagttgcggggaacgcgagggtagcgaggtcggcgtttttggttcgggagcgtttaggttcgtttatcgcgcgcgaggttcgtttgtcgagttttggttttagtttcggcgtagggtttagcggggcgtttattgtcgagggaggaagatggacgtgtttcgggagtttcgtttcgttttttattttttatttttcggtttcgcgcggtcggttcgggcgtattttcgtcggaggcgaagcgcggcgaagattcgtttcgtgaagtttcgcgcgtttcggaaatggttatgcggcggcgtcgaggtcggaagtggttgaggtcggtagtagcgggcggtagttgcggcgtaatcggtttcggagttgtttggcgcggtcgggcgggcggcgtcgtttaggttcgggtttcggttgggttcggcgcggtttcggggttgtttatggggcgcggggggtcgggtcggtgacgtcggacgtttatggacgtttttgaggagtcgttgtcgtcggtgatttatattatggagaataagtttatcgttatttgtgagtgttcggaggcggggagggcgcggcggtcgttgggcgggttcgggttttggcgttatgtattcggcgtttttagatttttagttttcggcgcgtttcgggttgggtcgttttttggaggtgtgattagggttgcggttgaggcggggttttttgatttttcggggacgttttttgattttttcgtcgggcgatttttgatt

SEQ ID NO: 20494 - DNA, 880 bp, Artificial Sequence
  chemically treated genomic DNA (Homo sapiens) CpG-island No: 20494
aatcaaaaatcgcccgacgaaaaaatcaaaaaacgtccccgaaaaatcaaaaaaccccgcctcaaccgcaaccctaatcacacctccaaaaaacgacccaacccgaaacgcgccgaaaactaaaaatctaaaaacgccgaatacataacgccaaaacccgaacccgcccaacgaccgccgcgccctccccgcctccgaacactcacaaataacgataaacttattctccataatataaatcaccgacgacaacgactcctcaaaaacgtccataaacgtccgacgtcaccgacccgaccccccgcgccccataaacaaccccgaaaccgcgccgaacccaaccgaaacccgaacctaaacgacgccgcccgcccgaccgcgccaaacaactccgaaaccgattacgccgcaactaccgcccgctactaccgacctcaaccacttccgacctcgacgccgccgcataaccatttccgaaacgcgcgaaacttcacgaaacgaatcttcgccgcgcttcgcctccgacgaaaatacgcccgaaccgaccgcgcgaaaccgaaaaataaaaaataaaaaacgaaacgaaactcccgaaacacgtccatcttcctccctcgacaataaacgccccgctaaaccctacgccgaaactaaaaccaaaactcgacaaacgaacctcgcgcgcgataaacgaacctaaacgctcccgaaccaaaaacgccgacctcgctaccctcgcgttccccgcaactcgaacgtcccgcgacgaaccgctactccccgaccgaactccttatcgcgctaaaaactcccgcaaaccctcgccgctaaatatccccgacgcgtaccttccgcctaccgctaaactcttcccgtttcc

SEQ ID NO: 20495 - DNA, 880 bp, Artificial Sequence
  chemically treated genomic DNA (Homo sapiens) CpG-island No: 20495
ggttagaggtcgttcggcgggaaggttagagggcgttttcgaaaagttagagggtttcgttttagtcgtagttttggttatatttttaggaagcggtttagttcggagcgcgtcgggggttgaaggtttgggggcgtcgggtgtataacgttagggttcgggttcgtttaacgatcgtcgcgtttttttcgttttcgggtatttataggtgacgatgggtttgttttttatggtgtagattatcggcggtagcggttttttagaggcgtttatgggcgttcggcgttatcggttcggtttttcgcgttttatgggtagtttcgaggtcgcgtcgggtttagtcggagttcgagtttgagcggcgtcgttcgttcggtcgcgttaggtagtttcggagtcggttgcgtcgtagttgtcgttcgttgttgtcggttttagttattttcggtttcggcgtcgtcgtatgattattttcggggcgcgcgaggttttacggggcgggttttcgtcgcgtttcgttttcgacggaagtgcgttcgggtcggtcgcgcgggatcgggaggtgggaagtgggaggcggagcggggttttcgggatacgtttatttttttttttcggtagtgggcgtttcgttgggttttgcgtcggagttgaggttaggattcggtaggcgggtttcgcgcgcggtgagcgagtttggacgttttcggattagagacgtcggtttcgttgttttcgcgtttttcgtagttcgggcgtttcgcggcgggtcgttgtttttcggtcgggttttttatcgcgttgggggttttcgtaggttttcgtcgttgagtgttttcggcgcgtgtttttcgtttatcgttgggtttttttcgttttt

SEQ ID NO: 20496 - DNA, 880 bp, Artificial Sequence
  chemically treated genomic DNA (Homo sapiens) CpG-island No: 20496
aaaaacgaaaaaaacccaacgataaacgaaaaacacgcgccgaaaacactcaacgacgaaaacctacgaaaacccccaacgcgataaaaaacccgaccgaaaaacaacgacccgccgcgaaacgcccgaactacgaaaaacgcgaaaacaacgaaaccgacgtctctaatccgaaaacgtccaaactcgctcaccgcgcgcgaaacccgcctaccgaatcctaacctcaactccgacgcaaaacccaacgaaacgcccactaccgaaaaaaaaaaataaacgtatcccgaaaaccccgctccgcctcccacttcccacctcccgatcccgcgcgaccgacccgaacgcacttccgtcgaaaacgaaacgcgacgaaaacccgccccgtaaaacctcgcgcgccccgaaaataatcatacgacgacgccgaaaccgaaaataactaaaaccgacaacaacgaacgacaactacgacgcaaccgactccgaaactacctaacgcgaccgaacgaacgacgccgctcaaactcgaactccgactaaacccgacgcgacctcgaaactacccataaaacgcgaaaaaccgaaccgataacgccgaacgcccataaacgcctctaaaaaaccgctaccgccgataatctacaccataaaaaacaaacccatcgtcacctataaatacccgaaaacgaaaaaaacgcgacgatcgttaaacgaacccgaaccctaacgttatacacccgacgcccccaaaccttcaacccccgacgcgctccgaactaaaccgcttcctaaaaatataaccaaaactacgactaaaacgaaaccctctaacttttcgaaaacgccctctaaccttcccgccgaacgacctctaacc

SEQ ID NO: 20497 - DNA, 889 bp, Artificial Sequence
  chemically treated genomic DNA (Homo sapiens) CpG-island No: 20497
agcgttcgcggttttttttttttggtagggatttcgttttcgagttcgttttcgtacggttgtgcgttttgttatgggtttcggtgttaggtttcgtcgtttattgtcgtttacgtttcgtcggtcgtttcggcgttttcgtcgttcgtttttcggattcgtattgttagttcggtatttttaggcgagtttcgtaggtttcgcgttcgagtcgagttggggacgcgcgggtcgagttatttcgtttttgatcgcggcgttttcgtttttttttcggtttatttgtttagtcgtatggtgcgggcggagatttcgggtcgcggagatttcggggcgcggagatttcggggcgcggagaatttgggtcgcgggagatttcggagaggagtaatttcggggcgcgggagatcggttttaattgcgttttcgtagcgttcgaggttttgagcgtttagcgcgcggtgtgttggaggtagtcgtgttttcgtttcgttttcgtttcgttttcggtttggtttttttggcgatcgagatcgtttcgggataggaggcggggcgttgcgcggcggtttcggaaagttcggttttgtttaggcgtgtgttcgtcggtcggaggcgggatagaggtaggtcggtttgttcgtttggacgcggatttgggcgtcgtaggtgttttgggaagcgtaggggtggggggtattcggtaggaaggtggttaggggtgttgcgggtgtcggcgtagcgagggagggtatcgtgggaggtaagggtcgtttttcgcgtcgcgtataatgcgtcggttttgcggtttttttcgagtaggagttcggggatttaggttttaaggttgggagagcgttaggtttttggtcggttgcgtttcgatgat

SEQ ID NO: 20498 - DNA, 889 bp, Artificial Sequence
  chemically treated genomic DNA (Homo sapiens) CpG-island No: 20498
atcatcgaaacgcaaccgaccaaaaacctaacgctctcccaaccttaaaacctaaatccccgaactcctactcgaaaaaaaccgcaaaaccgacgcattatacgcgacgcgaaaaacgacccttacctcccacgataccctccctcgctacgccgacacccgcaacacccctaaccaccttcctaccgaataccccccacccctacgcttcccaaaacacctacgacgcccaaatccgcgtccaaacgaacaaaccgacctacctctatcccgcctccgaccgacgaacacacgcctaaacaaaaccgaactttccgaaaccgccgcgcaacgccccgcctcctatcccgaaacgatctcgatcgccaaaaaaaccaaaccgaaaacgaaacgaaaacgaaacgaaaacacgactacctccaacacaccgcgcgctaaacgctcaaaacctcgaacgctacgaaaacgcaattaaaaccgatctcccgcgccccgaaattactcctctccgaaatctcccgcgacccaaattctccgcgccccgaaatctccgcgccccgaaatctccgcgacccgaaatctccgcccgcaccatacgactaaacaaataaaccgaaaaaaaaacgaaaacgccgcgatcaaaaacgaaataactcgacccgcgcgtccccaactcgactcgaacgcgaaacctacgaaactcgcctaaaaataccgaactaacaatacgaatccgaaaaacgaacgacgaaaacgccgaaacgaccgacgaaacgtaaacgacaataaacgacgaaacctaacaccgaaacccataacaaaacgcacaaccgtacgaaaacgaactcgaaaacgaaatccctaccaaaaaaaaaaaaccgcgaacgct

SEQ ID NO: 20499 - DNA, 889 bp, Artificial Sequence
  chemically treated genomic DNA (Homo sapiens) CpG-island No: 20499
attatcggagcgtagtcggttaggggtttggcgtttttttagttttggggtttgggttttcggatttttgttcggggagggtcgtaggatcggcgtattgtgcgcggcgcggggaacggtttttgttttttacggtgttttttttcgttgcgtcggtattcgtagtatttttggttatttttttgtcgggtattttttatttttgcgttttttagggtatttacggcgtttaggttcgcgtttaggcggataggtcgatttgtttttgtttcgttttcggtcgacgggtatacgtttgggtagagtcgaatttttcggagtcgtcgcgtagcgtttcgttttttgtttcggggcggtttcggtcgttagaggagttaggtcgggggcggggcggggacggggcggggatacggttgtttttagtatatcgcgcgttgggcgtttagagtttcgggcgttgcgggagcgtagttagagtcgatttttcgcgtttcgaggttgttttttttcgaggtttttcgcggtttaagtttttcgcgtttcgaggttttcgcgtttcgaggttttcgcggttcgaggttttcgttcgtattatgcggttgggtaggtgagtcggggaaggagcggaggcgtcgcggttaggggcggggtggttcggttcgcgcgtttttagttcggttcggacgcggggtttgcggggttcgtttggaggtgtcgggttggtagtgcgggttcgaggagcgggcggcggaggcgtcggggcggtcggcggggcgtggacggtagtgggcggcggggtttggtatcgggatttatggtaggacgtatagtcgtgcgggggcgggttcgggggcggggtttttgttagggaaggaggatcgcgaacgtt

SEQ ID NO: 20500 - DNA, 889 bp, Artificial Sequence
  chemically treated genomic DNA (Homo sapiens) CpG-island No: 20500
aacgttcgcgatcctccttccctaacaaaaaccccgcccccgaacccgcccccgcacgactatacgtcctaccataaatcccgataccaaaccccgccgcccactaccgtccacgccccgccgaccgccccgacgcctccgccgcccgctcctcgaacccgcactaccaacccgacacctccaaacgaaccccgcaaaccccgcgtccgaaccgaactaaaaacgcgcgaaccgaaccaccccgcccctaaccgcgacgcctccgctccttccccgactcacctacccaaccgcataatacgaacgaaaacctcgaaccgcgaaaacctcgaaacgcgaaaacctcgaaacgcgaaaaacttaaaccgcgaaaaacctcgaaaaaaaacaacctcgaaacgcgaaaaatcgactctaactacgctcccgcaacgcccgaaactctaaacgcccaacgcgcgatatactaaaaacaaccgtatccccgccccgtccccgccccgcccccgacctaactcctctaacgaccgaaaccgccccgaaacaaaaaacgaaacgctacgcgacgactccgaaaaattcgactctacccaaacgtatacccgtcgaccgaaaacgaaacaaaaacaaatcgacctatccgcctaaacgcgaacctaaacgccgtaaataccctaaaaaacgcaaaaataaaaaatacccgacaaaaaaataaccaaaaatactacgaataccgacgcaacgaaaaaaaacaccgtaaaaaacaaaaaccgttccccgcgccgcgcacaatacgccgatcctacgaccctccccgaacaaaaatccgaaaacccaaaccccaaaactaaaaaaacgccaaacccctaaccgactacgctccgataat

SEQ ID NO: 20501 - DNA, 534 bp, Artificial Sequence
  chemically treated genomic DNA (Homo sapiens) CpG-island No: 20501
gggggataggggggacggcggcggggaagggtagggagggcggcggcgaaggcgtaggaagttttgaagtcgggcggttttttttttttaggttacgttgagagacgggggttggggggatttaaaatcgcgcgtttggtaggggcggggcgggggttatttgtttttcggcgggaagagttgggtagggttcgcggagtgtagggcggaggtattggcggttcgtattcgggtgaggtgaggcgcgtaatcgtatttgagtcggattttttaggacgagtttcgtttttggagttagaaaattcggtttagcgttagcgtggacgtgcgtttttcgggatacgtttagggacgtcggttaggatcggcgaggttggaggggtggcgatgttgggggttgaggtttttcgtttcggggcgggcggttgttggtaagggatcgtatggtttcgtaggtgaggagggcgtaggtgaggagggcgtaggtgagtcgggcgggttgcgggtagcgttattttttttcggaggtttttt

SEQ ID NO: 20502 - DNA, 534 bp, Artificial Sequence
  chemically treated genomic DNA (Homo sapiens) CpG-island No: 20502
aaaaaacctccgaaaaaaaataacgctacccgcaacccgcccgactcacctacgccctcctcacctacgccctcctcacctacgaaaccatacgatcccttaccaacaaccgcccgccccgaaacgaaaaacctcaacccccaacatcgccacccctccaacctcgccgatcctaaccgacgtccctaaacgtatcccgaaaaacgcacgtccacgctaacgctaaaccgaattttctaactccaaaaacgaaactcgtcctaaaaaatccgactcaaatacgattacgcgcctcacctcacccgaatacgaaccgccaatacctccgccctacactccgcgaaccctacccaactcttcccgccgaaaaacaaataacccccgccccgcccctaccaaacgcgcgattttaaatccccccaacccccgtctctcaacgtaacctaaaaaaaaaaaaccgcccgacttcaaaacttcctacgccttcgccgccgccctccctacccttccccgccgccgtcccccctatccccc

SEQ ID NO: 20503 - DNA, 534 bp, Artificial Sequence
  chemically treated genomic DNA (Homo sapiens) CpG-island No: 20503
ggagggttttcgggaggaggtggcgttgttcgtagttcgttcggtttatttgcgttttttttatttgcgttttttttatttgcggggttatgcggttttttattagtagtcgttcgtttcggggcgaggaattttagtttttaatatcgttatttttttagtttcgtcggttttagtcggcgtttttgggcgtgtttcgggaagcgtacgtttacgttggcgttggatcgggttttttgattttagggacgggattcgttttaaagagttcggtttagatgcggttacgcgttttattttattcgggtgcggatcgttagtgttttcgttttgtatttcgcgggttttgtttagtttttttcgtcggagggtaggtggttttcgtttcgtttttgttaggcgcgcgattttaaatttttttaattttcgttttttagcgtggtttgggagggggaagtcgttcggttttagggttttttgcgttttcgtcgtcgttttttttgttttttttcgtcgtcgttttttttatttttt

SEQ ID NO: 20504 - DNA, 534 bp, Artificial Sequence
  chemically treated genomic DNA (Homo sapiens) CpG-island No: 20504
aaaaaataaaaaaaacgacgacgaaaaaaaacaaaaaaaacgacgacgaaaacgcaaaaaaccctaaaaccgaacgacttccccctcccaaaccacgctaaaaaacgaaaattaaaaaaatttaaaatcgcgcgcctaacaaaaacgaaacgaaaaccacctaccctccgacgaaaaaaactaaacaaaacccgcgaaatacaaaacgaaaacactaacgatccgcacccgaataaaataaaacgcgtaaccgcatctaaaccgaactctttaaaacgaatcccgtccctaaaatcaaaaaacccgatccaacgccaacgtaaacgtacgcttcccgaaacacgcccaaaaacgccgactaaaaccgacgaaactaaaaaaataacgatattaaaaactaaaattcctcgccccgaaacgaacgactactaataaaaaaccgcataaccccgcaaataaaaaaaacgcaaataaaaaaaacgcaaataaaccgaacgaactacgaacaacgccacctcctcccgaaaaccctcc

SEQ ID NO: 20505 - DNA, 833 bp, Artificial Sequence
  chemically treated genomic DNA (Homo sapiens) CpG-island No: 20505
cgtatagcgggaaggtggtttcggcgggtcgagggcgtaggatttttgtttcgtttagggttcgttttgcgaggaggcgtcgggggcgggttcggggcggggcgggcggaaggcgcgcgcggggcggggcggggacggcgacgcggcgtaggcggcgggagtgcgagttgggttcgtgtttcggtcgtcgttatggtcgcggtggatttggagaagttgcgggcgtcgggcgcgggtaaggttatcggcgttttgattagcggcggcgacgcgtaaggtgggcgggggtttcggtcgcgtcgcggcgtagggggtggagggcgttttcgttttggttttttcggagcgttcgtcgagtttcgggattcgggtttcgggtcggttcggtttttcgtttcggtttttcgtttcggttttttgtttcgggtttgtttttcgttttttttcggcgcggttttcggtttacgtgcggtcggttacgttttcggttttcgtttgggttttggcgtcgttcgcgttttgtttcgggggtgtgttcgattttgggtcgcggggtaggatttttcgaggagttttcgaggttacgcgagcggagggcgtcggtttcgttatttttagagtttggttttttttggttttgaagcgattcggggattcggtgtttttcgagggtcggcgttaggttgcgggttttcgggattttttttcggttgggcgggggcggatttattttcggatcgcgtttttttttcggggttttcgcggtcgttttttttgtgggtttagttggggaagagggcggtggggagatgggttgttcggggtattgagta

SEQ ID NO: 20506 - DNA, 833 bp, Artificial Sequence
  chemically treated genomic DNA (Homo sapiens) CpG-island No: 20506
tactcaataccccgaacaacccatctccccaccgccctcttccccaactaaacccacaaaaaaaacgaccgcgaaaaccccgaaaaaaaaacgcgatccgaaaataaatccgcccccgcccaaccgaaaaaaaatcccgaaaacccgcaacctaacgccgaccctcgaaaaacaccgaatccccgaatcgcttcaaaaccaaaaaaaaccaaactctaaaaataacgaaaccgacgccctccgctcgcgtaacctcgaaaactcctcgaaaaatcctaccccgcgacccaaaatcgaacacacccccgaaacaaaacgcgaacgacgccaaaacccaaacgaaaaccgaaaacgtaaccgaccgcacgtaaaccgaaaaccgcgccgaaaaaaaacgaaaaacaaacccgaaacaaaaaaccgaaacgaaaaaccgaaacgaaaaaccgaaccgacccgaaacccgaatcccgaaactcgacgaacgctccgaaaaaaccaaaacgaaaacgccctccaccccctacgccgcgacgcgaccgaaacccccgcccaccttacgcgtcgccgccgctaatcaaaacgccgataaccttacccgcgcccgacgcccgcaacttctccaaatccaccgcgaccataacgacgaccgaaacacgaacccaactcgcactcccgccgcctacgccgcgtcgccgtccccgccccgccccgcgcgcgccttccgcccgccccgccccgaacccgcccccgacgcctcctcgcaaaacgaaccctaaacgaaacaaaaatcctacgccctcgacccgccgaaaccaccttcccgctatacg

SEQ ID NO: 20507 - DNA, 833 bp, Artificial Sequence
  chemically treated genomic DNA (Homo sapiens) CpG-island No: 20507
tgtttaatgtttcgggtagtttatttttttatcgtttttttttttagttagatttataaggaaggcggtcgcgagggtttcgaggaggaggcgcggttcgggagtgagttcgttttcgtttagtcgggaggaggtttcggaagttcgtagtttggcgtcggttttcgggaggtatcgggttttcgggtcgttttagaattaggaagggttaggttttgggggtggcgggatcggcgtttttcgttcgcgtggtttcggggatttttcgggaggttttgtttcgcggtttagagtcggatatattttcggggtagggcgcgggcggcgttaagatttaggcggaggtcgagaacgtggtcggtcgtacgtaggtcggagatcgcgtcggggaagagcgggggatagattcggggtaggaggtcggggcgggaggtcggggcgggaggtcgggtcggttcgagattcgggtttcggggttcggcgggcgtttcggagaggttagggcggaggcgttttttattttttgcgtcgcgacgcggtcgggattttcgtttattttgcgcgtcgtcgtcgttggttaggacgtcgatggttttgttcgcgttcgacgttcgtagtttttttaggtttatcgcggttatggcggcggtcgaaatacgggtttagttcgtattttcgtcgtttgcgtcgcgtcgtcgttttcgtttcgtttcgcgcgcgtttttcgttcgtttcgtttcgggttcgttttcggcgttttttcgtaggacggattttggacggagtagggattttgcgttttcggttcgtcggggttattttttcgttgtgcg

SEQ ID NO: 20508 - DNA, 833 bp, Artificial Sequence
  chemically treated genomic DNA (Homo sapiens) CpG-island No: 20508
cgcacaacgaaaaaataaccccgacgaaccgaaaacgcaaaatccctactccgtccaaaatccgtcctacgaaaaaacgccgaaaacgaacccgaaacgaaacgaacgaaaaacgcgcgcgaaacgaaacgaaaacgacgacgcgacgcaaacgacgaaaatacgaactaaacccgtatttcgaccgccgccataaccgcgataaacctaaaaaaactacgaacgtcgaacgcgaacaaaaccatcgacgtcctaaccaacgacgacgacgcgcaaaataaacgaaaatcccgaccgcgtcgcgacgcaaaaaataaaaaacgcctccgccctaacctctccgaaacgcccgccgaaccccgaaacccgaatctcgaaccgacccgacctcccgccccgacctcccgccccgacctcctaccccgaatctatcccccgctcttccccgacgcgatctccgacctacgtacgaccgaccacgttctcgacctccgcctaaatcttaacgccgcccgcgccctaccccgaaaatatatccgactctaaaccgcgaaacaaaacctcccgaaaaatccccgaaaccacgcgaacgaaaaacgccgatcccgccacccccaaaacctaacccttcctaattctaaaacgacccgaaaacccgatacctcccgaaaaccgacgccaaactacgaacttccgaaacctcctcccgactaaacgaaaacgaactcactcccgaaccgcgcctcctcctcgaaaccctcgcgaccgccttccttataaatctaactaaaaaaaaaaacgataaaaaaataaactacccgaaacattaaaca

SEQ ID NO: 20509 - DNA, 948 bp, Artificial Sequence
  chemically treated genomic DNA (Homo sapiens) CpG-island No: 20509
tcgtcgttttcgtttttgtttttttttttttttatttcgttttcgtttcgtttcgtttcggttttttttttcggtttcgttttcgtttcgtttcggttttttttttcggtttcgttttcgtttcgtttcggttttttttttcggtttcgttttcgtttcgtttcggttttttttttcggtttcgtttttttttcgtttcggtttcgtttttttttcgtttcggtttcgtttttttttcgtttcggttttttttttcggtttcgttttcgtttcgtttcggttttttttttcggtttcgtttttttttcgtttcggttttttttttcggtttcgttttcgtttcgtttcggtttttttttttatttcggggcggtcgcggttaggtttcgttttattagtagttgagtttgcgtacgttgtgtagtttcgaggttttggttcgggttagaattatttttcgcgttagttttatggcggtcgtttaggttcgatcggcgggcgttttcggttttttgatttcgggcgggtgacgattgcgcggcgcgtgtttttaggggcggggttcgcgtcgttaggggcggattttgagtcgattggcggttcggtgaggagagcggggcgacgcgagttcgttggggtcgtttgggcgtcgttgatacgttggttttgtttttgtttatgcgcggtttggggcgtttttttttgacgcgattttaacgcgatttcggaagcgcgtagcgagtagagggtgggtgtaggtggcggttttcgagtcggtttagtgagggttgaattgttgtttttaggaatcgagcggggtgggttcggttcgacgcgtattatggtcgagtgtttaggtttgattttgagcgtaggtttagcgtggatggtatgggcgttatatagttttaagttacgcgatttaaatttttggaataaatttagggt

SEQ ID NO: 20510 - DNA, 948 bp, Artificial Sequence
  chemically treated genomic DNA (Homo sapiens) CpG-island No: 20510
accctaaatttattccaaaaatttaaatcgcgtaacttaaaactatataacgcccataccatccacgctaaacctacgctcaaaatcaaacctaaacactcgaccataatacgcgtcgaaccgaacccaccccgctcgattcctaaaaacaacaattcaaccctcactaaaccgactcgaaaaccgccacctacacccaccctctactcgctacgcgcttccgaaatcgcgttaaaatcgcgtcaaaaaaaaacgccccaaaccgcgcataaacaaaaacaaaaccaacgtatcaacgacgcccaaacgaccccaacgaactcgcgtcgccccgctctcctcaccgaaccgccaatcgactcaaaatccgcccctaacgacgcgaaccccgcccctaaaaacacgcgccgcgcaatcgtcacccgcccgaaatcaaaaaaccgaaaacgcccgccgatcgaacctaaacgaccgccataaaactaacgcgaaaaataattctaacccgaaccaaaacctcgaaactacacaacgtacgcaaactcaactactaataaaacgaaacctaaccgcgaccgccccgaaataaaaaaaaaaaccgaaacgaaacgaaaacgaaaccgaaaaaaaaaaccgaaacgaaaaaaaaacgaaaccgaaaaaaaaaaccgaaacgaaacgaaaacgaaaccgaaaaaaaaaaccgaaacgaaaaaaaaacgaaaccgaaacgaaaaaaaaacgaaaccgaaacgaaaaaaaaacgaaaccgaaaaaaaaaaccgaaacgaaacgaaaacgaaaccgaaaaaaaaaaccgaaacgaaacgaaaacgaaaccgaaaaaaaaaaccgaaacgaaacgaaaacgaaaccgaaaaaaaaaaccgaaacgaaacgaaacgaaaacgaaataaaaaaaaaaaaaaacaaaaacgaaaacgacga

SEQ ID NO: 20511 - DNA, 948 bp, Artificial Sequence
  chemically treated genomic DNA (Homo sapiens) CpG-island No: 20511
gttttgggtttattttaagagtttgaatcgcgtaatttggagttgtgtagcgtttatgttatttacgttaggtttgcgtttagagttaggtttaggtattcggttatgatgcgcgtcggatcgagtttatttcgttcggtttttgggagtagtagtttagtttttattgggtcgattcggggatcgttatttgtatttattttttgttcgttgcgcgttttcggggtcgcgttagaatcgcgttagagaagggcgttttaggtcgcgtatgagtaggagtagagttaacgtgttagcggcgtttaagcggttttagcgggttcgcgtcgtttcgttttttttatcgagtcgttaatcggtttaggattcgtttttgacgacgcgggtttcgtttttggagatacgcgtcgcgtagtcgttattcgttcgggattaggaggtcgggggcgttcgtcggtcgggtttgggcggtcgttatgaagttgacgcggaagatggttttgattcgggttaaggtttcggagttgtatagcgtgcgtaagtttaattgttggtgaggcggggtttggtcgcggtcgtttcggggtggggggaggagtcggggcggggcgagggcggagtcggagggaggagtcggggcggggagagggcggagtcggagggaggagtcggggcgggacgagggcggagtcggagggaggagtcggggcggggagagggcggagtcggggcggggagagggcggagtcggggcggggagagggcggagtcggagggaggagtcggggcgggacgagggcggagtcggagggaggagtcggggcgggacgagggcggagtcggagggaggagtcggggcgggacgagggcggagtcggagggaggagtcggggcggggcggggcgggggcggagtggaaggggggaggggtaggggcgagggcggcga

SEQ ID NO: 20512 - DNA, 948 bp, Artificial Sequence
  chemically treated genomic DNA (Homo sapiens) CpG-island No: 20512
tcgccgccctcgcccctacccctccccccttccactccgcccccgccccgccccgccccgactcctccctccgactccgccctcgtcccgccccgactcctccctccgactccgccctcgtcccgccccgactcctccctccgactccgccctcgtcccgccccgactcctccctccgactccgccctctccccgccccgactccgccctctccccgccccgactccgccctctccccgccccgactcctccctccgactccgccctcgtcccgccccgactcctccctccgactccgccctctccccgccccgactcctccctccgactccgccctcgccccgccccgactcctccccccaccccgaaacgaccgcgaccaaaccccgcctcaccaacaattaaacttacgcacgctatacaactccgaaaccttaacccgaatcaaaaccatcttccgcgtcaacttcataacgaccgcccaaacccgaccgacgaacgcccccgacctcctaatcccgaacgaataacgactacgcgacgcgtatctccaaaaacgaaacccgcgtcgtcaaaaacgaatcctaaaccgattaacgactcgataaaaaaaacgaaacgacgcgaacccgctaaaaccgcttaaacgccgctaacacgttaactctactcctactcatacgcgacctaaaacgcccttctctaacgcgattctaacgcgaccccgaaaacgcgcaacgaacaaaaaataaatacaaataacgatccccgaatcgacccaataaaaactaaactactactcccaaaaaccgaacgaaataaactcgatccgacgcgcatcataaccgaatacctaaacctaactctaaacgcaaacctaacgtaaataacataaacgctacacaactccaaattacgcgattcaaactcttaaaataaacccaaaac

SEQ ID NO: 20513 - DNA, 1132 bp, Artificial Sequence
  chemically treated genomic DNA (Homo sapiens) CpG-island No: 20513
tcgtcggtttaaaaggagatacgtgtttttaatttttcgaaggtatatattcgcgcgagggttcggttttaggtttttgggggagggcgggttcgtaggcggggtgtttgggtttagttttttttggcgtgtttttggttttagttgcgggcgcgggacgcggcgcgggagacgtttttcgggttgagtgacgtagagcgttgcgggcggttttattgtatcgggtacgcggcgtacgttcgggcgagatgtggatggtttcgcggggttagggcggcggtgttgcgcggggacgcgggtgacgtcggggcgcgggcggtttcgagtaggtaggtgttcgtcggggtcggggcgagggcgcgagttcgggtgcggggattgaggcggtcgtttcgggagtttgtgaaggttgaggcggggtgtaagggcgcggatcggggtgtcgagtgcgtgtaggggtgcggggtgcggggatcgaggcggtcggtttcggtgttgttgtagggcgcggcggaatgtaggggcgcggtggggtgtaggggcgtaggcggggttcggggcgttggtgtagggcgcggtggggtgtaagggcgtaggcggggttcggggcgttggtgtagggtacggcggggtgtaggggcgcgggtggggttcgaggcgttggtgtagggcgcggtggggtgtaggggcgcgaaggggtttcgggtattggtgtagggtgcggtggggtgtaggggcgggcggggttcggggcgttggtgtaggggtatcggtggggttcggggcgcggattggagtatttagtgtgcgtagaggcgcggggcgttgattgggagtcgggtgcggtttgtttgcgggacgttttgtcgttggagcgattttgttcggttggcgcgaggggattcggggatgagggatttagtcgttttcgtgtttttgttcgttcgtcgggatagtaggtttcgtttttggggcgtttatttttttcgttttcgtattcgtttttgtttgtttagttttcgaagcgttggtttttacgcggggattttagaagatgttcgagtaatttttagagagggtagggaggttatacggtgtatcgagggagtgtagggcgcgtttgttttagttt

SEQ ID NO: 20514 - DNA, 1132 bp, Artificial Sequence
  chemically treated genomic DNA (Homo sapiens) CpG-island No: 20514
aaactaaaacaaacgcgccctacactccctcgatacaccgtataacctccctaccctctctaaaaattactcgaacatcttctaaaatccccgcgtaaaaaccaacgcttcgaaaactaaacaaacaaaaacgaatacgaaaacgaaaaaaataaacgccccaaaaacgaaacctactatcccgacgaacgaacaaaaacacgaaaacgactaaatccctcatccccgaatcccctcgcgccaaccgaacaaaatcgctccaacgacaaaacgtcccgcaaacaaaccgcacccgactcccaatcaacgccccgcgcctctacgcacactaaatactccaatccgcgccccgaaccccaccgatacccctacaccaacgccccgaaccccgcccgcccctacaccccaccgcaccctacaccaatacccgaaaccccttcgcgcccctacaccccaccgcgccctacaccaacgcctcgaaccccacccgcgcccctacaccccgccgtaccctacaccaacgccccgaaccccgcctacgcccttacaccccaccgcgccctacaccaacgccccgaaccccgcctacgcccctacaccccaccgcgcccctacattccgccgcgccctacaacaacaccgaaaccgaccgcctcgatccccgcaccccgcacccctacacgcactcgacaccccgatccgcgcccttacaccccgcctcaaccttcacaaactcccgaaacgaccgcctcaatccccgcacccgaactcgcgccctcgccccgaccccgacgaacacctacctactcgaaaccgcccgcgccccgacgtcacccgcgtccccgcgcaacaccgccgccctaaccccgcgaaaccatccacatctcgcccgaacgtacgccgcgtacccgatacaataaaaccgcccgcaacgctctacgtcactcaacccgaaaaacgtctcccgcgccgcgtcccgcgcccgcaactaaaaccaaaaacacgccaaaaaaaactaaacccaaacaccccgcctacgaacccgccctcccccaaaaacctaaaaccgaaccctcgcgcgaatatataccttcgaaaaattaaaaacacgtatctccttttaaaccgacga

SEQ ID NO: 20515 - DNA, 1132 bp, Artificial Sequence
  chemically treated genomic DNA (Homo sapiens) CpG-island No: 20515
ggattgggataggcgcgttttgtattttttcggtatatcgtgtggtttttttgttttttttggaggttgttcgggtattttttgaaattttcgcgtgaaagttagcgtttcggagattgggtaggtagaggcgggtgcggggacggaggaagtaagcgttttagaagcggggtttgttgtttcggcggacgggtaggggtacgaggacggttgagttttttattttcgggttttttcgcgttagtcggatagggtcgttttagcggtaaggcgtttcgtagatagatcgtattcggtttttagttagcgtttcgcgtttttgcgtatattgggtgttttagttcgcgtttcgaattttatcggtgtttttgtattagcgtttcgaatttcgttcgtttttgtattttatcgtattttgtattagtgttcggagttttttcgcgtttttgtattttatcgcgttttgtattagcgtttcgagttttattcgcgtttttgtatttcgtcgtgttttgtattagcgtttcgaatttcgtttgcgtttttgtattttatcgcgttttgtattagcgtttcgaatttcgtttgcgtttttgtattttatcgcgtttttgtatttcgtcgcgttttgtagtagtatcggggtcggtcgtttcggttttcgtatttcgtatttttgtacgtattcggtatttcgattcgcgtttttgtatttcgttttaatttttataagttttcgggacggtcgttttagttttcgtattcgggttcgcgttttcgtttcggtttcggcgggtatttatttgttcggagtcgttcgcgtttcggcgttattcgcgttttcgcgtagtatcgtcgttttggtttcgcggggttatttatatttcgttcgagcgtgcgtcgcgtgttcggtgtagtggagtcgttcgtagcgttttgcgttatttagttcggagagcgtttttcgcgtcgcgtttcgcgttcgtagttagagttaaggatacgttagggaaggttgggtttagatatttcgtttgcgagttcgtttttttttagagatttggaatcggattttcgcgcggatgtgtgttttcggagggttgggggtacgtgtttttttttaaatcggcga

SEQ ID NO: 20516 - DNA, 1132 bp, Artificial Sequence
  chemically treated genomic DNA (Homo sapiens) CpG-island No: 20516
tcgccgatttaaaaaaaaacacgtacccccaaccctccgaaaacacacatccgcgcgaaaatccgattccaaatctctaaaaaaaaacgaactcgcaaacgaaatatctaaacccaaccttccctaacgtatccttaactctaactacgaacgcgaaacgcgacgcgaaaaacgctctccgaactaaataacgcaaaacgctacgaacgactccactacaccgaacacgcgacgcacgctcgaacgaaatataaataaccccgcgaaaccaaaacgacgatactacgcgaaaacgcgaataacgccgaaacgcgaacgactccgaacaaataaatacccgccgaaaccgaaacgaaaacgcgaacccgaatacgaaaactaaaacgaccgtcccgaaaacttataaaaattaaaacgaaatacaaaaacgcgaatcgaaataccgaatacgtacaaaaatacgaaatacgaaaaccgaaacgaccgaccccgatactactacaaaacgcgacgaaatacaaaaacgcgataaaatacaaaaacgcaaacgaaattcgaaacgctaatacaaaacgcgataaaatacaaaaacgcaaacgaaattcgaaacgctaatacaaaacacgacgaaatacaaaaacgcgaataaaactcgaaacgctaatacaaaacgcgataaaatacaaaaacgcgaaaaaactccgaacactaatacaaaatacgataaaatacaaaaacgaacgaaattcgaaacgctaatacaaaaacaccgataaaattcgaaacgcgaactaaaacacccaatatacgcaaaaacgcgaaacgctaactaaaaaccgaatacgatctatctacgaaacgccttaccgctaaaacgaccctatccgactaacgcgaaaaaacccgaaaataaaaaactcaaccgtcctcgtacccctacccgtccgccgaaacaacaaaccccgcttctaaaacgcttacttcctccgtccccgcacccgcctctacctacccaatctccgaaacgctaactttcacgcgaaaatttcaaaaaatacccgaacaacctccaaaaaaaacaaaaaaaccacacgatataccgaaaaaatacaaaacgcgcctatcccaatcc

SEQ ID NO: 20517 - DNA, 604 bp, Artificial Sequence
  chemically treated genomic DNA (Homo sapiens) CpG-island No: 20517
tcgggcgttgtggggagtaggcggagtgtgcgggggtcggggtgtgggtgacgtttgatcgggtgttgcggggagtaggtggagtgtgcgggggtcggggtgtgggtgagttttgatcgggtgttgcggggagtaggtggagtgtgcgggggaggcggggtgtgggtgacgtttgatcgggtgttgcggggagtaggtggagtgtgcgggggaggcggggtgtgggtgacgtttgatcgggtgttgcggcgagtaggtggagtgtgcgggggtcggggtgtgggtgagttttgatcgggtgttgcggggagtaggtggagtgtgcgggggaggcggggtgtgggtgacgtttgatcgggtgttgcggggagtaggtggagtgtgcgggggaggcggggtgtgggtgacgtttgatcgggtgttgcggggagtaggtggagtgtgcgggggtcggggtgtgggtgagttttgatcgggtgttgcggggagtaggtggagtgtgcgggggaggcggggtgtgggtgacgtttgatcgggtgttgtgaggagtaggtggagtgtgcgggggaggcgggtatatttaggagattgggtgtaattttcg

SEQ ID NO: 20518 - DNA, 604 bp, Artificial Sequence
  chemically treated genomic DNA (Homo sapiens) CpG-island No: 20518
cgaaaattacacccaatctcctaaatatacccgcctcccccgcacactccacctactcctcacaacacccgatcaaacgtcacccacaccccgcctcccccgcacactccacctactccccgcaacacccgatcaaaactcacccacaccccgacccccgcacactccacctactccccgcaacacccgatcaaacgtcacccacaccccgcctcccccgcacactccacctactccccgcaacacccgatcaaacgtcacccacaccccgcctcccccgcacactccacctactccccgcaacacccgatcaaaactcacccacaccccgacccccgcacactccacctactcgccgcaacacccgatcaaacgtcacccacaccccgcctcccccgcacactccacctactccccgcaacacccgatcaaacgtcacccacaccccgcctcccccgcacactccacctactccccgcaacacccgatcaaaactcacccacaccccgacccccgcacactccacctactccccgcaacacccgatcaaacgtcacccacaccccgacccccgcacactccgcctactccccacaacgcccga

SEQ ID NO: 20519 - DNA, 604 bp, Artificial Sequence
  chemically treated genomic DNA (Homo sapiens) CpG-island No: 20519
cgggagttgtatttaattttttgagtgtgttcgtttttttcgtatattttatttgttttttatagtattcggttagacgttatttatatttcgtttttttcgtatattttatttgtttttcgtagtattcggttagaatttatttatatttcggttttcgtatattttatttgtttttcgtagtattcggttagacgttatttatatttcgtttttttcgtatattttatttgtttttcgtagtattcggttagacgttatttatatttcgtttttttcgtatattttatttgtttttcgtagtattcggttagaatttatttatatttcggttttcgtatattttatttgttcgtcgtagtattcggttagacgttatttatatttcgtttttttcgtatattttatttgtttttcgtagtattcggttagacgttatttatatttcgtttttttcgtatattttatttgtttttcgtagtattcggttagaatttatttatatttcggttttcgtatattttatttgtttttcgtagtattcggttagacgttatttatatttcggttttcgtatatttcgtttgttttttatagcgttcgg

SEQ ID NO: 20520 - DNA, 604 bp, Artificial Sequence
  chemically treated genomic DNA (Homo sapiens) CpG-island No: 20520
ccgaacgctataaaaaacaaacgaaatatacgaaaaccgaaatataaataacgtctaaccgaatactacgaaaaacaaataaaatatacgaaaaccgaaatataaataaattctaaccgaatactacgaaaaacaaataaaatatacgaaaaaaacgaaatataaataacgtctaaccgaatactacgaaaaacaaataaaatatacgaaaaaaacgaaatataaataacgtctaaccgaatactacgacgaacaaataaaatatacgaaaaccgaaatataaataaattctaaccgaatactacgaaaaacaaataaaatatacgaaaaaaacgaaatataaataacgtctaaccgaatactacgaaaaacaaataaaatatacgaaaaaaacgaaatataaataacgtctaaccgaatactacgaaaaacaaataaaatatacgaaaaccgaaatataaataaattctaaccgaatactacgaaaaacaaataaaatatacgaaaaaaacgaaatataaataacgtctaaccgaatactataaaaaacaaataaaatatacgaaaaaaacgaacacactcaaaaaattaaatacaactcccg

SEQ ID NO: 20521 - DNA, 851 bp, Artificial Sequence
  chemically treated genomic DNA (Homo sapiens) CpG-island No: 20521
ggggcgagagcgcggtatattcgtatatacgtcgttcgtcgcggcgggcgattaggaattcgtttggattcgcggcggggtaggggtcgtcgtttttttcggggttgtcgttttcggttttcggttttttttttttagtgggagttggcgagagtagggcggagtagagcgggtaggaggagcgggtgcggttagtaggggtcgcggtcgggggtcgggttttcggatttttgggtcgggtttcggatttcggagaggagtcgtcgtggttttgggagttcgtgttagagtcgttcgttcgtcgtttcgcgcgttagtttttttcgcggtcgtttcgtcgcggtttttttttcgtttttttcgagttttttttttttttttcgagtttcgcgcgtttttttttttttcggcgtaaagtttcgcgttcgtaaatcggtttcgtcgagagcgtttagcgtcgcgggggcgtttagagttaagcgtatatttttgcggggcgcgtagggggcggcggcgttcggggttgcgtttttgtcgggggtaggggtttcgtcgtttttttttcgtaggtagtttcggcggcgttttcggacgtttcgtgaaagacgttattgtggcggtcgagcggattggggttcggggcggttttttttttttttttttgttcgggtcggattacgtcgtttttttttgtgggtcgcggtcggtgttcggcgtttttcgtcgtcggtcgggttggtttagattcgtcgttttcgtttatttaggcgtttttaaagtttttttttatttttttttatttttagttttttttttttttttggatgtaaacgttttatttatttttaaaa

SEQ ID NO: 20522 - DNA, 851 bp, Artificial Sequence
  chemically treated genomic DNA (Homo sapiens) CpG-island No: 20522
ttttaaaaataaataaaacgtttacatccaaaaaaaaaaaaaaaactaaaaataaaaaaaaataaaaaaaaactttaaaaacgcctaaataaacgaaaacgacgaatctaaaccaacccgaccgacgacgaaaaacgccgaacaccgaccgcgacccacaaaaaaaaacgacgtaatccgacccgaacaaaaaaaaaaaaaaaaaaccgccccgaaccccaatccgctcgaccgccacaataacgtctttcacgaaacgtccgaaaacgccgccgaaactacctacgaaaaaaaaacgacgaaacccctacccccgacaaaaacgcaaccccgaacgccgccgccccctacgcgccccgcaaaaatatacgcttaactctaaacgcccccgcgacgctaaacgctctcgacgaaaccgatttacgaacgcgaaactttacgccgaaaaaaaaaaaaacgcgcgaaactcgaaaaaaaaaaaaaaaactcgaaaaaaacgaaaaaaaaaccgcgacgaaacgaccgcgaaaaaaactaacgcgcgaaacgacgaacgaacgactctaacacgaactcccaaaaccacgacgactcctctccgaaatccgaaacccgacccaaaaatccgaaaacccgacccccgaccgcgacccctactaaccgcacccgctcctcctacccgctctactccgccctactctcgccaactcccactaaaaaaaaaaaaccgaaaaccgaaaacgacaaccccgaaaaaaacgacgacccctaccccgccgcgaatccaaacgaattcctaatcgcccgccgcgacgaacgacgtatatacgaatataccgcgctctcgcccc

SEQ ID NO: 20523 - DNA, 851 bp, Artificial Sequence
  chemically treated genomic DNA (Homo sapiens) CpG-island No: 20523
ttttaaaaataaatgaaacgtttgtatttaaaagggggaggagggttggagatgggagggagtgggagggggttttaaaggcgtttgggtgggcggaggcggcgaatttggattagttcggtcggcgacgaagagcgtcgggtatcggtcgcggtttataaaggggagcggcgtggttcggttcgggtaaaagggggaaggaaaaatcgtttcgggttttagttcgttcggtcgttataatggcgttttttacggggcgttcgggggcgtcgtcgaggttgtttgcgagaagggggcggcggggtttttattttcggtaggagcgtagtttcgggcgtcgtcgttttttgcgcgtttcgtagagatgtgcgtttggttttgggcgttttcgcggcgttgggcgttttcggcggggtcggtttgcgggcgcggagttttgcgtcggggaagaaagggacgcgcggggttcgggggaggagggaggggttcggggagggcggggggagagtcgcggcggagcggtcgcgggggaggttggcgcgcggagcggcgggcgggcggttttggtacgggtttttagagttacggcggttttttttcgagattcggaattcggtttagagattcggaaattcggttttcggtcgcggtttttgttggtcgtattcgttttttttgttcgttttgtttcgttttgttttcgttagtttttattggaggaagaaagtcgagaatcgggagcggtagtttcggaggaggcggcggtttttgtttcgtcgcgggtttaagcggatttttagtcgttcgtcgcggcgggcggcgtgtgtgcgagtgtgtcgcgttttcgtttt

SEQ ID NO: 20524 - DNA, 851 bp, Artificial Sequence
  chemically treated genomic DNA (Homo sapiens) CpG-island No: 20524
aaaacgaaaacgcgacacactcgcacacacgccgcccgccgcgacgaacgactaaaaatccgcttaaacccgcgacgaaacaaaaaccgccgcctcctccgaaactaccgctcccgattctcgactttcttcctccaataaaaactaacgaaaacaaaacgaaacaaaacgaacaaaaaaaacgaatacgaccaacaaaaaccgcgaccgaaaaccgaatttccgaatctctaaaccgaattccgaatctcgaaaaaaaaccgccgtaactctaaaaacccgtaccaaaaccgcccgcccgccgctccgcgcgccaacctcccccgcgaccgctccgccgcgactctccccccgccctccccgaacccctccctcctcccccgaaccccgcgcgtccctttcttccccgacgcaaaactccgcgcccgcaaaccgaccccgccgaaaacgcccaacgccgcgaaaacgcccaaaaccaaacgcacatctctacgaaacgcgcaaaaaacgacgacgcccgaaactacgctcctaccgaaaataaaaaccccgccgcccccttctcgcaaacaacctcgacgacgcccccgaacgccccgtaaaaaacgccattataacgaccgaacgaactaaaacccgaaacgatttttccttcccccttttacccgaaccgaaccacgccgctcccctttataaaccgcgaccgatacccgacgctcttcgtcgccgaccgaactaatccaaattcgccgcctccgcccacccaaacgcctttaaaaccccctcccactccctcccatctccaaccctcctcccccttttaaatacaaacgtttcatttatttttaaaa

SEQ ID NO: 20525 - DNA, 535 bp, Artificial Sequence
  chemically treated genomic DNA (Homo sapiens) CpG-island No: 20525
ttcgttcgttggttttagagcggacgttgggacgttcggggtttggtagttttgcgttcggttaggagcgggcgggcgagtattagtttgcgttttggagaaggggcgtagcgtcgtagttgaggtcggagtagtttttcgcgggcgtaggatatttgttagtgagcgttcggattgtacggttttcgggtagtgtttgtcggcgaggggcgggagttcgggtgatttggttatttttattttcggtttaggttcggagggcggtcgttttttatcgtttttttttttttattggtagagcgcgttgcgggcggattttcgggttcggagtagtttatcggttattttatcgtttattcggttttcggtgttttttttcggtcgttttatttagtaatttttcgtgttttgtttttcgattggaaatgttttacggaagcgttttggatagggttttcgttaggcgataagagttcggtgttgagatgtgttacgtttttatttttttattaattatggatggaaataaataagg

SEQ ID NO: 20526 - DNA, 535 bp, Artificial Sequence
  chemically treated genomic DNA (Homo sapiens) CpG-island No: 20526
ccttatttatttccatccataattaataaaaaaataaaaacgtaacacatctcaacaccgaactcttatcgcctaacgaaaaccctatccaaaacgcttccgtaaaacatttccaatcgaaaaacaaaacacgaaaaattactaaataaaacgaccgaaaaaaaacaccgaaaaccgaataaacgataaaataaccgataaactactccgaacccgaaaatccgcccgcaacgcgctctaccaataaaaaaaaaaaaacgataaaaaacgaccgccctccgaacctaaaccgaaaataaaaataaccaaatcacccgaactcccgcccctcgccgacaaacactacccgaaaaccgtacaatccgaacgctcactaacaaatatcctacgcccgcgaaaaactactccgacctcaactacgacgctacgccccttctccaaaacgcaaactaatactcgcccgcccgctcctaaccgaacgcaaaactaccaaaccccgaacgtcccaacgtccgctctaaaaccaacgaacgaa

SEQ ID NO: 20527 - DNA, 535 bp, Artificial Sequence
  chemically treated genomic DNA (Homo sapiens) CpG-island No: 20527
ttttatttgtttttatttataattgatggggagatgagaacgtaatatattttagtatcgagtttttgtcgtttggcggagattttgtttaagacgttttcgtaaagtatttttagtcggggaataaagtacggaaagttgttgggtagagcggtcgggaggagatatcgggagtcgggtgggcggtggggtggtcggtgggttgtttcgggttcgggagttcgttcgtagcgcgttttgttagtaaggggagagggacggtgggaagcggtcgtttttcgggtttgggtcggggatggggatggttaagttattcgagttttcgtttttcgtcggtaggtattattcgggggtcgtgtaattcgggcgtttattgataggtattttacgttcgcgaggggttgtttcggttttaattgcggcgttgcgttttttttttaggacgtaggttaatgttcgttcgttcgtttttagtcgggcgtagagttgttagatttcgggcgttttagcgttcgttttggggttaacgggcggg

SEQ ID NO: 20528 - DNA, 535 bp, Artificial Sequence
  chemically treated genomic DNA (Homo sapiens) CpG-island No: 20528
cccgcccgttaaccccaaaacgaacgctaaaacgcccgaaatctaacaactctacgcccgactaaaaacgaacgaacgaacattaacctacgtcctaaaaaaaaaacgcaacgccgcaattaaaaccgaaacaacccctcgcgaacgtaaaatacctatcaataaacgcccgaattacacgacccccgaataatacctaccgacgaaaaacgaaaactcgaataacttaaccatccccatccccgacccaaacccgaaaaacgaccgcttcccaccgtccctctccccttactaacaaaacgcgctacgaacgaactcccgaacccgaaacaacccaccgaccaccccaccgcccacccgactcccgatatctcctcccgaccgctctacccaacaactttccgtactttattccccgactaaaaatactttacgaaaacgtcttaaacaaaatctccgccaaacgacaaaaactcgatactaaaatatattacgttctcatctccccatcaattataaataaaaacaaataaaa

SEQ ID NO: 20529 - DNA, 515 bp, Artificial Sequence
  chemically treated genomic DNA (Homo sapiens) CpG-island No: 20529
cggttaggtttcgggggcgtgcggagggcgggttttcgcgcggtcgtcgtttttttaggtcgttaggggtgaggaggtgacgttgcgggtttggtggcggttggttttttatataggaatttttttcgttatcgttttttcgaaggtcgtttttcgttttatttttagtattgggcgttcgcgttttttaatttagttcgtcgtcgagtagacggcgcgtcgcggtaattgggtataggggttttttttagagtcgtttagtcgataaatgaaacgttagtttttttgtgatttcgcgtgtgtggggcggcggtggttgcgagtcggggcgtagggtcggtcggtagtcgttgtttttttatagttttagattttgcgcggtttgtcggcggttggcgatttttttttttttttcgaggcgttcgagtttttgattttttttcggggcgtttgtggtttttttttttttttcggggcgttcgagtttttgattttttttcggggcgtttgtggtt

SEQ ID NO: 20530 - DNA, 515 bp, Artificial Sequence
  chemically treated genomic DNA (Homo sapiens) CpG-island No: 20530
aaccacaaacgccccgaaaaaaaatcaaaaactcgaacgccccgaaaaaaaaaaaaaaaccacaaacgccccgaaaaaaaatcaaaaactcgaacgcctcgaaaaaaaaaaaaaaatcgccaaccgccgacaaaccgcgcaaaatctaaaactataaaaaaacaacgactaccgaccgaccctacgccccgactcgcaaccaccgccgccccacacacgcgaaatcacaaaaaaactaacgtttcatttatcgactaaacgactctaaaaaaaacccctatacccaattaccgcgacgcgccgtctactcgacgacgaactaaattaaaaaacgcgaacgcccaatactaaaaataaaacgaaaaacgaccttcgaaaaaacgataacgaaaaaaattcctatataaaaaaccaaccgccaccaaacccgcaacgtcacctcctcacccctaacgacctaaaaaaacgacgaccgcgcgaaaacccgccctccgcacgcccccgaaacctaaccg

SEQ ID NO: 20531 - DNA, 515 bp, Artificial Sequence
  chemically treated genomic DNA (Homo sapiens) CpG-island No: 20531
ggttataggcgtttcgggaggggattagaggttcgggcgtttcgggaggggaagggaggttataggcgtttcgggaggggattagaggttcgggcgtttcgggaggggaagggaggtcgttagtcgtcggtaggtcgcgtagggtttggggttgtgaaagagtagcggttgtcggtcggttttgcgtttcggttcgtagttatcgtcgttttatatacgcgggattataggggagttgacgttttatttatcgattgagcgattttgaaaaaggtttttgtgtttaattatcgcggcgcgtcgtttgttcggcggcgggttgagttgggaggcgcgggcgtttagtgttgggggtggagcggggggcggttttcgagggagcggtggcgaggaggatttttgtgtgaaaaattagtcgttattaagttcgtagcgttatttttttatttttggcggtttgggaaagcggcggtcgcgcgggggttcgtttttcgtacgttttcgaggtttagtcg

SEQ ID NO: 20532 - DNA, 515 bp, Artificial Sequence
  chemically treated genomic DNA (Homo sapiens) CpG-island No: 20532
cgactaaacctcgaaaacgtacgaaaaacgaacccccgcgcgaccgccgctttcccaaaccgccaaaaataaaaaaataacgctacgaacttaataacgactaatttttcacacaaaaatcctcctcgccaccgctccctcgaaaaccgccccccgctccacccccaacactaaacgcccgcgcctcccaactcaacccgccgccgaacaaacgacgcgccgcgataattaaacacaaaaacctttttcaaaatcgctcaatcgataaataaaacgtcaactcccctataatcccgcgtatataaaacgacgataactacgaaccgaaacgcaaaaccgaccgacaaccgctactctttcacaaccccaaaccctacgcgacctaccgacgactaacgacctcccttcccctcccgaaacgcccgaacctctaatcccctcccgaaacgcctataacctcccttcccctcccgaaacgcccgaacctctaatcccctcccgaaacgcctataacc

SEQ ID NO: 20533 - DNA, 1126 bp, Artificial Sequence
  chemically treated genomic DNA (Homo sapiens) CpG-island No: 20533
gttatttttaggagtaattttatatcgattttcgtattttggggtcgggataaagatattattttttcgttttttttattcggtgagtttcgttcggtttcggttaaattttattttttcgtttttcgagtttaatatagaattaagggttgatttttggtagcgatgagtataagttaagatgcgttttgggaggttcggacgtttttcgttttcggttatttcggtaattaggtcgggtattaagcggtagcgtagagggagggattttaaggtttcggtcgaggaagtcgtaggtagtttcgtagtacgagttcgatttatattttcggtagtttagtggagtatcgattcgaatcgtttttgtttttataggggttgtcgcgtcgggaaagcggttagtgggtaatatttgtcggggcgggaggcgtcggggttttttcgtgtatatatttgcgcgtgggtcgggtttaggtcgatcggaattttggattatgcgatttcggtttatcgtgttagggttcgtcgcgcgatcgttgtgttagatgggggaaggggacgcgggcggcggcgatatttattcggtaacgttttttttttcgtcggcggtagtagtagagttagcgattttcggtattatttttcgtcgtcgtttagttttcggtagcggttattaatcgtttattcggtatcgttaagtcgatataatcgtcggcgtttcgggcgttcgttcgtcgcggtttcgaattttaggaggtagggaggggttcgggcggataaggacgcgagtaggtttttcggttttgggtttggggtcgggggatagaaggtcgcggtttgttagagtcgaggggtttaggcgattgggggattttgaggtaacgtcgagggttcggtagggtcgcggatatcgtcgcggtttggtttgttattgtcgatttcgttttttttttcgcggcgtatgtcgggaaacggtttgtcgggggaggggcgcgtttggaggcgtagagaggcgtttacgtaggttcggaagtcggtagtttgtcgggaagggggcggtttcgttttcggtttttcggtcggtaggttggttgttttggtttgattttgggagatttcgttgggg

SEQ ID NO: 20534 - DNA, 1126 bp, Artificial Sequence
  chemically treated genomic DNA (Homo sapiens) CpG-island No: 20534
ccccaacgaaatctcccaaaatcaaaccaaaacaaccaacctaccgaccgaaaaaccgaaaacgaaaccgcccccttcccgacaaactaccgacttccgaacctacgtaaacgcctctctacgcctccaaacgcgcccctcccccgacaaaccgtttcccgacatacgccgcgaaaaaaaaaacgaaatcgacaataacaaaccaaaccgcgacgatatccgcgaccctaccgaaccctcgacgttacctcaaaatcccccaatcgcctaaacccctcgactctaacaaaccgcgaccttctatcccccgaccccaaacccaaaaccgaaaaacctactcgcgtccttatccgcccgaacccctccctacctcctaaaattcgaaaccgcgacgaacgaacgcccgaaacgccgacgattatatcgacttaacgataccgaataaacgattaataaccgctaccgaaaactaaacgacgacgaaaaataataccgaaaatcgctaactctactactaccgccgacgaaaaaaaaaacgttaccgaataaatatcgccgccgcccgcgtccccttcccccatctaacacaacgatcgcgcgacgaaccctaacacgataaaccgaaatcgcataatccaaaattccgatcgacctaaacccgacccacgcgcaaatatatacacgaaaaaaccccgacgcctcccgccccgacaaatattacccactaaccgctttcccgacgcgacaacccctataaaaacaaaaacgattcgaatcgatactccactaaactaccgaaaatataaatcgaactcgtactacgaaactacctacgacttcctcgaccgaaaccttaaaatccctccctctacgctaccgcttaatacccgacctaattaccgaaataaccgaaaacgaaaaacgtccgaacctcccaaaacgcatcttaacttatactcatcgctaccaaaaatcaacccttaattctatattaaactcgaaaaacgaaaaaataaaatttaaccgaaaccgaacgaaactcaccgaataaaaaaaacgaaaaaataatatctttatcccgaccccaaaatacgaaaatcgatataaaattactcctaaaaataac

SEQ ID NO: 20535 - DNA, 1126 bp, Artificial Sequence
  chemically treated genomic DNA (Homo sapiens) CpG-island No: 20535
ttttagcggagttttttagggttaggttaggatagttaatttgtcggtcggagagtcggaggcggggtcgtttttttttcggtaggttgtcgattttcggatttgcgtagacgtttttttgcgtttttaggcgcgtttttttttcggtaggtcgtttttcggtatgcgtcgcggaggaagagacggagtcgataataataaattaagtcgcggcggtgttcgcggttttgtcgagttttcggcgttgttttagaattttttagtcgtttgggtttttcggttttgataggtcgcggttttttgtttttcggttttagatttagagtcgaggggtttgttcgcgtttttgttcgttcggatttttttttgttttttagagttcggggtcgcggcgggcgggcgttcgggacgtcggcggttgtgtcggtttagcggtgtcgaatgggcggttggtaatcgttgtcgaggattaggcggcggcggaagatggtgtcgggggtcgttggttttgttgttgtcgtcggcgaaggaggaggcgttgtcgggtaagtgtcgtcgtcgttcgcgttttttttttttatttggtatagcggtcgcgcggcgggttttggtacggtgggtcggggtcgtatggtttagggtttcggtcggtttgagttcggtttacgcgtaggtgtgtgtacgggagggtttcggcgtttttcgtttcggtaggtgttgtttattggtcgttttttcggcgcgatagtttttgtggagataaaagcggttcgagtcgatgttttattaggttgtcggaggtgtgggtcggattcgtgttgcggggttgtttgcggttttttcggtcggagttttgggatttttttttttgcgttgtcgtttagtattcggtttagttgtcggagtggtcgagggcgagggacgttcgaattttttaagacgtattttgatttgtgtttatcgttgttagggattagtttttaattttgtgttggattcgagaaacgggagagtggagtttggtcgaggtcgaacgaagtttatcgaatgggaggaacggagagatgatgtttttgtttcgattttagagtgcgaggatcggtataaagttatttttaggaatgat

SEQ ID NO: 20536 - DNA, 1126 bp, Artificial Sequence
  chemically treated genomic DNA (Homo sapiens) CpG-island No: 20536
atcattcctaaaaataactttataccgatcctcgcactctaaaatcgaaacaaaaacatcatctctccgttcctcccattcgataaacttcgttcgacctcgaccaaactccactctcccgtttctcgaatccaacacaaaattaaaaactaatccctaacaacgataaacacaaatcaaaatacgtcttaaaaaattcgaacgtccctcgccctcgaccactccgacaactaaaccgaatactaaacgacaacgcaaaaaaaaaaatcccaaaactccgaccgaaaaaaccgcaaacaaccccgcaacacgaatccgacccacacctccgacaacctaataaaacatcgactcgaaccgcttttatctccacaaaaactatcgcgccgaaaaaacgaccaataaacaacacctaccgaaacgaaaaacgccgaaaccctcccgtacacacacctacgcgtaaaccgaactcaaaccgaccgaaaccctaaaccatacgaccccgacccaccgtaccaaaacccgccgcgcgaccgctataccaaataaaaaaaaaaaacgcgaacgacgacgacacttacccgacaacgcctcctccttcgccgacgacaacaacaaaaccaacgacccccgacaccatcttccgccgccgcctaatcctcgacaacgattaccaaccgcccattcgacaccgctaaaccgacacaaccgccgacgtcccgaacgcccgcccgccgcgaccccgaactctaaaaaacaaaaaaaaatccgaacgaacaaaaacgcgaacaaacccctcgactctaaatctaaaaccgaaaaacaaaaaaccgcgacctatcaaaaccgaaaaacccaaacgactaaaaaattctaaaacaacgccgaaaactcgacaaaaccgcgaacaccgccgcgacttaatttattattatcgactccgtctcttcctccgcgacgcataccgaaaaacgacctaccgaaaaaaaaacgcgcctaaaaacgcaaaaaaacgtctacgcaaatccgaaaatcgacaacctaccgaaaaaaaaacgaccccgcctccgactctccgaccgacaaattaactatcctaacctaaccctaaaaaactccgctaaaa

SEQ ID NO: 20537 - DNA, 881 bp, Artificial Sequence
  chemically treated genomic DNA (Homo sapiens) CpG-island No: 20537
agattcgcggcggtgggggtaaaaaattgtagcggtgggcgtaaaaagtcggggcggtgggggaaaaagttagggcgacgggggtaataagttatggcggcggggttaaaaagtcgtggttgcggaggtaaaaagttgcggtggcggaggtaaaaagttacggtgatgggcgtaaaaagtcgtaaaaagtcgtagtattgggggtaaaaagtcgcgacggcgggggtaaaaagttcgggcggtgggggtaagaagtcggggtaggaaaaatttgcggcgataggggaaaaaattcgcggcggcgggggttaaaagtcgcggcggtaaaaagtcgtaaaaagtcggggcggcgggggtaagaagtcgcggcgggaaaaatttgcggcggcgggggcgaaaagtcgtaaaaagtcgcggcgtcgggggttaaaagttataaaaagtcgcggcggcggtggtaaaaagtcgtagcggaaaaagtcgcggtgacgggggttaaaagttgtagcggtagggggaaaaaagtcgcggcggcgagggtaaaaagtcgcggcggtggggggagaaagacgtaaaaagttgcggcggtaaaaagtcgcggttgcgagggtaaagatttttaaaaagtcgcggtagtaggggttaaatttcgcgaggtcgggggtagaaagtcgcggtggcgggggtagaaagtaacggaggcgggggtaaaaagtcgaggcggcggaggtataaagtcgtaaaaattcgtagtagcgggggtaaaaatttatggcggtaaaaagtcgcgtcggcgggggtaaagtagtggaaatggggtagaaggttagaatagtttggtatttttggagtgtgatgtggaaggaaaagtgtagaggaag

SEQ ID NO: 20538 - DNA, 881 bp, Artificial Sequence
  chemically treated genomic DNA (Homo sapiens) CpG-island No: 20538
cttcctctacacttttccttccacatcacactccaaaaataccaaactattctaaccttctaccccatttccactactttacccccgccgacgcgactttttaccgccataaatttttacccccgctactacgaatttttacgactttatacctccgccgcctcgactttttacccccgcctccgttactttctacccccgccaccgcgactttctacccccgacctcgcgaaatttaacccctactaccgcgactttttaaaaatctttaccctcgcaaccgcgactttttaccgccgcaactttttacgtctttctccccccaccgccgcgactttttaccctcgccgccgcgacttttttccccctaccgctacaacttttaacccccgtcaccgcgactttttccgctacgactttttaccaccgccgccgcgactttttataacttttaacccccgacgccgcgactttttacgacttttcgcccccgccgccgcaaatttttcccgccgcgacttcttacccccgccgccccgactttttacgactttttaccgccgcgacttttaacccccgccgccgcgaattttttcccctatcgccgcaaatttttcctaccccgacttcttacccccaccgcccgaactttttacccccgccgtcgcgactttttacccccaatactacgactttttacgactttttacgcccatcaccgtaactttttacctccgccaccgcaactttttacctccgcaaccacgactttttaaccccgccgccataacttattacccccgtcgccctaactttttcccccaccgccccgactttttacgcccaccgctacaattttttacccccaccgccgcgaatct

SEQ ID NO: 20539 - DNA, 881 bp, Artificial Sequence
  chemically treated genomic DNA (Homo sapiens) CpG-island No: 20539
ttttttttgtatttttttttttatattatattttaggaatgttaagttgttttggttttttattttatttttattattttgttttcgtcgacgcggttttttgtcgttatggatttttgttttcgttgttgcgggtttttgcggttttatgttttcgtcgtttcgattttttgttttcgttttcgttgttttttgttttcgttatcgcggttttttgttttcggtttcgcggaatttagtttttgttgtcgcggttttttggggatttttgttttcgtagtcgcggttttttgtcgtcgtagttttttgcgtttttttttttttatcgtcgcggttttttgttttcgtcgtcgcggtttttttttttttgtcgttgtagtttttagttttcgttatcgcgatttttttcgttgcggttttttgttatcgtcgtcgcggttttttatgatttttggttttcggcgtcgcggttttttacggtttttcgttttcgtcgtcgtaggtttttttcgtcgcggttttttgttttcgtcgtttcggttttttgcggttttttgtcgtcgcggtttttggttttcgtcgtcgcgagtttttttttttgtcgtcgtaggttttttttgtttcggttttttgtttttatcgttcgggttttttgttttcgtcgtcgcggttttttgtttttaatgttgcggttttttacggttttttgcgtttattatcgtagttttttgttttcgttatcgtagttttttgttttcgtaattacggttttttgatttcgtcgttatggtttgttgttttcgtcgttttggtttttttttttatcgtttcggttttttgcgtttatcgttgtagttttttgtttttatcgtcgcgggttt

SEQ ID NO: 20540 - DNA, 881 bp, Artificial Sequence
  chemically treated genomic DNA (Homo sapiens) CpG-island No: 20540
aaacccgcgacgataaaaacaaaaaactacaacgataaacgcaaaaaaccgaaacgataaaaaaaaaaaccaaaacgacgaaaacaacaaaccataacgacgaaatcaaaaaaccgtaattacgaaaacaaaaaactacgataacgaaaacaaaaaactacgataataaacgcaaaaaaccgtaaaaaaccgcaacattaaaaacaaaaaaccgcgacgacgaaaacaaaaaacccgaacgataaaaacaaaaaaccgaaacaaaaaaaacctacgacgacaaaaaaaaaaactcgcgacgacgaaaaccaaaaaccgcgacgacaaaaaaccgcaaaaaaccgaaacgacgaaaacaaaaaaccgcgacgaaaaaaacctacgacgacgaaaacgaaaaaccgtaaaaaaccgcgacgccgaaaaccaaaaatcataaaaaaccgcgacgacgataacaaaaaaccgcaacgaaaaaaatcgcgataacgaaaactaaaaactacaacgacaaaaaaaaaaaaaccgcgacgacgaaaacaaaaaaccgcgacgataaaaaaaaaaaaacgcaaaaaactacgacgacaaaaaaccgcgactacgaaaacaaaaatccccaaaaaaccgcgacaacaaaaactaaattccgcgaaaccgaaaacaaaaaaccgcgataacgaaaacaaaaaacaacgaaaacgaaaacaaaaaatcgaaacgacgaaaacataaaaccgcaaaaacccgcaacaacgaaaacaaaaatccataacgacaaaaaaccgcgtcgacgaaaacaaaataataaaaataaaataaaaaaccaaaacaacttaacattcctaaaatataatataaaaaaaaaaatacaaaaaaaa

SEQ ID NO: 20541 - DNA, 887 bp, Artificial Sequence
  chemically treated genomic DNA (Homo sapiens) CpG-island No: 20541
cggtcgtcggtcgtcggtttttagacgcgtcgtcgttgttatggtttagtttttgtgttcgtcgtttttcgagttttggatgttttttgcggtttggggtttaattcggcggtcgtcgtttttcgataaggattgcggtcgttttttcgtttcgtttttagatttatggggtagtattttagtcgatagtttcgtggcgagtttcgcgcggttaggtatttttcgggattttcgcgtttttttcgtaggtaggcgcggcgcgcgtagtagtcgtttgggtagcgggtagaggtagagcgttagtgagcgggagaaattgcgtatgcgtacgttggttcgcgttttgtacgagttgcgtcgttttttatcgtcgttcgtggcgttcgcgggttagagtttgattaagatcgagacgttgcgtttggttattcgttatatcggttatttgtcggtcgtgttaggttttagcgaggagagtttttagcgtcggtgtcggtagcgcggtgacgcggggttttttcggggttgttcgttgtgtttcgacgattgtttcgcgtagatgtagatacggacgtaggttgaggggtaggggtaggggcgcgggttgggtttggtattcgtcgttcgcgtcggggcgttttggggattttcgtttgtttgtttcggagttcgagttgtattcgagtcgcgcgattcgtttgcgttgttcgtcgaggcggcgtgttttgaagggtaggcgatggagttaagtttatcgttttcggttagtgttttttttttcgcgtttttttcgttcgtgttttcgcgtatagttttatcgttcgttaaggtgaggattaggtattttgttgtttttcgtcggtagtttggttatttggttattatag

SEQ ID NO: 20542 - DNA, 887 bp, Artificial Sequence
  chemically treated genomic DNA (Homo sapiens) CpG-island No: 20542
ctataataaccaaataaccaaactaccgacgaaaaacaacaaaatacctaatcctcaccttaacgaacgataaaactatacgcgaaaacacgaacgaaaaaaacgcgaaaaaaaaaacactaaccgaaaacgataaacttaactccatcgcctacccttcaaaacacgccgcctcgacgaacaacgcaaacgaatcgcgcgactcgaatacaactcgaactccgaaacaaacaaacgaaaatccccaaaacgccccgacgcgaacgacgaataccaaacccaacccgcgcccctacccctacccctcaacctacgtccgtatctacatctacgcgaaacaatcgtcgaaacacaacgaacaaccccgaaaaaaccccgcgtcaccgcgctaccgacaccgacgctaaaaactctcctcgctaaaacctaacacgaccgacaaataaccgatataacgaataaccaaacgcaacgtctcgatcttaatcaaactctaacccgcgaacgccacgaacgacgataaaaaacgacgcaactcgtacaaaacgcgaaccaacgtacgcatacgcaatttctcccgctcactaacgctctacctctacccgctacccaaacgactactacgcgcgccgcgcctacctacgaaaaaaacgcgaaaatcccgaaaaatacctaaccgcgcgaaactcgccacgaaactatcgactaaaatactaccccataaatctaaaaacgaaacgaaaaaacgaccgcaatccttatcgaaaaacgacgaccgccgaattaaaccccaaaccgcaaaaaacatccaaaactcgaaaaacgacgaacacaaaaactaaaccataacaacgacgacgcgtctaaaaaccgacgaccgacgaccg

SEQ ID NO: 20543 - DNA, 887 bp, Artificial Sequence
  chemically treated genomic DNA (Homo sapiens) CpG-island No: 20543
ttatggtggttaggtggttaggttgtcggcggggagtagtagggtgtttggtttttattttggcgggcggtggggttgtgcgcgggggtacggacgaagggggcgcggggaaggggatattaatcggggacggtgggtttggttttatcgtttgttttttagggtacgtcgtttcggcgaatagcgtaggcgggtcgcgcggttcgggtgtagttcgggtttcggggtaggtaggcggggatttttaggacgtttcggcgcggacggcggatattaggtttagttcgcgtttttgtttttgttttttagtttgcgttcgtgtttgtatttgcgcggggtagtcgtcggggtatagcgggtagtttcgaggggatttcgcgttatcgcgttgtcggtatcggcgttggagatttttttcgttgaggtttagtacggtcgataggtggtcgatatagcggatagttaggcgtagcgtttcgattttggttaggttttggttcgcgggcgttacggacggcggtagaaagcggcgtagttcgtgtagggcgcgggttagcgtgcgtatgcgtagtttttttcgtttattggcgttttgtttttgttcgttgtttaggcggttgttgcgcgcgtcgcgtttatttacggagggggcgcgggggtttcggagggtgtttggtcgcgcggggttcgttacggggttgtcggttggggtgttgttttatgagtttggggacgagacgagggagcggtcgtagtttttgtcggagggcggcggtcgtcgagttgggttttaggtcgtagagagtatttaggattcggagagcggcgggtataggggttgggttatggtagcggcggcgcgtttgggggtcggcggtcggcggtcg

SEQ ID NO: 20544 - DNA, 887 bp, Artificial Sequence
  chemically treated genomic DNA (Homo sapiens) CpG-island No: 20544
cgaccgccgaccgccgacccccaaacgcgccgccgctaccataacccaacccctatacccgccgctctccgaatcctaaatactctctacgacctaaaacccaactcgacgaccgccgccctccgacaaaaactacgaccgctccctcgtctcgtccccaaactcataaaacaacaccccaaccgacaaccccgtaacgaaccccgcgcgaccaaacaccctccgaaacccccgcgccccctccgtaaataaacgcgacgcgcgcaacaaccgcctaaacaacgaacaaaaacaaaacgccaataaacgaaaaaaactacgcatacgcacgctaacccgcgccctacacgaactacgccgctttctaccgccgtccgtaacgcccgcgaaccaaaacctaaccaaaatcgaaacgctacgcctaactatccgctatatcgaccacctatcgaccgtactaaacctcaacgaaaaaaatctccaacgccgataccgacaacgcgataacgcgaaatcccctcgaaactacccgctataccccgacgactaccccgcgcaaatacaaacacgaacgcaaactaaaaaacaaaaacaaaaacgcgaactaaacctaatatccgccgtccgcgccgaaacgtcctaaaaatccccgcctacctaccccgaaacccgaactacacccgaaccgcgcgacccgcctacgctattcgccgaaacgacgtaccctaaaaaacaaacgataaaaccaaacccaccgtccccgattaatatccccttccccgcgcccccttcgtccgtacccccgcgcacaaccccaccgcccgccaaaataaaaaccaaacaccctactactccccgccgacaacctaaccacctaaccaccataa

SEQ ID NO: 20545 - DNA, 593 bp, Artificial Sequence
  chemically treated genomic DNA (Homo sapiens) CpG-island No: 20545
cggttgtcgttcgagtcggtagaacgaggtttttgagcgggtttcgggttgagcggcggtagattttcgtttttcgggttttagcgttgtcgcgtatgcggttgaacggcggagtcgcggtcgcgtaggcgtcggaggtcgtgggaggtgatatagttgtagggggagttggggaagagtcgcgtaggcgtcggaggaggtcggggtaggtgacgtagttgtagggggagttggggaagagtcgcgtaggcgtcggaggaggtcgtgggaggtgacgtagttgtagggggagttggggaagagtcgcgtaggcgtcggaggaggtcgtgggaggtgacgtagttgtagggggagttggggaagagtcgcgtaggcgtcggaggaggtcgtgggaggtgacgtagttgtagggggagttggggaagagtcgcgtaggcgtcggaggaggtcgtgggaggtgacgtagttgtagggggagttggggaagagtcgcgtaggcgtcggagagttttgcggagtatttttttgtgttgagtttcggatttattttttggttttatagacgaggaagttgaggatttgagagttgtata

SEQ ID NO: 20546 - DNA, 593 bp, Artificial Sequence
  chemically treated genomic DNA (Homo sapiens) CpG-island No: 20546
tatacaactctcaaatcctcaacttcctcgtctataaaaccaaaaaataaatccgaaactcaacacaaaaaaatactccgcaaaactctccgacgcctacgcgactcttccccaactccccctacaactacgtcacctcccacgacctcctccgacgcctacgcgactcttccccaactccccctacaactacgtcacctcccacgacctcctccgacgcctacgcgactcttccccaactccccctacaactacgtcacctcccacgacctcctccgacgcctacgcgactcttccccaactccccctacaactacgtcacctcccacgacctcctccgacgcctacgcgactcttccccaactccccctacaactacgtcacctaccccgacctcctccgacgcctacgcgactcttccccaactccccctacaactatatcacctcccacgacctccgacgcctacgcgaccgcgactccgccgttcaaccgcatacgcgacaacgctaaaacccgaaaaacgaaaatctaccgccgctcaacccgaaacccgctcaaaaacctcgttctaccgactcgaacgacaaccg

SEQ ID NO: 20547 - DNA, 593 bp, Artificial Sequence
  chemically treated genomic DNA (Homo sapiens) CpG-island No: 20547
tgtatagtttttagatttttagttttttcgtttgtaaaattaaggaatgaattcgggatttagtatagggggatgtttcgtaagatttttcggcgtttgcgcggtttttttttagttttttttgtagttacgttattttttacggtttttttcggcgtttgcgcggtttttttttagttttttttgtagttacgttattttttacggtttttttcggcgtttgcgcggtttttttttagttttttttgtagttacgttattttttacggtttttttcggcgtttgcgcggtttttttttagttttttttgtagttacgttattttttacggtttttttcggcgtttgcgcggtttttttttagttttttttgtagttacgttatttatttcggtttttttcggcgtttgcgcggtttttttttagttttttttgtagttatgttattttttacggttttcggcgtttgcgcggtcgcggtttcgtcgtttaatcgtatgcgcgatagcgttgaggttcggggagcgaggatttgtcgtcgtttagttcggagttcgtttagaaatttcgttttgtcgattcggacggtagtcg

SEQ ID NO: 20548 - DNA, 593 bp, Artificial Sequence
  chemically treated genomic DNA (Homo sapiens) CpG-island No: 20548
cgactaccgtccgaatcgacaaaacgaaatttctaaacgaactccgaactaaacgacgacaaatcctcgctccccgaacctcaacgctatcgcgcatacgattaaacgacgaaaccgcgaccgcgcaaacgccgaaaaccgtaaaaaataacataactacaaaaaaaactaaaaaaaaaccgcgcaaacgccgaaaaaaaccgaaataaataacgtaactacaaaaaaaactaaaaaaaaaccgcgcaaacgccgaaaaaaaccgtaaaaaataacgtaactacaaaaaaaactaaaaaaaaaccgcgcaaacgccgaaaaaaaccgtaaaaaataacgtaactacaaaaaaaactaaaaaaaaaccgcgcaaacgccgaaaaaaaccgtaaaaaataacgtaactacaaaaaaaactaaaaaaaaaccgcgcaaacgccgaaaaaaaccgtaaaaaataacgtaactacaaaaaaaactaaaaaaaaaccgcgcaaacgccgaaaaatcttacgaaacatccccctatactaaatcccgaattcattccttaattttacaaacgaaaaaactaaaaatctaaaaactataca

SEQ ID NO: 20549 - DNA, 645 bp, Artificial Sequence
  chemically treated genomic DNA (Homo sapiens) CpG-island No: 20549
tcgacgtaatagttgaaagggaaggacgcggagattattcggtattcgttttaggcgtttttagagttttcgtttaggcggttcgtgggggtcggggtcgcggtcgcggtcgcggatcggggatagagtaatggggcgggcgcgtagcgtcggttgtatttttagagttttttatcgtcgttttacggtcgtttagcgcgcgtcgggattgtattttttataggtttacgttgcggagtatcgtttattcgagttttacgcgagtgcgttgtcgcgaggtgtttttgtcgtagttttcgttcgttcgtagagtttttgaaaggcggcgggaggcggcgagcgttatggttagttcgggttgtttgttgtgcgtgttgggtttgttattttgcggggcggcgagtttcgagttgtttagattttacggcgatatcgttaagaagtttattatcggtaaggaggttgtgcggggtcgtagtagacggggaggagttgggtgttggcgttgggcgtttttcgtcgtcgcgttttagttggcgcgtttcgtcgggaaaaatttttagatgtgtttcgtttttggtgtaaggaggaattcgggttgggtattatttaggtcgtattgaaatgtatttggttgaggtattt

SEQ ID NO: 20550 - DNA, 645 bp, Artificial Sequence
  chemically treated genomic DNA (Homo sapiens) CpG-island No: 20550
aaatacctcaaccaaatacatttcaatacgacctaaataatacccaacccgaattcctccttacaccaaaaacgaaacacatctaaaaatttttcccgacgaaacgcgccaactaaaacgcgacgacgaaaaacgcccaacgccaacacccaactcctccccgtctactacgaccccgcacaacctccttaccgataataaacttcttaacgatatcgccgtaaaatctaaacaactcgaaactcgccgccccgcaaaataacaaacccaacacgcacaacaaacaacccgaactaaccataacgctcgccgcctcccgccgcctttcaaaaactctacgaacgaacgaaaactacgacaaaaacacctcgcgacaacgcactcgcgtaaaactcgaataaacgatactccgcaacgtaaacctataaaaaatacaatcccgacgcgcgctaaacgaccgtaaaacgacgataaaaaactctaaaaatacaaccgacgctacgcgcccgccccattactctatccccgatccgcgaccgcgaccgcgaccccgacccccacgaaccgcctaaacgaaaactctaaaaacgcctaaaacgaataccgaataatctccgcgtccttccctttcaactattacgtcga

SEQ ID NO: 20551 - DNA, 645 bp, Artificial Sequence
  chemically treated genomic DNA (Homo sapiens) CpG-island No: 20551
aggtattttaattaggtatattttagtacgatttaaatggtgtttagttcgggtttttttttgtattaaaagcgaagtatatttgggggtttttttcggcgggacgcgttagttggagcgcggcggcgggaggcgtttagcgttaatatttagttttttttcgtttgttgcggtttcgtatagtttttttatcgatgatgggttttttggcggtgtcgtcgtggggtttagatagttcgaggttcgtcgtttcgtagagtagtaggtttagtacgtatagtaggtagttcggattggttatggcgttcgtcgtttttcgtcgttttttaaaagttttgcgggcgggcgggggttgcggtagggatatttcgcggtagcgtattcgcgtgagattcgggtgggcggtgtttcgtagcgtgggtttatgggaaatgtagtttcggcgcgcgttaggcggtcgtggggcggcggtgggaggttttgggagtgtagtcggcgttgcgcgttcgttttattgttttgttttcggttcgcgatcgcgatcgcgatttcgatttttacgggtcgtttaagcggagattttggaaacgtttggggcgggtatcgggtggttttcgcgttttttttttttaattgttacgtcga

SEQ ID NO: 20552 - DNA, 645 bp, Artificial Sequence
  chemically treated genomic DNA (Homo sapiens) CpG-island No: 20552
tcgacgtaacaattaaaaaaaaaaaacgcgaaaaccacccgatacccgccccaaacgtttccaaaatctccgcttaaacgacccgtaaaaatcgaaatcgcgatcgcgatcgcgaaccgaaaacaaaacaataaaacgaacgcgcaacgccgactacactcccaaaacctcccaccgccgccccacgaccgcctaacgcgcgccgaaactacatttcccataaacccacgctacgaaacaccgcccacccgaatctcacgcgaatacgctaccgcgaaatatccctaccgcaacccccgcccgcccgcaaaacttttaaaaaacgacgaaaaacgacgaacgccataaccaatccgaactacctactatacgtactaaacctactactctacgaaacgacgaacctcgaactatctaaaccccacgacgacaccgccaaaaaacccatcatcgataaaaaaactatacgaaaccgcaacaaacgaaaaaaaactaaatattaacgctaaacgcctcccgccgccgcgctccaactaacgcgtcccgccgaaaaaaacccccaaatatacttcgcttttaatacaaaaaaaaacccgaactaaacaccatttaaatcgtactaaaatatacctaattaaaatacct

SEQ ID NO: 20553 - DNA, 500 bp, Artificial Sequence
  chemically treated genomic DNA (Homo sapiens) CpG-island No: 20553
  unsure (494)
tgtagcggtatatcggtagttttttgcgttaaggcgtcgattaattttataaatcgttgtaaggcgttggtagttcgttcggcgagggtttttttttgtaatagtttacgatatgtttgttagagtgttaattggcgatcgcgcgatgtttgacgtattacgtttagcgttcggttattaatatttcgcgttggcgtatttattatacgtttaaaggtcgcgtcgtcgttgcggttggtaattaggcgtagatacgagagcgtatttttgattttttggcgttcgaagaagcgtatttcgtcgtaaatacggtacggtatattggtttgtaataacgttttttcgagtattcgcgattgggcgttgttgcggtagagaatggcgtattcggtaagcgtttcgtcgttgttttgttaggttttgatgcggttaattataaaacgcgttttatcgagttcgttaaaagcgtaatagagggaaataagtttatcgtncgcgtt

SEQ ID NO: 20554 - DNA, 500 bp, Artificial Sequence
  chemically treated genomic DNA (Homo sapiens) CpG-island No: 20554
  unsure (7)
aacgcgnacgataaacttatttccctctattacgcttttaacgaactcgataaaacgcgttttataattaaccgcatcaaaacctaacaaaacaacgacgaaacgcttaccgaatacgccattctctaccgcaacaacgcccaatcgcgaatactcgaaaaaacgttattacaaaccaatataccgtaccgtatttacgacgaaatacgcttcttcgaacgccaaaaaatcaaaaatacgctctcgtatctacgcctaattaccaaccgcaacgacgacgcgacctttaaacgtataataaatacgccaacgcgaaatattaataaccgaacgctaaacgtaatacgtcaaacatcgcgcgatcgccaattaacactctaacaaacatatcgtaaactattacaaaaaaaaaccctcgccgaacgaactaccaacgccttacaacgatttataaaattaatcgacgccttaacgcaaaaaactaccgatataccgctaca

SEQ ID NO: 20555 - DNA, 500 bp, Artificial Sequence
  chemically treated genomic DNA (Homo sapiens) CpG-island No: 20555
  unsure (7)
ggcgcgnacggtgagtttatttttttttattgcgtttttaacgaattcgatgaagcgcgttttgtggttaatcgtattaaaatttggtaggataacggcggagcgtttgtcgagtgcgttattttttatcgtagtaacgtttagtcgcgggtgttcgaagaggcgttattgtaggttagtatgtcgtatcgtatttacggcgggatgcgttttttcgaacgttaggaaattaaagatgcgttttcgtatttgcgtttgattgttaatcgtaacgacgacgcggtttttgagcgtgtggtgaatacgttaacgcggggtattggtgatcggacgttggacgtggtacgttagatatcgcgcgatcgttagttaatattttggtaggtatgtcgtgagttgttgtaggaaaaagttttcgtcgggcgagttgttagcgttttgtagcgatttatggaattaatcgacgttttagcgtaggaaattgtcgatatgtcgttgta

SEQ ID NO: 20556 - DNA, 500 bp, Artificial Sequence
  chemically treated genomic DNA (Homo sapiens) CpG-island No: 20556
  unsure (494)
tacaacgacatatcgacaatttcctacgctaaaacgtcgattaattccataaatcgctacaaaacgctaacaactcgcccgacgaaaactttttcctacaacaactcacgacatacctaccaaaatattaactaacgatcgcgcgatatctaacgtaccacgtccaacgtccgatcaccaataccccgcgttaacgtattcaccacacgctcaaaaaccgcgtcgtcgttacgattaacaatcaaacgcaaatacgaaaacgcatctttaatttcctaacgttcgaaaaaacgcatcccgccgtaaatacgatacgacatactaacctacaataacgcctcttcgaacacccgcgactaaacgttactacgataaaaaataacgcactcgacaaacgctccgccgttatcctaccaaattttaatacgattaaccacaaaacgcgcttcatcgaattcgttaaaaacgcaataaaaaaaaataaactcaccgtncgcgcc

SEQ ID NO: 20557 - DNA, 653 bp, Artificial Sequence
  chemically treated genomic DNA (Homo sapiens) CpG-island No: 20557
  unsure (140, 538)
ttacgtcgtattcggtaattaacgtttgatgcgacgttggcgcgttttattaggtttatatcgttgtgaagtgcggtatttcgtaggttagataaggcggttacgtcgtattcgatatttaacgttcgagtcggttgttngttgcgacgttggcgcgttttattaggtttatatcgttgtgaagtgttttatttcgtaggtcggataaggcggttacgtcgtattcgatatttaacgtttaagtcggttgtttgatgcgacgttggcgcgttttattaggtttatatcgttgtgaagtgttttatttcgtaggttggataaggcggttacgtcgtattcgatatttaacgttcgagtcggttgtttgatgcgacgttggcgcgttttattaggtttatatcgttgtgaagtgttttatttcgtaggtcggataaggcggttacgtcgtattcgatatttaacgtttaagtcggttgtttgatgcgacgttggcgcgttttattaggtttatatcgttgtgaagtgttttatttcgtangttggataaggcggttacgtcgtatttaatatttaacgttcgagtcggttgtttgatgcgacgttggcgcgttttattagtatacgttatattcggtatattatgtcggatgtgg

SEQ ID NO: 20558 - DNA, 653 bp, Artificial Sequence
  chemically treated genomic DNA (Homo sapiens) CpG-island No: 20558
  unsure (116, 514)
ccacatccgacataatataccgaatataacgtatactaataaaacgcgccaacgtcgcatcaaacaaccgactcgaacgttaaatattaaatacgacgtaaccgccttatccaacntacgaaataaaacacttcacaacgatataaacctaataaaacgcgccaacgtcgcatcaaacaaccgacttaaacgttaaatatcgaatacgacgtaaccgccttatccgacctacgaaataaaacacttcacaacgatataaacctaataaaacgcgccaacgtcgcatcaaacaaccgactcgaacgttaaatatcgaatacgacgtaaccgccttatccaacctacgaaataaaacacttcacaacgatataaacctaataaaacgcgccaacgtcgcatcaaacaaccgacttaaacgttaaatatcgaatacgacgtaaccgccttatccgacctacgaaataaaacacttcacaacgatataaacctaataaaacgcgccaacgtcgcaacnaacaaccgactcgaacgttaaatatcgaatacgacgtaaccgccttatctaacctacgaaataccgcacttcacaacgatataaacctaataaaacgcgccaacgtcgcatcaaacgttaattaccgaatacgacgtaa

SEQ ID NO: 20559 - DNA, 653 bp, Artificial Sequence
  chemically treated genomic DNA (Homo sapiens) CpG-island No: 20559
  unsure (116, 514)
ttatattcggtatggtatgtcggatgtggcgtatgttgataagacgcgttagcgtcgtattaggtaatcggttcgggcgttagatgttggatgcggcgtaatcgttttatttaatntacggggtggagtattttatagcggtgtaggtttgataagacgcgttagcgtcgtattaggtaatcggtttgggcgttagatgtcggatgcggcgtaatcgttttattcgatttacggggtggagtattttatagcggtgtaggtttgataagacgcgttagcgtcgtattaggtaatcggttcggacgttggatgtcggatgcggcgtaatcgttttatttaatttacggggtggagtattttatagcggtgtaggtttgataagacgcgttagcgtcgtattaggtaatcggtttgggcgttagatgtcggatgcggcgtaatcgttttattcgatttacggggtggagtattttatagcggtgtaggtttgataagacgcgttagcgtcgtaatnggtaatcggttcgggcgttggatgtcggatgcggcgtgatcgttttgtttgatttacggggtgtcgtattttatagcggtgtaggtttgataagacgcgttagcgtcgtattaggcgttgattgtcggatgcggcgtga

SEQ ID NO: 20560 - DNA, 653 bp, Artificial Sequence
  chemically treated genomic DNA (Homo sapiens) CpG-island No: 20560
  unsure (140, 538)
tcacgccgcatccgacaatcaacgcctaatacgacgctaacgcgtcttatcaaacctacaccgctataaaatacgacaccccgtaaatcaaacaaaacgatcacgccgcatccgacatccaacgcccgaaccgattaccnattacgacgctaacgcgtcttatcaaacctacaccgctataaaatactccaccccgtaaatcgaataaaacgattacgccgcatccgacatctaacgcccaaaccgattacctaatacgacgctaacgcgtcttatcaaacctacaccgctataaaatactccaccccgtaaattaaataaaacgattacgccgcatccgacatccaacgtccgaaccgattacctaatacgacgctaacgcgtcttatcaaacctacaccgctataaaatactccaccccgtaaatcgaataaaacgattacgccgcatccgacatctaacgcccaaaccgattacctaatacgacgctaacgcgtcttatcaaacctacaccgctataaaatactccaccccgtanattaaataaaacgattacgccgcatccaacatctaacgcccgaaccgattacctaatacgacgctaacgcgtcttatcaacatacgccacatccgacataccataccgaatataa

SEQ ID NO: 20561 - DNA, 738 bp, Artificial Sequence
  chemically treated genomic DNA (Homo sapiens) CpG-island No: 20561
agtttcgtcgcgttatgtttgagtcgggcgcgtttcggttcgtgtttcgtcgtcgtttttcggttttcgcgtcgtttcggagttcgggtcgtagtttgcgtcgttcgtagcggttttgagttcggtttcgtcgatcggtttttggagttcgaacgttgttcggggacgaaggcgtaggaagcgcgtagggaacgagatcgaaggaaggagcgggaaggagagcgtagtcgtcgtttggttttgcgcgtttcgggagcgtcgtgcggttttgttcgcgggtttcgggtgtgcgcggggcggcgtcgcggaatatgacggcgttttgggtggttttcgtttttttttggggatcgttgtgcgtcggtaagaattgggcgcggcgcggggacgtcgagagggcgcgcggggttggtttttggcgtcgcgcggtgtttattaataaagggcgggttcggggtttcgtcgtcgtattatttgtatttagtttttattttcgggggcgtgggttgggggcgcggtgggcgttcggttcgtcgaatttgggggtacgattttgtttgtgtagttatttgcgggattttggtttttagaggcgtttttgcgatgggggtcgggacgcggagttttagggtcggagttcgggttacgcgggcgcgtggaatttagggaaagagtgaggaaaatttgagtttggggaaggcggttaagaggggtgggtagattttattgggggtggta

SEQ ID NO: 20562 - DNA, 738 bp, Artificial Sequence
  chemically treated genomic DNA (Homo sapiens) CpG-island No: 20562
taccacccccaataaaatctacccacccctcttaaccgccttccccaaactcaaattttcctcactctttccctaaattccacgcgcccgcgtaacccgaactccgaccctaaaactccgcgtcccgacccccatcgcaaaaacgcctctaaaaaccaaaatcccgcaaataactacacaaacaaaatcgtacccccaaattcgacgaaccgaacgcccaccgcgcccccaacccacgcccccgaaaataaaaactaaatacaaataatacgacgacgaaaccccgaacccgccctttattaataaacaccgcgcgacgccaaaaaccaaccccgcgcgccctctcgacgtccccgcgccgcgcccaattcttaccgacgcacaacgatccccaaaaaaaaacgaaaaccacccaaaacgccgtcatattccgcgacgccgccccgcgcacacccgaaacccgcgaacaaaaccgcacgacgctcccgaaacgcgcaaaaccaaacgacgactacgctctccttcccgctccttccttcgatctcgttccctacgcgcttcctacgccttcgtccccgaacaacgttcgaactccaaaaaccgatcgacgaaaccgaactcaaaaccgctacgaacgacgcaaactacgacccgaactccgaaacgacgcgaaaaccgaaaaacgacgacgaaacacgaaccgaaacgcgcccgactcaaacataacgcgacgaaact

SEQ ID NO: 20563 - DNA, 738 bp, Artificial Sequence
  chemically treated genomic DNA (Homo sapiens) CpG-island No: 20563
tgttatttttaatgagatttgtttattttttttggtcgttttttttaggtttaggttttttttattttttttttgggttttacgcgttcgcgtagttcgaatttcgattttgaggtttcgcgtttcggtttttatcgtaggggcgtttttaggaattagaatttcgtagatgattatatagataagatcgtgtttttaagttcggcgagtcgggcgtttatcgcgtttttagtttacgttttcggaggtgagggttgaatataggtggtgcggcgacgaggtttcgggttcgttttttgttggtaaatatcgcgcggcgttagaggttagtttcgcgcgttttttcggcgttttcgcgtcgcgtttagtttttatcggcgtatagcgatttttagaggagggcgagggttatttagggcgtcgttatgtttcgcggcgtcgtttcgcgtatattcggagttcgcgggtagggtcgtacggcgttttcggggcgcgtagggttaggcggcggttgcgttttttttttcgttttttttttcggtttcgttttttgcgcgttttttgcgttttcgttttcgagtagcgttcgggttttaagggtcggtcggcggggtcgggtttagggtcgttgcgggcggcgtaggttgcggttcgggtttcggggcgacgcgggggtcggggggcggcggcggggtacgggtcggggcgcgttcgatttaggtatagcgcggcggggtt

SEQ ID NO: 20564 - DNA, 738 bp, Artificial Sequence
  chemically treated genomic DNA (Homo sapiens) CpG-island No: 20564
aaccccgccgcgctatacctaaatcgaacgcgccccgacccgtaccccgccgccgccccccgacccccgcgtcgccccgaaacccgaaccgcaacctacgccgcccgcaacgaccctaaacccgaccccgccgaccgacccttaaaacccgaacgctactcgaaaacgaaaacgcaaaaaacgcgcaaaaaacgaaaccgaaaaaaaaaacgaaaaaaaaaacgcaaccgccgcctaaccctacgcgccccgaaaacgccgtacgaccctacccgcgaactccgaatatacgcgaaacgacgccgcgaaacataacgacgccctaaataaccctcgccctcctctaaaaatcgctatacgccgataaaaactaaacgcgacgcgaaaacgccgaaaaaacgcgcgaaactaacctctaacgccgcgcgatatttaccaacaaaaaacgaacccgaaacctcgtcgccgcaccacctatattcaaccctcacctccgaaaacgtaaactaaaaacgcgataaacgcccgactcgccgaacttaaaaacacgatcttatctatataatcatctacgaaattctaattcctaaaaacgcccctacgataaaaaccgaaacgcgaaacctcaaaatcgaaattcgaactacgcgaacgcgtaaaacccaaaaaaaaaataaaaaaaacctaaacctaaaaaaaacgaccaaaaaaaataaacaaatctcattaaaaataaca

SEQ ID NO: 20565 - DNA, 505 bp, Artificial Sequence
  chemically treated genomic DNA (Homo sapiens) CpG-island No: 20565
ggcgggaggcggcgtttagttaaggataatagaagattacgtcgcgtgggttaaaggaaatagtttcgttaataaataagtttttggtcgacgtattttattttttttatttatataagattttatttttttttcggagtcgcggaggttgttttgttaaattgtttggattacgacgattttttaggaggtcgggtcgtttatttaatatggcggtttcggttaattttgttagtcgggtttggagaacggaaagttcggagggattagaatttttgtattcgataagtttgtcggtaattttcgttagtcgattagagggcggagttgaggtcggtttagttcggaggcgggaaggataatttggattcgtagtttcgtcggaagtggttttagtttcgaggtcgggcgttttcggttattttcggcgtttttagggttggttttcgttattttcgggagtcgtggaggtacgaatttaagatatgtttattttattaattta

SEQ ID NO: 20566 - DNA, 505 bp, Artificial Sequence
  chemically treated genomic DNA (Homo sapiens) CpG-island No: 20566
taaattaataaaataaacatatcttaaattcgtacctccacgactcccgaaaataacgaaaaccaaccctaaaaacgccgaaaataaccgaaaacgcccgacctcgaaactaaaaccacttccgacgaaactacgaatccaaattatccttcccgcctccgaactaaaccgacctcaactccgccctctaatcgactaacgaaaattaccgacaaacttatcgaatacaaaaattctaatccctccgaactttccgttctccaaacccgactaacaaaattaaccgaaaccgccatattaaataaacgacccgacctcctaaaaaatcgtcgtaatccaaacaatttaacaaaacaacctccgcgactccgaaaaaaaaataaaatcttatataaataaaaaaaataaaatacgtcgaccaaaaacttatttattaacgaaactatttcctttaacccacgcgacgtaatcttctattatccttaactaaacgccgcctcccgcc

SEQ ID NO: 20567 - DNA, 505 bp, Artificial Sequence
  chemically treated genomic DNA (Homo sapiens) CpG-island No: 20567
taaattaataaaataggtatgttttaagttcgtatttttacggttttcgaagatgacgggaattagttttagaagcgtcggagatgatcgaagacgttcggtttcgaggttggggttattttcggcggaattgcgggtttaagttgtttttttcgttttcgggttgggtcgattttagtttcgttttttggtcggttgacggaaattgtcgataaatttgtcgaatgtaaggattttagttttttcgggtttttcgttttttaggttcggttgatagagttagtcgaggtcgttatattgaataagcgattcggttttttagggggtcgtcgtggtttagatagtttagtagaatagttttcgcggtttcggggagaaggtgaggttttgtatggatgggaagggtgaggtgcgtcggttagaggtttatttattgacgggattgttttttttggtttacgcgacgtagttttttgttgtttttgattgggcgtcgtttttcgtt

SEQ ID NO: 20568 - DNA, 505 bp, Artificial Sequence
  chemically treated genomic DNA (Homo sapiens) CpG-island No: 20568
aacgaaaaacgacgcccaatcaaaaacaacaaaaaactacgtcgcgtaaaccaaaaaaaacaatcccgtcaataaataaacctctaaccgacgcacctcacccttcccatccatacaaaacctcaccttctccccgaaaccgcgaaaactattctactaaactatctaaaccacgacgaccccctaaaaaaccgaatcgcttattcaatataacgacctcgactaactctatcaaccgaacctaaaaaacgaaaaacccgaaaaaactaaaatccttacattcgacaaatttatcgacaatttccgtcaaccgaccaaaaaacgaaactaaaatcgacccaacccgaaaacgaaaaaaacaacttaaacccgcaattccgccgaaaataaccccaacctcgaaaccgaacgtcttcgatcatctccgacgcttctaaaactaattcccgtcatcttcgaaaaccgtaaaaatacgaacttaaaacatacctattttattaattta

SEQ ID NO: 20569 - DNA, 552 bp, Artificial Sequence
  chemically treated genomic DNA (Homo sapiens) CpG-island No: 20569
tttgcgttcggggattagacgggaggtggagttgcgcggggagggcgggcgagtcgggcgttcgttttgagagtcggtttttttttttttttttgcgtggggcggggtggtgcgtttcgagtttttaggagttcgacgcgggcgggtgtcgaggggaggggagtggcggcggcggcgggcggttttcgttttagtttcggtagtggcgtcggcgacggcggtgtcgaggtagtcgttagcgttcggttaagtgttagtcggtagcgacggcgttagagttgggagttggggacgcgcgcgtcggattttttatagttttcgtttagagtttgaggcgtcggggtcgggggagtcggggggcgggcgggcgagcgggtcggggggagggtgggggatggcgcggattttgcggtcgttttcgttgtgttttggaggcggtaaagtataattttttttcgttttttttttcggagtcgggtttttgttgtagttttcgacgttattttcgttgttgttgttgtttttttcgttgttgtttttttttaggttttg

SEQ ID NO: 20570 - DNA, 552 bp, Artificial Sequence
  chemically treated genomic DNA (Homo sapiens) CpG-island No: 20570
caaaacctaaaaaaaaacaacaacgaaaaaaacaacaacaacaacgaaaataacgtcgaaaactacaacaaaaacccgactccgaaaaaaaaaacgaaaaaaaattatactttaccgcctccaaaacacaacgaaaacgaccgcaaaatccgcgccatcccccaccctccccccgacccgctcgcccgcccgccccccgactcccccgaccccgacgcctcaaactctaaacgaaaactataaaaaatccgacgcgcgcgtccccaactcccaactctaacgccgtcgctaccgactaacacttaaccgaacgctaacgactacctcgacaccgccgtcgccgacgccactaccgaaactaaaacgaaaaccgcccgccgccgccgccactcccctcccctcgacacccgcccgcgtcgaactcctaaaaactcgaaacgcaccaccccgccccacgcaaaaaaaaaaaaaaaaaccgactctcaaaacgaacgcccgactcgcccgccctccccgcgcaactccacctcccgtctaatccccgaacgcaaa

SEQ ID NO: 20571 - DNA, 552 bp, Artificial Sequence
  chemically treated genomic DNA (Homo sapiens) CpG-island No: 20571
tagagtttggagaagagtagtagcgggaagagtagtagtagtagcggaggtggcgtcgggggttgtagtaggagttcggtttcgaggagagaagcggaggaaagttgtgttttgtcgtttttaggatatagcggggacggtcgtagggttcgcgttattttttatttttttttcggttcgttcgttcgttcgtttttcggttttttcggtttcggcgttttaggttttgggcggaggttgtggaaggttcggcgcgcgcgtttttagtttttagttttagcgtcgtcgttgtcggttgatatttggtcgaacgttggcggttgtttcgatatcgtcgtcgtcgacgttattgtcgaggttgaagcgggagtcgttcgtcgtcgtcgttattttttttttttcggtattcgttcgcgtcgaatttttgggaattcggaacgtattatttcgttttacgtaagagggggaaaagaaatcgatttttagagcgggcgttcgattcgttcgtttttttcgcgtaattttatttttcgtttgattttcgggcgtaag

SEQ ID NO: 20572 - DNA, 552 bp, Artificial Sequence
  chemically treated genomic DNA (Homo sapiens) CpG-island No: 20572
cttacgcccgaaaatcaaacgaaaaataaaattacgcgaaaaaaacgaacgaatcgaacgcccgctctaaaaatcgatttcttttccccctcttacgtaaaacgaaataatacgttccgaattcccaaaaattcgacgcgaacgaataccgaaaaaaaaaaaataacgacgacgacgaacgactcccgcttcaacctcgacaataacgtcgacgacgacgatatcgaaacaaccgccaacgttcgaccaaatatcaaccgacaacgacgacgctaaaactaaaaactaaaaacgcgcgcgccgaaccttccacaacctccgcccaaaacctaaaacgccgaaaccgaaaaaaccgaaaaacgaacgaacgaacgaaccgaaaaaaaaataaaaaataacgcgaaccctacgaccgtccccgctatatcctaaaaacgacaaaacacaactttcctccgcttctctcctcgaaaccgaactcctactacaacccccgacgccacctccgctactactactactcttcccgctactactcttctccaaactcta

SEQ ID NO: 20573 - DNA, 730 bp, Artificial Sequence
  chemically treated genomic DNA (Homo sapiens) CpG-island No: 20573
cgcgttcgtcgttcgttcgggtttagtttcgggatttaggagtttttttcgtcgtcgtttttcggtgttcgttatcgtttttcggtgttcgtcgttttcgcgggttcggcgcgttgttttcggggcgttagtcgatttcgcggtcgggatttatcgagtagtaggagtcggtgcgtttgttgtaggtcgcgtttttggtcgcgtagtatgcggtcgatgtttcggtttatttttttcgtttttttgatcgtttcgcgttttttggtcgtttcgcgtttttcggtatttagttgttcggtgcgttgtcgtttttttttcggtttgtttgttttgggtcgagcgtatgtcgggtttttttcgtcgtttcgagggagtagggttcgggtcgtgttttttgcggtcgttcggattggggttagggtcggggtcggggcgggttgcgcgttttttatcggcggtttcgaggtcgcgtaggggtcgttttttgggttttcgaaaagtagcggtcgtagattgtagtatagatttatgtgggcgcggtatagcgggggcggcgcgcgggattagggtaggttgggcgtcgagggcggtttggttttcgcgtttagtttaggtcggcgttttagcggaggggcgggagggggttgtattcggattttgttcggcgttgtcggtcgttagttgcgggaagggggtgcggtaggtcggggtcgagggttatagtttttta

SEQ ID NO: 20574 - DNA, 730 bp, Artificial Sequence
  chemically treated genomic DNA (Homo sapiens) CpG-island No: 20574
taaaaaactataaccctcgaccccgacctaccgcacccccttcccgcaactaacgaccgacaacgccgaacaaaatccgaatacaaccccctcccgcccctccgctaaaacgccgacctaaactaaacgcgaaaaccaaaccgccctcgacgcccaacctaccctaatcccgcgcgccgcccccgctataccgcgcccacataaatctatactacaatctacgaccgctacttttcgaaaacccaaaaaacgacccctacgcgacctcgaaaccgccgataaaaaacgcgcaacccgccccgaccccgaccctaaccccaatccgaacgaccgcaaaaaacacgacccgaaccctactccctcgaaacgacgaaaaaaacccgacatacgctcgacccaaaacaaacaaaccgaaaaaaaaacgacaacgcaccgaacaactaaataccgaaaaacgcgaaacgaccaaaaaacgcgaaacgatcaaaaaaacgaaaaaaataaaccgaaacatcgaccgcatactacgcgaccaaaaacgcgacctacaacaaacgcaccgactcctactactcgataaatcccgaccgcgaaatcgactaacgccccgaaaacaacgcgccgaacccgcgaaaacgacgaacaccgaaaaacgataacgaacaccgaaaaacgacgacgaaaaaaactcctaaatcccgaaactaaacccgaacgaacgacgaacgcg

SEQ ID NO: 20575 - DNA, 730 bp, Artificial Sequence
  chemically treated genomic DNA (Homo sapiens) CpG-island No: 20575
tgaggggttgtggttttcggtttcggtttgtcgtatttttttttcgtagttggcggtcggtagcgtcgaatagggttcgggtgtagttttttttcgttttttcgttgaggcgtcggtttgaattgggcgcgggaattaggtcgttttcggcgtttagtttgttttagtttcgcgcgtcgttttcgttgtgtcgcgtttatatgggtttgtgttatagtttgcggtcgttgtttttcgggggtttaggggacgatttttgcgcggtttcggagtcgtcggtggaggacgcgtagttcgtttcggtttcggttttggttttagttcgggcggtcgtaagggatacggttcggattttgttttttcggggcggcgaagggagttcggtatgcgttcggtttaaagtagataagtcgaaggagaagcggtagcgtatcgagtagttgagtgtcgaggagcgcgaggcggttaaggagcgcgaggcggttaaggaggcgaggaaagtgagtcggggtatcgatcgtatgttgcgcgattagaagcgcgatttgtagtagacgtatcggtttttgttgttcggtaggtttcggtcgcgaggtcggttgacgtttcggggatagcgcgtcgggttcgcgggggcggcgggtatcggggagcggtggcgggtatcggggagcggcggcgggaggggtttttgaatttcgggattggattcggacgggcggcgggcgcg

SEQ ID NO: 20576 - DNA, 730 bp, Artificial Sequence
  chemically treated genomic DNA (Homo sapiens) CpG-island No: 20576
cgcgcccgccgcccgtccgaatccaatcccgaaattcaaaaacccctcccgccgccgctccccgatacccgccaccgctccccgatacccgccgcccccgcgaacccgacgcgctatccccgaaacgtcaaccgacctcgcgaccgaaacctaccgaacaacaaaaaccgatacgtctactacaaatcgcgcttctaatcgcgcaacatacgatcgataccccgactcactttcctcgcctccttaaccgcctcgcgctccttaaccgcctcgcgctcctcgacactcaactactcgatacgctaccgcttctccttcgacttatctactttaaaccgaacgcataccgaactcccttcgccgccccgaaaaaacaaaatccgaaccgtatcccttacgaccgcccgaactaaaaccaaaaccgaaaccgaaacgaactacgcgtcctccaccgacgactccgaaaccgcgcaaaaatcgtcccctaaacccccgaaaaacaacgaccgcaaactataacacaaacccatataaacgcgacacaacgaaaacgacgcgcgaaactaaaacaaactaaacgccgaaaacgacctaattcccgcgcccaattcaaaccgacgcctcaacgaaaaaacgaaaaaaaactacacccgaaccctattcgacgctaccgaccgccaactacgaaaaaaaaatacgacaaaccgaaaccgaaaaccacaacccctca

SEQ ID NO: 20577 - DNA, 536 bp, Artificial Sequence
  chemically treated genomic DNA (Homo sapiens) CpG-island No: 20577
cgtcgtttttttatttatttaggcgaggtggtttggatttgtatttcgttgaagaagttttttatgcgatattttcgttagtatttcgcgcggatttggttgggcggcggcggggagttagtttgttatcgtacggcggtcgggatcgtagtttttgggtgcgtagtgcgtttttcgttgcgtttttttagagcgcgggtttcgtgtttgtgttcggcgcgacgcgatttttttgttagtcgggtttcgcgtgtttttcgcgtttttcgtagttttcgcgtagttcgtagcgttttttagtttcgtttcgcggtcgcgggaattcggcgtttgtagtttcgttcggaatcgatcgttaggcgttgttgtcgtcggttacgtaacgcggggtttttgtttggtattagttttaggtgttttgtttcgggtcgtgttgtcgcgcgatattggggatttaataggtcgtcggttatttagttggtttcgtagtttttttgcggtttagcggttttttatttaggagaaaattatatttg

SEQ ID NO: 20578 - DNA, 536 bp, Artificial Sequence
  chemically treated genomic DNA (Homo sapiens) CpG-island No: 20578
caaatataattttctcctaaataaaaaaccgctaaaccgcaaaaaaactacgaaaccaactaaataaccgacgacctattaaatccccaatatcgcgcgacaacacgacccgaaacaaaacacctaaaactaataccaaacaaaaaccccgcgttacgtaaccgacgacaacaacgcctaacgatcgattccgaacgaaactacaaacgccgaattcccgcgaccgcgaaacgaaactaaaaaacgctacgaactacgcgaaaactacgaaaaacgcgaaaaacacgcgaaacccgactaacaaaaaaatcgcgtcgcgccgaacacaaacacgaaacccgcgctctaaaaaaacgcaacgaaaaacgcactacgcacccaaaaactacgatcccgaccgccgtacgataacaaactaactccccgccgccgcccaaccaaatccgcgcgaaatactaacgaaaatatcgcataaaaaacttcttcaacgaaatacaaatccaaaccacctcgcctaaataaataaaaaaacgacg

SEQ ID NO: 20579 - DNA, 536 bp, Artificial Sequence
  chemically treated genomic DNA (Homo sapiens) CpG-island No: 20579
taaatgtggtttttttttgggtgggaggtcgttgagtcgtagggaagttgcggggttagttgagtagtcggcggtttgttgggtttttagtgtcgcgcgatagtacgattcgagataaggtatttggggttggtgttaggtagaggtttcgcgttgcgtggtcggcggtaatagcgtttggcggtcggtttcgggcggggttgtaggcgtcgggttttcgcggtcgcgaggcggggttggagggcgttgcgggttgcgcggaggttgcgggaagcgcggggagtacgcggagttcgattagtagggagatcgcgtcgcgtcgggtataggtacgggattcgcgttttaggagggcgtagcgagaggcgtattgcgtatttaggggttgcggtttcggtcgtcgtgcggtgataagttgatttttcgtcgtcgtttagttaagttcgcgcggggtgttggcggagatgtcgtatgggaggtttttttaacgaggtgtaaatttaagttatttcgtttgagtgaatgaagggacggcg

SEQ ID NO: 20580 - DNA, 536 bp, Artificial Sequence
  chemically treated genomic DNA (Homo sapiens) CpG-island No: 20580
cgccgtcccttcattcactcaaacgaaataacttaaatttacacctcgttaaaaaaacctcccatacgacatctccgccaacaccccgcgcgaacttaactaaacgacgacgaaaaatcaacttatcaccgcacgacgaccgaaaccgcaacccctaaatacgcaatacgcctctcgctacgccctcctaaaacgcgaatcccgtacctatacccgacgcgacgcgatctccctactaatcgaactccgcgtactccccgcgcttcccgcaacctccgcgcaacccgcaacgccctccaaccccgcctcgcgaccgcgaaaacccgacgcctacaaccccgcccgaaaccgaccgccaaacgctattaccgccgaccacgcaacgcgaaacctctacctaacaccaaccccaaataccttatctcgaatcgtactatcgcgcgacactaaaaacccaacaaaccgccgactactcaactaaccccgcaacttccctacgactcaacgacctcccacccaaaaaaaaaccacattta

SEQ ID NO: 20581 - DNA, 538 bp, Artificial Sequence
  chemically treated genomic DNA (Homo sapiens) CpG-island No: 20581
gacgatgttcgcgtgattttgtaggacgaattcgtggtttagtattggggggtttttggtgttttttttgcgaatcgttatggtggggtcgtcgttcgcgtttgtaggtgtttcgtttcggttttgttttttttagttgtttatcgattcgtcgtcgtttttcgttggttgttttttacggtttcgttgtagtcgttcgttggggttttattttttattttatagttagtacgtagtcgtcgggtcgttcgggggaaaaaaaaaaaatataatagttagttcgtagcgggggcgagtatgcgtattagggagacgacgttttttggtgtcgcggtcgttttcgcgagtttatagcgttatttggggatcggaggtcgttggttcgcggtcgggcgagcgtgtaggaatgtgagcggcgtttttttgtttcgcgtcgggttcgggtttgggagtcgtttgaggcgcgagttttttgcgtttgtttagtagtttgaggtcgcggtcgggtgtttttttgtttttttggttatttagggat

SEQ ID NO: 20582 - DNA, 538 bp, Artificial Sequence
  chemically treated genomic DNA (Homo sapiens) CpG-island No: 20582
atccctaaataaccaaaaaaacaaaaaaacacccgaccgcgacctcaaactactaaacaaacgcaaaaaactcgcgcctcaaacgactcccaaacccgaacccgacgcgaaacaaaaaaacgccgctcacattcctacacgctcgcccgaccgcgaaccaacgacctccgatccccaaataacgctataaactcgcgaaaacgaccgcgacaccaaaaaacgtcgtctccctaatacgcatactcgcccccgctacgaactaactattatattttttttttttcccccgaacgacccgacgactacgtactaactataaaataaaaaataaaaccccaacgaacgactacaacgaaaccgtaaaaaacaaccaacgaaaaacgacgacgaatcgataaacaactaaaaaaaacaaaaccgaaacgaaacacctacaaacgcgaacgacgaccccaccataacgattcgcaaaaaaaacaccaaaaaccccccaatactaaaccacgaattcgtcctacaaaatcacgcgaacatcgtc

SEQ ID NO: 20583 - DNA, 538 bp, Artificial Sequence
  chemically treated genomic DNA (Homo sapiens) CpG-island No: 20583
atttttggatggttaggagggtaggagggtattcggtcgcggttttaggttgttgagtaggcgtaggaagttcgcgttttaaacgatttttaaattcgggttcggcgcgaagtagggaagcgtcgtttatatttttgtacgttcgttcggtcgcgggttagcggttttcggtttttaggtggcgttgtgggttcgcggaggcggtcgcggtattagggagcgtcgtttttttggtgcgtatgttcgttttcgttgcgggttagttgttgtgttttttttttttttttcgggcggttcggcggttgcgtattggttgtgggatgggaagtgaagttttagcgagcggttgtagcggggtcgtgaggagtagttagcgggaggcggcggcgagtcggtgagtagttgggaagagtagaatcggggcggagtatttgtaggcgcgggcggcggttttattatggcgattcgtaagaaaagtattaagagttttttagtgttgagttacgaattcgttttgtagaattacgcggatatcgtt

SEQ ID NO: 20584 - DNA, 538 bp, Artificial Sequence
  chemically treated genomic DNA (Homo sapiens) CpG-island No: 20584
aacgatatccgcgtaattctacaaaacgaattcgtaactcaacactaaaaaactcttaatacttttcttacgaatcgccataataaaaccgccgcccgcgcctacaaatactccgccccgattctactcttcccaactactcaccgactcgccgccgcctcccgctaactactcctcacgaccccgctacaaccgctcgctaaaacttcacttcccatcccacaaccaatacgcaaccgccgaaccgcccgaaaaaaaaaaaaaaaacacaacaactaacccgcaacgaaaacgaacatacgcaccaaaaaaacgacgctccctaataccgcgaccgcctccgcgaacccacaacgccacctaaaaaccgaaaaccgctaacccgcgaccgaacgaacgtacaaaaatataaacgacgcttccctacttcgcgccgaacccgaatttaaaaatcgtttaaaacgcgaacttcctacgcctactcaacaacctaaaaccgcgaccgaataccctcctaccctcctaaccatccaaaaat

SEQ ID NO: 20585 - DNA, 874 bp, Artificial Sequence
  chemically treated genomic DNA (Homo sapiens) CpG-island No: 20585
ggtgtttacgggattgataggtaggtaggtaggtcgcgggttgggattcggatattaaagtaaaagtatcgttgggcgtcggaggagtcgcggggtttttattttttttttgattgatttttaaattttaatttgtatttttttcgtcgtttcgttttttttttttcgatttcgttttatcgtttttcggtttttttgtttttttttttttttcggttttttttttcgcgttttttttttttgcgttttcggtttgttttttttttttttttttcgtttttttttttttttttttttttttttttcggtttttttcgttttttttttttttttttttttttttcgttttttttttttgcgttttcgttttttgtttttttttttcgtgtttgtagacgcgcggatcgtttatgcgtttttcgcgggtagaatgttgggtagtagcgttaagagcgtgtagttcgaggtggagttgagtagcggcggcggcgacgagggcgcggacgaatcgcggggcgtcggtaggaaggcggtagcggcggacggtagaggtatgttgtttaagcgcgttaaggcgttcggcggcggcggcggtatggttaaggttagcgcggttgagttgaaggtttttaagttcggtagcgtggatagtcgtgttttcggcgggtcgttcgtttttaatttgcgtaagtagaagttatttattaatttttttttttttacggatttcgagaaaaagttgtagttttatgagttcgaatggagcgacgatatggttaaggcgtttaaaggtttaggtaaggtggggtttaagggtcgtgaagtttcgttgatgtttaagacgttgtttaagtcggagtattcgtttttttag

SEQ ID NO: 20586 - DNA, 874 bp, Artificial Sequence
  chemically treated genomic DNA (Homo sapiens) CpG-island No: 20586
ctaaaaaaacgaatactccgacttaaacaacgtcttaaacatcaacgaaacttcacgacccttaaaccccaccttacctaaacctttaaacgccttaaccatatcgtcgctccattcgaactcataaaactacaactttttctcgaaatccgtaaaaaaaaaaaaattaataaataacttctacttacgcaaattaaaaacgaacgacccgccgaaaacacgactatccacgctaccgaacttaaaaaccttcaactcaaccgcgctaaccttaaccataccgccgccgccgccgaacgccttaacgcgcttaaacaacatacctctaccgtccgccgctaccgccttcctaccgacgccccgcgattcgtccgcgccctcgtcgccgccgccgctactcaactccacctcgaactacacgctcttaacgctactacccaacattctacccgcgaaaaacgcataaacgatccgcgcgtctacaaacacgaaaaaaaaaaacaaaaaacgaaaacgcaaaaaaaaaaaacgaaaaaaaaaaaaaaaaaaaaaaaaaacgaaaaaaaccgaaaaaaaaaaaaaaaaaaaaaaaaaaaaacgaaaaaaaaaaaaaaaaaacaaaccgaaaacgcaaaaaaaaaaaacgcgaaaaaaaaaaccgaaaaaaaaaaaaaaacaaaaaaaccgaaaaacgataaaacgaaatcgaaaaaaaaaaaacgaaacgacgaaaaaaatacaaattaaaatttaaaaatcaatcaaaaaaaaaataaaaaccccgcgactcctccgacgcccaacgatacttttactttaatatccgaatcccaacccgcgacctacctacctacctatcaatcccgtaaacacc

SEQ ID NO: 20587 - DNA, 874 bp, Artificial Sequence
  chemically treated genomic DNA (Homo sapiens) CpG-island No: 20587
ttggaagagcgagtgtttcgatttggatagcgttttggatattagcggagttttacggtttttggattttattttgtttaagtttttgggcgttttggttatatcgtcgttttattcgggtttataaagttgtagttttttttcggagttcgtgagaaaagagaggttggtgagtgatttttgtttgcgtaggttggaggcgggcggttcgtcggggatacggttgtttacgttgtcggatttgaagatttttagtttagtcgcgttggttttggttatgtcgtcgtcgtcgtcgggcgttttggcgcgtttgggtagtatgtttttgtcgttcgtcgttgtcgtttttttgtcggcgtttcgcggttcgttcgcgttttcgtcgtcgtcgtcgttgtttagttttatttcgggttgtacgtttttgacgttgttgtttagtattttgttcgcgaggagcgtatggacgattcgcgcgtttgtaggtacggggggagggggtagggggcgggagcgtaggaggaggaggcgggggaggaggagggggagagagaggacggaagaaatcgaggaagaaggggagagaagggggagagagcgagggaggagggagagaggtaagtcgagggcgtaggggaaagaaacgcgaggaaggaagtcgggaaaaaggaaagagtagggaagtcggggagcgatagggcggggtcggaggaaaaggggcggggcggcggggaaaatataaattaaaatttaaaaattagttaaaggaaggatggaagtttcgcggttttttcggcgtttagcggtgtttttgttttggtgttcggattttagttcgcggtttgtttgtttgtttgttagtttcgtggatatt

SEQ ID NO: 20588 - DNA, 874 bp, Artificial Sequence
  chemically treated genomic DNA (Homo sapiens) CpG-island No: 20588
aatatccacgaaactaacaaacaaacaaacaaaccgcgaactaaaatccgaacaccaaaacaaaaacaccgctaaacgccgaaaaaaccgcgaaacttccatccttcctttaactaatttttaaattttaatttatattttccccgccgccccgccccttttcctccgaccccgccctatcgctccccgacttccctactctttcctttttcccgacttccttcctcgcgtttctttcccctacgccctcgacttacctctctccctcctccctcgctctctcccccttctctccccttcttcctcgatttcttccgtcctctctctccccctcctcctcccccgcctcctcctcctacgctcccgccccctaccccctccccccgtacctacaaacgcgcgaatcgtccatacgctcctcgcgaacaaaatactaaacaacaacgtcaaaaacgtacaacccgaaataaaactaaacaacgacgacgacgacgaaaacgcgaacgaaccgcgaaacgccgacaaaaaaacgacaacgacgaacgacaaaaacatactacccaaacgcgccaaaacgcccgacgacgacgacgacataaccaaaaccaacgcgactaaactaaaaatcttcaaatccgacaacgtaaacaaccgtatccccgacgaaccgcccgcctccaacctacgcaaacaaaaatcactcaccaacctctcttttctcacgaactccgaaaaaaaactacaactttataaacccgaataaaacgacgatataaccaaaacgcccaaaaacttaaacaaaataaaatccaaaaaccgtaaaactccgctaatatccaaaacgctatccaaatcgaaacactcgctcttccaa

SEQ ID NO: 20589 - DNA, 740 bp, Artificial Sequence
  chemically treated genomic DNA (Homo sapiens) CpG-island No: 20589
gttcgcgtttttcgcggtgttttcgtttttgggttgcgttagttcgaggcggtgtcggtttttttgttttttcgagtcgtagatgttgcgggcgttttcgggaaaagatttgggcggcgcgttcgttcggtaagttttgagtatttagggacgcggtggcgacgcggttagtgagtcggttttttttagttcgttgtttttttcggttatttttttttgcgaggggtattagcgtggggaggttgggcgttattcgcggagggtagttcgttggcggtcgttttttatttttaatttttattggagattttttatttcgggatcgttcgcgcgggcgtggtcgggtttcgcgtttcgcgtagcggggtggtataggcggttagggagggtttacgtattcggcgcgagttagaagttttcggtcggtttgtagtgtttaagttttatggcgagggtagttcgagtggtcgtcgcggttgtaggttcgtatgtcgggtatcgtattaggcgtttagtaggtaggggtagggaaggtagggttgcgttggcggtcggtgtttagttatcggcgatcggggacgttcggagatatttggtttttcggaagcgtttttcggaaatgggattcgattcggtttgcgggcggcgggtgtttagaagaagaggttgcgggtaagtagtgttttttttttggtttttcggattttttttagttttttcgtggtttgatgggcggtcgg

SEQ ID NO: 20590 - DNA, 740 bp, Artificial Sequence
  chemically treated genomic DNA (Homo sapiens) CpG-island No: 20590
ccgaccgcccatcaaaccacgaaaaaactaaaaaaaatccgaaaaaccaaaaaaaaaacactacttacccgcaacctcttcttctaaacacccgccgcccgcaaaccgaatcgaatcccatttccgaaaaacgcttccgaaaaaccaaatatctccgaacgtccccgatcgccgataactaaacaccgaccgccaacgcaaccctaccttccctacccctacctactaaacgcctaatacgatacccgacatacgaacctacaaccgcgacgaccactcgaactaccctcgccataaaacttaaacactacaaaccgaccgaaaacttctaactcgcgccgaatacgtaaaccctccctaaccgcctataccaccccgctacgcgaaacgcgaaacccgaccacgcccgcgcgaacgatcccgaaataaaaaatctccaataaaaattaaaaataaaaaacgaccgccaacgaactaccctccgcgaataacgcccaacctccccacgctaatacccctcgcaaaaaaaaataaccgaaaaaaacaacgaactaaaaaaaaccgactcactaaccgcgtcgccaccgcgtccctaaatactcaaaacttaccgaacgaacgcgccgcccaaatcttttcccgaaaacgcccgcaacatctacgactcgaaaaaacaaaaaaaccgacaccgcctcgaactaacgcaacccaaaaacgaaaacaccgcgaaaaacgcgaac

SEQ ID NO: 20591 - DNA, 740 bp, Artificial Sequence
  chemically treated genomic DNA (Homo sapiens) CpG-island No: 20591
tcggtcgtttattaggttacgagggggttaagaggagttcggggaattagagagggggtattgtttgttcgtagtttttttttttaaatattcgtcgttcgtaagtcgggtcgaattttattttcgaagggcgttttcgggagattaggtgttttcgagcgttttcgatcgtcggtaattgggtatcggtcgttagcgtagttttattttttttgtttttatttgttagacgtttggtgcggtgttcggtatgcggatttatagtcgcgacggttattcgggttgttttcgttatgggatttgggtattgtaggtcgatcggaggtttttagttcgcgtcgggtgcgtgggttttttttggtcgtttgtgttatttcgttgcgcgaggcgcggagttcgattacgttcgcgcggacggtttcggggtgaggaatttttagtggggattgagggtagagggcggtcgttagcgagttgtttttcgcggatggcgtttagtttttttacgttggtgtttttcgtaaggagaggtggtcgggaaaggtaacggattgaggaaagtcggtttattggtcgcgtcgttatcgcgtttttgagtgtttagaatttatcgagcgagcgcgtcgtttagattttttttcggaggcgttcgtagtatttgcgattcggggaggtaaaggagtcggtatcgtttcggattggcgtagtttaggagcgagagtatcgcggggagcgcgggt

SEQ ID NO: 20592 - DNA, 740 bp, Artificial Sequence
  chemically treated genomic DNA (Homo sapiens) CpG-island No: 20592
acccgcgctccccgcgatactctcgctcctaaactacgccaatccgaaacgataccgactcctttacctccccgaatcgcaaatactacgaacgcctccgaaaaaaaatctaaacgacgcgctcgctcgataaattctaaacactcaaaaacgcgataacgacgcgaccaataaaccgactttcctcaatccgttacctttcccgaccacctctccttacgaaaaacaccaacgtaaaaaaactaaacgccatccgcgaaaaacaactcgctaacgaccgccctctaccctcaatccccactaaaaattcctcaccccgaaaccgtccgcgcgaacgtaatcgaactccgcgcctcgcgcaacgaaataacacaaacgaccaaaaaaaacccacgcacccgacgcgaactaaaaacctccgatcgacctacaatacccaaatcccataacgaaaacaacccgaataaccgtcgcgactataaatccgcataccgaacaccgcaccaaacgtctaacaaataaaaacaaaaaaaataaaactacgctaacgaccgatacccaattaccgacgatcgaaaacgctcgaaaacacctaatctcccgaaaacgcccttcgaaaataaaattcgacccgacttacgaacgacgaatatttaaaaaaaaaaactacgaacaaacaataccccctctctaattccccgaactcctcttaaccccctcgtaacctaataaacgaccga

SEQ ID NO: 20593 - DNA, 765 bp, Artificial Sequence
  chemically treated genomic DNA (Homo sapiens) CpG-island No: 20593
tttcgcgaaattgacggaagagttcgggtgtttttttttgtgtttttttcggtaggtttgtacgaagaaggcgtacgaggatattttgtttcgcggtttgttggggttttttttatttatgttgatagattcgcgtttatttgacggggtcgaggggggagaggggaagtcggagggtcggcgcggagttcgtagttgttagggcgggcgttggcggggtttcgtttttcgtttaaattcgttttcgttttgttcgcgttttttttttttcgagggcgtttttttaagggcggtcgttcgcgttttcgttcgcgtttcggcgtatatttttttttttttttttttttcggttcgagcggtcgcggtttagtttagtaagtggttttcggggttcgagacgtcgtcgttcgttttttatcgagttcggtgatttcgtaagcgtttttaaaacgttttttttgatagaaatgttttttagtttttacgtcgcgagttttatttaatcgttaagtatttcgtgatcgatattgaaaatttttagaatcgggttcggttaggggtagttttcgtttttttcgattgttcgtcggttttttatagatttagttttcgtcggttcgtattttaaatgtcgttcgtcgggttagatttcgagagttattgcgtcgagatcgagtagaggttttgagggaatggggaaaggtaggtttacgaattcgagggtattggagggtatttttgtttggtgcgagtttttttttagag

SEQ ID NO: 20594 - DNA, 765 bp, Artificial Sequence
  chemically treated genomic DNA (Homo sapiens) CpG-island No: 20594
ctctaaaaaaaaactcgcaccaaacaaaaataccctccaataccctcgaattcgtaaacctacctttccccattccctcaaaacctctactcgatctcgacgcaataactctcgaaatctaacccgacgaacgacatttaaaatacgaaccgacgaaaactaaatctataaaaaaccgacgaacaatcgaaaaaaacgaaaactacccctaaccgaacccgattctaaaaattttcaatatcgatcacgaaatacttaacgattaaataaaactcgcgacgtaaaaactaaaaaacatttctatcaaaaaaaacgttttaaaaacgcttacgaaatcaccgaactcgataaaaaacgaacgacgacgtctcgaaccccgaaaaccacttactaaactaaaccgcgaccgctcgaaccgaaaaaaaaaaaaaaaaaaaaatatacgccgaaacgcgaacgaaaacgcgaacgaccgcccttaaaaaaacgccctcgaaaaaaaaaaaacgcgaacaaaacgaaaacgaatttaaacgaaaaacgaaaccccgccaacgcccgccctaacaactacgaactccgcgccgaccctccgacttcccctctcccccctcgaccccgtcaaataaacgcgaatctatcaacataaataaaaaaaaccccaacaaaccgcgaaacaaaatatcctcgtacgccttcttcgtacaaacctaccgaaaaaaacacaaaaaaaaacacccgaactcttccgtcaatttcgcgaaa

SEQ ID NO: 20595 - DNA, 765 bp, Artificial Sequence
  chemically treated genomic DNA (Homo sapiens) CpG-island No: 20595
ttttgaggaaaagttcgtattaggtaagaatattttttaatattttcgggttcgtggatttgtttttttttatttttttagagtttttattcggtttcggcgtagtggttttcggggtttgattcggcgagcggtatttggggtgcgggtcggcgagggttgggtttgtggagggtcggcgggtagtcggaggaggcggaaattgtttttgatcgggttcggttttgggagtttttaatgtcggttacgaggtgtttagcggttaagtgaggttcgcgacgtgggagttgggggatatttttgttaggaaaggcgttttgagggcgtttgcggagttatcggattcggtgaagggcgggcggcggcgtttcgggtttcgggagttatttgttgggttgagtcgcggtcgttcgggtcgggaggaggaggaggaggagggtgtgcgtcggggcgcgggcgggggcgcgggcggtcgtttttgggaggacgttttcgggaggaggggggcgcgggtagggcgggagcggatttgggcgggaagcggagtttcgttagcgttcgttttggtagttgcgggtttcgcgtcgatttttcggtttttttttttttttttcggtttcgttaggtggacgcggatttgttaatatgggtaaaggagattttaataagtcgcggggtaaaatgttttcgtacgtttttttcgtgtagatttgtcgggaagagtataagaagaaatattcggattttttcgttaatttcgcggaa

SEQ ID NO: 20596 - DNA, 765 bp, Artificial Sequence
  chemically treated genomic DNA (Homo sapiens) CpG-island No: 20596
ttccgcgaaattaacgaaaaaatccgaatatttcttcttatactcttcccgacaaatctacacgaaaaaaacgtacgaaaacattttaccccgcgacttattaaaatctcctttacccatattaacaaatccgcgtccacctaacgaaaccgaaaaaaaaaaaaaaaaaccgaaaaatcgacgcgaaacccgcaactaccaaaacgaacgctaacgaaactccgcttcccgcccaaatccgctcccgccctacccgcgcccccctcctcccgaaaacgtcctcccaaaaacgaccgcccgcgcccccgcccgcgccccgacgcacaccctcctcctcctcctcctcccgacccgaacgaccgcgactcaacccaacaaataactcccgaaacccgaaacgccgccgcccgcccttcaccgaatccgataactccgcaaacgccctcaaaacgcctttcctaacaaaaatatcccccaactcccacgtcgcgaacctcacttaaccgctaaacacctcgtaaccgacattaaaaactcccaaaaccgaacccgatcaaaaacaatttccgcctcctccgactacccgccgaccctccacaaacccaaccctcgccgacccgcaccccaaataccgctcgccgaatcaaaccccgaaaaccactacgccgaaaccgaataaaaactctaaaaaaataaaaaaaaacaaatccacgaacccgaaaatattaaaaaatattcttacctaatacgaacttttcctcaaaa

SEQ ID NO: 20597 - DNA, 606 bp, Artificial Sequence
  chemically treated genomic DNA (Homo sapiens) CpG-island No: 20597
gttgtcggagcggagagaggcggagcggttaggagagaggggatttttgttagcgtcggtttcgggagttcggagatatgaacggttttacgtttgacgagatgagtcgcggcggggatgcggtcgtcgtagtggtcgtagtggtcgttgtcgcggtcgtcgtcgtttcggcggggaacgggatcggcgcgggtatcggggttgaggtgtcgggcgcgggggcggttttagcggttgggttttcgggggcggtcgggtcgggtttcgggtaattgtgttgtttgcgggaggatggtgagcggtgcggtcgggcggtaggtaacgttagttttagtaagaggatttagaagagtattttttagaagaaggtgaagatcgagttggataagagcgtaagtaaatcgcgggatcgttttgttttttcgtttttcggtggggttttaggagtcgggtaaaggtacgggttgtcggcggggttttttagataatcgtattggttgtagtgcggtttcgtggagtttgtgtttggaagtaaataataaagtcgttgtaatttttatcgttattttaatatatatattatatataggttgtcgtttttttttt

SEQ ID NO: 20598 - DNA, 606 bp, Artificial Sequence
  chemically treated genomic DNA (Homo sapiens) CpG-island No: 20598
aaaaaaaaaacgacaacctatatataatatatatattaaaataacgataaaaattacaacgactttattatttacttccaaacacaaactccacgaaaccgcactacaaccaatacgattatctaaaaaaccccgccgacaacccgtacctttacccgactcctaaaaccccaccgaaaaacgaaaaaacaaaacgatcccgcgatttacttacgctcttatccaactcgatcttcaccttcttctaaaaaatactcttctaaatcctcttactaaaactaacgttacctaccgcccgaccgcaccgctcaccatcctcccgcaaacaacacaattacccgaaacccgacccgaccgcccccgaaaacccaaccgctaaaaccgcccccgcgcccgacacctcaaccccgatacccgcgccgatcccgttccccgccgaaacgacgacgaccgcgacaacgaccactacgaccactacgacgaccgcatccccgccgcgactcatctcgtcaaacgtaaaaccgttcatatctccgaactcccgaaaccgacgctaacaaaaatcccctctctcctaaccgctccgcctctctccgctccgacaac

SEQ ID NO: 20599 - DNA, 606 bp, Artificial Sequence
  chemically treated genomic DNA (Homo sapiens) CpG-island No: 20599
aagaggggaacgatagtttgtgtgtggtgtgtgtgttggggtggcggtaggagttgtagcgattttgttatttgtttttaaatatagattttacgagatcgtattgtagttagtgcggttgtttgggggatttcgtcgataattcgtgtttttgttcggtttttggggttttatcgaggggcgggagggtagggcggtttcgcggtttatttacgtttttatttagttcgatttttatttttttttgggagatgtttttttggatttttttgttgaagttggcgttgtttgtcgttcggtcgtatcgtttattattttttcgtaggtagtatagttgttcggggttcggttcggtcgttttcgggggtttagtcgttgagatcgttttcgcgttcggtattttagtttcggtgttcgcgtcggtttcgtttttcgtcgaggcggcggcggtcgcggtagcgattattgcggttattgcggcggtcgtattttcgtcgcggtttatttcgttaggcgtgaagtcgtttatgttttcgagttttcgaggtcggcgttgatagaaatttttttttttttggtcgtttcgttttttttcgtttcggtagt

SEQ ID NO: 20600 - DNA, 606 bp, Artificial Sequence
  chemically treated genomic DNA (Homo sapiens) CpG-island No: 20600
actaccgaaacgaaaaaaaacgaaacgaccaaaaaaaaaaaaatttctatcaacgccgacctcgaaaactcgaaaacataaacgacttcacgcctaacgaaataaaccgcgacgaaaatacgaccgccgcaataaccgcaataatcgctaccgcgaccgccgccgcctcgacgaaaaacgaaaccgacgcgaacaccgaaactaaaataccgaacgcgaaaacgatctcaacgactaaacccccgaaaacgaccgaaccgaaccccgaacaactatactacctacgaaaaaataataaacgatacgaccgaacgacaaacaacgccaacttcaacaaaaaaatccaaaaaaacatctcccaaaaaaaaataaaaatcgaactaaataaaaacgtaaataaaccgcgaaaccgccctaccctcccgcccctcgataaaaccccaaaaaccgaacaaaaacacgaattatcgacgaaatcccccaaacaaccgcactaactacaatacgatctcgtaaaatctatatttaaaaacaaataacaaaatcgctacaactcctaccgccaccccaacacacacaccacacacaaactatcgttcccctctt

SEQ ID NO: 20601 - DNA, 1020 bp, Artificial Sequence
  chemically treated genomic DNA (Homo sapiens) CpG-island No: 20601
tatgagttatattcgcgatttttggaatttggaacggtttttttagtttcggcggacgtcggtttttaggtcgtgttattgggagtaggcgggcgtcgcgattggtcgcggtcggttttattcggtgggcgagttttatcggcgaggcggaaaggaagtggcggtcgtcgcggttttgtattaattatgttcggttagcgggcgaatgttattcggcgttcggagtcgggtcggagggtacggggcgggtattcgcgtttttatttcgtcgcggttcgcgtttcgggatttcgaggggacgtcggtttttattgcgtcgttcggttttcggaggtttttcgtttttatttcgttcgtttcgtagtcgaggcgggttaggtttagcgcgcgaggtcggtcgggggcgtttgcggggattcgggggcgtacggcgttaggtcgcggttcgggcggttgatttttcggtacggtgtttttttgggacgcgtcgttcgagtttttggcgcgttgggataagtgtaatgataaagttttagggttcgatcgggcgttggtcggcgggaaggaggacgcggcgttttttttgagcggcggcggcggcggtttagtttttaggaagtagggcgcgtcggttaggttcggcgttcggttcggtttcgagttcgttttttcgtttcggtcgttggtattcgacgttcgcgattcgatttcgagttcggtaggtaggcgagtttttggatcgtcgcggggcgttttagtaagttttttttggtcgtggttggaggcgtttttttcggtcggggagcggtgtttgtttatttacgttggaggtagtttggagaggcgtcgtcgcgggtatcgagaaggattcgtttttttttttcggattcggtggcggcggtggttgtatatatatatacgcgcgtatatataaatacgtatatatatataattttgttttaaatgaggttcgattttagttgatttgtatttttatatataatatttggggcgtagaag

SEQ ID NO: 20602 - DNA, 1020 bp, Artificial Sequence
  chemically treated genomic DNA (Homo sapiens) CpG-island No: 20602
cttctacgccccaaatattatatataaaaatacaaatcaactaaaatcgaacctcatttaaaacaaaattatatatatatacgtatttatatatacgcgcgtatatatatatacaaccaccgccgccaccgaatccgaaaaaaaaaaacgaatccttctcgatacccgcgacgacgcctctccaaactacctccaacgtaaataaacaaacaccgctccccgaccgaaaaaaacgcctccaaccacgaccaaaaaaaacttactaaaacgccccgcgacgatccaaaaactcgcctacctaccgaactcgaaatcgaatcgcgaacgtcgaataccaacgaccgaaacgaaaaaacgaactcgaaaccgaaccgaacgccgaacctaaccgacgcgccctacttcctaaaaactaaaccgccgccgccgccgctcaaaaaaaacgccgcgtcctccttcccgccgaccaacgcccgatcgaaccctaaaactttatcattacacttatcccaacgcgccaaaaactcgaacgacgcgtcccaaaaaaacaccgtaccgaaaaatcaaccgcccgaaccgcgacctaacgccgtacgcccccgaatccccgcaaacgcccccgaccgacctcgcgcgctaaacctaacccgcctcgactacgaaacgaacgaaataaaaacgaaaaacctccgaaaaccgaacgacgcaataaaaaccgacgtcccctcgaaatcccgaaacgcgaaccgcgacgaaataaaaacgcgaatacccgccccgtaccctccgacccgactccgaacgccgaataacattcgcccgctaaccgaacataattaatacaaaaccgcgacgaccgccacttcctttccgcctcgccgataaaactcgcccaccgaataaaaccgaccgcgaccaatcgcgacgcccgcctactcccaataacacgacctaaaaaccgacgtccgccgaaactaaaaaaaccgttccaaattccaaaaatcgcgaatataactcata

SEQ ID NO: 20603 - DNA, 1020 bp, Artificial Sequence
  chemically treated genomic DNA (Homo sapiens) CpG-island No: 20603
tttttgcgttttaggtgttgtgtgtgggggtgtaggttagttggagtcgggttttatttaaaataaaattgtgtgtatgtgcgtgtttgtgtgtgcgcgcgtgtgtgtgtgtgtagttatcgtcgttatcggattcgaaggaggggagcgggtttttttcggtgttcgcggcggcgtttttttaggttgtttttagcgtaaataagtaggtatcgtttttcggtcgggaggagcgtttttagttacggttagaggaaatttgttggggcgtttcgcggcggtttaggggttcgtttgtttgtcgggttcggggtcgggtcgcgggcgtcgggtgttagcggtcggggcgggagggcgggttcggagtcgggtcgggcgtcgggtttggtcgacgcgttttgttttttgggggttgggtcgtcgtcgtcgtcgtttagaagggacgtcgcgttttttttttcgtcggttagcgttcggtcgggttttggggttttgttattgtatttgttttagcgcgttaggggttcgggcggcgcgttttaggaaggtatcgtgtcgaggggttagtcgttcgggtcgcggtttagcgtcgtgcgttttcgggttttcgtaggcgttttcggtcggtttcgcgcgttgggtttgattcgtttcggttacggagcgggcgaggtgggggcggggagttttcggggatcgagcggcgtagtgggggtcggcgttttttcggggtttcggggcgcgggtcgcggcggggtggggacgcgagtgttcgtttcgtgtttttcgattcggtttcgggcgtcgggtgatattcgttcgttggtcgaatatggttggtgtaaagtcgcggcggtcgttatttttttttcgtttcgtcggtagggttcgtttatcgagtgaagtcggtcgcggttaatcgcggcgttcgtttgtttttagtggtacggtttgggggtcggcgttcgtcggggttggggaagtcgttttaagttttaagggtcgcgggtgtaatttatg

SEQ ID NO: 20604 - DNA, 1020 bp, Artificial Sequence
  chemically treated genomic DNA (Homo sapiens) CpG-island No: 20604
cataaattacacccgcgacccttaaaacttaaaacgacttccccaaccccgacgaacgccgacccccaaaccgtaccactaaaaacaaacgaacgccgcgattaaccgcgaccgacttcactcgataaacgaaccctaccgacgaaacgaaaaaaaaataacgaccgccgcgactttacaccaaccatattcgaccaacgaacgaatatcacccgacgcccgaaaccgaatcgaaaaacacgaaacgaacactcgcgtccccaccccgccgcgacccgcgccccgaaaccccgaaaaaacgccgacccccactacgccgctcgatccccgaaaactccccgcccccacctcgcccgctccgtaaccgaaacgaatcaaacccaacgcgcgaaaccgaccgaaaacgcctacgaaaacccgaaaacgcacgacgctaaaccgcgacccgaacgactaacccctcgacacgataccttcctaaaacgcgccgcccgaacccctaacgcgctaaaacaaatacaataacaaaaccccaaaacccgaccgaacgctaaccgacgaaaaaaaaaacgcgacgtcccttctaaacgacgacgacgacgacccaacccccaaaaaacaaaacgcgtcgaccaaacccgacgcccgacccgactccgaacccgccctcccgccccgaccgctaacacccgacgcccgcgacccgaccccgaacccgacaaacaaacgaacccctaaaccgccgcgaaacgccccaacaaatttcctctaaccgtaactaaaaacgctcctcccgaccgaaaaacgatacctacttatttacgctaaaaacaacctaaaaaaacgccgccgcgaacaccgaaaaaaacccgctcccctccttcgaatccgataacgacgataactacacacacacacacgcgcgcacacacaaacacgcacatacacacaattttattttaaataaaacccgactccaactaacctacacccccacacacaacacctaaaacgcaaaaa

SEQ ID NO: 20605 - DNA, 772 bp, Artificial Sequence
  chemically treated genomic DNA (Homo sapiens) CpG-island No: 20605
tgtcgtcgggagcggcgtacgtagtttcgtattcgtttattcggtttcgggcggcggcgcggtttatgcggttgggggcggaggttgggagcgggtggcgggcgcggcggttcgggttcgggcggtgattggtcgtttgttggtcgcgattgaggttcgggaggcgggcggggagcgtaggcggagttcgttgtcgtcgagttgaaaagatgttgttgtttttggtgttttatacgtattttatgcgttatttgttgtttagcgtcgtgtttttgggtacggcgtttatttacgtgttggtttggggggtttggcggttgtttttcgtttttttgttcgttcgtttttattaagcgttggacgatcggttttattgcgtttattagagtatggtgtttttttttttcgagaattatatcggggtttaggtgagtcgtttttcgttttcgggtttcggcgtttattcgagttttcgggggcgcggattttttcgtttttttatagttggcgagggttattcggtcggttcggcggatttagtacggagagtacgtgtcgttttttcgttttttttttcgtatgttttttgtcgttttgtcgagatcgttttttaggaagttgtggttgcgtcgttttgaggttacgagtgggattcgtcgttttttttttcgtttttcgtttgggtttgatgttgtttagtaaagtgggtgtagatgtacgttttaaataatagggtacgcgtttagtagtttttggtttttggtttaaagag

SEQ ID NO: 20606 - DNA, 772 bp, Artificial Sequence
  chemically treated genomic DNA (Homo sapiens) CpG-island No: 20606
ctctttaaaccaaaaaccaaaaactactaaacgcgtaccctattatttaaaacgtacatctacacccactttactaaacaacatcaaacccaaacgaaaaacgaaaaaaaaaacgacgaatcccactcgtaacctcaaaacgacgcaaccacaacttcctaaaaaacgatctcgacaaaacgacaaaaaacatacgaaaaaaaaaacgaaaaaacgacacgtactctccgtactaaatccgccgaaccgaccgaataaccctcgccaactataaaaaaacgaaaaaatccgcgcccccgaaaactcgaataaacgccgaaacccgaaaacgaaaaacgactcacctaaaccccgatataattctcgaaaaaaaaaaacaccatactctaataaacgcaataaaaccgatcgtccaacgcttaataaaaacgaacgaacaaaaaaacgaaaaacaaccgccaaaccccccaaaccaacacgtaaataaacgccgtacccaaaaacacgacgctaaacaacaaataacgcataaaatacgtataaaacaccaaaaacaacaacatcttttcaactcgacgacaacgaactccgcctacgctccccgcccgcctcccgaacctcaatcgcgaccaacaaacgaccaatcaccgcccgaacccgaaccgccgcgcccgccacccgctcccaacctccgcccccaaccgcataaaccgcgccgccgcccgaaaccgaataaacgaatacgaaactacgtacgccgctcccgacgaca

SEQ ID NO: 20607 - DNA, 772 bp, Artificial Sequence
  chemically treated genomic DNA (Homo sapiens) CpG-island No: 20607
ttttttggattaaaggttagaaattgttaaacgcgtgttttattatttaaaacgtgtatttgtatttattttgttaagtagtattagatttaggcgaggggcggggaaaggggcggcgggttttattcgtagttttaggacgacgtagttatagttttttagagagcgatttcggtagaacggtaggaagtatgcggagaggaaggcggggaggcggtacgtgtttttcgtgttgggttcgtcgggtcggtcgggtgattttcgttagttgtgggggagcggagaggttcgcgttttcgggagttcgggtggacgtcgagattcgggagcgggaggcggtttatttggatttcggtgtaattttcgaagaagaagagtattatgttttggtagacgtagtagagtcggtcgtttagcgtttggtagaagcgggcgggtaggaaggcggagagtagtcgttagattttttaggttaatacgtaggtgggcgtcgtgtttaggagtacgacgttgggtagtaggtagcgtatggagtacgtgtggagtattagggatagtagtatttttttagttcggcggtagcgagtttcgtttgcgtttttcgttcgtttttcgggttttagtcgcggttagtaggcggttaattatcgttcgggttcgggtcgtcgcgttcgttattcgtttttagttttcgtttttagtcgtatgggtcgcgtcgtcgttcggggtcgggtaggcgagtgcggggttgcgtgcgtcgttttcggcggta

SEQ ID NO: 20608 - DNA, 772 bp, Artificial Sequence
  chemically treated genomic DNA (Homo sapiens) CpG-island No: 20608
taccgccgaaaacgacgcacgcaaccccgcactcgcctacccgaccccgaacgacgacgcgacccatacgactaaaaacgaaaactaaaaacgaataacgaacgcgacgacccgaacccgaacgataattaaccgcctactaaccgcgactaaaacccgaaaaacgaacgaaaaacgcaaacgaaactcgctaccgccgaactaaaaaaatactactatccctaatactccacacgtactccatacgctacctactacccaacgtcgtactcctaaacacgacgcccacctacgtattaacctaaaaaatctaacgactactctccgccttcctacccgcccgcttctaccaaacgctaaacgaccgactctactacgtctaccaaaacataatactcttcttcttcgaaaattacaccgaaatccaaataaaccgcctcccgctcccgaatctcgacgtccacccgaactcccgaaaacgcgaacctctccgctcccccacaactaacgaaaatcacccgaccgacccgacgaacccaacacgaaaaacacgtaccgcctccccgccttcctctccgcatacttcctaccgttctaccgaaatcgctctctaaaaaactataactacgtcgtcctaaaactacgaataaaacccgccgcccctttccccgcccctcgcctaaatctaatactacttaacaaaataaatacaaatacacgttttaaataataaaacacgcgtttaacaatttctaacctttaatccaaaaaa

SEQ ID NO: 20609 - DNA, 1339 bp, Artificial Sequence
  chemically treated genomic DNA (Homo sapiens) CpG-island No: 20609
ttgttattcgattttcgttagggtttggtcggacggaaacgtttcgtcggttttattgtcgtttcgttatgtggcggagtcgagtagtttagcgtgttttttatttttagcgtttgcgaagtcggcggcggcgtcgggatttttcggcgcgcggaggaaggatatttgtgtggaggatcggtgtgtgcgcgcgcggttttaaagagggggtagcggagggttttttcgtatttcgttgtttaatttcgaaggtttcgttcgttgtaggttcgttttttattttttcgtcgttcgttttttttttcgcgcgggacgttgttcggagcgcggcggggcgggggtggaggacgagagagcggtcggaggcgtcggttcggtagcggtagcggtagcggacgcgtgtagtagattcgggagcgagcgcgagtcgggttgtcgggcgagagggcgaggtcgagtttcgcgagatcggaacgtcgggggcgggggcgagatagagggggagtcgcggggagcgcgcgggacgcggttcgaggtcgtgcgcgagtcggggtatcgggcggcggcggcggcggcgcgcgttatgtcgtttagtgaaatgaatcgtaggacgttggcgtttcgaggaggcgggttggttatcgttagcggcggcggttttacgaataataacgttggcggggaggttttagtttggttttcgtagttttagtcgagatagttttcgtcgatagcgtcgttcgcgttttagtcgtttaatgggcggggggtcgacgaggaagtggaattggagggtttggagttttaagatttggaggttttcgtcgggtcggtcgtcggcgtcgtcgaggaagttaaggagttgttgtttttttaagacgcgggcggttttatttcgtttggcggtggcgcggggggttttttgttagcggaaaggaatcgtcggattttggtttttcgaggcggcggcggcgggggtttcggtaataatggtagtagtcgcggtcgtttcgagatttcggtgtggtttttgaggtattttaatgggcgagggtcggcgattgtggatttggagttggacgcgttggaggggaaggagttgatataggacggcgcgtttttgagcgatagtatcgaggacgaggaggagggggcgagtttgggcgacggtagcggggcggaaggcggtagttgtagtagtagtaggcggtcgggcggcgatggcggggacgaagtggagggtagcggtgtgggagttggcgaaggagagattgtttagtatttttcgttcgcgcggtttaagtttttaatgtagaagttttaatgttttttttagatt

SEQ ID NO: 20610 - DNA, 1339 bp, Artificial Sequence
  chemically treated genomic DNA (Homo sapiens) CpG-island No: 20610
aatctaaaaaaaacattaaaacttctacattaaaaacttaaaccgcgcgaacgaaaaatactaaacaatctctccttcgccaactcccacaccgctaccctccacttcgtccccgccatcgccgcccgaccgcctactactactacaactaccgccttccgccccgctaccgtcgcccaaactcgccccctcctcctcgtcctcgatactatcgctcaaaaacgcgccgtcctatatcaactccttcccctccaacgcgtccaactccaaatccacaatcgccgaccctcgcccattaaaatacctcaaaaaccacaccgaaatctcgaaacgaccgcgactactaccattattaccgaaacccccgccgccgccgcctcgaaaaaccaaaatccgacgattcctttccgctaacaaaaaaccccccgcgccaccgccaaacgaaataaaaccgcccgcgtcttaaaaaaacaacaactccttaacttcctcgacgacgccgacgaccgacccgacgaaaacctccaaatcttaaaactccaaaccctccaattccacttcctcgtcgaccccccgcccattaaacgactaaaacgcgaacgacgctatcgacgaaaactatctcgactaaaactacgaaaaccaaactaaaacctccccgccaacgttattattcgtaaaaccgccgccgctaacgataaccaacccgcctcctcgaaacgccaacgtcctacgattcatttcactaaacgacataacgcgcgccgccgccgccgccgcccgataccccgactcgcgcacgacctcgaaccgcgtcccgcgcgctccccgcgactccccctctatctcgcccccgcccccgacgttccgatctcgcgaaactcgacctcgccctctcgcccgacaacccgactcgcgctcgctcccgaatctactacacgcgtccgctaccgctaccgctaccgaaccgacgcctccgaccgctctctcgtcctccacccccgccccgccgcgctccgaacaacgtcccgcgcgaaaaaaaaaacgaacgacgaaaaaataaaaaacgaacctacaacgaacgaaaccttcgaaattaaacaacgaaatacgaaaaaaccctccgctaccccctctttaaaaccgcgcgcgcacacaccgatcctccacacaaatatccttcctccgcgcgccgaaaaatcccgacgccgccgccgacttcgcaaacgctaaaaataaaaaacacgctaaactactcgactccgccacataacgaaacgacaataaaaccgacgaaacgtttccgtccgaccaaaccctaacgaaaatcgaataacaa

SEQ ID NO: 20611 - DNA, 1339 bp, Artificial Sequence
  chemically treated genomic DNA (Homo sapiens) CpG-island No: 20611
ggtttggaaggagtattggagtttttgtattagagatttgggtcgcgcgagcgggaagtgttggatagtttttttttcgttagtttttatatcgttgttttttatttcgttttcgttatcgtcgttcgatcgtttgttgttgttgtagttgtcgtttttcgtttcgttgtcgtcgtttaggttcgttttttttttttcgttttcggtgttgtcgtttagggacgcgtcgttttgtattaatttttttttttttagcgcgtttagttttagatttatagtcgtcggttttcgtttattgaaatgttttaagggttatatcgaggtttcggggcggtcgcggttattgttattgttgtcgagattttcgtcgtcgtcgtttcggaaggttagagttcgacggttttttttcgttagtagggggtttttcgcgttatcgttaagcgaggtggggtcgttcgcgttttgggggagtagtaattttttggttttttcggcggcgtcggcggtcggttcggcggaggtttttaggttttggggttttaggttttttaattttattttttcgtcggtttttcgtttattaggcggttgaagcgcgggcggcgttgtcggcgggggttgtttcggttggggttgcggaggttaagttgaggttttttcgttagcgttattgttcgtggagtcgtcgtcgttagcggtgattaattcgttttttcggaacgttagcgttttgcggtttattttattgaacgatatggcgcgcgtcgtcgtcgtcgtcgttcggtgtttcggttcgcgtacggtttcgggtcgcgtttcgcgcgtttttcgcggttttttttttgtttcgttttcgttttcggcgtttcggtttcgcggggttcggtttcgttttttcgttcggtagttcggttcgcgttcgttttcgggtttgttgtacgcgttcgttgtcgttgtcgttgtcgggtcgacgttttcgatcgttttttcgttttttattttcgtttcgtcgcgtttcgggtagcgtttcgcgcggagaagggggcgggcggcggagaggtgaggagcgagtttgtagcgagcgaggttttcgaagttgagtagcggagtgcggggagatttttcgttgttttttttttaaagtcgcgcgcgtatatatcgattttttatatagatatttttttttcgcgcgtcgaggagtttcgacgtcgtcgtcggtttcgtaggcgttgagggtgagaggtacgttaaattgttcggtttcgttatataacgaagcgataataaagtcggcggagcgttttcgttcgattaggttttggcggaggtcgaatggtaa

SEQ ID NO: 20612 - DNA, 1339 bp, Artificial Sequence
  chemically treated genomic DNA (Homo sapiens) CpG-island No: 20612
ttaccattcgacctccgccaaaacctaatcgaacgaaaacgctccgccgactttattatcgcttcgttatataacgaaaccgaacaatttaacgtacctctcaccctcaacgcctacgaaaccgacgacgacgtcgaaactcctcgacgcgcgaaaaaaaaatatctatataaaaaatcgatatatacgcgcgcgactttaaaaaaaaaacaacgaaaaatctccccgcactccgctactcaacttcgaaaacctcgctcgctacaaactcgctcctcacctctccgccgcccgcccccttctccgcgcgaaacgctacccgaaacgcgacgaaacgaaaataaaaaacgaaaaaacgatcgaaaacgtcgacccgacaacgacaacgacaacgaacgcgtacaacaaacccgaaaacgaacgcgaaccgaactaccgaacgaaaaaacgaaaccgaaccccgcgaaaccgaaacgccgaaaacgaaaacgaaacaaaaaaaaaaccgcgaaaaacgcgcgaaacgcgacccgaaaccgtacgcgaaccgaaacaccgaacgacgacgacgacgacgcgcgccatatcgttcaataaaataaaccgcaaaacgctaacgttccgaaaaaacgaattaatcaccgctaacgacgacgactccacgaacaataacgctaacgaaaaaacctcaacttaacctccgcaaccccaaccgaaacaacccccgccgacaacgccgcccgcgcttcaaccgcctaataaacgaaaaaccgacgaaaaaataaaattaaaaaacctaaaaccccaaaacctaaaaacctccgccgaaccgaccgccgacgccgccgaaaaaaccaaaaaattactactcccccaaaacgcgaacgaccccacctcgcttaacgataacgcgaaaaaccccctactaacgaaaaaaaaccgtcgaactctaaccttccgaaacgacgacgacgaaaatctcgacaacaataacaataaccgcgaccgccccgaaacctcgatataacccttaaaacatttcaataaacgaaaaccgacgactataaatctaaaactaaacgcgctaaaaaaaaaaaaattaatacaaaacgacgcgtccctaaacgacaacaccgaaaacgaaaaaaaaaaaacgaacctaaacgacgacaacgaaacgaaaaacgacaactacaacaacaacaaacgatcgaacgacgataacgaaaacgaaataaaaaacaacgatataaaaactaacgaaaaaaaaactatccaacacttcccgctcgcgcgacccaaatctctaatacaaaaactccaatactccttccaaacc

SEQ ID NO: 20613 - DNA, 1012 bp, Artificial Sequence
  chemically treated genomic DNA (Homo sapiens) CpG-island No: 20613
cgatacgtagatatataagttcgttcgtcgttttatttttattttcgcgtcgcgttcgcgggttttgcgttttatagcggcgcgggggaggcgggggttagcgacgcggtcgcggggagttgatgtttttttcgacgttcggatttcgatacgtagataagattaataaagtatcgtcgttttcgagataaaatatgttataggtttcgattagggattttacgacgcgtggttgttcggggcgtagggttgcgcggacgggttgggggaagggggtggggaagggtttcgcggggtggtttttcggttcgggagtttcgttttcgtcgggatgcggtgttgtagggatttttacgttgattttggagttttcgttgtatagagttatcggggttagggtcggagtcgcggcggtgacggcgatagtacgagacggggcgggagggtgtcggaagggtcggcgtcgcgggttgaggttgagaaggaggtttggtcgaggagtagtcggtagcggagaggagttagtcgttagaaaagcgtcgaatggagtaatagtagcggagcgcgggttttagcgtcgcgggagagaagattagtagcgcgtacgttgttttcgttttttgttttcgtttcggtcggttattgggaggagttagagttcgttcggtttggtagtcgagttttagatatttttcgtagtcgtcgttaaatcggtcggttttcgagaggaggggttcgcggcgttcggtttcgtttttagttcggttttcgtcggtaaagtcggtcgggtttttcgcggttcgtttttgggaggaggagttcgcggtatttatcggtttcgttttttttgttttcgtatcgaggagttcgtttcgggaggaggggtttgtggcgtcggttaggagaaaaatcgaagtcgaattcgagttagtttgttgttgtcggatttgtttgttattttggatgatttcgggaggttggcggtatcgaagaggttttttgagagttgggt

SEQ ID NO: 20614 - DNA, 1012 bp, Artificial Sequence
  chemically treated genomic DNA (Homo sapiens) CpG-island No: 20614
acccaactctcaaaaaacctcttcgataccgccaacctcccgaaatcatccaaaataacaaacaaatccgacaacaacaaactaactcgaattcgacttcgatttttctcctaaccgacgccacaaacccctcctcccgaaacgaactcctcgatacgaaaacaaaaaaaacgaaaccgataaataccgcgaactcctcctcccaaaaacgaaccgcgaaaaacccgaccgactttaccgacgaaaaccgaactaaaaacgaaaccgaacgccgcgaacccctcctctcgaaaaccgaccgatttaacgacgactacgaaaaatatctaaaactcgactaccaaaccgaacgaactctaactcctcccaataaccgaccgaaacgaaaacaaaaaacgaaaacaacgtacgcgctactaatcttctctcccgcgacgctaaaacccgcgctccgctactattactccattcgacgcttttctaacgactaactcctctccgctaccgactactcctcgaccaaacctccttctcaacctcaacccgcgacgccgacccttccgacaccctcccgccccgtctcgtactatcgccgtcaccgccgcgactccgaccctaaccccgataactctatacaacgaaaactccaaaatcaacgtaaaaatccctacaacaccgcatcccgacgaaaacgaaactcccgaaccgaaaaaccaccccgcgaaacccttccccacccccttcccccaacccgtccgcgcaaccctacgccccgaacaaccacgcgtcgtaaaatccctaatcgaaacctataacatattttatctcgaaaacgacgatactttattaatcttatctacgtatcgaaatccgaacgtcgaaaaaaacatcaactccccgcgaccgcgtcgctaacccccgcctcccccgcgccgctataaaacgcaaaacccgcgaacgcgacgcgaaaataaaaataaaacgacgaacgaacttatatatctacgtatcg

SEQ ID NO: 20615 - DNA, 1012 bp, Artificial Sequence
  chemically treated genomic DNA (Homo sapiens) CpG-island No: 20615
gtttagtttttaggaggttttttcggtgtcgttagtttttcgaagttatttaaggtagtaggtaaattcggtagtagtaaattagttcggattcggtttcggttttttttttggtcggcgttataggttttttttttcggggcgggtttttcggtgcgagggtaggaggggcggagtcggtggatgtcgcgggtttttttttttaagggcgggtcgcgggagattcggtcggttttgtcggcggggatcgggttgggggcggggtcgggcgtcgcgagttttttttttcgagggtcggtcggtttggcggcggttgcggagggtatttgaggttcggttgttaagtcgaacgggttttggttttttttagtggtcggtcggggcggaagtaggaggcgggggtagcgtgcgcgttgttggttttttttttcgcggcgttggggttcgcgtttcgttgttgttgttttattcggcgtttttttggcggttggttttttttcgttgtcggttgtttttcgattaggttttttttttaattttagttcgcggcgtcgattttttcggtattttttcgtttcgtttcgtattgtcgtcgttatcgtcgcggtttcggttttggtttcgatggttttgtgtaacggagattttaaggttagcgtgggggtttttgtagtatcgtatttcggcggaggcgaggttttcggatcggggagttatttcgcgaggtttttttttattttttttttttagttcgttcgcgtagttttgcgtttcgggtagttacgcgtcgtagagtttttggtcggggtttgtggtatgttttatttcgggagcggcgatgttttgttgattttgtttgcgtgtcgaggttcgggcgtcggggagggtattagtttttcgcggtcgcgtcgttggttttcgtttttttcgcgtcgttgtggggcgtagagttcgcgagcgcggcgcgagggtgggggtagggcggcgagcgggtttgtgtgtttgcgtgtcg

SEQ ID NO: 20616 - DNA, 1012 bp, Artificial Sequence
  chemically treated genomic DNA (Homo sapiens) CpG-island No: 20616
cgacacgcaaacacacaaacccgctcgccgccctacccccaccctcgcgccgcgctcgcgaactctacgccccacaacgacgcgaaaaaaacgaaaaccaacgacgcgaccgcgaaaaactaataccctccccgacgcccgaacctcgacacgcaaacaaaatcaacaaaacatcgccgctcccgaaataaaacataccacaaaccccgaccaaaaactctacgacgcgtaactacccgaaacgcaaaactacgcgaacgaactaaaaaaaaaaaataaaaaaaaacctcgcgaaataactccccgatccgaaaacctcgcctccgccgaaatacgatactacaaaaacccccacgctaaccttaaaatctccgttacacaaaaccatcgaaaccaaaaccgaaaccgcgacgataacgacgacaatacgaaacgaaacgaaaaaataccgaaaaaatcgacgccgcgaactaaaattaaaaaaaaaacctaatcgaaaaacaaccgacaacgaaaaaaaaccaaccgccaaaaaaacgccgaataaaacaacaacaacgaaacgcgaaccccaacgccgcgaaaaaaaaaaccaacaacgcgcacgctacccccgcctcctacttccgccccgaccgaccactaaaaaaaaccaaaacccgttcgacttaacaaccgaacctcaaataccctccgcaaccgccgccaaaccgaccgaccctcgaaaaaaaaaactcgcgacgcccgaccccgcccccaacccgatccccgccgacaaaaccgaccgaatctcccgcgacccgcccttaaaaaaaaaaacccgcgacatccaccgactccgcccctcctaccctcgcaccgaaaaacccgccccgaaaaaaaaaacctataacgccgaccaaaaaaaaaaccgaaaccgaatccgaactaatttactactaccgaatttacctactaccttaaataacttcgaaaaactaacgacaccgaaaaaacctcctaaaaactaaac

SEQ ID NO: 20617 - DNA, 502 bp, Artificial Sequence
  chemically treated genomic DNA (Homo sapiens) CpG-island No: 20617
cgtataggcgaggagacgatcgatgggggcggatagtcggacgtacggttgcgttatttatttttagcgattagggttttacgtttttaagcgcggagttgggggaggggtcggttagttgtaaggtcgcggggtcgggaagggtcgggaggaggcgtcggggcggtcggggtttttagggagcggttgagtgggggagtcgcgcgtagtatttgggtttggggcgggcgttcggggagcgcggggtgtcgttaagggggtcgtacgattcgttcgcggtgagcgtaaggttcgcgtgttttagtttttttcggtggggattttttttatttggaaaatatacgggttatggagggggtggtggttaatcgtcgtacggggaaatcggtagataggttttgatcgagttttttattttagttataggtggtaggtgtcgggcgttacgattttattgtgtagggcgtacgtttttttttcgtttttttatattttagcggtt

SEQ ID NO: 20618 - DNA, 502 bp, Artificial Sequence
  chemically treated genomic DNA (Homo sapiens) CpG-island No: 20618
aaccgctaaaatataaaaaaacgaaaaaaaaacgtacgccctacacaataaaatcgtaacgcccgacacctaccacctataactaaaataaaaaactcgatcaaaacctatctaccgatttccccgtacgacgattaaccaccaccccctccataacccgtatattttccaaataaaaaaaatccccaccgaaaaaaactaaaacacgcgaaccttacgctcaccgcgaacgaatcgtacgacccccttaacgacaccccgcgctccccgaacgcccgccccaaacccaaatactacgcgcgactcccccactcaaccgctccctaaaaaccccgaccgccccgacgcctcctcccgacccttcccgaccccgcgaccttacaactaaccgacccctcccccaactccgcgcttaaaaacgtaaaaccctaatcgctaaaaataaataacgcaaccgtacgtccgactatccgcccccatcgatcgtctcctcgcctatacg

SEQ ID NO: 20619 - DNA, 502 bp, Artificial Sequence
  chemically treated genomic DNA (Homo sapiens) CpG-island No: 20619
ggtcgttggggtgtgggagggcggggagagagcgtgcgttttgtatagtgaggtcgtggcgttcggtatttgttatttgtgattgggatgaagggttcgattagaatttgtttgtcggttttttcgtgcgacgattaattattattttttttataattcgtgtgttttttaggtgaggaaaatttttatcgaggagagttggggtacgcgggttttgcgtttatcgcgggcgggtcgtgcggtttttttggcgatatttcgcgtttttcgggcgttcgttttaggtttagatgttgcgcgcggtttttttatttagtcgttttttgggagtttcggtcgtttcggcgttttttttcggtttttttcggtttcgcggttttgtagttggtcgattttttttttagtttcgcgtttagggacgtggggttttggtcgttgagggtgagtgacgtagtcgtgcgttcggttgttcgtttttatcggtcgttttttcgtttgtgcg

SEQ ID NO: 20620 - DNA, 502 bp, Artificial Sequence
  chemically treated genomic DNA (Homo sapiens) CpG-island No: 20620
cgcacaaacgaaaaaacgaccgataaaaacgaacaaccgaacgcacgactacgtcactcaccctcaacgaccaaaaccccacgtccctaaacgcgaaactaaaaaaaaaatcgaccaactacaaaaccgcgaaaccgaaaaaaaccgaaaaaaaacgccgaaacgaccgaaactcccaaaaaacgactaaataaaaaaaccgcgcgcaacatctaaacctaaaacgaacgcccgaaaaacgcgaaatatcgccaaaaaaaccgcacgacccgcccgcgataaacgcaaaacccgcgtaccccaactctcctcgataaaaattttcctcacctaaaaaacacacgaattataaaaaaaataataattaatcgtcgcacgaaaaaaccgacaaacaaattctaatcgaacccttcatcccaatcacaaataacaaataccgaacgccacgacctcactatacaaaacgcacgctctctccccgccctcccacaccccaacgacc

SEQ ID NO: 20621 - DNA, 595 bp, Artificial Sequence
  chemically treated genomic DNA (Homo sapiens) CpG-island No: 20621
tttttttcgatcgtatttttattaatcgtattttttttcgattatatttttattaattgaatttttttcgattatatttttattaattgtatttttttcgatcgtatttttattaatcgtattttttttcgatcgtatttttattaattgtattttttttcgattatatttttattaattgtatttttttcgattatatttttattaattgtattttttttcgattatatttttattaattgtatttttttcgattatatttttattaattgtatttttttcgattatatttttattaattgtatttttttttgatcgtatttttattaattgtatttttttcgattatatttttattaattgtattttttttcgattatatttttattaattgaattttttttcgattatatttttattaattgtatttttttcgattatatttttattaattgtatttttttttgatcgtatttttattaattgtatttttttcgattatatttttattaattgtattttttttcgatcgtatttttattaattgtatttttttttgattatatttttattaattgtatttttttttgattat

SEQ ID NO: 20622 - DNA, 595 bp, Artificial Sequence
  chemically treated genomic DNA (Homo sapiens) CpG-island No: 20622
ataatcaaaaaaaaatacaattaataaaaatataatcaaaaaaaaatacaattaataaaaatacgatcgaaaaaaaatacaattaataaaaatataatcgaaaaaaatacaattaataaaaatacgatcaaaaaaaaatacaattaataaaaatataatcgaaaaaaatacaattaataaaaatataatcgaaaaaaaattcaattaataaaaatataatcgaaaaaaaatacaattaataaaaatataatcgaaaaaaatacaattaataaaaatacgatcaaaaaaaaatacaattaataaaaatataatcgaaaaaaatacaattaataaaaatataatcgaaaaaaatacaattaataaaaatataatcgaaaaaaaatacaattaataaaaatataatcgaaaaaaatacaattaataaaaatataatcgaaaaaaaatacaattaataaaaatacgatcgaaaaaaaatacgattaataaaaatacgatcgaaaaaaatacaattaataaaaatataatcgaaaaaaattcaattaataaaaatataatcgaaaaaaaatacgattaataaaaatacgatcgaaaaaaa

SEQ ID NO: 20623 - DNA, 595 bp, Artificial Sequence
  chemically treated genomic DNA (Homo sapiens) CpG-island No: 20623
gtggttaggaggggatgtagttagtagggatgtgattaggaggggatgtagttagtagggatgcggtcgggaggggatgtagttagtagggatgtggtcgggagggatgtagttagtagggatgcggttaggaggggatgtagttagtagggatgtggtcgggagggatgtagttagtagggatgtggtcgggaggggatttagttagtagggatgtggtcgggaggggatgtagttagtagggatgtggtcgggagggatgtagttagtagggatgcggttaggaggggatgtagttagtaaggatgtggtcgggagggatgtagttagtagggatgtggtcgggagggatgtagttagtagggatgtggtcgggaggggatgtagttagtagggatgtggtcgggagggatgtagttagtagggatgtggtcgggaggggatgtagttagtaggggtgcggtcgggaggggatgcggttagtagggatgcggtcgggagggatgtagttagtagggatgtggtcgggagggatttagttagtagggatgtggtcgggaggggatgcggttagtagggatgcggtcgggagggg

SEQ ID NO: 20624 - DNA, 595 bp, Artificial Sequence
  chemically treated genomic DNA (Homo sapiens) CpG-island No: 20624
cccctcccgaccgcatccctactaaccgcatcccctcccgaccacatccctactaactaaatccctcccgaccacatccctactaactacatccctcccgaccgcatccctactaaccgcatcccctcccgaccgcacccctactaactacatcccctcccgaccacatccctactaactacatccctcccgaccacatccctactaactacatcccctcccgaccacatccctactaactacatccctcccgaccacatccctactaactacatccctcccgaccacatccttactaactacatcccctcctaaccgcatccctactaactacatccctcccgaccacatccctactaactacatcccctcccgaccacatccctactaactaaatcccctcccgaccacatccctactaactacatccctcccgaccacatccctactaactacatcccctcctaaccgcatccctactaactacatccctcccgaccacatccctactaactacatcccctcccgaccgcatccctactaactacatcccctcctaatcacatccctactaactacatcccctcctaaccac

SEQ ID NO: 20625 - DNA, 748 bp, Artificial Sequence
  chemically treated genomic DNA (Homo sapiens) CpG-island No: 20625
tcgagcgttcggttagatatacgtggaattttttgtattagagtttaatttgggaatttaagtttcggtagcgcgttgttttttacgaacggggttgacgattttcgtagttatttattcgttatggttgcgtttttatgggcggtttttagtagcgttagtatttgtagcgtttttaggagtagcgcggtttaagtatttcgcgcgtcgagttttattgtttcgagggtaggatgcggtagtttcgtgggtttttagtcgaggtggcggcggcgagagcggtttttttgcgtagtcggcgtcggtttcgtttttttttcggtcgcgtacgttttttttttcgtcgtttgtttttcgaatgattaaatagggcgtaggagcggggtttggagggggcgtcgcgtgcgtagtcggggcggcggggtcgggttgggtggcgcgggggcgggttcggggttttgggcgtggcgattcggttcgcggtttttttcgtaggcgcgcgtttgggaattttagaaatcgcgagtcgtttttttttttttcggaaatggtagttttgttgttttggatgaaggcgagcgtcgttgtttttttgaatgttgagtacgttggtttcgcggtgttcggaaggaagtttttgaagagtagttttgcgggtagggaggggataggggtgcgtgcgatttagagtgagagggaggagttgtagggtaaaggcgggaggagggggagattttggagaggaatt

SEQ ID NO: 20626 - DNA, 748 bp, Artificial Sequence
  chemically treated genomic DNA (Homo sapiens) CpG-island No: 20626
aattcctctccaaaatctccccctcctcccgcctttaccctacaactcctccctctcactctaaatcgcacgcacccctatcccctccctacccgcaaaactactcttcaaaaacttccttccgaacaccgcgaaaccaacgtactcaacattcaaaaaaacaacgacgctcgccttcatccaaaacaacaaaactaccatttccgaaaaaaaaaaaaacgactcgcgatttctaaaattcccaaacgcgcgcctacgaaaaaaaccgcgaaccgaatcgccacgcccaaaaccccgaacccgcccccgcgccacccaacccgaccccgccgccccgactacgcacgcgacgccccctccaaaccccgctcctacgccctatttaatcattcgaaaaacaaacgacgaaaaaaaaaacgtacgcgaccgaaaaaaaaacgaaaccgacgccgactacgcaaaaaaaccgctctcgccgccgccacctcgactaaaaacccacgaaactaccgcatcctaccctcgaaacaataaaactcgacgcgcgaaatacttaaaccgcgctactcctaaaaacgctacaaatactaacgctactaaaaaccgcccataaaaacgcaaccataacgaataaataactacgaaaatcgtcaaccccgttcgtaaaaaacaacgcgctaccgaaacttaaattcccaaattaaactctaatacaaaaaattccacgtatatctaaccgaacgctcga

SEQ ID NO: 20627 - DNA, 748 bp, Artificial Sequence
  chemically treated genomic DNA (Homo sapiens) CpG-island No: 20627
agtttttttttagaattttttttttttttcgtttttgttttgtaattttttttttttattttgagtcgtacgtatttttgttttttttttgttcgtaaaattattttttaaaggttttttttcgggtatcgcgaagttagcgtgtttagtatttagggaggtagcggcgttcgtttttatttaggataataaaattgttattttcgaagagaaaggaaacggttcgcggtttttggggtttttaagcgcgcgtttgcgagggaggtcgcgagtcgagtcgttacgtttagaatttcgagttcgttttcgcgttatttagttcggtttcgtcgtttcggttgcgtacgcgacgttttttttaggtttcgtttttgcgttttatttggttattcggggggtaagcggcgggaggggaaacgtgcgcggtcgaaggggaagcggagtcggcgtcggttgcgtagaggagtcgttttcgtcgtcgttatttcggttgggagtttacgaggttgtcgtattttgttttcggaataatgggattcggcgcgcgaggtgtttgggtcgcgttgtttttggggacgttgtaggtgttagcgttgttgggggtcgtttatgaaagcgtagttatggcgggtaagtggttgcgggggtcgttagtttcgttcgtgggaggtagcgcgttgtcgaggtttgggtttttaagttgggttttggtatagaaagttttacgtgtgtttggtcgaacgttcgg

SEQ ID NO: 20628 - DNA, 748 bp, Artificial Sequence
  chemically treated genomic DNA (Homo sapiens) CpG-island No: 20628
ccgaacgttcgaccaaacacacgtaaaactttctataccaaaacccaacttaaaaacccaaacctcgacaacgcgctacctcccacgaacgaaactaacgacccccgcaaccacttacccgccataactacgctttcataaacgacccccaacaacgctaacacctacaacgtccccaaaaacaacgcgacccaaacacctcgcgcgccgaatcccattattccgaaaacaaaatacgacaacctcgtaaactcccaaccgaaataacgacgacgaaaacgactcctctacgcaaccgacgccgactccgcttccccttcgaccgcgcacgtttcccctcccgccgcttaccccccgaataaccaaataaaacgcaaaaacgaaacctaaaaaaaacgtcgcgtacgcaaccgaaacgacgaaaccgaactaaataacgcgaaaacgaactcgaaattctaaacgtaacgactcgactcgcgacctccctcgcaaacgcgcgcttaaaaaccccaaaaaccgcgaaccgtttcctttctcttcgaaaataacaattttattatcctaaataaaaacgaacgccgctacctccctaaatactaaacacgctaacttcgcgatacccgaaaaaaaacctttaaaaaataattttacgaacaaaaaaaaaacaaaaatacgtacgactcaaaataaaaaaaaaaaattacaaaacaaaaacgaaaaaaaaaaaaaattctaaaaaaaaact

SEQ ID NO: 20629 - DNA, 560 bp, Artificial Sequence
  chemically treated genomic DNA (Homo sapiens) CpG-island No: 20629
tttatagggtttcgcgagcgtcggacggacggattataattttcgataggtagcgcggttggcggggcggttcgtcgcggtgtttataggattttagggcgagtgcgggttgtttcgcgcggcgttcgtaggatttcggcggttatttatgtcgaggtgagttcgcgggagtcgtcgtcgtcgtcgtttcgttttagttgtcgtttcgcgcggtttcgtcgtcggttaggatgttggaggaagcgggcgaggtgttggagaatatgttgaaggcgttttgtttgtcgttcggttttatcgtttttttgttcgttgtgttgttgttggtggcgtcgtcgttgtttgtcgtcgacgtcgcgtacgagtttatcgtgtatcgtatgtagtagtacgatttgtagggttagttttacggtgcgtgttttcggtttattttcggggtttttcgggtttttcggttacgttatttcggttcggcgatttttaggtcgatttttagtttcggtttgggttgttcgatttatgtttaggttttaggcgaggtagagttttgtcgtttt

SEQ ID NO: 20630 - DNA, 560 bp, Artificial Sequence
  chemically treated genomic DNA (Homo sapiens) CpG-island No: 20630
aaaacgacaaaactctacctcgcctaaaacctaaacataaatcgaacaacccaaaccgaaactaaaaatcgacctaaaaatcgccgaaccgaaataacgtaaccgaaaaacccgaaaaaccccgaaaataaaccgaaaacacgcaccgtaaaactaaccctacaaatcgtactactacatacgatacacgataaactcgtacgcgacgtcgacgacaaacaacgacgacgccaccaacaacaacacaacgaacaaaaaaacgataaaaccgaacgacaaacaaaacgccttcaacatattctccaacacctcgcccgcttcctccaacatcctaaccgacgacgaaaccgcgcgaaacgacaactaaaacgaaacgacgacgacgacgactcccgcgaactcacctcgacataaataaccgccgaaatcctacgaacgccgcgcgaaacaacccgcactcgccctaaaatcctataaacaccgcgacgaaccgccccgccaaccgcgctacctatcgaaaattataatccgtccgtccgacgctcgcgaaaccctataaa

SEQ ID NO: 20631 - DNA, 560 bp, Artificial Sequence
  chemically treated genomic DNA (Homo sapiens) CpG-island No: 20631
agggcggtagggttttgtttcgtttggggtttgagtatgggtcgggtagtttaggtcggagttagggatcggtttggggatcgtcgggtcggagtggcgtggtcggggagttcggggagtttcgagggtgggtcggggatacgtatcgtagggttggttttgtaggtcgtattgttgtatgcggtatacggtgaattcgtgcgcggcgtcggcggtaggtagcggcggcgttattagtagtagtatagcgggtaggaagacgatgaagtcgagcggtagataagacgtttttagtatgttttttagtatttcgttcgttttttttagtattttggtcggcggcggggtcgcgcggggcggtagttgggacgggacggcggcggcggcggttttcgcggatttatttcggtatgggtagtcgtcggggttttgcgggcgtcgcgcggggtagttcgtattcgttttgaggttttgtgggtatcgcggcgaatcgtttcgttagtcgcgttgtttgtcgggaattgtagttcgttcgttcggcgttcgcggagttttgtggg

SEQ ID NO: 20632 - DNA, 560 bp, Artificial Sequence
  chemically treated genomic DNA (Homo sapiens) CpG-island No: 20632
cccacaaaactccgcgaacgccgaacgaacgaactacaattcccgacaaacaacgcgactaacgaaacgattcgccgcgatacccacaaaacctcaaaacgaatacgaactaccccgcgcgacgcccgcaaaaccccgacgactacccataccgaaataaatccgcgaaaaccgccgccgccgccgtcccgtcccaactaccgccccgcgcgaccccgccgccgaccaaaatactaaaaaaaacgaacgaaatactaaaaaacatactaaaaacgtcttatctaccgctcgacttcatcgtcttcctacccgctatactactactaataacgccgccgctacctaccgccgacgccgcgcacgaattcaccgtataccgcatacaacaatacgacctacaaaaccaaccctacgatacgtatccccgacccaccctcgaaactccccgaactccccgaccacgccactccgacccgacgatccccaaaccgatccctaactccgacctaaactacccgacccatactcaaaccccaaacgaaacaaaaccctaccgccct

SEQ ID NO: 20633 - DNA, 532 bp, Artificial Sequence
  chemically treated genomic DNA (Homo sapiens) CpG-island No: 20633
tgacgttagcggattgacgtattattaatgtggtgacgtcgttttcgttgttagggcgatagttgacgtacggttgggtttttgacggcgttaatgtcggggttggttattggggggtcgagagttttcgggttcgggtcgttttagtttttattttttttttcgcgggggttttttcggttcggggatttcgtagaaaaaattgggagtttttagagttggtcgcgtgcggcgcgtggttcgagtcgggggtcggaggaagcgtttttttcgagttgttgggtttttaagttttaaattcgaaatagtttcgatgtgcgggggtcgggcgtagagagacggcggtttgggtatagatgggggacgtataggtagaggcgcgtggagatagatagggacgtgtggaaatagaaatagatagatagggatatagacgtcgttttcgaagacgggtgcgttttgtagttatcgatttttgtttgaaatgtttgggggagggagaggttggtttattttattttggtatttaggt

SEQ ID NO: 20634 - DNA, 532 bp, Artificial Sequence
  chemically treated genomic DNA (Homo sapiens) CpG-island No: 20634
acctaaataccaaaataaaataaaccaacctctccctcccccaaacatttcaaacaaaaatcgataactacaaaacgcacccgtcttcgaaaacgacgtctatatccctatctatctatttctatttccacacgtccctatctatctccacgcgcctctacctatacgtcccccatctatacccaaaccgccgtctctctacgcccgacccccgcacatcgaaactatttcgaatttaaaacttaaaaacccaacaactcgaaaaaaacgcttcctccgacccccgactcgaaccacgcgccgcacgcgaccaactctaaaaactcccaattttttctacgaaatccccgaaccgaaaaaacccccgcgaaaaaaaaaataaaaactaaaacgacccgaacccgaaaactctcgaccccccaataaccaaccccgacattaacgccgtcaaaaacccaaccgtacgtcaactatcgccctaacaacgaaaacgacgtcaccacattaataatacgtcaatccgctaacgtca

SEQ ID NO: 20635 - DNA, 532 bp, Artificial Sequence
  chemically treated genomic DNA (Homo sapiens) CpG-island No: 20635
gtttgggtgttaaggtaaagtaagttagttttttttttttttaagtattttagataaggatcggtggttgtagagcgtattcgttttcgggaacggcgtttgtgtttttgtttgtttgtttttatttttatacgtttttgtttgtttttacgcgtttttgtttgtgcgttttttatttgtgtttaagtcgtcgtttttttgcgttcggttttcgtatatcggagttatttcgggtttaaggtttaaaagtttaatagttcggaggagacgtttttttcggttttcggttcggattacgcgtcgtacgcggttagttttgggagtttttagttttttttgcgggattttcgagtcggggaagttttcgcgggaggaagggtgggggttggggcgattcgggttcggaggttttcggttttttagtggttaatttcggtattgacgtcgttaggagtttagtcgtgcgttagttgtcgttttggtaacgggggcgacgttattatattggtggtgcgttagttcgttgacgtta

SEQ ID NO: 20636 - DNA, 532 bp, Artificial Sequence
  chemically treated genomic DNA (Homo sapiens) CpG-island No: 20636
taacgtcaacgaactaacgcaccaccaatataataacgtcgcccccgttaccaaaacgacaactaacgcacgactaaactcctaacgacgtcaataccgaaattaaccactaaaaaaccgaaaacctccgaacccgaatcgccccaacccccacccttcctcccgcgaaaacttccccgactcgaaaatcccgcaaaaaaaactaaaaactcccaaaactaaccgcgtacgacgcgtaatccgaaccgaaaaccgaaaaaaacgtctcctccgaactattaaacttttaaaccttaaacccgaaataactccgatatacgaaaaccgaacgcaaaaaaacgacgacttaaacacaaataaaaaacgcacaaacaaaaacgcgtaaaaacaaacaaaaacgtataaaaataaaaacaaacaaacaaaaacacaaacgccgttcccgaaaacgaatacgctctacaaccaccgatccttatctaaaatacttaaaaaaaaaaaaaactaacttactttaccttaacacccaaac

SEQ ID NO: 20637 - DNA, 846 bp, Artificial Sequence
  chemically treated genomic DNA (Homo sapiens) CpG-island No: 20637
tcgaatcgagattacgttttcgtaggtggaggtttcgtttcgcggtatgatcggaagtgcgcggggtttttaagatggcgttcgaaattcggaagtgagcggcggtagttgcgaggttcggagaaataggcgtcgcgggtttcgcgttcggtcggattcgggttcgaggtgaggttttggttgcgattttcgtttcggttttatcgcgatttttgtttggttcgatttcgtttgtgggttcggcgtttttcgcggatttttgcgttcggggttgggggttttgggggtcgtggggcgggggcgagcgcggcgggattttcgtttttcgtcgcgatttttttcgatttcgtttttcgtcgttaacgttgatttcgcgttgtttcgcgattatcgtcgtgaattttgatttgttttttcgtttttcggcgattttttgtcgtgaattttaattttattttttacgataatttttttaatttttttttttcgttttttcgggtgattttttgtatcgcgtagtttggtgattttcgatttttcgttttttggtaatttttgatttcgtatttatcggtgttttcgagttttttggtgatttcgtattcgttttttttcggtattttggtttttttttttggggattttcgattttatgcgtttcgtgatttcgatttttttttgggagtgattttcggtttttttcgtcgtttcgatttttgattttaggtttttcgggcgttcgtgttttttttttttttttgttttcggttttaggatttttgttttttcggtttcgtagcgtagttttgtttttttttttttttttgtttttcgtttttttcgttt

SEQ ID NO: 20638 - DNA, 846 bp, Artificial Sequence
  chemically treated genomic DNA (Homo sapiens) CpG-island No: 20638
aaacgaaaaaaacgaaaaacaaaaaaaaaaaaaaaaacaaaactacgctacgaaaccgaaaaaacaaaaatcctaaaaccgaaaacaaaaaaaaaaaaaaaacacgaacgcccgaaaaacctaaaatcaaaaatcgaaacgacgaaaaaaaccgaaaatcactcccaaaaaaaaatcgaaatcacgaaacgcataaaatcgaaaatccccaaaaaaaaaaaccaaaataccgaaaaaaaacgaatacgaaatcaccaaaaaactcgaaaacaccgataaatacgaaatcaaaaattaccaaaaaacgaaaaatcgaaaatcaccaaactacgcgatacaaaaaatcacccgaaaaaacgaaaaaaaaaaattaaaaaaattatcgtaaaaaataaaattaaaattcacgacaaaaaatcgccgaaaaacgaaaaaacaaatcaaaattcacgacgataatcgcgaaacaacgcgaaatcaacgttaacgacgaaaaacgaaatcgaaaaaaatcgcgacgaaaaacgaaaatcccgccgcgctcgcccccgccccacgacccccaaaacccccaaccccgaacgcaaaaatccgcgaaaaacgccgaacccacaaacgaaatcgaaccaaacaaaaatcgcgataaaaccgaaacgaaaatcgcaaccaaaacctcacctcgaacccgaatccgaccgaacgcgaaacccgcgacgcctatttctccgaacctcgcaactaccgccgctcacttccgaatttcgaacgccatcttaaaaaccccgcgcacttccgatcataccgcgaaacgaaacctccacctacgaaaacgtaatctcgattcga

SEQ ID NO: 20639 - DNA, 846 bp, Artificial Sequence
  chemically treated genomic DNA (Homo sapiens) CpG-island No: 20639
gagcgggaggggcggggagtaaggggagggagggagatagggttgcgttgcggggtcgagaaggtaagggttttgggatcggggataaggaggaggaaggggtacgaacgttcgaggagtttggagttaggaatcggggcggcgggagagatcgggggttatttttaggaaggggtcgaggttacgaggcgtatggagtcgagagtttttaaaagggaaggttaggatatcgaggaaaagcgggtgcggggttattaaggggttcgggggtatcgatgagtgcggggttaagggttattagaaaacgaaaggtcgggggttattaagttgcgcggtatagggagttattcggaagagcgggaaggaaaggttgggagggttgtcgtggaaggtagggttaaggtttacggtagggggtcgtcggggggcgggggggtaggttaaggtttacggcggtggtcgcggggtagcgcggggttaacgttggcggcgaagggcggggtcggaaggggtcgcggcggagggcgggggtttcgtcgcgttcgttttcgttttacggtttttagaatttttagtttcgggcgtaggggttcgcggggagcgtcggatttataagcggggtcgggttaggtaggggtcgcggtggagtcggggcgggggtcgtaattagagttttatttcgggttcgggttcggtcgggcgcggagttcgcggcgtttgttttttcgagtttcgtagttgtcgtcgtttattttcgggtttcgggcgttattttgggggtttcgcgtattttcggttatgtcgcggggcggggtttttatttgcgggggcgtggtttcggttcgg

SEQ ID NO: 20640 - DNA, 846 bp, Artificial Sequence
  chemically treated genomic DNA (Homo sapiens) CpG-island No: 20640
ccgaaccgaaaccacgcccccgcaaataaaaaccccgccccgcgacataaccgaaaatacgcgaaacccccaaaataacgcccgaaacccgaaaataaacgacgacaactacgaaactcgaaaaaacaaacgccgcgaactccgcgcccgaccgaacccgaacccgaaataaaactctaattacgacccccgccccgactccaccgcgacccctacctaacccgaccccgcttataaatccgacgctccccgcgaacccctacgcccgaaactaaaaattctaaaaaccgtaaaacgaaaacgaacgcgacgaaacccccgccctccgccgcgaccccttccgaccccgcccttcgccgccaacgttaaccccgcgctaccccgcgaccaccgccgtaaaccttaacctacccccccgccccccgacgaccccctaccgtaaaccttaaccctaccttccacgacaaccctcccaacctttccttcccgctcttccgaataactccctataccgcgcaacttaataacccccgacctttcgttttctaataacccttaaccccgcactcatcgatacccccgaaccccttaataaccccgcacccgcttttcctcgatatcctaaccttcccttttaaaaactctcgactccatacgcctcgtaacctcgaccccttcctaaaaataacccccgatctctcccgccgccccgattcctaactccaaactcctcgaacgttcgtaccccttcctcctccttatccccgatcccaaaacccttaccttctcgaccccgcaacgcaaccctatctccctccctccccttactccccgcccctcccgctc

SEQ ID NO: 20641 - DNA, 500 bp, Artificial Sequence
  chemically treated genomic DNA (Homo sapiens) CpG-island No: 20641
ttcggttatcgtcggcgtcgagcggggtttcgagcgtagtagtagcgtcggacgcggcgtaaagttcggtcggtagggttcgtaggtcggagaacggagcgggtcgggcgggtaggggttggtgattaaagtagcgggagacggttttcgaggtattaagttggcggtttagttgtttcgtcgcggttatttgtttcgcgttttcggttttaatcgatattaaatattcggagttcggaaatggatcggggtcgtttagtacggagggagagaggagatagaaaggcgggcgggtcggttgggggagggggagttgtaggtttgtaatcgtaattgcgagtggttggcgagcgaagattagcgttcgttgtcgtttcgttgttgttttttttgtgtttagtgacgcgtcgtttgaggttggggtttcgttgtgttttcgttttcgggttttgttttttttttacgggagggtcgcgtttttaggtgggggttttgtattt

SEQ ID NO: 20642 - DNA, 500 bp, Artificial Sequence
  chemically treated genomic DNA (Homo sapiens) CpG-island No: 20642
aaatacaaaacccccacctaaaaacgcgaccctcccgtaaaaaaaaaacaaaacccgaaaacgaaaacacaacgaaaccccaacctcaaacgacgcgtcactaaacacaaaaaaaacaacaacgaaacgacaacgaacgctaatcttcgctcgccaaccactcgcaattacgattacaaacctacaactccccctcccccaaccgacccgcccgcctttctatctcctctctccctccgtactaaacgaccccgatccatttccgaactccgaatatttaatatcgattaaaaccgaaaacgcgaaacaaataaccgcgacgaaacaactaaaccgccaacttaatacctcgaaaaccgtctcccgctactttaatcaccaacccctacccgcccgacccgctccgttctccgacctacgaaccctaccgaccgaactttacgccgcgtccgacgctactactacgctcgaaaccccgctcgacgccgacgataaccgaa

SEQ ID NO: 20643 - DNA, 500 bp, Artificial Sequence
  chemically treated genomic DNA (Homo sapiens) CpG-island No: 20643
ggatataaggtttttatttaaagacgcgattttttcgtaggaggggggtagggttcgggggcgggagtatagcggggttttagttttaggcggcgcgttattgagtataaaggagataatagcgaggcggtagcgggcgttgattttcgttcgttagttattcgtaattgcggttatagatttgtagtttttttttttttagtcggttcgttcgtttttttgtttttttttttttttcgtattggacggtttcggtttattttcgggtttcggatatttggtatcgattggggtcggggacgcggagtaggtggtcgcggcggggtagttgggtcgttagtttggtgtttcggggatcgtttttcgttgttttggttattagtttttgttcgttcgattcgtttcgtttttcggtttgcgagttttgtcggtcggattttgcgtcgcgttcggcgttgttgttgcgttcggggtttcgttcggcgtcggcggtgatcggg

SEQ ID NO: 20644 - DNA, 500 bp, Artificial Sequence
  chemically treated genomic DNA (Homo sapiens) CpG-island No: 20644
cccgatcaccgccgacgccgaacgaaaccccgaacgcaacaacaacgccgaacgcgacgcaaaatccgaccgacaaaactcgcaaaccgaaaaacgaaacgaatcgaacgaacaaaaactaataaccaaaacaacgaaaaacgatccccgaaacaccaaactaacgacccaactaccccgccgcgaccacctactccgcgtccccgaccccaatcgataccaaatatccgaaacccgaaaataaaccgaaaccgtccaatacgaaaaaaaaaaaaaaacaaaaaaacgaacgaaccgactaaaaaaaaaaaaactacaaatctataaccgcaattacgaataactaacgaacgaaaatcaacgcccgctaccgcctcgctattatctcctttatactcaataacgcgccgcctaaaactaaaaccccgctatactcccgcccccgaaccctacccccctcctacgaaaaaatcgcgtctttaaataaaaaccttatatcc

SEQ ID NO: 20645 - DNA, 601 bp, Artificial Sequence
  chemically treated genomic DNA (Homo sapiens) CpG-island No: 20645
cgttcggtaggattggtcgcgattaattcgcgttcgtcggtttttattacggtttaattttcgtttttgttcgcggatttcgtgggttgtcgagtttttttttatttttatttattagttaaagtgttaagcggggtgcgtcgcggttttttgggtcgtttagagcgttttggtacgttcgaggcgttcgtttcgtttcggttcgcgcgttttcggaagtggtcgcggcgggatatagcgcgggatatagcgcggatttgcggtatttgttcggtcggcggtcgttgaggcgttcggggacgtaggggtagggcgtaaggtttggggcgttgattagttttcggggatgatatcgcgataacgcgtacgtacggttttgttcggtcgcggcgttttttcgatttaggtcggagttgtttcgggtgcgggttttggggatcggtcgcgggcgttttcggttttttttgaatttcgtagattttttttttttttttcgaagcgcggcgattttcggtaaatttttttttgggagattcgttcggtgttaagcggatttaagagattgataggagtcggagggggtagtagagggggatttatt

SEQ ID NO: 20646 - DNA, 601 bp, Artificial Sequence
  chemically treated genomic DNA (Homo sapiens) CpG-island No: 20646
aataaatccccctctactaccccctccgactcctatcaatctcttaaatccgcttaacaccgaacgaatctcccaaaaaaaaatttaccgaaaatcgccgcgcttcgaaaaaaaaaaaaaaaatctacgaaattcaaaaaaaaccgaaaacgcccgcgaccgatccccaaaacccgcacccgaaacaactccgacctaaatcgaaaaaacgccgcgaccgaacaaaaccgtacgtacgcgttatcgcgatatcatccccgaaaactaatcaacgccccaaaccttacgccctacccctacgtccccgaacgcctcaacgaccgccgaccgaacaaataccgcaaatccgcgctatatcccgcgctatatcccgccgcgaccacttccgaaaacgcgcgaaccgaaacgaaacgaacgcctcgaacgtaccaaaacgctctaaacgacccaaaaaaccgcgacgcaccccgcttaacactttaactaataaataaaaataaaaaaaaactcgacaacccacgaaatccgcgaacaaaaacgaaaattaaaccgtaataaaaaccgacgaacgcgaattaatcgcgaccaatcctaccgaacg

SEQ ID NO: 20647 - DNA, 601 bp, Artificial Sequence
  chemically treated genomic DNA (Homo sapiens) CpG-island No: 20647
ggtggatttttttttgttgtttttttcggtttttgttagttttttgggttcgtttggtatcgggcgggttttttaaaagaaagtttgtcgggagtcgtcgcgtttcggaaaggaaggggagggtttgcggagtttagaggaagtcggggacgttcgcggtcggtttttagggttcgtattcgggatagtttcggtttaggtcggggaggcgtcgcggtcgggtagggtcgtgcgtgcgcgttgtcgcgatgttattttcggggattggttagcgttttaggttttgcgttttgtttttgcgttttcgagcgttttagcggtcgtcggtcgggtaagtgtcgtaggttcgcgttgtgtttcgcgttgtgtttcgtcgcggttattttcgaaagcgcgcgggtcggagcgagacgggcgtttcgagcgtgttaagacgttttgggcggtttagggagtcgcggcgtatttcgtttgatattttggttggtggatggaggtggggaggaattcggtagtttacgggattcgcgggtaggggcggaggttagatcgtggtgagggtcgacgggcgcgggttagtcgcggttaattttgtcgggcg

SEQ ID NO: 20648 - DNA, 601 bp, Artificial Sequence
  chemically treated genomic DNA (Homo sapiens) CpG-island No: 20648
cgcccgacaaaattaaccgcgactaacccgcgcccgtcgaccctcaccacgatctaacctccgcccctacccgcgaatcccgtaaactaccgaattcctccccacctccatccaccaaccaaaatatcaaacgaaatacgccgcgactccctaaaccgcccaaaacgtcttaacacgctcgaaacgcccgtctcgctccgacccgcgcgctttcgaaaataaccgcgacgaaacacaacgcgaaacacaacgcgaacctacgacacttacccgaccgacgaccgctaaaacgctcgaaaacgcaaaaacaaaacgcaaaacctaaaacgctaaccaatccccgaaaataacatcgcgacaacgcgcacgcacgaccctacccgaccgcgacgcctccccgacctaaaccgaaactatcccgaatacgaaccctaaaaaccgaccgcgaacgtccccgacttcctctaaactccgcaaaccctccccttcctttccgaaacgcgacgactcccgacaaactttcttttaaaaaacccgcccgataccaaacgaacccaaaaaactaacaaaaaccgaaaaaaacaacaaaaaaaaatccacc

SEQ ID NO: 20649 - DNA, 575 bp, Artificial Sequence
  chemically treated genomic DNA (Homo sapiens) CpG-island No: 20649
gcggtggggtagggcgtattgcgagaagagtatttcgcgtatgcgtatattatcgagcgaacgcgtcgtgttcgggaaggtaggagaaagaggcggagttttttgttaacgatatttttaatttttgttaacgcgtaggcgtattttttgaagttgaaggttagtatagataaagggttttagaatcgcgtaggcgtaattgtgttttggttcgttaagatgtcgtttttaaagtataagtcgtcgagtttgcgtattttgtttgagattttcgatttagtcgaatataatatattttcggaaattcggcgggcgtaagtcgagcggttggttataagagtttagttgaaacgagagtatttgttttagtataacgattttaatcgtcgagggtttatcgtgagtgtggggttttttaggcgggaatagggttcgagttttgggagagatcgagagagattacgtaaagggtcggttatcgttttcgattagtattttagacgtaggtttttttttaggtttagttaatttattatttttttatttttgttagagtttggttttcgagaggatcg

SEQ ID NO: 20650 - DNA, 575 bp, Artificial Sequence
  chemically treated genomic DNA (Homo sapiens) CpG-island No: 20650
cgatcctctcgaaaaccaaactctaacaaaaataaaaaaataataaattaactaaacctaaaaaaaaacctacgtctaaaatactaatcgaaaacgataaccgaccctttacgtaatctctctcgatctctcccaaaactcgaaccctattcccgcctaaaaaaccccacactcacgataaaccctcgacgattaaaatcgttatactaaaacaaatactctcgtttcaactaaactcttataaccaaccgctcgacttacgcccgccgaatttccgaaaatatattatattcgactaaatcgaaaatctcaaacaaaatacgcaaactcgacgacttatactttaaaaacgacatcttaacgaaccaaaacacaattacgcctacgcgattctaaaaccctttatctatactaaccttcaacttcaaaaaatacgcctacgcgttaacaaaaattaaaaatatcgttaacaaaaaactccgcctctttctcctaccttcccgaacacgacgcgttcgctcgataatatacgcatacgcgaaatactcttctcgcaatacgccctaccccaccgc

SEQ ID NO: 20651 - DNA, 575 bp, Artificial Sequence
  chemically treated genomic DNA (Homo sapiens) CpG-island No: 20651
cggttttttcgagggttaagttttggtaaaggtaaaagggtagtgagttggttaggtttggaagaggatttgcgtttgagatattgatcgggagcggtggtcgattttttgcgtggtttttttcggttttttttaggattcgggttttattttcgtttgggaggttttatatttacgatgagttttcggcggttgggatcgttgtattgaagtaggtattttcgttttagttgggtttttatggttaatcgttcggtttgcgttcgtcgggttttcggagatatgttgtattcggttgggtcgagggttttaggtagagtgcgtaggttcgacggtttatattttgggaacgatattttggcgaattagggtataattgcgtttgcgcgattttgaggttttttgtttatgttgatttttagttttaggaagtgcgtttgcgcgttagtagaggttggggatgtcgttaataaggagtttcgttttttttttttattttttcgaatacggcgcgttcgttcggtgatatgcgtatgcgcgaagtgtttttttcgtagtgcgttttgttttatcgt

SEQ ID NO: 20652 - DNA, 575 bp, Artificial Sequence
  chemically treated genomic DNA (Homo sapiens) CpG-island No: 20652
acgataaaacaaaacgcactacgaaaaaaacacttcgcgcatacgcatatcaccgaacgaacgcgccgtattcgaaaaaataaaaaaaaaaaacgaaactccttattaacgacatccccaacctctactaacgcgcaaacgcacttcctaaaactaaaaatcaacataaacaaaaaacctcaaaatcgcgcaaacgcaattataccctaattcgccaaaatatcgttcccaaaatataaaccgtcgaacctacgcactctacctaaaaccctcgacccaaccgaatacaacatatctccgaaaacccgacgaacgcaaaccgaacgattaaccataaaaacccaactaaaacgaaaatacctacttcaatacaacgatcccaaccgccgaaaactcatcgtaaatataaaacctcccaaacgaaaataaaacccgaatcctaaaaaaaaccgaaaaaaaccacgcaaaaaatcgaccaccgctcccgatcaatatctcaaacgcaaatcctcttccaaacctaaccaactcactacccttttacctttaccaaaacttaaccctcgaaaaaaccg

SEQ ID NO: 20653 - DNA, 670 bp, Artificial Sequence
  chemically treated genomic DNA (Homo sapiens) CpG-island No: 20653
aggacgcgcgtttattcgtttagcgcgtagatttaagaggtttcggggatcgagttcggatttttcggtttttcgtttatttcggcgcggatttaggcgatcgttattagcgcgagcgcgagcgcgagttagcgtttttatatttgcggaagagagaagagagcgagtttgaaggcgtcgggtttcgcgtcgatttgggaaatttgttcgggtttcgtaggttcgtttcggtcgtttaagtattttcggtcgttcgaagagttcggttttcgcgtcgtgcgttttgcgtttatcgtggtttggtttaggttttttgggggcgcggggtaggacggcggtagcgagttgtaagcgtaggtgggagtttcgtcgatcgttagtttcggaggaaatgcgattttttttcgtcgttttttaagattttttttttttcgtttgtttgtttttttagtttttttttattttttttttttttttgttgtagcggttttcgcggttttcgtttttttttttttcgatttttgtttcggggagttcgcgggagttttggcgtcgtcgaattttttttttcgtacggtttttcgttcggcgttttttcgggtttttttggacgtggagcggaggtagagggggtgtttcgtgggtttttgttataaaggggtagggggaa

SEQ ID NO: 20654 - DNA, 670 bp, Artificial Sequence
  chemically treated genomic DNA (Homo sapiens) CpG-island No: 20654
ttccccctacccctttataacaaaaacccacgaaacaccccctctacctccgctccacgtccaaaaaaacccgaaaaaacgccgaacgaaaaaccgtacgaaaaaaaaaattcgacgacgccaaaactcccgcgaactccccgaaacaaaaatcgaaaaaaaaaaaaacgaaaaccgcgaaaaccgctacaacaaaaaaaaaaaaaaaataaaaaaaaactaaaaaaacaaacaaacgaaaaaaaaaaaatcttaaaaaacgacgaaaaaaaatcgcatttcctccgaaactaacgatcgacgaaactcccacctacgcttacaactcgctaccgccgtcctaccccgcgcccccaaaaaacctaaaccaaaccacgataaacgcaaaacgcacgacgcgaaaaccgaactcttcgaacgaccgaaaatacttaaacgaccgaaacgaacctacgaaacccgaacaaatttcccaaatcgacgcgaaacccgacgccttcaaactcgctctcttctctcttccgcaaatataaaaacgctaactcgcgctcgcgctcgcgctaataacgatcgcctaaatccgcgccgaaataaacgaaaaaccgaaaaatccgaactcgatccccgaaacctcttaaatctacgcgctaaacgaataaacgcgcgtcct

SEQ ID NO: 20655 - DNA, 670 bp, Artificial Sequence
  chemically treated genomic DNA (Homo sapiens) CpG-island No: 20655
ttttttttatttttttgtggtagggatttacgggatattttttttgttttcgttttacgtttaggggggttcgaaggggcgtcggacgaaggatcgtgcggagagaggggttcggcggcgttaggattttcgcgggtttttcggagtaggggtcggaaggagggggagcgggagtcgcgggggtcgttgtagtagaagggggaggagaatggggaggagttgggggggtaggtaggcggggaaggagaggttttaaggggcggcgaggggaggtcgtatttttttcgaggttggcgatcggcggagtttttatttgcgtttatagttcgttgtcgtcgttttgtttcgcgtttttaggagatttggattagattacggtgagcgtagggcgtacggcgcggaggtcggatttttcgggcggtcgggggtgtttgggcggtcggagcgagtttgcgggattcgagtaagttttttaggtcggcgcggggttcggcgtttttagattcgtttttttttttttttcgtagatgtggaaacgttggttcgcgttcgcgttcgcgttggtggcggtcgtttgggttcgcgtcgaggtaggcgaggggtcgaggagttcgaattcggttttcggggttttttgggtttgcgcgttgggcgggtgggcgcgcgtttt

SEQ ID NO: 20656 - DNA, 670 bp, Artificial Sequence
  chemically treated genomic DNA (Homo sapiens) CpG-island No: 20656
aaaacgcgcgcccacccgcccaacgcgcaaacccaaaaaaccccgaaaaccgaattcgaactcctcgacccctcgcctacctcgacgcgaacccaaacgaccgccaccaacgcgaacgcgaacgcgaaccaacgtttccacatctacgaaaaaaaaaaaaaaacgaatctaaaaacgccgaaccccgcgccgacctaaaaaacttactcgaatcccgcaaactcgctccgaccgcccaaacacccccgaccgcccgaaaaatccgacctccgcgccgtacgccctacgctcaccgtaatctaatccaaatctcctaaaaacgcgaaacaaaacgacgacaacgaactataaacgcaaataaaaactccgccgatcgccaacctcgaaaaaaatacgacctcccctcgccgccccttaaaacctctccttccccgcctacctacccccccaactcctccccattctcctcccccttctactacaacgacccccgcgactcccgctccccctccttccgacccctactccgaaaaacccgcgaaaatcctaacgccgccgaacccctctctccgcacgatccttcgtccgacgccccttcgaacccccctaaacgtaaaacgaaaacaaaaaaaatatcccgtaaatccctaccacaaaaaaataaaaaaaa

SEQ ID NO: 20657 - DNA, 512 bp, Artificial Sequence
  chemically treated genomic DNA (Homo sapiens) CpG-island No: 20657
gtcgttcgttagacgagttttcggggttcgtttttagttttgagttgcgttttttagttttggggttatagcgttagcgttattttgttaggttttcggatatcgttcgtttggtgcgtcgtcggttagttttttgttcgcgcggggtcgttcgtcgcgggtttagggtagattatgcgttcgttaagttcgttgttcgttcgttggttatgcgtgttggtaggtcgttttcgtttgggtttttggggttcggcggtgagtgttcgttcgttcgtttagagtttcggttagttttgggggttgcggagggcgggggaggtgggggatggcgggagtcgggtcgtttgtgcgcgtgtttgtgtaagaggaataggggatattaagtatttcgattcgtttttttttatcgttttagatcgaatttagacgcgagggttgggatattggtcgtgtttagttttttttagcgtagttcggagtaggtatagtattagtggaggggtagcggggaa

SEQ ID NO: 20658 - DNA, 512 bp, Artificial Sequence
  chemically treated genomic DNA (Homo sapiens) CpG-island No: 20658
ttccccgctacccctccactaatactatacctactccgaactacgctaaaaaaaactaaacacgaccaatatcccaaccctcgcgtctaaattcgatctaaaacgataaaaaaaaacgaatcgaaatacttaatatcccctattcctcttacacaaacacgcgcacaaacgacccgactcccgccatcccccacctcccccgccctccgcaacccccaaaactaaccgaaactctaaacgaacgaacgaacactcaccgccgaaccccaaaaacccaaacgaaaacgacctaccaacacgcataaccaacgaacgaacaacgaacttaacgaacgcataatctaccctaaacccgcgacgaacgaccccgcgcgaacaaaaaactaaccgacgacgcaccaaacgaacgatatccgaaaacctaacaaaataacgctaacgctataaccccaaaactaaaaaacgcaactcaaaactaaaaacgaaccccgaaaactcgtctaacgaacgac

SEQ ID NO: 20659 - DNA, 512 bp, Artificial Sequence
  chemically treated genomic DNA (Homo sapiens) CpG-island No: 20659
tttttcgttgtttttttattgatgttgtgtttgtttcgggttgcgttgggagggattgggtacgattaatattttagttttcgcgtttaggttcggtttggagcggtgggaggaggcgagtcgagatgtttgatgttttttattttttttatatagatacgcgtatagacggttcggttttcgttattttttatttttttcgtttttcgtaatttttaaggttggtcgggattttgggcggacgggcgaatatttatcgtcgggttttaagggtttaggcgagggcggtttgttagtacgtatagttagcgggcgggtagcggatttggcgggcgtatggtttgttttgagttcgcggcgggcggtttcgcgcgggtaaagagttggtcggcggcgtattaggcgggcgatgttcgggagtttgatagagtggcgttggcgttgtggttttagagttaagaggcgtagtttagggttgggggcgggtttcgggggttcgtttgacgggcggt

SEQ ID NO: 20660 - DNA, 512 bp, Artificial Sequence
  chemically treated genomic DNA (Homo sapiens) CpG-island No: 20660
accgcccgtcaaacgaacccccgaaacccgcccccaaccctaaactacgcctcttaactctaaaaccacaacgccaacgccactctatcaaactcccgaacatcgcccgcctaatacgccgccgaccaactctttacccgcgcgaaaccgcccgccgcgaactcaaaacaaaccatacgcccgccaaatccgctacccgcccgctaactatacgtactaacaaaccgccctcgcctaaacccttaaaacccgacgataaatattcgcccgtccgcccaaaatcccgaccaaccttaaaaattacgaaaaacgaaaaaaataaaaaataacgaaaaccgaaccgtctatacgcgtatctatataaaaaaaataaaaaacatcaaacatctcgactcgcctcctcccaccgctccaaaccgaacctaaacgcgaaaactaaaatattaatcgtacccaatccctcccaacgcaacccgaaacaaacacaacatcaataaaaaaacaacgaaaaa

SEQ ID NO: 20661 - DNA, 691 bp, Artificial Sequence
  chemically treated genomic DNA (Homo sapiens) CpG-island No: 20661
tcgttcgttttacgatttcggttcggcgttttttttttcggaatttttatttagtgttcggttttcgtttcgtttcgcgcggttttcggttttagtttcgcgcgtttcgacgtttcgtttgcgtcgcgggttcgagtagtggacggggggcggttcgttcggttttttcgtattcgtttttcgttcgggtcgaggcgtcgcggtcgcgcgttttttttggaggaggaggaggaaggaggcgggaggaggagttgtcgagaggagaaggcgagcgcggtagtcgcgtcggcgttgggcgaggaagcggagtcgggtcgttttcgggtaagcgttcggggagttcgggcgggaggtaggggtagggtttcgtcgttcgttttcgggtcgttcgcggttcgggatacggttggttttcgtttcggagtgtagggggcggattcggcgcgggtcgggttagggaggtcgtcgggcgcggggttgtagcgacgggtttgggttagcgcgaggttttgcgtcgtttcggcgggtgcgcgggcgggggttagggtcggggaacgggggtcggggttagtttcgggagcggggacgcggaaatcgggaagtcggggtcggggcgcggcggtttttgaagggtcgaggtttgcgcggtcgcggacggtttttttcgatttttcggttttttcggtcgcgg

SEQ ID NO: 20662 - DNA, 691 bp, Artificial Sequence
  chemically treated genomic DNA (Homo sapiens) CpG-island No: 20662
ccgcgaccgaaaaaaccgaaaaatcgaaaaaaaccgtccgcgaccgcgcaaacctcgacccttcaaaaaccgccgcgccccgaccccgacttcccgatttccgcgtccccgctcccgaaactaaccccgacccccgttccccgaccctaacccccgcccgcgcacccgccgaaacgacgcaaaacctcgcgctaacccaaacccgtcgctacaaccccgcgcccgacgacctccctaacccgacccgcgccgaatccgccccctacactccgaaacgaaaaccaaccgtatcccgaaccgcgaacgacccgaaaacgaacgacgaaaccctacccctacctcccgcccgaactccccgaacgcttacccgaaaacgacccgactccgcttcctcgcccaacgccgacgcgactaccgcgctcgccttctcctctcgacaactcctcctcccgcctccttcctcctcctcctccaaaaaaaacgcgcgaccgcgacgcctcgacccgaacgaaaaacgaatacgaaaaaaccgaacgaaccgccccccgtccactactcgaacccgcgacgcaaacgaaacgtcgaaacgcgcgaaactaaaaccgaaaaccgcgcgaaacgaaacgaaaaccgaacactaaataaaaattccgaaaaaaaaaacgccgaaccgaaatcgtaaaacgaacga

SEQ ID NO: 20663 - DNA, 691 bp, Artificial Sequence
  chemically treated genomic DNA (Homo sapiens) CpG-island No: 20663
tcgcggtcgaagaggtcgaggggtcgagaagagtcgttcgcggtcgcgtaggtttcggttttttaggggtcgtcgcgtttcggtttcggtttttcggttttcgcgttttcgttttcgggattggtttcggttttcgtttttcggttttggttttcgttcgcgtattcgtcgagacggcgtagggtttcgcgttgatttagattcgtcgttgtagtttcgcgttcggcggtttttttggttcggttcgcgtcggattcgttttttgtatttcgaggcgaaaattagtcgtgtttcggatcgcgggcgattcggaggcggacggcgaagttttgtttttgtttttcgttcgagtttttcggacgtttattcggaggcggttcggtttcgttttttcgtttagcgtcggcgcgattgtcgcgttcgtttttttttttcggtaattttttttttcgtttttttttttttttttttttaggaggggcgcgcggtcgcggcgtttcggttcgagcggggagcgggtgcggaggagtcgagcgggtcgtttttcgtttattattcgggttcgcggcgtaggcggggcgtcggggcgcgcggggttgaggtcgggggtcgcgcggggcggggcgggggtcgggtattaagtgggggtttcgaggggaggggcgtcgggtcggggtcgtggggcggacgg

SEQ ID NO: 20664 - DNA, 691 bp, Artificial Sequence
  chemically treated genomic DNA (Homo sapiens) CpG-island No: 20664
ccgtccgccccacgaccccgacccgacgcccctcccctcgaaacccccacttaatacccgacccccgccccgccccgcgcgacccccgacctcaaccccgcgcgccccgacgccccgcctacgccgcgaacccgaataataaacgaaaaacgacccgctcgactcctccgcacccgctccccgctcgaaccgaaacgccgcgaccgcgcgcccctcctaaaaaaaaaaaaaaaaaaaaacgaaaaaaaaaattaccgaaaaaaaaaaacgaacgcgacaatcgcgccgacgctaaacgaaaaaacgaaaccgaaccgcctccgaataaacgtccgaaaaactcgaacgaaaaacaaaaacaaaacttcgccgtccgcctccgaatcgcccgcgatccgaaacacgactaattttcgcctcgaaatacaaaaaacgaatccgacgcgaaccgaaccaaaaaaaccgccgaacgcgaaactacaacgacgaatctaaatcaacgcgaaaccctacgccgtctcgacgaatacgcgaacgaaaaccaaaaccgaaaaacgaaaaccgaaaccaatcccgaaaacgaaaacgcgaaaaccgaaaaaccgaaaccgaaacgcgacgacccctaaaaaaccgaaacctacgcgaccgcgaacgactcttctcgacccctcgacctcttcgaccgcga

SEQ ID NO: 20665 - DNA, 1647 bp, Artificial Sequence
  chemically treated genomic DNA (Homo sapiens) CpG-island No: 20665
gagcgttgggggcgtcgggatgatttttaggatttcgattcgtttttatcgcggcgcgagtaaggggcgggagggtttagtgttcgcgtcgggtttcggaatttacgcgtttttcgtcgcggttcgagatcgacgcggcggttttcgtaattcgtcgttttttttttaagttttcgagttagtttttgttattttttcggcgttttttgtttcgcgtcgtcgtcgggtgtttcgcgcgtcgggttcggtcgcggttggggtttcgaggagcggggtgaggggtaattcggcgtttagcgagcggagcggcggcgagcggagatgcgaagtgatttattcgttcggtaataatagaattgataagttgtagggaacgcgtcgttcgtaggttcgcgtttgcggtcgtcgtcgttcggacgttttcggcgggtttaggaggtcggaaagtatttttagtttatttaaggggcgtttttaaatagaaaatagaaatttcgataattagtttcgttttcggtcggcgtttttttttttaggttcggtttttttttatttttgttgttttgtttcggatttgtcgaataatgagtttggtttcgcggtcgaagtcgttcgatttttcgcgcgtttcggagtttgggcgtcggttcgagtcgggtatcgaacggggcgtataggtcgagcgcgtcgttagcgggtttgagcgttcgcgattcgagttttcgtttttatttcgttttttaatttggaggggatttcgggtttcgcgttgtataaaggggcgcggagttgaggcgggggacgggggcgtttttatttcggtagggacgcggcggcgtttcgtagtttttagtttcgtcgcgtcgttttattttcgttcgttagttcgtaattatttgtcgtttcgttttcgtatttaattatttcgattaaagtttattttggtcgggagaacgggtttgggtttttttttgtatcgtttagcggttcggtttattttgtttcgtacgagttttcgggtttgggagggggaggcggttttcgggtttggtcgtttttttttttcggggcgggttgtcggttttttcgaatagaatttgtgggtttttttaggcggatatttttttcgttgaggcggttttattatcgcgttcggttcgttttcggattttttcgcgtcgggaagagtcgcgggttaattttttttttttcgattcgtttcgtcgtttaggaagtggggtcggtagagggggcggggaggagttgtcggggattgggaggagtcgtatcgcggcgggtggataaagttcgcggtcgggtgaggcgggacggagttggggtcggtggggaggggtatgaggcgttcgtaggtatttcgagaagtaggtttcgatcgttcgtcgacgaagtttcgttcgggttttttgggagcggggtggtaggtatcgtggcgttttttcgcgttggttttgttggttttcggttttcgaagcggagcgacggagatatagttgtggaagtatttggattcgttgtttaggttttcgagtttttcggaattcgaggtcgtaggatattgaaggttgttattttcgagtaggttacgttggacgttattttaagttgggtttagaggttttcgtttag

SEQ ID NO: 20666 - DNA, 1647 bp, Artificial Sequence
  chemically treated genomic DNA (Homo sapiens) CpG-island No: 20666
ctaaacgaaaacctctaaacccaacttaaaataacgtccaacgtaacctactcgaaaataacaaccttcaatatcctacgacctcgaattccgaaaaactcgaaaacctaaacaacgaatccaaatacttccacaactatatctccgtcgctccgcttcgaaaaccgaaaaccaacaaaaccaacgcgaaaaaacgccacgatacctaccaccccgctcccaaaaaacccgaacgaaacttcgtcgacgaacgatcgaaacctacttctcgaaatacctacgaacgcctcatacccctccccaccgaccccaactccgtcccgcctcacccgaccgcgaactttatccacccgccgcgatacgactcctcccaatccccgacaactcctccccgccccctctaccgaccccacttcctaaacgacgaaacgaatcgaaaaaaaaaaaattaacccgcgactcttcccgacgcgaaaaaatccgaaaacgaaccgaacgcgataataaaaccgcctcaacgaaaaaaatatccgcctaaaaaaacccacaaattctattcgaaaaaaccgacaacccgccccgaaaaaaaaaaacgaccaaacccgaaaaccgcctccccctcccaaacccgaaaactcgtacgaaacaaaataaaccgaaccgctaaacgatacaaaaaaaaacccaaacccgttctcccgaccaaaataaactttaatcgaaataattaaatacgaaaacgaaacgacaaataattacgaactaacgaacgaaaataaaacgacgcgacgaaactaaaaactacgaaacgccgccgcgtccctaccgaaataaaaacgcccccgtcccccgcctcaactccgcgcccctttatacaacgcgaaacccgaaatcccctccaaattaaaaaacgaaataaaaacgaaaactcgaatcgcgaacgctcaaacccgctaacgacgcgctcgacctatacgccccgttcgatacccgactcgaaccgacgcccaaactccgaaacgcgcgaaaaatcgaacgacttcgaccgcgaaaccaaactcattattcgacaaatccgaaacaaaacaacaaaaataaaaaaaaaccgaacctaaaaaaaaaaacgccgaccgaaaacgaaactaattatcgaaatttctattttctatttaaaaacgccccttaaataaactaaaaatactttccgacctcctaaacccgccgaaaacgtccgaacgacgacgaccgcaaacgcgaacctacgaacgacgcgttccctacaacttatcaattctattattaccgaacgaataaatcacttcgcatctccgctcgccgccgctccgctcgctaaacgccgaattacccctcaccccgctcctcgaaaccccaaccgcgaccgaacccgacgcgcgaaacacccgacgacgacgcgaaacaaaaaacgccgaaaaaataacaaaaactaactcgaaaacttaaaaaaaaaacgacgaattacgaaaaccgccgcgtcgatctcgaaccgcgacgaaaaacgcgtaaattccgaaacccgacgcgaacactaaaccctcccgccccttactcgcgccgcgataaaaacgaatcgaaatcctaaaaatcatcccgacgcccccaacgctc

SEQ ID NO: 20667 - DNA, 1647 bp, Artificial Sequence
  chemically treated genomic DNA (Homo sapiens) CpG-island No: 20667
ttggacgggagtttttgggtttagtttagggtggcgtttagcgtgatttattcgggaatggtagtttttagtgttttgcggtttcgggtttcgggaagttcggggatttgggtagcggatttagatgtttttatagttgtgttttcgtcgtttcgtttcgggggtcgagaattagtaagattaacgcgaggaggcgttacggtatttgttatttcgtttttaggaggttcggacgaggtttcgtcggcgagcggtcggggtttgtttttcgaggtgtttgcgagcgttttatgtttttttttatcggttttaatttcgtttcgttttattcgatcgcgggttttgtttattcgtcgcggtgcggttttttttagttttcgatagttttttttcgttttttttgtcggttttattttttaggcggcggagcgggtcggggagggaagggttaattcgcggtttttttcggcgcggagggattcggaggcgagtcgagcgcggtggtgaggtcgttttagcgaaaaaaatgttcgtttgaagagatttataagttttattcggggggatcgatagttcgtttcgggaggaaggggcggttaggttcgaaagtcgttttttttttttagattcgagagttcgtgcggggtaaagtgaatcgagtcgttgggcggtgtaaggggaagtttaagttcgttttttcggttaaagtgaattttaatcggggtggttggatgcggagacggggcggtaggtaattgcgggttagcgagcgggagtggggcggcgcggcggggttgggggttgcggggcgtcgtcgcgtttttgtcggagtgggggcgttttcgtttttcgttttaatttcgcgtttttttgtatagcgcgaaattcggggttttttttaagttggggagcggagtgggggcggaggttcgagtcgcgggcgtttaggttcgttggcggcgcgttcggtttgtgcgtttcgttcggtgttcgattcgggtcggcgtttaggtttcggggcgcgcgggagatcgggcggtttcggtcgcggagttaggtttattgttcggtaggttcggggtagggtagtaaaagtgggaggaggtcgagtttggggaggaggacgtcggtcgagagcgagattagttgtcggggtttttgttttttgtttaaaaacgttttttggatgagttgggggtgtttttcgattttttgggttcgtcggggacgttcgggcggcggcggtcgtagacgcgggtttgcgagcggcgcgttttttgtaatttgttagttttattgttgtcgagcgagtgagttatttcgtattttcgttcgtcgtcgtttcgttcgttggacgtcgaattgttttttatttcgtttttcgagattttagtcgcggtcgggttcggcgcgcggagtattcggcggcggcgcggagtagggggcgtcgaggaggtggtagagattggttcggaaatttgggggagaggcggcgagttgcgggagtcgtcgcgtcgatttcgggtcgcggcgaggaacgcgtggatttcgggattcggcgcgggtattgagttttttcgttttttgttcgcgtcgcggtgggagcgagtcggggttttggaagttatttcggcgtttttagcgttt

SEQ ID NO: 20668 - DNA, 1647 bp, Artificial Sequence
  chemically treated genomic DNA (Homo sapiens) CpG-island No: 20668
aaacgctaaaaacgccgaaataacttccaaaaccccgactcgctcccaccgcgacgcgaacaaaaaacgaaaaaactcaatacccgcgccgaatcccgaaatccacgcgttcctcgccgcgacccgaaatcgacgcgacgactcccgcaactcgccgcctctcccccaaatttccgaaccaatctctaccacctcctcgacgccccctactccgcgccgccgccgaatactccgcgcgccgaacccgaccgcgactaaaatctcgaaaaacgaaataaaaaacaattcgacgtccaacgaacgaaacgacgacgaacgaaaatacgaaataactcactcgctcgacaacaataaaactaacaaattacaaaaaacgcgccgctcgcaaacccgcgtctacgaccgccgccgcccgaacgtccccgacgaacccaaaaaatcgaaaaacacccccaactcatccaaaaaacgtttttaaacaaaaaacaaaaaccccgacaactaatctcgctctcgaccgacgtcctcctccccaaactcgacctcctcccacttttactaccctaccccgaacctaccgaacaataaacctaactccgcgaccgaaaccgcccgatctcccgcgcgccccgaaacctaaacgccgacccgaatcgaacaccgaacgaaacgcacaaaccgaacgcgccgccaacgaacctaaacgcccgcgactcgaacctccgcccccactccgctccccaacttaaaaaaaaccccgaatttcgcgctatacaaaaaaacgcgaaattaaaacgaaaaacgaaaacgcccccactccgacaaaaacgcgacgacgccccgcaacccccaaccccgccgcgccgccccactcccgctcgctaacccgcaattacctaccgccccgtctccgcatccaaccaccccgattaaaattcactttaaccgaaaaaacgaacttaaacttccccttacaccgcccaacgactcgattcactttaccccgcacgaactctcgaatctaaaaaaaaaaaacgactttcgaacctaaccgccccttcctcccgaaacgaactatcgatccccccgaataaaacttataaatctcttcaaacgaacatttttttcgctaaaacgacctcaccaccgcgctcgactcgcctccgaatccctccgcgccgaaaaaaaccgcgaattaacccttccctccccgacccgctccgccgcctaaaaaataaaaccgacaaaaaaaacgaaaaaaaactatcgaaaactaaaaaaaaccgcaccgcgacgaataaacaaaacccgcgatcgaataaaacgaaacgaaattaaaaccgataaaaaaaaacataaaacgctcgcaaacacctcgaaaaacaaaccccgaccgctcgccgacgaaacctcgtccgaacctcctaaaaacgaaataacaaataccgtaacgcctcctcgcgttaatcttactaattctcgacccccgaaacgaaacgacgaaaacacaactataaaaacatctaaatccgctacccaaatccccgaacttcccgaaacccgaaaccgcaaaacactaaaaactaccattcccgaataaatcacgctaaacgccaccctaaactaaacccaaaaactcccgtccaa

SEQ ID NO: 20669 - DNA, 625 bp, Artificial Sequence
  chemically treated genomic DNA (Homo sapiens) CpG-island No: 20669
tttatttcggtagtttttagttttagacgttgcgtggagcggcggagtcggagggaagtaaaggatcgtttgcgttgttgttttcgtttcgcgcgttttgcgtttttcgtttttggcggtcgtttcgaagtttagtttttttgtttgtttcggagttgtttcgggttagtcgagaagagagcggtcggtaagtttgggcgcgcgtaggcggcgggtcgcgggtattgggcgtttcgttggggcggggggaggtggttatcgttttcggtttggcgtttcgcgcgtatttcggcgatggttttttcgtcgcggcgacggttgcgtttcggttttcgcggtttttcgttttttttttcgggatttttgttatttttgtgtcgcgtttttaatttagacgtggatagttttgtcgagtattttggtttcgagggaagttatttcggtttcgtcgtggattttttcgtgtttagcgcgttttcgtaagtggtcgtatttggaattggagtcggtttttttttttatcgcgcgtatttatttagcgtttttttattgggattgattttcgagagatttcggcgtttgtttgttttatttattttattttttagagtggtttatattttgg

SEQ ID NO: 20670 - DNA, 625 bp, Artificial Sequence
  chemically treated genomic DNA (Homo sapiens) CpG-island No: 20670
ccaaaatataaaccactctaaaaaataaaataaataaaacaaacaaacgccgaaatctctcgaaaatcaatcccaataaaaaaacgctaaataaatacgcgcgataaaaaaaaaaaccgactccaattccaaatacgaccacttacgaaaacgcgctaaacacgaaaaaatccacgacgaaaccgaaataacttccctcgaaaccaaaatactcgacaaaactatccacgtctaaattaaaaacgcgacacaaaaataacaaaaatcccgaaaaaaaaaacgaaaaaccgcgaaaaccgaaacgcaaccgtcgccgcgacgaaaaaaccatcgccgaaatacgcgcgaaacgccaaaccgaaaacgataaccacctccccccgccccaacgaaacgcccaatacccgcgacccgccgcctacgcgcgcccaaacttaccgaccgctctcttctcgactaacccgaaacaactccgaaacaaacaaaaaaactaaacttcgaaacgaccgccaaaaacgaaaaacgcaaaacgcgcgaaacgaaaacaacaacgcaaacgatcctttacttccctccgactccgccgctccacgcaacgtctaaaactaaaaactaccgaaataaa

SEQ ID NO: 20671 - DNA, 625 bp, Artificial Sequence
  chemically treated genomic DNA (Homo sapiens) CpG-island No: 20671
ttaggatataaattattttgagaggtaggatgggtgagatagatagacgtcgggatttttcggaaattaattttaatggagaaacgttgggtgggtgcgcgcggtgggggagggggtcggttttagttttaagtgcggttatttacgaagacgcgttgggtacgaagaaatttacggcgaagtcgaagtaatttttttcggggttagagtattcggtaggattgtttacgtttaggttgaaggcgcggtatagaggtagtaggagtttcgagagaagaagcgggaggtcgcggggatcgaggcgtagtcgtcgtcgcggcggaaaagttatcgtcgaagtgcgcgcgggacgttaagtcgggagcggtagttattttttttcgttttagcgaggcgtttagtgttcgcggttcgtcgtttgcgcgcgtttaaatttgtcggtcgtttttttttcggttagttcgggatagtttcggggtaggtaagagggttgagtttcggagcgatcgttagggacgaggggcgtagagcgcgcggggcggggatagtagcgtagacggttttttgttttttttcggtttcgtcgttttacgtagcgtttgaggttggggattgtcggggtgag

SEQ ID NO: 20672 - DNA, 625 bp, Artificial Sequence
  chemically treated genomic DNA (Homo sapiens) CpG-island No: 20672
ctcaccccgacaatccccaacctcaaacgctacgtaaaacgacgaaaccgaaaaaaaacaaaaaaccgtctacgctactatccccgccccgcgcgctctacgcccctcgtccctaacgatcgctccgaaactcaaccctcttacctaccccgaaactatcccgaactaaccgaaaaaaaaacgaccgacaaatttaaacgcgcgcaaacgacgaaccgcgaacactaaacgcctcgctaaaacgaaaaaaaataactaccgctcccgacttaacgtcccgcgcgcacttcgacgataacttttccgccgcgacgacgactacgcctcgatccccgcgacctcccgcttcttctctcgaaactcctactacctctataccgcgccttcaacctaaacgtaaacaatcctaccgaatactctaaccccgaaaaaaattacttcgacttcgccgtaaatttcttcgtacccaacgcgtcttcgtaaataaccgcacttaaaactaaaaccgaccccctcccccaccgcgcgcacccacccaacgtttctccattaaaattaatttccgaaaaatcccgacgtctatctatctcacccatcctacctctcaaaataatttatatcctaa

SEQ ID NO: 20673 - DNA, 792 bp, Artificial Sequence
  chemically treated genomic DNA (Homo sapiens) CpG-island No: 20673
tcgtttcgcgtttcgcgttttcgggtgcggattttgggcgttcgtcggttgcgcgttaggatttcgttattttaggcggtttttaaggtttacgcgtttttgtttcgttcggattttcgagtttagtcgtggcgtttatttgttttgttcgtagcgttagttgtacggtcgtttggaagtattttttttaggggtcggtcgttagcgtcgtttggttttcgtcgttcggttttatcgcggtttcgtcgggtttttttatttttagtttttttcggcgggatttcggtttttatcggatttcgtcgtttcgtcgttaggttttatattttttgtgtttgttttcgtagttttgtgtttagttcgtcgttcgttttatatttgcgttggcgggaagggtagttagcgggtcgcgggagtcgtgcgttttgtttttcgttttttatttttcgtttcgtttcgtgtcgagtttagtttagtttttcgtttcgtttttcgtttagttttttgttttcgcgttcggtttcgttttgtattttttatttcgtttttcgtagagttcggtttcgtttatttttttttttttttcgttttttgacgttttcggtttcgtttcgtattcgttgttgtttttggttttttttcgcgtcgtgttcggtttcgttttgtatcgtttttttcgttttcggttgcgtttcgtatttggtttcgtttttttgggttagttttgaatataaattagtgtcgagtttggttttttttcgtttcgcgttttatttttagtttcgtttttgt

SEQ ID NO: 20674 - DNA, 792 bp, Artificial Sequence
  chemically treated genomic DNA (Homo sapiens) CpG-island No: 20674
acaaaaacgaaactaaaaataaaacgcgaaacgaaaaaaaaccaaactcgacactaatttatattcaaaactaacccaaaaaaacgaaaccaaatacgaaacgcaaccgaaaacgaaaaaaacgatacaaaacgaaaccgaacacgacgcgaaaaaaaaccaaaaacaacaacgaatacgaaacgaaaccgaaaacgtcaaaaaacgaaaaaaaaaaaaaaataaacgaaaccgaactctacgaaaaacgaaataaaaaatacaaaacgaaaccgaacgcgaaaacaaaaaactaaacgaaaaacgaaacgaaaaactaaactaaactcgacacgaaacgaaacgaaaaataaaaaacgaaaaacaaaacgcacgactcccgcgacccgctaactacccttcccgccaacgcaaatataaaacgaacgacgaactaaacacaaaactacgaaaacaaacacaaaaaatataaaacctaacgacgaaacgacgaaatccgataaaaaccgaaatcccgccgaaaaaaactaaaaataaaaaaacccgacgaaaccgcgataaaaccgaacgacgaaaaccaaacgacgctaacgaccgacccctaaaaaaaatacttccaaacgaccgtacaactaacgctacgaacaaaacaaataaacgccacgactaaactcgaaaatccgaacgaaacaaaaacgcgtaaaccttaaaaaccgcctaaaataacgaaatcctaacgcgcaaccgacgaacgcccaaaatccgcacccgaaaacgcgaaacgcgaaacga

SEQ ID NO: 20675 - DNA, 792 bp, Artificial Sequence
  chemically treated genomic DNA (Homo sapiens) CpG-island No: 20675
ataggggcggggttggaggtaaagcgcggagcggagagggattaggttcggtattgatttgtgtttagggttagtttagaggggcggggttaggtacggggcgtagtcgggagcgggaggggcggtgtaggacggggtcgggtacggcgcgggaagaggttaggagtagtaacgggtgcggggcggggtcgggagcgttaaggggcggggaagaggggggaatgggcggggtcgagttttgcgaggggcgaggtggggaatgtagagcggggtcggacgcgggagtagggagttgggcggggagcggggcggggagttgggttgggttcggtacggggcggggcggagggtggggagcggaaagtaggacgtacggttttcgcggttcgttggttgtttttttcgttagcgtaggtgtgggacgggcggcggattaggtatagagttgcgggagtaggtatagggagtgtggagtttggcggcgggacggcgggattcggtgggagtcggagtttcgtcgaggggggttggaggtggaggggttcggcgaggtcgcgatgaagtcgagcggcgaggattaggcggcgttggcggtcggtttttgggaggagtgtttttaggcggtcgtgtagttggcgttgcgggtaggataggtgagcgttacggttgggttcggaagttcgggcggagtagaagcgcgtgggttttgggagtcgtttggagtggcggggttttggcgcgtagtcggcgggcgtttagggttcgtattcgagggcgcggggcgcggagcgg

SEQ ID NO: 20676 - DNA, 792 bp, Artificial Sequence
  chemically treated genomic DNA (Homo sapiens) CpG-island No: 20676
ccgctccgcgccccgcgccctcgaatacgaaccctaaacgcccgccgactacgcgccaaaaccccgccactccaaacgactcccaaaacccacgcgcttctactccgcccgaacttccgaacccaaccgtaacgctcacctatcctacccgcaacgccaactacacgaccgcctaaaaacactcctcccaaaaaccgaccgccaacgccgcctaatcctcgccgctcgacttcatcgcgacctcgccgaacccctccacctccaacccccctcgacgaaactccgactcccaccgaatcccgccgtcccgccgccaaactccacactccctatacctactcccgcaactctatacctaatccgccgcccgtcccacacctacgctaacgaaaaaaacaaccaacgaaccgcgaaaaccgtacgtcctactttccgctccccaccctccgccccgccccgtaccgaacccaacccaactccccgccccgctccccgcccaactccctactcccgcgtccgaccccgctctacattccccacctcgcccctcgcaaaactcgaccccgcccattcccccctcttccccgccccttaacgctcccgaccccgccccgcacccgttactactcctaacctcttcccgcgccgtacccgaccccgtcctacaccgcccctcccgctcccgactacgccccgtacctaaccccgcccctctaaactaaccctaaacacaaatcaataccgaacctaatccctctccgctccgcgctttacctccaaccccgcccctat

SEQ ID NO: 20677 - DNA, 857 bp, Artificial Sequence
  chemically treated genomic DNA (Homo sapiens) CpG-island No: 20677
gagggattcgggaattgtagtcggagtcggcgcgtatttagttaattttttgttttcgcggtagcgcgcgggtttgttattgaagtttcgtttcggcgattttaggcgggcggggaagatcgagttttttcggagtcgtttcgttcgttcggcgtcggagttttacggtcggtttgcggaagcgggtcgtttgaaggggttcggcgggtggttttcgggttttcgcggtttgtgatttttagagcggataatcgtagttggggtttcgtgcgtaattcggagtaaaggtcggaatttacgttcggcggtcgcgtttcggtttttagcgtttttcgcgaagtgtttggtaggttcggtagtttgagtgtcgcgttatagagttttttgggtagttatcgttgaagggcgggggacgcgggaaaggtattttggggatataggagagttgcgagggcgaagtacgggcgagttgtcgttagggtttaggaaaggttcgttgcggggcgtataggcgggtaggggaattcgcgtttcgcgtcgcgcgttcggttttttgacgttagggtcggtttttgagtatagttatcgcggcggtcgggggcggttattgtttttcgcgagttcgttttcgcgttttagaagtttttagagttcgcgttcgagttttaggttttggaggagttaggcgggtagttgatagtttcggagtcgttttcgggtttcgcgcgcggtggtagttaggtcgtgttttttcgtttttttttcgcgtcgcgttgttttttcgggatttattaggtttggttgcgtttttttttttttttttttcggagttttggaaagtgttttttagagatgtg

SEQ ID NO: 20678 - DNA, 857 bp, Artificial Sequence
  chemically treated genomic DNA (Homo sapiens) CpG-island No: 20678
cacatctctaaaaaacactttccaaaactccgaaaaaaaaaaaaaaaaaaacgcaaccaaacctaataaatcccgaaaaaacaacgcgacgcgaaaaaaaaacgaaaaaacacgacctaactaccaccgcgcgcgaaacccgaaaacgactccgaaactatcaactacccgcctaactcctccaaaacctaaaactcgaacgcgaactctaaaaacttctaaaacgcgaaaacgaactcgcgaaaaacaataaccgcccccgaccgccgcgataactatactcaaaaaccgaccctaacgtcaaaaaaccgaacgcgcgacgcgaaacgcgaattcccctacccgcctatacgccccgcaacgaacctttcctaaaccctaacgacaactcgcccgtacttcgccctcgcaactctcctatatccccaaaatacctttcccgcgtcccccgcccttcaacgataactacccaaaaaactctataacgcgacactcaaactaccgaacctaccaaacacttcgcgaaaaacgctaaaaaccgaaacgcgaccgccgaacgtaaattccgacctttactccgaattacgcacgaaaccccaactacgattatccgctctaaaaatcacaaaccgcgaaaacccgaaaaccacccgccgaaccccttcaaacgacccgcttccgcaaaccgaccgtaaaactccgacgccgaacgaacgaaacgactccgaaaaaactcgatcttccccgcccgcctaaaatcgccgaaacgaaacttcaataacaaacccgcgcgctaccgcgaaaacaaaaaattaactaaatacgcgccgactccgactacaattcccgaatccctc

SEQ ID NO: 20679 - DNA, 857 bp, Artificial Sequence
  chemically treated genomic DNA (Homo sapiens) CpG-island No: 20679
tatatttttggagggtattttttaaggtttcgggggaggagaggaaagaggcgtagttaggtttggtgggtttcggaggggtagcgcggcgcgggaggggaacggggaggtacggtttggttgttatcgcgcgcggaattcgggagcggtttcggggttgttagttgttcgtttggtttttttaaggtttggagttcggacgcgggttttgggggtttttggggcgcggaagcgggttcgcggggagtagtggtcgttttcggtcgtcgcggtggttgtgtttagaagtcggttttggcgttaggaggtcgggcgcgcggcgcggggcgcgagtttttttgttcgtttgtgcgtttcgtaacgggttttttttgggttttaacgatagttcgttcgtgtttcgttttcgtagtttttttgtgtttttaaaatgtttttttcgcgtttttcgttttttagcggtgattgtttaggggattttgtaacgcgatatttagattgtcgagtttgttaggtatttcgcggagggcgttaggggtcgggacgcggtcgtcgagcgtaggtttcggtttttatttcgagttgcgtacggagttttagttgcggttgttcgttttggggattataggtcgcggagattcgggagttattcgtcgggtttttttagacgattcgttttcgtaaatcggtcgtgggatttcggcgtcgggcggacgaagcggtttcgggaagattcggtttttttcgttcgtttgaggtcgtcggggcggggttttagtgataggttcgcgcgttatcgcggaaataggaagttggttgggtgcgcgtcggtttcggttgtagttttcgggtttttt

SEQ ID NO: 20680 - DNA, 857 bp, Artificial Sequence
  chemically treated genomic DNA (Homo sapiens) CpG-island No: 20680
aaaaaacccgaaaactacaaccgaaaccgacgcgcacccaaccaacttcctatttccgcgataacgcgcgaacctatcactaaaaccccgccccgacgacctcaaacgaacgaaaaaaaccgaatcttcccgaaaccgcttcgtccgcccgacgccgaaatcccacgaccgatttacgaaaacgaatcgtctaaaaaaacccgacgaataactcccgaatctccgcgacctataatccccaaaacgaacaaccgcaactaaaactccgtacgcaactcgaaataaaaaccgaaacctacgctcgacgaccgcgtcccgacccctaacgccctccgcgaaatacctaacaaactcgacaatctaaatatcgcgttacaaaatcccctaaacaatcaccgctaaaaaacgaaaaacgcgaaaaaaacattttaaaaacacaaaaaaactacgaaaacgaaacacgaacgaactatcgttaaaacccaaaaaaaacccgttacgaaacgcacaaacgaacaaaaaaactcgcgccccgcgccgcgcgcccgacctcctaacgccaaaaccgacttctaaacacaaccaccgcgacgaccgaaaacgaccactactccccgcgaacccgcttccgcgccccaaaaacccccaaaacccgcgtccgaactccaaaccttaaaaaaaccaaacgaacaactaacaaccccgaaaccgctcccgaattccgcgcgcgataacaaccaaaccgtacctccccgttcccctcccgcgccgcgctacccctccgaaacccaccaaacctaactacgcctctttcctctcctcccccgaaaccttaaaaaataccctccaaaaatata

SEQ ID NO: 20681 - DNA, 772 bp, Artificial Sequence
  chemically treated genomic DNA (Homo sapiens) CpG-island No: 20681
ttagattcgttttttagcgtatttgttttttttttttttttcgggttcgttaacgttttatttattcgcgagttaggttttagcgttttttcgttcgaacgtttaggtcgtcgggtcgtttgcgttcgtttgttttagttcgtgtcgtcgcgggtcgcgtttatttaggttttcgtttttgttcgtgtagtcgtttcgttcggtagtcgtcgtcgcgttttatattcgcggtcgttcggttcgggtttacgtgtcgttacgttagggagtttgggggttgtagttttgcgtcgtcgttcgcgaggcgcgttcggaatcgttggttcggaaatttcgaaacgttttgtatattggagtttgttttttttcgggtgttatttgaataatatgggttgaagtgatttcggcgtagcgtttcggtttttcgaggatcggaagtattcgaattggcggtcgggtgttcgagagtacgcggtttattcgcgttacgtcgagtgtaaatttttttttgtttcgtttgtacgttagtttttttcgcgtgcgggtattttttgggtttcgttgcgttttaatttttttttttttgcgtagggttttgtaatttttattatttcgtggttttgcgttgtgaggtttgggttgttgttttcgaggcgtacggagaattttaattgtttatcggcgtttaggttttttcgggttgacgtcgttgtattagttttgtagattttcgtgttaaagagagatgagcgaattttaaagtgaattattt

SEQ ID NO: 20682 - DNA, 772 bp, Artificial Sequence
  chemically treated genomic DNA (Homo sapiens) CpG-island No: 20682
aaataattcactttaaaattcgctcatctctctttaacacgaaaatctacaaaactaatacaacgacgtcaacccgaaaaaacctaaacgccgataaacaattaaaattctccgtacgcctcgaaaacaacaacccaaacctcacaacgcaaaaccacgaaataataaaaattacaaaaccctacgcaaaaaaaaaaaaattaaaacgcaacgaaacccaaaaaatacccgcacgcgaaaaaaactaacgtacaaacgaaacaaaaaaaaatttacactcgacgtaacgcgaataaaccgcgtactctcgaacacccgaccgccaattcgaatacttccgatcctcgaaaaaccgaaacgctacgccgaaatcacttcaacccatattattcaaataacacccgaaaaaaaacaaactccaatatacaaaacgtttcgaaatttccgaaccaacgattccgaacgcgcctcgcgaacgacgacgcaaaactacaacccccaaactccctaacgtaacgacacgtaaacccgaaccgaacgaccgcgaatataaaacgcgacgacgactaccgaacgaaacgactacacgaacaaaaacgaaaacctaaataaacgcgacccgcgacgacacgaactaaaacaaacgaacgcaaacgacccgacgacctaaacgttcgaacgaaaaaacgctaaaacctaactcgcgaataaataaaacgttaacgaacccgaaaaaaaaaaaaaaaacaaatacgctaaaaaacgaatctaa

SEQ ID NO: 20683 - DNA, 772 bp, Artificial Sequence
  chemically treated genomic DNA (Homo sapiens) CpG-island No: 20683
agataatttattttaaaattcgtttatttttttttaatacgagagtttgtagggttggtgtagcggcgttaattcgaagagatttgaacgtcgatgggtagttgggatttttcgtacgtttcggaaatagtagtttaaattttataacgtagaattacgagatagtggggattgtagagttttgcgtaagagaaggaaaattaagacgtagcggagtttaggaggtgttcgtacgcgggaaggattggcgtgtagacgaggtagggggaggtttgtattcggcgtggcgcgggtgagtcgcgtgttttcgggtattcggtcgttagttcggatgttttcgattttcggggagtcggggcgttgcgtcggagttattttagtttatgttgtttaggtgatattcggggaagagtagattttagtgtgtaaaacgtttcggggttttcgggttagcggtttcgggcgcgtttcgcgggcggcggcgtagaattataatttttaggttttttggcgtggcggtacgtgggttcgagtcgggcggtcgcggatataaagcgcggcggcggttgtcgggcggagcggttgtacggataagagcggaggtttgggtgagcgcggttcgcgacggtacgggttaggatagacggacgtagacggttcgacgatttgggcgttcgggcggaggggcgttggggtttgattcgcgggtgggtgagacgttgacggattcggaggaaagagggaaggtagatacgttgggaaacggatttgg

SEQ ID NO: 20684 - DNA, 772 bp, Artificial Sequence
  chemically treated genomic DNA (Homo sapiens) CpG-island No: 20684
ccaaatccgtttcccaacgtatctaccttccctctttcctccgaatccgtcaacgtctcacccacccgcgaatcaaaccccaacgcccctccgcccgaacgcccaaatcgtcgaaccgtctacgtccgtctatcctaacccgtaccgtcgcgaaccgcgctcacccaaacctccgctcttatccgtacaaccgctccgcccgacaaccgccgccgcgctttatatccgcgaccgcccgactcgaacccacgtaccgccacgccaaaaaacctaaaaattataattctacgccgccgcccgcgaaacgcgcccgaaaccgctaacccgaaaaccccgaaacgttttacacactaaaatctactcttccccgaatatcacctaaacaacataaactaaaataactccgacgcaacgccccgactccccgaaaatcgaaaacatccgaactaacgaccgaatacccgaaaacacgcgactcacccgcgccacgccgaatacaaacctccccctacctcgtctacacgccaatccttcccgcgtacgaacacctcctaaactccgctacgtcttaattttccttctcttacgcaaaactctacaatccccactatctcgtaattctacgttataaaatttaaactactatttccgaaacgtacgaaaaatcccaactacccatcgacgttcaaatctcttcgaattaacgccgctacaccaaccctacaaactctcgtattaaaaaaaaataaacgaattttaaaataaattatct

SEQ ID NO: 20685 - DNA, 514 bp, Artificial Sequence
  chemically treated genomic DNA (Homo sapiens) CpG-island No: 20685
ggtggggcggggttgcgttttttcgagagtatatcgagggcggcggcggttcgagtgattttttagagtttggtattaagtttagggtatcgttaaggtttgcggcggtttttgaagatgttcggtagtcggtaaagtttttttattcgtatatcgcgtttattattatggttattttgtaaaattcgtataagcgttttacgtttagcggtatttgcgtttttattagtggtcgttttttatattatcgtcgtaagtttttcgtttggtagaatagtattcgttataatttttcgttgaacgattgtttcgttaagatttttcgcgagtcgggttatttaggtaagggtaattattggagtttggatttcgttttttaggatatgttcgataatggtagtttttttcggcgtaggaagcgttttaagcgttattaattgatttcgggagtttatttgttttattttttttttttatttgttgcgtacgtcgttttgtataatttttatttagg

SEQ ID NO: 20686 - DNA, 514 bp, Artificial Sequence
  chemically treated genomic DNA (Homo sapiens) CpG-island No: 20686
cctaaataaaaattatacaaaacgacgtacgcaacaaataaaaaaaaaaaataaaacaaataaactcccgaaatcaattaataacgcttaaaacgcttcctacgccgaaaaaaactaccattatcgaacatatcctaaaaaacgaaatccaaactccaataattacccttacctaaataacccgactcgcgaaaaatcttaacgaaacaatcgttcaacgaaaaattataacgaatactattctaccaaacgaaaaacttacgacgataatataaaaaacgaccactaataaaaacgcaaataccgctaaacgtaaaacgcttatacgaattttacaaaataaccataataataaacgcgatatacgaataaaaaaactttaccgactaccgaacatcttcaaaaaccgccgcaaaccttaacgataccctaaacttaataccaaactctaaaaaatcactcgaaccgccgccgccctcgatatactctcgaaaaaacgcaaccccgccccacc

SEQ ID NO: 20687 - DNA, 514 bp, Artificial Sequence
  chemically treated genomic DNA (Homo sapiens) CpG-island No: 20687
tttgggtgggggttgtgtagggcggcgtgcgtagtaggtagagggaaggggtggggtaggtgggttttcggggttagttggtggcgtttgaaacgttttttacgtcggagaaagttgttattgtcgaatatgttttgggaggcggggtttaggttttagtagttgtttttgtttgggtggttcggttcgcgggggattttaacgaagtagtcgtttagcgagaggttgtggcggatgttgttttgttaggcggggaatttgcggcggtagtatgggaagcggttattaatgaaggcgtagatgtcgttgagcgtgaggcgtttgtgcgggttttgtaggatggttatggtgatgagcgcgatgtacgagtaggggggttttgtcggttgtcgggtatttttagaggtcgtcgtagattttggcggtgttttgaatttggtgttaaattttgaggggttattcgggtcgtcgtcgttttcgatgtgttttcggggaagcgtaatttcgttttatt

SEQ ID NO: 20688 - DNA, 514 bp, Artificial Sequence
  chemically treated genomic DNA (Homo sapiens) CpG-island No: 20688
aataaaacgaaattacgcttccccgaaaacacatcgaaaacgacgacgacccgaataacccctcaaaatttaacaccaaattcaaaacaccgccaaaatctacgacgacctctaaaaatacccgacaaccgacaaaacccccctactcgtacatcgcgctcatcaccataaccatcctacaaaacccgcacaaacgcctcacgctcaacgacatctacgccttcattaataaccgcttcccatactaccgccgcaaattccccgcctaacaaaacaacatccgccacaacctctcgctaaacgactacttcgttaaaatcccccgcgaaccgaaccacccaaacaaaaacaactactaaaacctaaaccccgcctcccaaaacatattcgacaataacaactttctccgacgtaaaaaacgtttcaaacgccaccaactaaccccgaaaacccacctaccccaccccttccctctacctactacgcacgccgccctacacaacccccacccaaa

SEQ ID NO: 20689 - DNA, 878 bp, Artificial Sequence
  chemically treated genomic DNA (Homo sapiens) CpG-island No: 20689
cgcgtcgtcgcggttttttgatttttattatagcggtttttttgtttttcgtcgtcgcggttttttgttttaagtattatttcggtttttttttcgtcgtcgcggttttttttttatcgcggttttttgtttttattcgtcgtttcgggtttatgttcgttacggtttttagttttttgtcgtcgcggttttttgttcgattcggttttttgttttttattttttttcgtcgtcgtcgcggttttttgttcgatttggttttttgtttattttcgttgtcgcggtttttttattttcgtcgtcgtggtttttttattttcgttgtcgcggtttttttattttcgtcgtcgtggtttttttattttcgttgtcgcggtttttttattttcgtcgtcgtggtttttttattttcgtcgtcgtggttttttgttatcgcggttttttgtttttttcgtcgtcgttacggttttttgttcgatttggttttttgttcgattcggttttttgtttttcgttgttacggttttttgtttttcgttgttacggttttttgtttttcgtcgtcgcggttttttgttcgatttggttttttgttcgattcggttttttgtttttcgttgttacggttttatgttttacgtagtcgcggtttttttattttcgtcgtcgtggtttttagtcgtcgcggttttttgtttttcgtcgtcgcgtttttttgttttttcgttatggcggttttgtgcgttttacgttttttcgtttcgtgtcgcggttatttgttcgcggcggttttttgtttttcgttttcgtggttttttgttttatggttatttttagaagcgtgagtggaatagagtgaagggaaagttgtttttttt

SEQ ID NO: 20690 - DNA, 878 bp, Artificial Sequence
  chemically treated genomic DNA (Homo sapiens) CpG-island No: 20690
aaaaaaaacaactttcccttcactctattccactcacgcttctaaaaataaccataaaacaaaaaaccacgaaaacgaaaaacaaaaaaccgccgcgaacaaataaccgcgacacgaaacgaaaaaacgtaaaacgcacaaaaccgccataacgaaaaaacaaaaaaacgcgacgacgaaaaacaaaaaaccgcgacgactaaaaaccacgacgacgaaaataaaaaaaccgcgactacgtaaaacataaaaccgtaacaacgaaaaacaaaaaaccgaatcgaacaaaaaaccaaatcgaacaaaaaaccgcgacgacgaaaaacaaaaaaccgtaacaacgaaaaacaaaaaaccgtaacaacgaaaaacaaaaaaccgaatcgaacaaaaaaccaaatcgaacaaaaaaccgtaacgacgacgaaaaaaacaaaaaaccgcgataacaaaaaaccacgacgacgaaaataaaaaaaccacgacgacgaaaataaaaaaaccgcgacaacgaaaataaaaaaaccacgacgacgaaaataaaaaaaccgcgacaacgaaaataaaaaaaccacgacgacgaaaataaaaaaaccgcgacaacgaaaataaacaaaaaaccaaatcgaacaaaaaaccgcgacgacgacgaaaaaaaataaaaaacaaaaaaccgaatcgaacaaaaaaccgcgacgacaaaaaactaaaaaccgtaacgaacataaacccgaaacgacgaataaaaacaaaaaaccgcgataaaaaaaaaaccgcgacgacgaaaaaaaaaccgaaataatacttaaaacaaaaaaccgcgacgacgaaaaacaaaaaaaccgctataataaaaatcaaaaaaccgcgacgacgcg

SEQ ID NO: 20691 - DNA, 878 bp, Artificial Sequence
  chemically treated genomic DNA (Homo sapiens) CpG-island No: 20691
gaagaaaatagttttttttttattttgttttatttacgtttttgaggatggttatggggtaaaaagttacgggggcggggggtaaaaagtcgtcgcgggtaaataatcgcggtacggggcgggggggcgtggggcgtataaagtcgttatagcgggggagtaaaaagacgcggcggcggggggtaaaaagtcgcggcgattaaaagttacggcggcgggggtgaaaaagtcgcggttgcgtggggtataaagtcgtggtagcgaggggtaaaaagtcgggtcgggtaaaaagttaggtcgggtaaaaagtcgcggcggcggggggtaaaaagtcgtggtagcgaggggtaaaaagtcgtggtagcgaggggtaaaaagtcgggtcgggtaaaaagttaggtcgggtagaaagtcgtggcggcggcggggggggtaaaaagtcgcggtgataaaaagttacggcggcgggggtgaaaaagttacggcggcgggggtgaaaaagtcgcggtagcgggggtgaaaaagttacggcggcgggggtgaaaaagtcgcggtagcgggggtgaaaaagttacggcggcgggggtgaaaaagtcgcggtagcgggggtgggtaaaaagttaggtcgggtaaaaagtcgcggcggcggcgggggggggtggggggtaaaaagtcgggtcgggtaaaaagtcgcggcggtagggaattaaaagtcgtggcgggtataaattcgaggcggcgggtgggggtaaaaaatcgcggtggggaaaaagtcgcggcggcgggggaaaagtcgaggtggtgtttggggtaaaaagtcgcggcggcgaagggtaaaagagtcgttgtgatgagggttaaaaagtcgcggcgacgcg

SEQ ID NO: 20692 - DNA, 878 bp, Artificial Sequence
  chemically treated genomic DNA (Homo sapiens) CpG-island No: 20692
cgcgtcgccgcgactttttaaccctcatcacaacgactcttttacccttcgccgccgcgactttttaccccaaacaccacctcgacttttcccccgccgccgcgactttttccccaccgcgattttttacccccacccgccgcctcgaatttatacccgccacgacttttaattccctaccgccgcgactttttacccgacccgactttttaccccccacccccccccgccgccgccgcgactttttacccgacctaactttttacccacccccgctaccgcgactttttcacccccgccgccgtaactttttcacccccgctaccgcgactttttcacccccgccgccgtaactttttcacccccgctaccgcgactttttcacccccgccgccgtaactttttcacccccgccgccgtaactttttatcaccgcgactttttaccccccccgccgccgccacgactttctacccgacctaactttttacccgacccgactttttacccctcgctaccacgactttttacccctcgctaccacgactttttaccccccgccgccgcgactttttacccgacctaactttttacccgacccgactttttacccctcgctaccacgactttataccccacgcaaccgcgactttttcacccccgccgccgtaacttttaatcgccgcgactttttaccccccgccgccgcgtctttttactcccccgctataacgactttatacgccccacgcccccccgccccgtaccgcgattatttacccgcgacgactttttaccccccgcccccgtaactttttaccccataaccatcctcaaaaacgtaaataaaacaaaataaaaaaaaaactattttcttc

SEQ ID NO: 20693 - DNA, 899 bp, Artificial Sequence
  chemically treated genomic DNA (Homo sapiens) CpG-island No: 20693
gcggtacgcgtgggtttagagtttgttttagcgaggtagtagttgttatgtcgatcgttggagcgtcggtcgcgttttttttgcgtatgcgtagcgagttttttttcgggttgtcgggagttttaggagcgttagggggtgcgtttgcgcgtcgttgttttagcgtattcgggttggagttcgttcgttttttttttcgttcggagtcgtcgaagcgtttcggtgcgttgtatcgtcggaggttgggtagttcgtagcgttgttcggcgttggattttattcggtaggcgtaggttatttatattcggttttgtgcggttgtttttcgtagtattgtacggtcgattttcgttcgtttattgttatcggtcgcgggattggttgggattggttcggtcgagggtattgtttttcggtgtattgttgttcgggcgtcgtagttcgtagtcgttagtttttttcggtcgtgtttttttttcgtggagtcggttgttcgtcggcgtttattgttcggcggtagcggcggagttaggtagtttcgcggcggtcgagcgcgttcgcgtatcgggttttttggttttttttatttagggtagttcgcgtttcggtgcgagggagcggtttttatcgagattcgttcggttcggcggtgcgatgagttttttcggtttcgggtagagcgtggaggtggaaatttttttgaacgatgtagagagtaggaagcgggtcgagtataagacggaggacgggaagaaggagaaatatttttttttttacgacggggagacggttttcgggaaggtgagttttgtttttaagaattttaataagcggttggagtattagggtattaagatcgagtttatcgggtagatcggtgagtcgattttcgggatttt

SEQ ID NO: 20694 - DNA, 899 bp, Artificial Sequence
  chemically treated genomic DNA (Homo sapiens) CpG-island No: 20694
aaaatcccgaaaatcgactcaccgatctacccgataaactcgatcttaataccctaatactccaaccgcttattaaaattcttaaaaacaaaactcaccttcccgaaaaccgtctccccgtcgtaaaaaaaaaaatatttctccttcttcccgtcctccgtcttatactcgacccgcttcctactctctacatcgttcaaaaaaatttccacctccacgctctacccgaaaccgaaaaaactcatcgcaccgccgaaccgaacgaatctcgataaaaaccgctccctcgcaccgaaacgcgaactaccctaaataaaaaaaaccaaaaaacccgatacgcgaacgcgctcgaccgccgcgaaactacctaactccgccgctaccgccgaacaataaacgccgacgaacaaccgactccacgaaaaaaaaacacgaccgaaaaaaactaacgactacgaactacgacgcccgaacaacaatacaccgaaaaacaataccctcgaccgaaccaatcccaaccaatcccgcgaccgataacaataaacgaacgaaaatcgaccgtacaatactacgaaaaacaaccgcacaaaaccgaatataaataacctacgcctaccgaataaaatccaacgccgaacaacgctacgaactacccaacctccgacgatacaacgcaccgaaacgcttcgacgactccgaacgaaaaaaaaaacgaacgaactccaacccgaatacgctaaaacaacgacgcgcaaacgcaccccctaacgctcctaaaactcccgacaacccgaaaaaaaactcgctacgcatacgcaaaaaaaacgcgaccgacgctccaacgatcgacataacaactactacctcgctaaaacaaactctaaacccacgcgtaccgc

SEQ ID NO: 20695 - DNA, 899 bp, Artificial Sequence
  chemically treated genomic DNA (Homo sapiens) CpG-island No: 20695
ggggtttcgggggtcgatttatcgatttgttcgatgaattcgattttgatgttttggtgttttagtcgtttgttggggtttttgagggtaaggtttattttttcggagatcgttttttcgtcgtagaagaggaaatattttttttttttttcgtttttcgttttgtgttcggttcgttttttattttttgtatcgtttagaaggatttttatttttacgttttgttcgaagtcgaagaagtttatcgtatcgtcgggtcgggcgggtttcggtaaggatcgttttttcgtatcggggcgcgggttgttttaggtaaagaaggttagagggttcgatgcgcgagcgcgttcggtcgtcgcggggttgtttggtttcgtcgttgtcgtcgggtagtgggcgtcgacggatagtcggttttacgggggaggggtacggtcgggggaggttggcggttgcgggttgcggcgttcgagtagtaatgtatcgaggagtagtgttttcggtcgagttagttttagttagtttcgcggtcggtggtagtgggcgggcgagggtcggtcgtgtaatgttgcggggggtagtcgtatagagtcgggtgtgggtggtttgcgtttgtcgggtggggtttagcgtcgagtagcgttgcgagttgtttagttttcggcggtgtaacgtatcgaggcgtttcggcggtttcgggcgggggagggggcgggcgagttttagttcggatgcgttggagtagcggcgcgtaggcgtattttttaacgtttttgggattttcggtagttcggaggagagttcgttgcgtatgcgtagggagagcgcggtcggcgttttagcggtcggtatggtagttgttatttcgttgggataggttttgggtttacgcgtgtcgt

SEQ ID NO: 20696 - DNA, 899 bp, Artificial Sequence
  chemically treated genomic DNA (Homo sapiens) CpG-island No: 20696
acgacacgcgtaaacccaaaacctatcccaacgaaataacaactaccataccgaccgctaaaacgccgaccgcgctctccctacgcatacgcaacgaactctcctccgaactaccgaaaatcccaaaaacgttaaaaaatacgcctacgcgccgctactccaacgcatccgaactaaaactcgcccgccccctcccccgcccgaaaccgccgaaacgcctcgatacgttacaccgccgaaaactaaacaactcgcaacgctactcgacgctaaaccccacccgacaaacgcaaaccacccacacccgactctatacgactaccccccgcaacattacacgaccgaccctcgcccgcccactaccaccgaccgcgaaactaactaaaactaactcgaccgaaaacactactcctcgatacattactactcgaacgccgcaacccgcaaccgccaacctcccccgaccgtacccctcccccgtaaaaccgactatccgtcgacgcccactacccgacgacaacgacgaaaccaaacaaccccgcgacgaccgaacgcgctcgcgcatcgaaccctctaaccttctttacctaaaacaacccgcgccccgatacgaaaaaacgatccttaccgaaacccgcccgacccgacgatacgataaacttcttcgacttcgaacaaaacgtaaaaataaaaatccttctaaacgatacaaaaaataaaaaacgaaccgaacacaaaacgaaaaacgaaaaaaaaaaaaaatatttcctcttctacgacgaaaaaacgatctccgaaaaaataaaccttaccctcaaaaaccccaacaaacgactaaaacaccaaaacatcaaaatcgaattcatcgaacaaatcgataaatcgacccccgaaacccc

SEQ ID NO: 20697 - DNA, 630 bp, Artificial Sequence
  chemically treated genomic DNA (Homo sapiens) CpG-island No: 20697
cgagcgtaacggaggtcgaaggcgtttagatttttagttgaacgcggagttgcggcggttatgttgtggagcggttgtcggcgtttcggggcgcgtttcggttgtttgttcggcggttttcgggttttcgtttagatcggttatcggagtttgattttttgtatcgatcgtaaggattttttggcgggtagtaggataggtgtttagaatttcggcggatatatgttcgcgaggggttgtagttttttcgttttatttagttatttcggcgttagtttttttttcggttagttattttttcggtttggttttttatttcggtcggttattttcggtttggttgtttttttcggtcggttattattattcgggtttttatttggttcgttatttttgttcgggttttttttcggtcggttattttcgtttcggttttttttcggtcggttattttcgtttcggttttttttcggtcggttatttttcgtaggttttttttcggtcggttattttttcgtaggttttttttcggttcgggtttttttgcggtcggttattttcggatgtttagagaagtgaagaaatttggggtttggttgttgttgggttggttggtttttaattataata

SEQ ID NO: 20698 - DNA, 630 bp, Artificial Sequence
  chemically treated genomic DNA (Homo sapiens) CpG-island No: 20698
tattataattaaaaaccaaccaacccaacaacaaccaaaccccaaatttcttcacttctctaaacatccgaaaataaccgaccgcaaaaaaacccgaaccgaaaaaaaacctacgaaaaaataaccgaccgaaaaaaaacctacgaaaaataaccgaccgaaaaaaaaccgaaacgaaaataaccgaccgaaaaaaaaccgaaacgaaaataaccgaccgaaaaaaaacccgaacaaaaataacgaaccaaataaaaacccgaataataataaccgaccgaaaaaaacaaccaaaccgaaaataaccgaccgaaataaaaaaccaaaccgaaaaaataactaaccgaaaaaaaaactaacgccgaaataactaaataaaacgaaaaaactacaacccctcgcgaacatatatccgccgaaattctaaacacctatcctactacccgccaaaaaatccttacgatcgatacaaaaaatcaaactccgataaccgatctaaacgaaaacccgaaaaccgccgaacaaacaaccgaaacgcgccccgaaacgccgacaaccgctccacaacataaccgccgcaactccgcgttcaactaaaaatctaaacgccttcgacctccgttacgctcg

SEQ ID NO: 20699 - DNA, 630 bp, Artificial Sequence
  chemically treated genomic DNA (Homo sapiens) CpG-island No: 20699
tgttatgattaaaaattaattaatttaataataattaagttttaagtttttttatttttttaagtattcgagggtgatcggtcgtaggaggattcgggtcggaggggaatttgcggggggatgatcggtcggaggggaatttgcggggggtgatcggtcggaggaggatcggggcgggggtgatcggtcggaggaggatcggggcgggggtgatcggtcggaggaggattcgggtaggggtgacgggttagatggggattcggatggtggtgatcgatcggagggggtagttaggtcgggggtgatcggtcggagtagggagttaggtcgggggggtgattggtcggaaggggagttgacgtcggggtgattggatggaacggggagattgtagtttttcgcggatatatgttcgtcggggttttggatatttgttttattgttcgttaggagatttttacggtcgatgtaggaggttaagtttcggtggtcggtttggacgaggattcggagatcgtcgggtaggtagtcgaggcgcgtttcgaaacgtcggtagtcgttttatagtatagtcgtcgtagtttcgcgtttagttaagagtttgaacgttttcgattttcgttgcgttcg

SEQ ID NO: 20700 - DNA, 630 bp, Artificial Sequence
  chemically treated genomic DNA (Homo sapiens) CpG-island No: 20700
cgaacgcaacgaaaatcgaaaacgttcaaactcttaactaaacgcgaaactacgacgactatactataaaacgactaccgacgtttcgaaacgcgcctcgactacctacccgacgatctccgaatcctcgtccaaaccgaccaccgaaacttaacctcctacatcgaccgtaaaaatctcctaacgaacaataaaacaaatatccaaaaccccgacgaacatatatccgcgaaaaactacaatctccccgttccatccaatcaccccgacgtcaactccccttccgaccaatcacccccccgacctaactccctactccgaccgatcacccccgacctaactaccccctccgatcgatcaccaccatccgaatccccatctaacccgtcacccctacccgaatcctcctccgaccgatcacccccgccccgatcctcctccgaccgatcacccccgccccgatcctcctccgaccgatcaccccccgcaaattcccctccgaccgatcatccccccgcaaattcccctccgacccgaatcctcctacgaccgatcaccctcgaatacttaaaaaaataaaaaaacttaaaacttaattattattaaattaattaatttttaatcataaca

SEQ ID NO: 20701 - DNA, 873 bp, Artificial Sequence
  chemically treated genomic DNA (Homo sapiens) CpG-island No: 20701
aaagcgttcgtcgcgttcgtatttgttgtgaagttgtgttcgggtcgttttcgtcgagggaacggtttttttaaggttttgcgttttaattttcgttcgtttgttaagaggtagtcgtgtcggggagttagagtttttcggggatttttttttgtttttcgtggttttttgtggaattttcgttttaggatttgtacgtcgtttttagtcgcgcgcgcggtacggagatcgttcgttgtgtttcgcgttgcgtttttttcgtttttttttcgcgtaggtttttttgtgttagtcggttgtcgatttaggttaggaagttcgaggtcggggcgttattttaagggttttttcgtttttttttcgagggtagagaggcgttcgcgttcggacgtattgcgggaatatttggagtttcggcggagttcggttgttttcgcgggagggagttcgacgcgtatttttgggattcggattcggcgttcgcgtttcgggacggatttttgtttcggttgtaggcgtagcgcgtagatttgagtttgtttcgcggaatcggggttcgagtttcggttcgagcgcggcgtcggggttagcggagaggggcggaagtcgtaagggattttcggcgtttcggtttggtcgcgatgaagttttcgtttttttttaggtgacggatcgtcgttgtcgtttcgggttgtttattatttcggcgcgtgttcgggagtttttatttttttcgggttttgtggtcggttacgcgttttaggtacgcgtcgcgtcgggtcgcgttattaagttcgttgtttttagtttttttcggtagattttttggttatttttattttgcggaggggtcgtttattagatgttagaaaa

SEQ ID NO: 20702 - DNA, 873 bp, Artificial Sequence
  chemically treated genomic DNA (Homo sapiens) CpG-island No: 20702
ttttctaacatctaataaacgacccctccgcaaaataaaaataaccaaaaaatctaccgaaaaaaactaaaaacaacgaacttaataacgcgacccgacgcgacgcgtacctaaaacgcgtaaccgaccacaaaacccgaaaaaaataaaaactcccgaacacgcgccgaaataataaacaacccgaaacgacaacgacgatccgtcacctaaaaaaaaacgaaaacttcatcgcgaccaaaccgaaacgccgaaaatcccttacgacttccgcccctctccgctaaccccgacgccgcgctcgaaccgaaactcgaaccccgattccgcgaaacaaactcaaatctacgcgctacgcctacaaccgaaacaaaaatccgtcccgaaacgcgaacgccgaatccgaatcccaaaaatacgcgtcgaactccctcccgcgaaaacaaccgaactccgccgaaactccaaatattcccgcaatacgtccgaacgcgaacgcctctctaccctcgaaaaaaaaacgaaaaaacccttaaaataacgccccgacctcgaacttcctaacctaaatcgacaaccgactaacacaaaaaaacctacgcgaaaaaaaaacgaaaaaaacgcaacgcgaaacacaacgaacgatctccgtaccgcgcgcgcgactaaaaacgacgtacaaatcctaaaacgaaaattccacaaaaaaccacgaaaaacaaaaaaaaatccccgaaaaactctaactccccgacacgactacctcttaacaaacgaacgaaaattaaaacgcaaaaccttaaaaaaaccgttccctcgacgaaaacgacccgaacacaacttcacaacaaatacgaacgcgacgaacgcttt

SEQ ID NO: 20703 - DNA, 873 bp, Artificial Sequence
  chemically treated genomic DNA (Homo sapiens) CpG-island No: 20703
ttttttggtatttggtgaacggttttttcgtagggtgggggtagttaggggatttgtcgaggaaagttggggatagcgggtttggtggcgcggttcggcgcggcgcgtgtttggggcgcgtggtcggttatagaattcggggagggtggaggttttcgggtacgcgtcggggtggtgggtagttcgggacggtagcggcgattcgttatttgaggaggggcggggattttatcgcggttaggtcgaggcgtcgagggttttttgcggttttcgttttttttcgttggtttcgacgtcgcgttcgggtcgggattcgagtttcggtttcgcggggtaggtttaggtttgcgcgttgcgtttgtagtcgaggtagaaattcgtttcgaggcgcgggcgtcgggttcgggttttaaggatgcgcgtcgggttttttttcgcggggatagtcgagtttcgtcggggttttaggtgttttcgtagtgcgttcgggcgcggacgtttttttgttttcggaggggaagcgggagggtttttggggtaacgtttcgatttcgggttttttaatttgggtcgatagtcggttggtatagggaggtttgcgcgggagaggggcggagagagcgtagcgcggggtatagcgggcggttttcgtgtcgcgcgcgcgattggaaacggcgtgtagattttaaaacgagggttttatagagggttacgaggggtaggagagagttttcggagaattttagtttttcgatacggttattttttggtaaacgagcgagaattggggcgtagagttttgggagggtcgttttttcggcgggagcggttcgagtatagttttatagtagatgcgggcgcggcgggcgtttt

SEQ ID NO: 20704 - DNA, 873 bp, Artificial Sequence
  chemically treated genomic DNA (Homo sapiens) CpG-island No: 20704
aaaacgcccgccgcgcccgcatctactataaaactatactcgaaccgctcccgccgaaaaaacgaccctcccaaaactctacgccccaattctcgctcgtttaccaaaaaataaccgtatcgaaaaactaaaattctccgaaaactctctcctacccctcgtaaccctctataaaaccctcgttttaaaatctacacgccgtttccaatcgcgcgcgcgacacgaaaaccgcccgctataccccgcgctacgctctctccgcccctctcccgcgcaaacctccctataccaaccgactatcgacccaaattaaaaaacccgaaatcgaaacgttaccccaaaaaccctcccgcttcccctccgaaaacaaaaaaacgtccgcgcccgaacgcactacgaaaacacctaaaaccccgacgaaactcgactatccccgcgaaaaaaaacccgacgcgcatccttaaaacccgaacccgacgcccgcgcctcgaaacgaatttctacctcgactacaaacgcaacgcgcaaacctaaacctaccccgcgaaaccgaaactcgaatcccgacccgaacgcgacgtcgaaaccaacgaaaaaaaacgaaaaccgcaaaaaaccctcgacgcctcgacctaaccgcgataaaatccccgcccctcctcaaataacgaatcgccgctaccgtcccgaactacccaccaccccgacgcgtacccgaaaacctccaccctccccgaattctataaccgaccacgcgccccaaacacgcgccgcgccgaaccgcgccaccaaacccgctatccccaactttcctcgacaaatcccctaactacccccaccctacgaaaaaaccgttcaccaaataccaaaaaa

SEQ ID NO: 20705 - DNA, 503 bp, Artificial Sequence
  chemically treated genomic DNA (Homo sapiens) CpG-island No: 20705
ggcggcggatttcgtttggtcgagtttaagtatcgcgtgtaggagagaagtatacgtatttttcgacggtttagtcgcggcgtacgggattggtgaggtgtagttatatcggcgattattagcgcgcggtcggtatcggtaggttttttacgcgtcggtttttacggcgagtcggggcggggtttggcgcggagtattgtgggaaaggcgtggaggacgttgtttggggagattcgttgcgggtttagcgggcgttgcggcggtggggtggagagggcggtgtaggtttaggttgacgtggcggtgtgcgcgggattcggtttcggtttcggttttaattcggagttgagggaattgttttggttaagtagttcgcgtttttttattaatgcggtcggcgtttgtcgcgggcggggagggtggatggcgaagttcgtttttttttgttttcgttgttagggtgacggggaaatttagagggtgggttttggggttgagttttt

SEQ ID NO: 20706 - DNA, 503 bp, Artificial Sequence
  chemically treated genomic DNA (Homo sapiens) CpG-island No: 20706
aaaaactcaaccccaaaacccaccctctaaatttccccgtcaccctaacaacgaaaacaaaaaaaaacgaacttcgccatccaccctccccgcccgcgacaaacgccgaccgcattaataaaaaaacgcgaactacttaaccaaaacaattccctcaactccgaattaaaaccgaaaccgaaaccgaatcccgcgcacaccgccacgtcaacctaaacctacaccgccctctccaccccaccgccgcaacgcccgctaaacccgcaacgaatctccccaaacaacgtcctccacgcctttcccacaatactccgcgccaaaccccgccccgactcgccgtaaaaaccgacgcgtaaaaaacctaccgataccgaccgcgcgctaataatcgccgatataactacacctcaccaatcccgtacgccgcgactaaaccgtcgaaaaatacgtatacttctctcctacacgcgatacttaaactcgaccaaacgaaatccgccgcc

SEQ ID NO: 20707 - DNA, 503 bp, Artificial Sequence
  chemically treated genomic DNA (Homo sapiens) CpG-island No: 20707
gggaatttaattttaaaatttattttttgggttttttcgttattttggtaacggaagtaggaagaggcgggtttcgttatttatttttttcgttcgcggtaggcgtcggtcgtattggtgagggggcgcgggttgtttggttagggtagtttttttagtttcgggttggagtcggagtcggagtcggatttcgcgtatatcgttacgttaatttaaatttatatcgttttttttattttatcgtcgtagcgttcgttgggttcgtagcgggtttttttaggtagcgttttttacgttttttttataatgtttcgcgttaggtttcgtttcggttcgtcgtggagatcggcgcgtgaggaatttatcggtatcggtcgcgcgttggtagtcgtcggtgtggttgtattttattaatttcgtgcgtcgcggttgggtcgtcggagagtgcgtgtgttttttttttgtacgcggtgtttgggttcggttaggcggggttcgtcgtt

SEQ ID NO: 20708 - DNA, 503 bp, Artificial Sequence
  chemically treated genomic DNA (Homo sapiens) CpG-island No: 20708
aacgacgaaccccgcctaaccgaacccaaacaccgcgtacaaaaaaaaaacacacgcactctccgacgacccaaccgcgacgcacgaaattaataaaatacaaccacaccgacgactaccaacgcgcgaccgataccgataaattcctcacgcgccgatctccacgacgaaccgaaacgaaacctaacgcgaaacattataaaaaaaacgtaaaaaacgctacctaaaaaaacccgctacgaacccaacgaacgctacgacgataaaataaaaaaaacgatataaatttaaattaacgtaacgatatacgcgaaatccgactccgactccgactccaacccgaaactaaaaaaactaccctaaccaaacaacccgcgccccctcaccaatacgaccgacgcctaccgcgaacgaaaaaaataaataacgaaacccgcctcttcctacttccgttaccaaaataacgaaaaaacccaaaaaataaattttaaaattaaattccc

SEQ ID NO: 20709 - DNA, 653 bp, Artificial Sequence
  chemically treated genomic DNA (Homo sapiens) CpG-island No: 20709
gtttgacggttcgcggttgggatcgaattcggattgcgagatatttttcgtttcgtaggcgttttttagtcgttgaggttcggttcggtttttatcgtcggagtttgataaagaaagtttttcggttcgagttttttacgtatttatcggcgtcgacgttggcggcgattcggtttttcgtcgtttttagttttttgcgggggtcggtttttgggtcggttcgggcgtcggcggcggttattgttttatatttacggggttcgggtcgcgttcgtttcgagttaacggttttattagttaggcgcgtgcgtcggtttcgcgcgttatgttttcgtcgtgttgcgcgtcgtcgcggcgatttttattgttttttaatcgcgtacgttttcgtaggtttatatacgaatcgcgtacgcgcgcgttcgacgcgtttcgtttttcgcgcgttcggtttcgggttttttgtagttggtcgttgtttttagtgttttatttattttcgtcggaatcgttcgattgggcgggtgagcgcgcggttttcgatttagtatcgtcgtttgtttttttgtagattatttttgattcgatttttcggttatttttttatattgttttttttattttttttacggcgcggggtttaggacgagggt

SEQ ID NO: 20710 - DNA, 653 bp, Artificial Sequence
  chemically treated genomic DNA (Homo sapiens) CpG-island No: 20710
accctcgtcctaaaccccgcgccgtaaaaaaaataaaaaaaacaatataaaaaaataaccgaaaaatcgaatcaaaaataatctacaaaaaaacaaacgacgatactaaatcgaaaaccgcgcgctcacccgcccaatcgaacgattccgacgaaaataaataaaacactaaaaacaacgaccaactacaaaaaacccgaaaccgaacgcgcgaaaaacgaaacgcgtcgaacgcgcgcgtacgcgattcgtatataaacctacgaaaacgtacgcgattaaaaaacaataaaaatcgccgcgacgacgcgcaacacgacgaaaacataacgcgcgaaaccgacgcacgcgcctaactaataaaaccgttaactcgaaacgaacgcgacccgaaccccgtaaatataaaacaataaccgccgccgacgcccgaaccgacccaaaaaccgacccccgcaaaaaactaaaaacgacgaaaaaccgaatcgccgccaacgtcgacgccgataaatacgtaaaaaactcgaaccgaaaaactttctttatcaaactccgacgataaaaaccgaaccgaacctcaacgactaaaaaacgcctacgaaacgaaaaatatctcgcaatccgaattcgatcccaaccgcgaaccgtcaaac

SEQ ID NO: 20711 - DNA, 653 bp, Artificial Sequence
  chemically treated genomic DNA (Homo sapiens) CpG-island No: 20711
attttcgttttaggtttcgcgtcgtgggggaagtgaaaggggtagtgtggggaaatggtcgagaggtcgggttaggggtggtttgtagagaggtaggcggcggtgttgagtcgggaatcgcgcgtttattcgtttagtcggacggtttcggcgggggtgggtgagatattgggaatagcggttagttgtagagggttcgaggtcgggcgcgcggggagcggggcgcgtcgaacgcgcgcgtgcgcggttcgtgtgtgggtttgcgggggcgtgcgcggttggggggtagtgagggtcgtcgcggcggcgcgtagtacggcgggaatatggcgcgcggaatcggcgtacgcgtttagttggtgggatcgttagttcgaggcggacgcggttcggatttcgtggatatggagtagtggtcgtcgtcggcgttcgagtcggtttaagggtcgattttcgtaaggagttgaaggcggcgggagatcgagtcgtcgttagcgtcggcgtcggtgagtgcgtgaggggttcgggtcgggagattttttttgttaaatttcggcggtgggagtcgggtcgggttttagcgattgaggagcgtttgcgaggcggagggtgtttcgtagttcgggttcgattttagtcgcgagtcgttaggt

SEQ ID NO: 20712 - DNA, 653 bp, Artificial Sequence
  chemically treated genomic DNA (Homo sapiens) CpG-island No: 20712
acctaacgactcgcgactaaaatcgaacccgaactacgaaacaccctccgcctcgcaaacgctcctcaatcgctaaaacccgacccgactcccaccgccgaaatttaacaaaaaaaatctcccgacccgaacccctcacgcactcaccgacgccgacgctaacgacgactcgatctcccgccgccttcaactccttacgaaaatcgacccttaaaccgactcgaacgccgacgacgaccactactccatatccacgaaatccgaaccgcgtccgcctcgaactaacgatcccaccaactaaacgcgtacgccgattccgcgcgccatattcccgccgtactacgcgccgccgcgacgaccctcactaccccccaaccgcgcacgcccccgcaaacccacacacgaaccgcgcacgcgcgcgttcgacgcgccccgctccccgcgcgcccgacctcgaaccctctacaactaaccgctattcccaatatctcacccacccccgccgaaaccgtccgactaaacgaataaacgcgcgattcccgactcaacaccgccgcctacctctctacaaaccacccctaacccgacctctcgaccatttccccacactacccctttcacttcccccacgacgcgaaacctaaaacgaaaat

SEQ ID NO: 20713 - DNA, 535 bp, Artificial Sequence
  chemically treated genomic DNA (Homo sapiens) CpG-island No: 20713
gtttttttcgtttatttggatgcggtattttacgtcggtggtgtttattttgttggcgatgttgacggtgtttttttagatgtcgtatagtagtttggtggtgtcgatgatttcggtcgtgaggggtttatggttgaagtcgacgcggagtttgaagttgaattatagtatgttgttgttgaagtcgtttattacgcgtattatttttttggcgaattcgaataggatttgtaggtgtttttgcgggtggttgtcgttttgggtttgcgcggtgtttagttttgacgtcgttatgtacgtggtttcgatggttttgattttttcgatgttgttgtagttcggtttgtttaggagttcgttaaagttttcgatgagttcgttgaggattcggtagtattttttgtcgttttcgtagtttttttcgtagaattcgttgaagttgacgatgttggcgaagattattttttcgttgtcgtggtttttggagtaggtttgggatatttttagttgtttagttacgtggtaggggatgatg

SEQ ID NO: 20714 - DNA, 535 bp, Artificial Sequence
  chemically treated genomic DNA (Homo sapiens) CpG-island No: 20714
catcatcccctaccacgtaactaaacaactaaaaatatcccaaacctactccaaaaaccacgacaacgaaaaaataatcttcgccaacatcgtcaacttcaacgaattctacgaaaaaaactacgaaaacgacaaaaaatactaccgaatcctcaacgaactcatcgaaaactttaacgaactcctaaacaaaccgaactacaacaacatcgaaaaaatcaaaaccatcgaaaccacgtacataacgacgtcaaaactaaacaccgcgcaaacccaaaacgacaaccacccgcaaaaacacctacaaatcctattcgaattcgccaaaaaaataatacgcgtaataaacgacttcaacaacaacatactataattcaacttcaaactccgcgtcgacttcaaccataaacccctcacgaccgaaatcatcgacaccaccaaactactatacgacatctaaaaaaacaccgtcaacatcgccaacaaaataaacaccaccgacgtaaaataccgcatccaaataaacgaaaaaaac

SEQ ID NO: 20715 - DNA, 535 bp, Artificial Sequence
  chemically treated genomic DNA (Homo sapiens) CpG-island No: 20715
tattattttttattacgtggttgagtagttgaaggtgttttagatttattttaagaattacgatagcggaggggtgattttcgttagtatcgttaattttagcgagttttacgaggagaattacgagggcggtaaggagtgttatcgggtttttaacgagtttatcggggattttgacgagtttttaagtaagtcggattatagtagtatcgagaagattaagattatcggagttacgtatatggcggcgttagggttgaatatcgcgtaggtttaggacggtagttattcgtaggagtatttgtagattttgttcgagttcgttaaggagatgatgcgcgtggtggacgattttaataataatatgttgtggtttaattttaagtttcgcgtcggttttaattatgggttttttacggtcggggttatcggtattattaagttgttgtacgatatttggggagatatcgttaatatcgttagtaggatggatattatcggcgtggagtgtcgtatttaggtgagcgaagagagt

SEQ ID NO: 20716 - DNA, 535 bp, Artificial Sequence
  chemically treated genomic DNA (Homo sapiens) CpG-island No: 20716
actctcttcgctcacctaaatacgacactccacgccgataatatccatcctactaacgatattaacgatatctccccaaatatcgtacaacaacttaataataccgataaccccgaccgtaaaaaacccataattaaaaccgacgcgaaacttaaaattaaaccacaacatattattattaaaatcgtccaccacgcgcatcatctccttaacgaactcgaacaaaatctacaaatactcctacgaataactaccgtcctaaacctacgcgatattcaaccctaacgccgccatatacgtaactccgataatcttaatcttctcgatactactataatccgacttacttaaaaactcgtcaaaatccccgataaactcgttaaaaacccgataacactccttaccgccctcgtaattctcctcgtaaaactcgctaaaattaacgatactaacgaaaatcacccctccgctatcgtaattcttaaaataaatctaaaacaccttcaactactcaaccacgtaataaaaaataata

SEQ ID NO: 20717 - DNA, 1570 bp, Artificial Sequence
  chemically treated genomic DNA (Homo sapiens) CpG-island No: 20717
gaatgcggttttacgttaggtttggttttcgaattcgttaggcgcgcgcgtacggtagaagcgcgcgttttcgtttttcgcgagcgcgttttttattttttttcgtcgtacgcgtcgagtttcggcgttttcgttcgtttcgcgtttttatagttcgagcgtcgtttagttgattcgcgggcgttagacgcggcggtttttagttcgcgagcgtagttgcggttgcgagggttttttaggtcgatatttttttcgcgttttttttttattcggtcgggtttcggattcgtcgcgcgcgagttcgcggtcgtttttttcgcgtcgagcgaggaggtaggttgcggcggcgagaggcggttgcgcggttatgggcgcgttagtgtcgttttagggcgggcgtatagattatagtcggagcggtggtggtagttttcgtagaaagttttttcgggcggcggcggcggcggtttttggagtagcgcggtcgggatgagcgggagttgcgcggcgttcggttcgggttcgggttttttttcggtcgtttgtcgtttcgcgtattatttcgtgttgtgcgggatcgacgcggatagcgggttggagtttgacgagttggcgggtaaggttagggttgcggcggcgttgagtttttttaggggcgcgggggacgttgtggggacgcgcgggaggcggggtgtaggttttagataaagttagttttcggtggcgttttttcgtcgttttttggtcgaattggcgttcgggcgcgatttaatgatattgttatttatttcgcgtgcgggttttgcggttgcgtttatcggggttttcgtttttaggcgttgggttattaataataggcgcgggggtggttttaagggtacggatttcgtttggcgcgtcggttttttcgtttgtagtcgtattcggaggcggtcggtgagttatcgggcgcgtaggttgtttttcgatcgtcgtgtttgttttttattcgttagttattcggtttcggtcgcgaagtttcggtttcgtacgtgacgcggttttcgggttttttcgggagagggggagtcggatttagttcggttttcgtcggggtagcgttcgcggaggagtcggtggtcgtgcggagcgagcgcggggcggggatcggtcggattttgttttttgcgtcgtttgtcgttttgcggtgtcggttaagttattttttggaattttgtggatttggtcgcgtttgggagttggtagggatttttggacgttcgggatttagtatcgcgttttgttgatattgtttatattgttttcgagtttaaatttagttgggtgtatcgtgtgttagtgtttggttttttcggaggggtatcggttttttcgtttgatttatttgatggcgtagtgcggggttgtgttgggtaaacgacgtcgttaaaaggggtcgttaaagggcgatgggcgggggtagggtagcggagtgcgtagtgtcgagaggaggtcggggagaaataattgattttattttttacgtttgtttttttttgtttgttttcgcgggatttgaattttgatttgt

SEQ ID NO: 20718 - DNA, 1570 bp, Artificial Sequence
  chemically treated genomic DNA (Homo sapiens) CpG-island No: 20718
acaaatcaaaattcaaatcccgcgaaaacaaacaaaaaaaaacaaacgtaaaaaataaaatcaattatttctccccgacctcctctcgacactacgcactccgctaccctacccccgcccatcgccctttaacgaccccttttaacgacgtcgtttacccaacacaaccccgcactacgccatcaaataaatcaaacgaaaaaaccgatacccctccgaaaaaaccaaacactaacacacgatacacccaactaaatttaaactcgaaaacaatataaacaatatcaacaaaacgcgatactaaatcccgaacgtccaaaaatccctaccaactcccaaacgcgaccaaatccacaaaattccaaaaaataacttaaccgacaccgcaaaacgacaaacgacgcaaaaaacaaaatccgaccgatccccgccccgcgctcgctccgcacgaccaccgactcctccgcgaacgctaccccgacgaaaaccgaactaaatccgactccccctctcccgaaaaaacccgaaaaccgcgtcacgtacgaaaccgaaacttcgcgaccgaaaccgaataactaacgaataaaaaacaaacacgacgatcgaaaaacaacctacgcgcccgataactcaccgaccgcctccgaatacgactacaaacgaaaaaaccgacgcgccaaacgaaatccgtacccttaaaaccacccccgcgcctattattaataacccaacgcctaaaaacgaaaaccccgataaacgcaaccgcaaaacccgcacgcgaaataaataacaatatcattaaatcgcgcccgaacgccaattcgaccaaaaaacgacgaaaaaacgccaccgaaaactaactttatctaaaacctacaccccgcctcccgcgcgtccccacaacgtcccccgcgcccctaaaaaaactcaacgccgccgcaaccctaaccttacccgccaactcgtcaaactccaacccgctatccgcgtcgatcccgcacaacacgaaataatacgcgaaacgacaaacgaccgaaaaaaaacccgaacccgaaccgaacgccgcgcaactcccgctcatcccgaccgcgctactccaaaaaccgccgccgccgccgcccgaaaaaactttctacgaaaactaccaccaccgctccgactataatctatacgcccgccctaaaacgacactaacgcgcccataaccgcgcaaccgcctctcgccgccgcaacctacctcctcgctcgacgcgaaaaaaacgaccgcgaactcgcgcgcgacgaatccgaaacccgaccgaataaaaaaaaaacgcgaaaaaaatatcgacctaaaaaaccctcgcaaccgcaactacgctcgcgaactaaaaaccgccgcgtctaacgcccgcgaatcaactaaacgacgctcgaactataaaaacgcgaaacgaacgaaaacgccgaaactcgacgcgtacgacgaaaaaaaataaaaaacgcgctcgcgaaaaacgaaaacgcgcgcttctaccgtacgcgcgcgcctaacgaattcgaaaaccaaacctaacgtaaaaccgcattc

SEQ ID NO: 20719 - DNA, 1570 bp, Artificial Sequence
  chemically treated genomic DNA (Homo sapiens) CpG-island No: 20719
ataaattaagatttagatttcgcggaggtaagtagaaaggaataggcgtgaaaaatgaaattagttgttttttttcggttttttttcgatattgcgtatttcgttgttttgttttcgtttatcgttttttagcggttttttttaacggcgtcgtttgtttagtatagtttcgtattgcgttattaaatgagttaagcggaaggatcggtattttttcgggaaaattaggtattaatatacggtgtatttaattgaatttaaattcgggaatagtgtaggtagtgttaataaagcgcggtgttgggtttcgagcgtttaaaggtttttgttagtttttagacgcggttaaatttataggattttaaaaggtgatttggtcggtatcgtagagcggtaggcggcgtagagggtagagttcgatcggttttcgtttcgcgttcgtttcgtacggttatcggttttttcgcggacgttatttcggcgggagtcgagttgagttcgattttttttttttcgaagaggttcgaaagtcgcgttacgtgcggggtcgaaatttcgcggtcggggtcgggtggttggcgggtgggaggtaggtacggcggtcggggggtagtttgcgcgttcggtgatttatcggtcgttttcgagtgcggttgtaggcgaaggggtcggcgcgttaggcggggttcgtgtttttggggttattttcgcgtttgttattaataatttagcgtttggaggcgaaagtttcggtgggcgtagtcgtaaagttcgtacgcggaataaataataatgttattaaatcgcgttcgagcgttagttcggttagaaagcggcgggagggcgttatcgggagttgattttgtttggagtttgtatttcgtttttcgcgcgtttttatagcgtttttcgcgtttttgagggggtttagcgtcgtcgtagttttggttttattcgttagttcgttaggttttagttcgttgttcgcgtcgatttcgtatagtacgaagtagtgcgcgaagcggtaggcggtcggggaggagttcgagttcgggtcgggcgtcgcgtagttttcgtttatttcggtcgcgttgttttaggggtcgtcgtcgtcgtcgttcgggaaggttttttgcggaggttgttattatcgtttcggttgtggtttgtgcgttcgttttagggcgatattggcgcgtttatggtcgcgtagtcgtttttcgtcgtcgtagtttgttttttcgttcggcgcgggggaagcggtcgcgggttcgcgcgcggcgggttcggagttcggtcgggtgggggaggggcgcggggggagtgtcggtttgagaggttttcgtagtcgtagttgcgttcgcgagttgagagtcgtcgcgtttggcgttcgcgggttagttgagcggcgttcgggttgtgggagcgcggggcgggcgggggcgtcggggttcggcgcgtgcgacggagaggggtggggggcgcgttcgcgagggacggaggcgcgcgtttttatcgtgcgcgcgcgtttagcgggttcggaggttaagtttggcgtggggtcgtattt

SEQ ID NO: 20720 - DNA, 1570 bp, Artificial Sequence
  chemically treated genomic DNA (Homo sapiens) CpG-island No: 20720
aaatacgaccccacgccaaacttaacctccgaacccgctaaacgcgcgcgcacgataaaaacgcgcgcctccgtccctcgcgaacgcgccccccacccctctccgtcgcacgcgccgaaccccgacgcccccgcccgccccgcgctcccacaacccgaacgccgctcaactaacccgcgaacgccaaacgcgacgactctcaactcgcgaacgcaactacgactacgaaaacctctcaaaccgacactccccccgcgcccctcccccacccgaccgaactccgaacccgccgcgcgcgaacccgcgaccgcttcccccgcgccgaacgaaaaaacaaactacgacgacgaaaaacgactacgcgaccataaacgcgccaatatcgccctaaaacgaacgcacaaaccacaaccgaaacgataataacaacctccgcaaaaaaccttcccgaacgacgacgacgacgacccctaaaacaacgcgaccgaaataaacgaaaactacgcgacgcccgacccgaactcgaactcctccccgaccgcctaccgcttcgcgcactacttcgtactatacgaaatcgacgcgaacaacgaactaaaacctaacgaactaacgaataaaaccaaaactacgacgacgctaaaccccctcaaaaacgcgaaaaacgctataaaaacgcgcgaaaaacgaaatacaaactccaaacaaaatcaactcccgataacgccctcccgccgctttctaaccgaactaacgctcgaacgcgatttaataacattattatttattccgcgtacgaactttacgactacgcccaccgaaactttcgcctccaaacgctaaattattaataacaaacgcgaaaataaccccaaaaacacgaaccccgcctaacgcgccgaccccttcgcctacaaccgcactcgaaaacgaccgataaatcaccgaacgcgcaaactaccccccgaccgccgtacctacctcccacccgccaaccacccgaccccgaccgcgaaatttcgaccccgcacgtaacgcgactttcgaacctcttcgaaaaaaaaaaaatcgaactcaactcgactcccgccgaaataacgtccgcgaaaaaaccgataaccgtacgaaacgaacgcgaaacgaaaaccgatcgaactctaccctctacgccgcctaccgctctacgataccgaccaaatcaccttttaaaatcctataaatttaaccgcgtctaaaaactaacaaaaacctttaaacgctcgaaacccaacaccgcgctttattaacactacctacactattcccgaatttaaattcaattaaatacaccgtatattaatacctaattttcccgaaaaaataccgatccttccgcttaactcatttaataacgcaatacgaaactatactaaacaaacgacgccgttaaaaaaaaccgctaaaaaacgataaacgaaaacaaaacaacgaaatacgcaatatcgaaaaaaaaccgaaaaaaaacaactaatttcatttttcacgcctattcctttctacttacctccgcgaaatctaaatcttaatttat

SEQ ID NO: 20721 - DNA, 705 bp, Artificial Sequence
  chemically treated genomic DNA (Homo sapiens) CpG-island No: 20721
gtttgtcgcgcgcgcgcgcgcgcgcgcgacgattgggtatttgttttggtttttgtatagattttttttcggggattttcgtttaggagtgaagtatagagacggatttttttcgggaaaatttttgcgcgcgtatatttatatatatagagagagatttggggataaatacgtcgcgagtttcggttgtttcgttaatttcgggcgcgggaagaaagcgggcgggtaggttagtaaagtttttatatattcgcgtttttatttttttaaattcgagttattttgagtatttgttttcgcgtgcgtaaaggttgaattcggaatttataatttgcggtcgttttttttttttttgtatttttaggttagttggaatgcgcgagtagatttttttataaggagtagttagtttttcgcggcgtacgcggcgggcgtcgcgggtagtagcggttggggatttattcggtacgtacgttcggggcgcgggtcgtagggataagagtgtggtcggggttttttcgtcgttagttttaggggcgagagacgcgttttttaattttttcgtagttggggtgaagttgtattagcggttttgtaagcgttgatcgttacgtcggcgaaagaagatttgtggggattattttcgtttttaggtttggtttatagttcgtatttttgggtgtttttaaatagtattttttttag

SEQ ID NO: 20722 - DNA, 705 bp, Artificial Sequence
  chemically treated genomic DNA (Homo sapiens) CpG-island No: 20722
ctaaaaaaaatactatttaaaaacacccaaaaatacgaactataaaccaaacctaaaaacgaaaataatccccacaaatcttctttcgccgacgtaacgatcaacgcttacaaaaccgctaatacaacttcaccccaactacgaaaaaattaaaaaacgcgtctctcgcccctaaaactaacgacgaaaaaaccccgaccacactcttatccctacgacccgcgccccgaacgtacgtaccgaataaatccccaaccgctactacccgcgacgcccgccgcgtacgccgcgaaaaactaactactccttataaaaaaatctactcgcgcattccaactaacctaaaaatacaaaaaaaaaaaaaacgaccgcaaattataaattccgaattcaacctttacgcacgcgaaaacaaatactcaaaataactcgaatttaaaaaaataaaaacgcgaatatataaaaactttactaacctacccgcccgctttcttcccgcgcccgaaattaacgaaacaaccgaaactcgcgacgtatttatccccaaatctctctctatatatataaatatacgcgcgcaaaaattttcccgaaaaaaatccgtctctatacttcactcctaaacgaaaatccccgaaaaaaaatctatacaaaaaccaaaacaaatacccaatcgtcgcgcgcgcgcgcgcgcgcgcgacaaac

SEQ ID NO: 20723 - DNA, 705 bp, Artificial Sequence
  chemically treated genomic DNA (Homo sapiens) CpG-island No: 20723
ttggggagagtgttgtttggggatatttaggggtacgagttgtaggttaggtttgagggcgagggtggtttttataaattttttttcgtcggcgtgacggttagcgtttgtaggatcgttagtgtaattttattttagttgcggggaagttggagagcgcgtttttcgtttttggggttggcggcggagaagtttcggttatatttttatttttgcggttcgcgtttcgggcgtgcgtgtcgggtgagtttttagtcgttattgttcgcggcgttcgtcgcgtgcgtcgcgggaaattgattgttttttgtgagggaatttgttcgcgtattttagttagtttaggaatgtaggggagggagaagcgatcgtaagttgtgaatttcgggtttagtttttgcgtacgcgagggtaggtgtttagggtggttcgggtttggaggggtagagacgcgggtgtgtgggagttttgttagtttgttcgttcgtttttttttcgcgttcgaaattagcgagatagtcggagttcgcggcgtgtttatttttaagtttttttttgtgtgtatgggtgtgcgcgcgtagagattttttcgaagggaattcgtttttgtgttttatttttgagcgagagttttcgagagggaatttgtgtagaggttagaataggtgtttagtcgtcgcgcgcgcgcgcgcgcgcgcgataagt

SEQ ID NO: 20724 - DNA, 705 bp, Artificial Sequence
  chemically treated genomic DNA (Homo sapiens) CpG-island No: 20724
acttatcgcgcgcgcgcgcgcgcgcgcgacgactaaacacctattctaacctctacacaaattccctctcgaaaactctcgctcaaaaataaaacacaaaaacgaattcccttcgaaaaaatctctacgcgcgcacacccatacacacaaaaaaaaacttaaaaataaacacgccgcgaactccgactatctcgctaatttcgaacgcgaaaaaaaaacgaacgaacaaactaacaaaactcccacacacccgcgtctctacccctccaaacccgaaccaccctaaacacctaccctcgcgtacgcaaaaactaaacccgaaattcacaacttacgatcgcttctccctcccctacattcctaaactaactaaaatacgcgaacaaattccctcacaaaaaacaatcaatttcccgcgacgcacgcgacgaacgccgcgaacaataacgactaaaaactcacccgacacgcacgcccgaaacgcgaaccgcaaaaataaaaatataaccgaaacttctccgccgccaaccccaaaaacgaaaaacgcgctctccaacttccccgcaactaaaataaaattacactaacgatcctacaaacgctaaccgtcacgccgacgaaaaaaaatttataaaaaccaccctcgccctcaaacctaacctacaactcgtacccctaaatatccccaaacaacactctccccaa

SEQ ID NO: 20725 - DNA, 569 bp, Artificial Sequence
  chemically treated genomic DNA (Homo sapiens) CpG-island No: 20725
cggcgtttggttggatgcgggttcgagtcgcgtgtacgtattggagggagatggttagattgggtcgggaatttattttatagttaggcgtcggtcgcggttggatcggtcgagcggttcgggcggaggagtcgagcgggtagagacggtgggcggttttttaggtgattttagttttttaagatcgtcgtttcggtagtcggcgtttacgtgtttttttttttgtgatagggagcgttttcgggtttgcgggttttggcgggggcggtcgtgtttcgtttgcgagtgcgcgttcgtcgtgttcgatattgtttcgggggtcgcgcggttcgtcgttcgtcggttttacgaggaatagcgcggggcgcggggcgttgggcgcggacgtaggacgagaggatatttttgagtacgacgttttcgttaggcgtcgttacgggtattttgtgcgggttttcggtcgggtggcgagggcggcgtttagcgggtagttagggaattggtttaagagggtcggtcggttttgtcggtggagggcgttttttattcggtagcggggaggtgtttag

SEQ ID NO: 20726 - DNA, 569 bp, Artificial Sequence
  chemically treated genomic DNA (Homo sapiens) CpG-island No: 20726
ctaaacacctccccgctaccgaataaaaaacgccctccaccgacaaaaccgaccgaccctcttaaaccaattccctaactacccgctaaacgccgccctcgccacccgaccgaaaacccgcacaaaatacccgtaacgacgcctaacgaaaacgtcgtactcaaaaatatcctctcgtcctacgtccgcgcccaacgccccgcgccccgcgctattcctcgtaaaaccgacgaacgacgaaccgcgcgacccccgaaacaatatcgaacacgacgaacgcgcactcgcaaacgaaacacgaccgcccccgccaaaacccgcaaacccgaaaacgctccctatcacaaaaaaaaaaacacgtaaacgccgactaccgaaacgacgatcttaaaaaactaaaatcacctaaaaaaccgcccaccgtctctacccgctcgactcctccgcccgaaccgctcgaccgatccaaccgcgaccgacgcctaactataaaataaattcccgacccaatctaaccatctccctccaatacgtacacgcgactcgaacccgcatccaaccaaacgccg

SEQ ID NO: 20727 - DNA, 569 bp, Artificial Sequence
  chemically treated genomic DNA (Homo sapiens) CpG-island No: 20727
ttgggtattttttcgttatcgggtggggaacgttttttatcggtagggtcggtcgatttttttgggttagttttttagttgttcgttgggcgtcgttttcgttattcggtcgaggattcgtataaggtgttcgtggcggcgtttgacgggagcgtcgtgtttaggggtgttttttcgttttgcgttcgcgtttagcgtttcgcgtttcgcgttgtttttcgtgagatcggcgggcggcgagtcgcgcggttttcggggtagtgtcggatacggcgggcgcgtattcgtaggcggggtacggtcgttttcgttaggattcgtaggttcggaaacgttttttgttataaaggggggaatacgtgggcgtcggttgtcggggcggcgattttagggaattagggttatttggagagtcgtttatcgtttttgttcgttcgattttttcgttcgggtcgttcggtcggtttagtcgcggtcggcgtttggttgtgaggtggattttcggtttagtttgattatttttttttagtacgtatacgcggttcgaattcgtatttaattagacgtcg

SEQ ID NO: 20728 - DNA, 569 bp, Artificial Sequence
  chemically treated genomic DNA (Homo sapiens) CpG-island No: 20728
cgacgtctaattaaatacgaattcgaaccgcgtatacgtactaaaaaaaaataatcaaactaaaccgaaaatccacctcacaaccaaacgccgaccgcgactaaaccgaccgaacgacccgaacgaaaaaatcgaacgaacaaaaacgataaacgactctccaaataaccctaattccctaaaatcgccgccccgacaaccgacgcccacgtattcccccctttataacaaaaaacgtttccgaacctacgaatcctaacgaaaacgaccgtaccccgcctacgaatacgcgcccgccgtatccgacactaccccgaaaaccgcgcgactcgccgcccgccgatctcacgaaaaacaacgcgaaacgcgaaacgctaaacgcgaacgcaaaacgaaaaaacacccctaaacacgacgctcccgtcaaacgccgccacgaacaccttatacgaatcctcgaccgaataacgaaaacgacgcccaacgaacaactaaaaaactaacccaaaaaaatcgaccgaccctaccgataaaaaacgttccccacccgataacgaaaaaatacccaa

SEQ ID NO: 20729 - DNA, 596 bp, Artificial Sequence
  chemically treated genomic DNA (Homo sapiens) CpG-island No: 20729
aaaggcgggttttcgtgacgatttataaaagtttaggggtaagcggttcggataacggttagtttgaggagttgttgcgatagtttattatttttttcgagagtgattttcgttgttttaaggttttttagagcgaatttgtgcggttgtaggtatcggcgcgtcgagttttcggcgttcggaaggatcgagtttttttcgcggatttagtgtttcgtttttagtttttaattttagagtcgagtcgatagagagtagggaatcggtatggttaaagtcgcggcgatcggtatcgatttgggtattatttatttttgcgtgggggtgttttaatacggtaaggtggagattatcgttaacgattagggtaatcgtattatttttagttacgtggtttttacggatatcgagcggtttatcggggatgcggttaagaattaggtggcgttgaattcgtagaatatcgtgtttgacgcgaagcggttgatcggtcgtaagttcggcgattcggtggtgtagtcggatatgaagtattggtttttttaggtgattaacgacggagataagtttaaggtgtaggtgagttataaggggga

SEQ ID NO: 20730 - DNA, 596 bp, Artificial Sequence
  chemically treated genomic DNA (Homo sapiens) CpG-island No: 20730
tcccccttataactcacctacaccttaaacttatctccgtcgttaatcacctaaaaaaaccaatacttcatatccgactacaccaccgaatcgccgaacttacgaccgatcaaccgcttcgcgtcaaacacgatattctacgaattcaacgccacctaattcttaaccgcatccccgataaaccgctcgatatccgtaaaaaccacgtaactaaaaataatacgattaccctaatcgttaacgataatctccaccttaccgtattaaaacacccccacgcaaaaataaataatacccaaatcgataccgatcgccgcgactttaaccataccgattccctactctctatcgactcgactctaaaattaaaaactaaaaacgaaacactaaatccgcgaaaaaaactcgatccttccgaacgccgaaaactcgacgcgccgatacctacaaccgcacaaattcgctctaaaaaaccttaaaacaacgaaaatcactctcgaaaaaaataataaactatcgcaacaactcctcaaactaaccgttatccgaaccgcttacccctaaacttttataaatcgtcacgaaaacccgccttt

SEQ ID NO: 20731 - DNA, 596 bp, Artificial Sequence
  chemically treated genomic DNA (Homo sapiens) CpG-island No: 20731
ttttttttgtagtttatttgtattttgggtttgttttcgtcgttgattatttggaaaggttagtgttttatgttcgattgtattatcgggtcgtcgaatttgcggtcgattagtcgtttcgcgttaaatacggtgttttgcgggtttagcgttatttggtttttggtcgtattttcgatgagtcgttcggtgttcgtgaaggttacgtagttgggggtggtgcggttgttttggtcgttggcgatgatttttattttgtcgtgttggaatatttttacgtaggagtaggtggtgtttaggtcgatgtcgatcgtcgcggttttggttatgtcggttttttgttttttgtcggttcggttttgagattgggggttggaaacggaatattggattcgcgagaagagttcggttttttcggacgtcggaaattcgacgcgtcggtgtttgtagtcgtataggttcgttttgggaagttttgggataacgggagttattttcgaaaaaggtagtggattgtcgtagtagttttttaggttagtcgttattcggatcgtttgtttttgggtttttataagtcgttacggagattcgttttt

SEQ ID NO: 20732 - DNA, 596 bp, Artificial Sequence
  chemically treated genomic DNA (Homo sapiens) CpG-island No: 20732
aaaaacgaatctccgtaacgacttataaaaacccaaaaacaaacgatccgaataacgactaacctaaaaaactactacgacaatccactacctttttcgaaaataactcccgttatcccaaaacttcccaaaacgaacctatacgactacaaacaccgacgcgtcgaatttccgacgtccgaaaaaaccgaactcttctcgcgaatccaatattccgtttccaacccccaatctcaaaaccgaaccgacaaaaaacaaaaaaccgacataaccaaaaccgcgacgatcgacatcgacctaaacaccacctactcctacgtaaaaatattccaacacgacaaaataaaaatcatcgccaacgaccaaaacaaccgcaccacccccaactacgtaaccttcacgaacaccgaacgactcatcgaaaatacgaccaaaaaccaaataacgctaaacccgcaaaacaccgtatttaacgcgaaacgactaatcgaccgcaaattcgacgacccgataatacaatcgaacataaaacactaacctttccaaataatcaacgacgaaaacaaacccaaaatacaaataaactacaaaaaaaa

SEQ ID NO: 20733 - DNA, 584 bp, Artificial Sequence
  chemically treated genomic DNA (Homo sapiens) CpG-island No: 20733
tttacgacgatttataaaagtcgaggggcgcgcggttcggaaaacggttagtttgaggagttgttgcgagggttcgtttcgtttttcgagagtgattttcgcggttttaaggttttttagagcgaatttgtgcggttgtaggtatcggcgtgttgagtgttcggcgttttcgaaggattgagtttatgtcgcggatttcgttcgtcgtatttagtttttagttttagagcggagtttatagagtagggtatcggtatggttaaagtcgcgacgaacggtatcgatttgggtattatttattcgtgcgtgggggtgttttaatacggtaaggtggagattatcgttaacgattagggtagtcgtattatttttagttacgtggtttttacggatatcgagcggtttatcggggatgcggttaagaattaggtggcgttgaattcgtagaatatcgtgtttgacgcgaagcggttgatcggtcgtaagttcggcgattcggtggtgtagtcggatatgaagtattggtttttttaggtgattaacgacggagataagtttaaggtgtaggtgagttataaggggga

SEQ ID NO: 20734 - DNA, 584 bp, Artificial Sequence
  chemically treated genomic DNA (Homo sapiens) CpG-island No: 20734
tcccccttataactcacctacaccttaaacttatctccgtcgttaatcacctaaaaaaaccaatacttcatatccgactacaccaccgaatcgccgaacttacgaccgatcaaccgcttcgcgtcaaacacgatattctacgaattcaacgccacctaattcttaaccgcatccccgataaaccgctcgatatccgtaaaaaccacgtaactaaaaataatacgactaccctaatcgttaacgataatctccaccttaccgtattaaaacacccccacgcacgaataaataatacccaaatcgataccgttcgtcgcgactttaaccataccgataccctactctataaactccgctctaaaactaaaaactaaatacgacgaacgaaatccgcgacataaactcaatccttcgaaaacgccgaacactcaacacgccgatacctacaaccgcacaaattcgctctaaaaaaccttaaaaccgcgaaaatcactctcgaaaaacgaaacgaaccctcgcaacaactcctcaaactaaccgttttccgaaccgcgcgcccctcgacttttataaatcgtcgtaaa

SEQ ID NO: 20735 - DNA, 584 bp, Artificial Sequence
  chemically treated genomic DNA (Homo sapiens) CpG-island No: 20735
ttttttttgtagtttatttgtattttgggtttgttttcgtcgttgattatttggaaaggttagtgttttatgttcgattgtattatcgggtcgtcgaatttgcggtcgattagtcgtttcgcgttaaatacggtgttttgcgggtttagcgttatttggtttttggtcgtattttcgatgagtcgttcggtgttcgtgaaggttacgtagttgggggtggtgcggttgttttggtcgttggcgatgatttttattttgtcgtgttggaatatttttacgtacgagtaggtggtgtttaggtcgatgtcgttcgtcgcggttttggttatgtcggtgttttgttttgtgggtttcgttttgagattgggggttggatacggcggacgggattcgcgatatgagtttagtttttcgggaacgtcggatatttaatacgtcggtgtttgtagtcgtataggttcgttttggaaagttttgggatcgcgggagttattttcgaaagacgaagcggattttcgtagtagttttttaggttggtcgtttttcggatcgcgcgtttttcggtttttataagtcgtcgtgga

SEQ ID NO: 20736 - DNA, 584 bp, Artificial Sequence
  chemically treated genomic DNA (Homo sapiens) CpG-island No: 20736
tccacgacgacttataaaaaccgaaaaacgcgcgatccgaaaaacgaccaacctaaaaaactactacgaaaatccgcttcgtctttcgaaaataactcccgcgatcccaaaactttccaaaacgaacctatacgactacaaacaccgacgtattaaatatccgacgttcccgaaaaactaaactcatatcgcgaatcccgtccgccgtatccaacccccaatctcaaaacgaaacccacaaaacaaaacaccgacataaccaaaaccgcgacgaacgacatcgacctaaacaccacctactcgtacgtaaaaatattccaacacgacaaaataaaaatcatcgccaacgaccaaaacaaccgcaccacccccaactacgtaaccttcacgaacaccgaacgactcatcgaaaatacgaccaaaaaccaaataacgctaaacccgcaaaacaccgtatttaacgcgaaacgactaatcgaccgcaaattcgacgacccgataatacaatcgaacataaaacactaacctttccaaataatcaacgacgaaaacaaacccaaaatacaaataaactacaaaaaaaa

SEQ ID NO: 20737 - DNA, 543 bp, Artificial Sequence
  chemically treated genomic DNA (Homo sapiens) CpG-island No: 20737
gttttcgtagtttattagtaggttttttttattcgcgggcggtgtagtttcgtttcgtttttttaatcgcggtttcgttttttcgagggtgggggtcgtgttggttattagtcgggttggaggcgggggtcgggtttttattgggttcgtgcgttttgcgttcgtcgcggcggtgtcgagttcgttggttttcgattgttttttgcggcggtggcggtcgttgtttttttgttttcgggttcggggttgtaggggttagagcgagtgcgttttttgttcgcggatcgcggtagtttagagtaggtaatggggcgtttttggggagcgtttgtcggagtttagggttaggttcgggcggtggggtcggttttcgaagttgttttttgcgtcggcgatcgggtcgagcggtgtcgcggtttttcggagttttttgtcggtttttaggcgttttagtttgggagttcgcggcgggtattttgtgaggaggtgggggcggggtcggggtaggggcggggtcgtttcgggcgggattttgaggatttt

SEQ ID NO: 20738 - DNA, 543 bp, Artificial Sequence
  chemically treated genomic DNA (Homo sapiens) CpG-island No: 20738
aaaatcctcaaaatcccgcccgaaacgaccccgcccctaccccgaccccgcccccacctcctcacaaaatacccgccgcgaactcccaaactaaaacgcctaaaaaccgacaaaaaactccgaaaaaccgcgacaccgctcgacccgatcgccgacgcaaaaaacaacttcgaaaaccgaccccaccgcccgaacctaaccctaaactccgacaaacgctccccaaaaacgccccattacctactctaaactaccgcgatccgcgaacaaaaaacgcactcgctctaacccctacaaccccgaacccgaaaacaaaaaaacaacgaccgccaccgccgcaaaaaacaatcgaaaaccaacgaactcgacaccgccgcgacgaacgcaaaacgcacgaacccaataaaaacccgacccccgcctccaacccgactaataaccaacacgacccccaccctcgaaaaaacgaaaccgcgattaaaaaaacgaaacgaaactacaccgcccgcgaataaaaaaaacctactaataaactacgaaaac

SEQ ID NO: 20739 - DNA, 543 bp, Artificial Sequence
  chemically treated genomic DNA (Homo sapiens) CpG-island No: 20739
ggggtttttagggtttcgttcgaggcggtttcgtttttgtttcggtttcgtttttatttttttataaggtgttcgtcgcgggtttttaggttgaggcgtttagaggtcggtaggaggtttcggaggatcgcggtatcgttcggttcggtcgtcggcgtagggagtagtttcgggggtcgattttatcgttcgagtttagttttgggtttcgataggcgttttttagaggcgttttattatttgttttgggttgtcgcggttcgcgggtaggaggcgtattcgttttggtttttgtagtttcgggttcggaggtaaggaggtagcgatcgttatcgtcgtagaggataatcgggagttagcgggttcggtatcgtcgcggcgggcgtagaacgtacgagtttagtgggagttcggttttcgtttttagttcggttagtaattaatacggtttttattttcggaggggcgggatcgcggttggaggggcggggcggggttgtatcgttcgcgggtaagaggggtttgttgataggttgcgaaggt

SEQ ID NO: 20740 - DNA, 543 bp, Artificial Sequence
  chemically treated genomic DNA (Homo sapiens) CpG-island No: 20740
accttcgcaacctatcaacaaacccctcttacccgcgaacgatacaaccccgccccgcccctccaaccgcgatcccgcccctccgaaaataaaaaccgtattaattactaaccgaactaaaaacgaaaaccgaactcccactaaactcgtacgttctacgcccgccgcgacgataccgaacccgctaactcccgattatcctctacgacgataacgatcgctacctccttacctccgaacccgaaactacaaaaaccaaaacgaatacgcctcctacccgcgaaccgcgacaacccaaaacaaataataaaacgcctctaaaaaacgcctatcgaaacccaaaactaaactcgaacgataaaatcgacccccgaaactactccctacgccgacgaccgaaccgaacgataccgcgatcctccgaaacctcctaccgacctctaaacgcctcaacctaaaaacccgcgacgaacaccttataaaaaaataaaaacgaaaccgaaacaaaaacgaaaccgcctcgaacgaaaccctaaaaacccc

SEQ ID NO: 20741 - DNA, 632 bp, Artificial Sequence
  chemically treated genomic DNA (Homo sapiens) CpG-island No: 20741
ggtatttttttttttatatacgtacgttcgcgagtcgtttcgggtagcggtcgtgtttttcggcggggtttcgtcggcggtttttgatttcgttttagagttgtttttcggtagcgttattttttcgtgtttataaaagtattttttttttaatttatgaacggatttcgatttttgttttgttattatttatgcgtttcgtattcgaggtgtcgtttttatttatacgttttacggtttcgcgaaattcggttttttagttcgcgggacgcgttgtttgttaggcgggttcggcggtatttcgggggcgggaggggtcggtcgtagggtttttagtttggcgttcgcggggcgttcgtagcgaaggggtgggtgtcgttcgtgaacgtagtagggattagtttagttcgcgttcgtttttgggtttcggttatcgttttttcgttattttttcggtttttgcgtggatcggttcgtggcgggggttgttttgcgttttcgttttcgtagtagtcgcggatttttattaacgttgacgagttagtgtcgcgattcggggagagaagacggtattaggggttgaaggtatgtgtgtaagtggttcgagttattttttatgatatattagggtt

SEQ ID NO: 20742 - DNA, 632 bp, Artificial Sequence
  chemically treated genomic DNA (Homo sapiens) CpG-island No: 20742
aaccctaatatatcataaaaaataactcgaaccacttacacacataccttcaacccctaataccgtcttctctccccgaatcgcgacactaactcgtcaacgttaataaaaatccgcgactactacgaaaacgaaaacgcaaaacaacccccgccacgaaccgatccacgcaaaaaccgaaaaaataacgaaaaaacgataaccgaaacccaaaaacgaacgcgaactaaactaatccctactacgttcacgaacgacacccaccccttcgctacgaacgccccgcgaacgccaaactaaaaaccctacgaccgacccctcccgcccccgaaataccgccgaacccgcctaacaaacaacgcgtcccgcgaactaaaaaaccgaatttcgcgaaaccgtaaaacgtataaataaaaacgacacctcgaatacgaaacgcataaataataacaaaacaaaaatcgaaatccgttcataaattaaaaaaaaaatacttttataaacacgaaaaaataacgctaccgaaaaacaactctaaaacgaaatcaaaaaccgccgacgaaaccccgccgaaaaacacgaccgctacccgaaacgactcgcgaacgtacgtatataaaaaaaaaaatacc

SEQ ID NO: 20743 - DNA, 632 bp, Artificial Sequence
  chemically treated genomic DNA (Homo sapiens) CpG-island No: 20743
agttttggtatattatggagagtggttcgggttatttgtatatatgtttttagtttttggtatcgtttttttttttcgggtcgcgatattgattcgttaacgttaatgggggttcgcgattgttgcggggacgagggcgtagagtagttttcgttacgggtcggtttacgtaggggtcgagaaagtggcggagaggcggtggtcgaggtttaggggcgagcgcgggttgagttggtttttgttgcgtttacgagcgatatttattttttcgttgcggacgtttcgcgggcgttaggttgggggttttgcgatcgatttttttcgttttcgaggtatcgtcgggttcgtttggtaggtagcgcgtttcgcgagttggagggtcgagtttcgcggggtcgtggggcgtgtgggtgaaggcgatatttcggatgcgggacgtatgaatggtggtagagtaggggtcgggattcgtttatgggttgggagagagatgtttttgtgagtacgggaaagtagcgttgtcggagaatagttttgaggcgggattaaaagtcgtcggcgaagtttcgtcgaggaatacggtcgttgttcggggcggttcgcgagcgtgcgtgtgtggaggggaggatgtt

SEQ ID NO: 20744 - DNA, 632 bp, Artificial Sequence
  chemically treated genomic DNA (Homo sapiens) CpG-island No: 20744
aacatcctcccctccacacacgcacgctcgcgaaccgccccgaacaacgaccgtattcctcgacgaaacttcgccgacgacttttaatcccgcctcaaaactattctccgacaacgctactttcccgtactcacaaaaacatctctctcccaacccataaacgaatcccgacccctactctaccaccattcatacgtcccgcatccgaaatatcgccttcacccacacgccccacgaccccgcgaaactcgaccctccaactcgcgaaacgcgctacctaccaaacgaacccgacgatacctcgaaaacgaaaaaaatcgatcgcaaaacccccaacctaacgcccgcgaaacgtccgcaacgaaaaaataaatatcgctcgtaaacgcaacaaaaaccaactcaacccgcgctcgcccctaaacctcgaccaccgcctctccgccactttctcgacccctacgtaaaccgacccgtaacgaaaactactctacgccctcgtccccgcaacaatcgcgaacccccattaacgttaacgaatcaatatcgcgacccgaaaaaaaaaaacgataccaaaaactaaaaacatatatacaaataacccgaaccactctccataatataccaaaact

SEQ ID NO: 20745 - DNA, 525 bp, Artificial Sequence
  chemically treated genomic DNA (Homo sapiens) CpG-island No: 20745
attcgcgtcgagtttttttttatttcgatattataagggagaagagcggagtcgtcgtcgtcgtcgtcgttattatcgttatcgttatcgtcgcggttttcggagcgagcgagcgattttgtcgcgcggggagttttatcgggagtcgcgtttcgttagttcgttttaggtcgtcgtcgtcgtcgtcgtttatttattttgtcgcggcgcgttttcgttgtggtcgtgaggaatcgagtttagcgttgttaagttgtttgggtttggagcgtatcgtgttatagcgtttggtttcgggttcgggttgcgcgcggcggttagatatgataggttgaggtttttttgtttatattcggtcgtcgagggggcggtgcgtcgtttaattttttcgcgtcgggtcgttatcgtcgtttttcgttagtttcgcgtttagcgtttcggttcggtcgtcgttttattttttcgttttattttttcgtttcgttttatatacgcgggtcggggtttgtgagtagtcgtgttttt

SEQ ID NO: 20746 - DNA, 525 bp, Artificial Sequence
  chemically treated genomic DNA (Homo sapiens) CpG-island No: 20746
aaaaacacgactactcacaaaccccgacccgcgtatataaaacgaaacgaaaaaataaaacgaaaaaataaaacgacgaccgaaccgaaacgctaaacgcgaaactaacgaaaaacgacgataacgacccgacgcgaaaaaattaaacgacgcaccgccccctcgacgaccgaatataaacaaaaaaacctcaacctatcatatctaaccgccgcgcgcaacccgaacccgaaaccaaacgctataacacgatacgctccaaacccaaacaacttaacaacgctaaactcgattcctcacgaccacaacgaaaacgcgccgcgacaaaataaataaacgacgacgacgacgacgacctaaaacgaactaacgaaacgcgactcccgataaaactccccgcgcgacaaaatcgctcgctcgctccgaaaaccgcgacgataacgataacgataataacgacgacgacgacgacgactccgctcttctcccttataatatcgaaataaaaaaaaactcgacgcgaat

SEQ ID NO: 20747 - DNA, 525 bp, Artificial Sequence
  chemically treated genomic DNA (Homo sapiens) CpG-island No: 20747
gggggtacggttgtttataggtttcggttcgcgtgtgtggagcggggcgagggggtgaggcgagggggtgaggcggcggtcgagtcggggcgttgggcgcggggttggcgggaggcggcggtggcggttcggcgcgaaggggttaagcggcgtatcgttttttcggcggtcgggtgtaaatagaggagttttagtttattatgtttggtcgtcgcgcgtagttcgagttcggagttaggcgttgtaatacgatacgttttagatttaggtaatttggtagcgttgggttcggttttttacggttatagcgagggcgcgtcgcggtaaggtgggtgagcggcggcggcggcggcggtttggggcgggttggcggagcgcggttttcggtgaggtttttcgcgcggtagggtcgttcgttcgtttcggggatcgcggcggtggcggtggcggtggtggcggcggcggcggcggcggtttcgttttttttttttgtggtgtcggaatgggaggaggttcggcgcgggt

SEQ ID NO: 20748 - DNA, 525 bp, Artificial Sequence
  chemically treated genomic DNA (Homo sapiens) CpG-island No: 20748
acccgcgccgaacctcctcccattccgacaccacaaaaaaaaaaaacgaaaccgccgccgccgccgccgccaccaccgccaccgccaccgccgcgatccccgaaacgaacgaacgaccctaccgcgcgaaaaacctcaccgaaaaccgcgctccgccaacccgccccaaaccgccgccgccgccgccgctcacccaccttaccgcgacgcgccctcgctataaccgtaaaaaaccgaacccaacgctaccaaattacctaaatctaaaacgtatcgtattacaacgcctaactccgaactcgaactacgcgcgacgaccaaacataataaactaaaactcctctatttacacccgaccgccgaaaaaacgatacgccgcttaaccccttcgcgccgaaccgccaccgccgcctcccgccaaccccgcgcccaacgccccgactcgaccgccgcctcaccccctcgcctcaccccctcgccccgctccacacacgcgaaccgaaacctataaacaaccgtaccccc

SEQ ID NO: 20749 - DNA, 796 bp, Artificial Sequence
  chemically treated genomic DNA (Homo sapiens) CpG-island No: 20749
gaatcgtcgtttttttagattcgcgtgtatagcgcggcgcgtttattgagtcggtttaggttcgtaggaggcgttgttattgcgaggtcgaaacgagtgtttcggaaaacgtcggttcggttaggcgttttgtcgttattcgttgatcgattggtatattagtttatgtaatttagcgttaaagatcggtagtttggggaatgatatttacggggggaattcgaattttattttcgcgacgcggggacgttaacgtgcgacgttttgtcggttcgtttttttttgtttatttattggttaattgttttagagtacgggcgagagcgcggtatatagggtaaaggtagagtttatcgttttagcgagtttaaaatttgcggtgtttcggtagtcgcggaattcgggttttgcgcggtagtttgggttgtcgtcgggggtggtattttcggtaggaacgtcgtttcggggtatcgtagacggcgcgcgcggttttttacgcgttttatacgttttgtacgtcgtcgtttgagttttaaggcgtaggatttcgtgcggcgggattcgtttattttcgaggttagttaatggacgcggagcgcgggaagtcgggggcggggtttagttttttttttgtagtcgagtaacgtagtaggtttcgcggttttgcgttcgcgttcgttttattaggagcggtttgggattgggggagtatattttttaaatagaaggtttgtgaggtttaaggtgttcggtacgcgttgttgtttttgcgggagtttttttgttttttttaaga

SEQ ID NO: 20750 - DNA, 796 bp, Artificial Sequence
  chemically treated genomic DNA (Homo sapiens) CpG-island No: 20750
tcttaaaaaaaacaaaaaaactcccgcaaaaacaacaacgcgtaccgaacaccttaaacctcacaaaccttctatttaaaaaatatactcccccaatcccaaaccgctcctaataaaacgaacgcgaacgcaaaaccgcgaaacctactacgttactcgactacaaaaaaaaaactaaaccccgcccccgacttcccgcgctccgcgtccattaactaacctcgaaaataaacgaatcccgccgcacgaaatcctacgccttaaaactcaaacgacgacgtacaaaacgtataaaacgcgtaaaaaaccgcgcgcgccgtctacgataccccgaaacgacgttcctaccgaaaataccacccccgacgacaacccaaactaccgcgcaaaacccgaattccgcgactaccgaaacaccgcaaattttaaactcgctaaaacgataaactctacctttaccctatataccgcgctctcgcccgtactctaaaacaattaaccaataaataaacaaaaaaaaacgaaccgacaaaacgtcgcacgttaacgtccccgcgtcgcgaaaataaaattcgaattccccccgtaaatatcattccccaaactaccgatctttaacgctaaattacataaactaatataccaatcgatcaacgaataacgacaaaacgcctaaccgaaccgacgttttccgaaacactcgtttcgacctcgcaataacaacgcctcctacgaacctaaaccgactcaataaacgcgccgcgctatacacgcgaatctaaaaaaacgacgattc

SEQ ID NO: 20751 - DNA, 796 bp, Artificial Sequence
  chemically treated genomic DNA (Homo sapiens) CpG-island No: 20751
ttttaaaaaggatagaaagattttcgtaaaagtagtagcgcgtgtcgaatattttaggttttatagattttttatttgaggaatgtgtttttttaattttagatcgtttttggtggggcgggcgcgagcgtaggatcgcggagtttgttgcgttgttcggttgtaggggaggagttgggtttcgttttcggtttttcgcgtttcgcgtttattggttggtttcgggggtgggcgggtttcgtcgtacggagttttgcgttttgaggtttaagcggcggcgtgtaaggcgtgtgaggcgcgtagagagtcgcgcgcgtcgtttgcgatgtttcgggacggcgtttttgtcgggaatattattttcggcggtagtttaggttgtcgcgtagagttcggatttcgcgattgtcggggtatcgtaggttttggattcgttgaagcggtgagttttgtttttgttttatatgtcgcgttttcgttcgtgttttggggtagttggttagtgggtgggtaggaaggggcgggtcggtagggcgtcgtacgttggcgttttcgcgtcgcgggaatggggttcggatttttttcgtgaatgttattttttaggttatcggtttttagcgttaagttgtatgggttggtgtgttagtcggttagcgaatagcggtagaacgtttggtcgggtcggcgtttttcgggatattcgtttcggtttcgtagtggtagcgttttttgcgagtttagatcggtttagtggacgcgtcgcgttgtgtacgcgggtttggggagacggcggttt

SEQ ID NO: 20752 - DNA, 796 bp, Artificial Sequence
  chemically treated genomic DNA (Homo sapiens) CpG-island No: 20752
aaaccgccgtctccccaaacccgcgtacacaacgcgacgcgtccactaaaccgatctaaactcgcaaaaaacgctaccactacgaaaccgaaacgaatatcccgaaaaacgccgacccgaccaaacgttctaccgctattcgctaaccgactaacacaccaacccatacaacttaacgctaaaaaccgataacctaaaaaataacattcacgaaaaaaatccgaaccccattcccgcgacgcgaaaacgccaacgtacgacgccctaccgacccgccccttcctacccacccactaaccaactaccccaaaacacgaacgaaaacgcgacatataaaacaaaaacaaaactcaccgcttcaacgaatccaaaacctacgataccccgacaatcgcgaaatccgaactctacgcgacaacctaaactaccgccgaaaataatattcccgacaaaaacgccgtcccgaaacatcgcaaacgacgcgcgcgactctctacgcgcctcacacgccttacacgccgccgcttaaacctcaaaacgcaaaactccgtacgacgaaacccgcccacccccgaaaccaaccaataaacgcgaaacgcgaaaaaccgaaaacgaaacccaactcctcccctacaaccgaacaacgcaacaaactccgcgatcctacgctcgcgcccgccccaccaaaaacgatctaaaattaaaaaaacacattcctcaaataaaaaatctataaaacctaaaatattcgacacgcgctactacttttacgaaaatctttctatcctttttaaaa

SEQ ID NO: 20753 - DNA, 1207 bp, Artificial Sequence
  chemically treated genomic DNA (Homo sapiens) CpG-island No: 20753
tcggttttttttttttatataggcgtttttggtatagtcggagttttttacggtttcggtaggggaggacgtgtagtttttggtcgattcgttggattcggatcgcgattcggtgtgtagtaattttaatagtaataacggtaagaacggtaaggataaggagaaggagaagtagcgtaaggagaaggataagacgcgcgtcgatttcgtggttaataagttgggtagttttagtaagacgttgggtattaagttgaagaaaaatatgggcggtttcggcggtttggtgtacggtaagatgggtcgcgttaatttcgttaatggtaagaacggggattcggtcgagcggggtaaggagaagaaggttaagtcgcgtaagggtagtaaggaggagtttggtgcgtcggttagtacgtcgtcgtcggaaaagattacgtcgtcgtttatagataaggtagcgggcgcgtcgtcggcggagaagggcggtgggtcgcggggcgacgtttggaagtatagtacggatgtgaagttgagttttaatattttgcgcgtcgttatgtagggggagcgtaagtttattttcgtcggtttgttgtttattagttatcggtattagttttacgaggagatgatcggttattatttgacgagcgcgtaggagcgttttagcgtcgagtaggagtagcggcgtcgcgacgtcgttattgcggtcgtcgttgtcgtcgtcgtcgtcgtcgttacggttaagcggtcgtcgcgtagatcggagacggagggcgtgtcggtttcggagcgcgttttttcgggtttatttacgtagttggtgtttaagtttaaggagcggtcgagtttcgggttcgcggtagggcgtgcggcgcgggcggcggcgggcggtacggttttttcggggggaggcgcgcggcgtgcgagcgttagcggattagtgtttggtcgtagtttttcggcgttagcgcgttagagcgttatttacgtgtaggcgtcgggcgcgcgggacgaggcgtgcgcgtcggtcgtgggggcgttgcggtcgtgcgttacgtattcgtagtagaatcgttcgttgtcgtcgtagagttatagttcggcgcgcgtcgtcgttttgcgtatcgttaatacggtcgagtcgttggcgcgcgcggtgttcggggttttatcgggcgcggcggggatcgcgggggcggtcgag

SEQ ID NO: 20754 - DNA, 1207 bp, Artificial Sequence
  chemically treated genomic DNA (Homo sapiens) CpG-island No: 20754
ctcgaccgcccccgcgatccccgccgcgcccgataaaaccccgaacaccgcgcgcgccaacgactcgaccgtattaacgatacgcaaaacgacgacgcgcgccgaactataactctacgacgacaacgaacgattctactacgaatacgtaacgcacgaccgcaacgcccccacgaccgacgcgcacgcctcgtcccgcgcgcccgacgcctacacgtaaataacgctctaacgcgctaacgccgaaaaactacgaccaaacactaatccgctaacgctcgcacgccgcgcgcctccccccgaaaaaaccgtaccgcccgccgccgcccgcgccgcacgccctaccgcgaacccgaaactcgaccgctccttaaacttaaacaccaactacgtaaataaacccgaaaaaacgcgctccgaaaccgacacgccctccgtctccgatctacgcgacgaccgcttaaccgtaacgacgacgacgacgacgacaacgacgaccgcaataacgacgtcgcgacgccgctactcctactcgacgctaaaacgctcctacgcgctcgtcaaataataaccgatcatctcctcgtaaaactaataccgataactaataaacaacaaaccgacgaaaataaacttacgctccccctacataacgacgcgcaaaatattaaaactcaacttcacatccgtactatacttccaaacgtcgccccgcgacccaccgcccttctccgccgacgacgcgcccgctaccttatctataaacgacgacgtaatcttttccgacgacgacgtactaaccgacgcaccaaactcctccttactacccttacgcgacttaaccttcttctccttaccccgctcgaccgaatccccgttcttaccattaacgaaattaacgcgacccatcttaccgtacaccaaaccgccgaaaccgcccatatttttcttcaacttaatacccaacgtcttactaaaactacccaacttattaaccacgaaatcgacgcgcgtcttatccttctccttacgctacttctccttctccttatccttaccgttcttaccgttattactattaaaattactacacaccgaatcgcgatccgaatccaacgaatcgaccaaaaactacacgtcctcccctaccgaaaccgtaaaaaactccgactataccaaaaacgcctatataaaaaaaaaaaaccga

SEQ ID NO: 20755 - DNA, 1207 bp, Artificial Sequence
  chemically treated genomic DNA (Homo sapiens) CpG-island No: 20755
ttcggtcgttttcgcggttttcgtcgcgttcggtagggtttcgggtatcgcgcgcgttagcgattcgatcgtgttgacggtgcgtagggcggcggcgcgcgtcgggttgtagttttgcgacgatagcgagcggttttgttgcgggtacgtggcgtacggtcgtagcgtttttacggtcggcgcgtacgtttcgtttcgcgcgttcgacgtttgtacgtggatgacgttttggcgcgttggcgtcggggggttgcggttaggtattggttcgttggcgttcgtacgtcgcgcgttttttttcggggaggtcgtgtcgttcgtcgtcgttcgcgtcgtacgttttgtcgcgggttcggggttcggtcgttttttgagtttgagtattagttgcgtgggtgggttcggagaggcgcgtttcgggatcggtacgtttttcgttttcggtttgcgcggcggtcgtttggtcgtggcggcggcggcggcggcggtagcggcggtcgtagtagcggcgtcgcggcgtcgttgtttttgttcggcgttgaagcgtttttgcgcgttcgttaggtagtagtcgattattttttcgtggaattggtgtcggtggttggtgagtagtaggtcggcgaagatgaatttgcgttttttttgtatggcggcgcgtaggatgttgaggtttagttttatattcgtgttgtatttttaggcgtcgtttcgcggtttatcgttttttttcgtcggcgacgcgttcgttgttttgtttgtgggcgacggcgtggtttttttcgacggcgacgtgttggtcgacgtattagatttttttttgttgtttttgcgcgatttggtttttttttttttgtttcgttcggtcgagttttcgtttttgttattggcggagttggcgcggtttattttgtcgtgtattaggtcgtcgaggtcgtttatgtttttttttagtttgatgtttagcgttttgttgaagttgtttagtttgttggttacggagtcggcgcgcgttttgtttttttttttgcgttgtttttttttttttttgtttttgtcgtttttgtcgttattgttgttagaattgttgtatatcgaatcgcggttcgagtttagcgagtcggttagggattgtacgtttttttttgtcgaggtcgtgggagatttcggttgtgttaggggcgtttgtgtggagagggagggtcgg

SEQ ID NO: 20756 - DNA, 1207 bp, Artificial Sequence
  chemically treated genomic DNA (Homo sapiens) CpG-island No: 20756
ccgaccctccctctccacacaaacgcccctaacacaaccgaaatctcccacgacctcgacaaaaaaaaacgtacaatccctaaccgactcgctaaactcgaaccgcgattcgatatacaacaattctaacaacaataacgacaaaaacgacaaaaacaaaaaaaaaaaaaaacaacgcaaaaaaaaaaacaaaacgcgcgccgactccgtaaccaacaaactaaacaacttcaacaaaacgctaaacatcaaactaaaaaaaaacataaacgacctcgacgacctaatacacgacaaaataaaccgcgccaactccgccaataacaaaaacgaaaactcgaccgaacgaaacaaaaaaaaaaaaaccaaatcgcgcaaaaacaacaaaaaaaaatctaatacgtcgaccaacacgtcgccgtcgaaaaaaaccacgccgtcgcccacaaacaaaacaacgaacgcgtcgccgacgaaaaaaaacgataaaccgcgaaacgacgcctaaaaatacaacacgaatataaaactaaacctcaacatcctacgcgccgccatacaaaaaaaacgcaaattcatcttcgccgacctactactcaccaaccaccgacaccaattccacgaaaaaataatcgactactacctaacgaacgcgcaaaaacgcttcaacgccgaacaaaaacaacgacgccgcgacgccgctactacgaccgccgctaccgccgccgccgccgccgccacgaccaaacgaccgccgcgcaaaccgaaaacgaaaaacgtaccgatcccgaaacgcgcctctccgaacccacccacgcaactaatactcaaactcaaaaaacgaccgaaccccgaacccgcgacaaaacgtacgacgcgaacgacgacgaacgacacgacctccccgaaaaaaaacgcgcgacgtacgaacgccaacgaaccaatacctaaccgcaaccccccgacgccaacgcgccaaaacgtcatccacgtacaaacgtcgaacgcgcgaaacgaaacgtacgcgccgaccgtaaaaacgctacgaccgtacgccacgtacccgcaacaaaaccgctcgctatcgtcgcaaaactacaacccgacgcgcgccgccgccctacgcaccgtcaacacgatcgaatcgctaacgcgcgcgatacccgaaaccctaccgaacgcgacgaaaaccgcgaaaacgaccgaa

SEQ ID NO: 20757 - DNA, 593 bp, Artificial Sequence
  chemically treated genomic DNA (Homo sapiens) CpG-island No: 20757
aagcggcgtcgttttttcgtttttttttatttttcgttttttttcgtcgcgtatttttcgcggcgttgggagagggcggagggggaggcggcgcgcggcgttagaggaggggggacgtagggggcggagcggagatagtattttcggagataatttttttttttgtcgtagaggagaggagcggtcggagcgagatatttcgtcgaggtatagtagtcggtaggatggcgatcgtggtggtggaagttatcgagtcggagtcgttcggtagtatcgttaattcggcggcgtttatttcgtttagtttgtcgtatcgtttttttgatagtaagttttatttgttggtggtcgtcggcgagatcgtgatcgaggagtatttgcggcgtgttatcggtaatatcgagttcggtaagtggtttcgcgtttttagagacgcgcgttgggagacgcgtaaatacgattttatttagggcgcgacggttattgcgtttttttcgcgcgtttcgtatttatgttttttttcgttattttttatatttggtttagattttttttgggttaattaagaataattcgaattattagatatgaga

SEQ ID NO: 20758 - DNA, 593 bp, Artificial Sequence
  chemically treated genomic DNA (Homo sapiens) CpG-island No: 20758
tctcatatctaataattcgaattattcttaattaacccaaaaaaaatctaaaccaaatataaaaaataacgaaaaaaaacataaatacgaaacgcgcgaaaaaaacgcaataaccgtcgcgccctaaataaaatcgtatttacgcgtctcccaacgcgcgtctctaaaaacgcgaaaccacttaccgaactcgatattaccgataacacgccgcaaatactcctcgatcacgatctcgccgacgaccaccaacaaataaaacttactatcaaaaaaacgatacgacaaactaaacgaaataaacgccgccgaattaacgatactaccgaacgactccgactcgataacttccaccaccacgatcgccatcctaccgactactatacctcgacgaaatatctcgctccgaccgctcctctcctctacgacaaaaaaaaaaattatctccgaaaatactatctccgctccgccccctacgtcccccctcctctaacgccgcgcgccgcctccccctccgccctctcccaacgccgcgaaaaatacgcgacgaaaaaaaacgaaaaataaaaaaaaacgaaaaaacgacgccgctt

SEQ ID NO: 20759 - DNA, 593 bp, Artificial Sequence
  chemically treated genomic DNA (Homo sapiens) CpG-island No: 20759
ttttatatttaataattcggattatttttaattagtttagaaagggtttggattaagtatgagaggtgacgaggagaggtatgggtgcggggcgcgcgggaggagcgtagtgatcgtcgcgttttgggtggggtcgtgtttgcgcgttttttagcgcgcgtttttgggggcgcggggttatttatcgagttcgatgttgtcgatggtacgtcgtaggtgtttttcggttacgatttcgtcgacgattattagtaagtagaatttgttgttaaggaagcggtgcgataggttaggcgaggtggacgtcgtcgggttggcgatgttgtcggacggtttcggttcggtggtttttattattacggtcgttattttgtcggttgttgtgtttcggcgaagtgtttcgtttcggtcgttttttttttttgcggtaggagaaaggattattttcgaaggtgttgttttcgtttcgttttttgcgtttttttttttttggcgtcgcgcgtcgttttttttttcgtttttttttagcgtcgcggagagtgcgcggcggagaggagcggggagtgagagagggcggggaggcggcgtcgttt

SEQ ID NO: 20760 - DNA, 593 bp, Artificial Sequence
  chemically treated genomic DNA (Homo sapiens) CpG-island No: 20760
aaacgacgccgcctccccgccctctctcactccccgctcctctccgccgcgcactctccgcgacgctaaaaaaaaacgaaaaaaaaaacgacgcgcgacgccaaaaaaaaaaaaacgcaaaaaacgaaacgaaaacaacaccttcgaaaataatcctttctcctaccgcaaaaaaaaaaaacgaccgaaacgaaacacttcgccgaaacacaacaaccgacaaaataacgaccgtaataataaaaaccaccgaaccgaaaccgtccgacaacatcgccaacccgacgacgtccacctcgcctaacctatcgcaccgcttccttaacaacaaattctacttactaataatcgtcgacgaaatcgtaaccgaaaaacacctacgacgtaccatcgacaacatcgaactcgataaataaccccgcgcccccaaaaacgcgcgctaaaaaacgcgcaaacacgaccccacccaaaacgcgacgatcactacgctcctcccgcgcgccccgcacccatacctctcctcgtcacctctcatacttaatccaaaccctttctaaactaattaaaaataatccgaattattaaatataaaa

SEQ ID NO: 20761 - DNA, 644 bp, Artificial Sequence
  chemically treated genomic DNA (Homo sapiens) CpG-island No: 20761
cggtaatcgtttacgttcgggggttaggtttgttttcgttcgcgttgattggagggtagcgaaagcgtcgtttagcgattggtaggtggtgttataaaggggcggggcgcggcggtagcggagcgttgtcggttagtgtttttcgtgaagttgttcgtcgggtcgttgggttttgtcgatttgtaggcgggcgagcgagttagcggataagattgcgggtgaggttgagttagcgagcggtcggtagggggggcgttcgggttgcgagtcgttgagtttagtcgcgttgtcgtcgtcggtcgtcgtggggtcggaatggcgtaaggtcggagtggcgcgggcgttcggcgttgggttgtcgggtagagttttgttttcgtttttcgttttgcggtttgacgtcggtcgttgttgttcggggatcggagcggcgggtcgtttttgtttaggatatacgttttggcgtttgtttttttgggcgtgacgttagttttaacgggtacgcggttttttcgacgggtgttgattttcgagtcgttgttgttacgcggattgttgttttttagatttaggtcggtgggtttggggagttcggattggttttggaggagtaacggttgcgtaggtgattcggtggttttaag

SEQ ID NO: 20762 - DNA, 644 bp, Artificial Sequence
  chemically treated genomic DNA (Homo sapiens) CpG-island No: 20762
cttaaaaccaccgaatcacctacgcaaccgttactcctccaaaaccaatccgaactccccaaacccaccgacctaaatctaaaaaacaacaatccgcgtaacaacaacgactcgaaaatcaacacccgtcgaaaaaaccgcgtacccgttaaaactaacgtcacgcccaaaaaaacaaacgccaaaacgtatatcctaaacaaaaacgacccgccgctccgatccccgaacaacaacgaccgacgtcaaaccgcaaaacgaaaaacgaaaacaaaactctacccgacaacccaacgccgaacgcccgcgccactccgaccttacgccattccgaccccacgacgaccgacgacgacaacgcgactaaactcaacgactcgcaacccgaacgccccccctaccgaccgctcgctaactcaacctcacccgcaatcttatccgctaactcgctcgcccgcctacaaatcgacaaaacccaacgacccgacgaacaacttcacgaaaaacactaaccgacaacgctccgctaccgccgcgccccgcccctttataacaccacctaccaatcgctaaacgacgctttcgctaccctccaatcaacgcgaacgaaaacaaacctaacccccgaacgtaaacgattaccg

SEQ ID NO: 20763 - DNA, 644 bp, Artificial Sequence
  chemically treated genomic DNA (Homo sapiens) CpG-island No: 20763
tttgaggttatcgagttatttgcgtagtcgttgtttttttaagattaattcgggttttttagatttatcggtttgaatttggaggatagtagttcgcgtgataatagcgattcggagattagtattcgtcgggaaagtcgcgtattcgttgaagttggcgttacgtttaaaggaataaacgttagagcgtgtgttttgggtaaaggcggttcgtcgtttcggttttcgggtagtagcggtcggcgttaggtcgtaaggcgaggggcggggataggattttattcggtagtttagcgtcgagcgttcgcgttatttcggttttgcgttatttcggttttacgacggtcggcggcggtagcgcggttgggtttagcggttcgtagttcgggcgttttttttgtcggtcgttcgttagtttagttttattcgtagttttgttcgttggttcgttcgttcgtttataggtcgatagggtttaacgattcggcgagtaattttacggaaggtattggtcgataacgtttcgttgtcgtcgcgtttcgtttttttgtgatattatttattaatcgttggacggcgttttcgttgttttttaattagcgcgggcgggggtaggtttggttttcggacgtgggcggttgtcg

SEQ ID NO: 20764 - DNA, 644 bp, Artificial Sequence
  chemically treated genomic DNA (Homo sapiens) CpG-island No: 20764
cgacaaccgcccacgtccgaaaaccaaacctacccccgcccgcgctaattaaaaaacaacgaaaacgccgtccaacgattaataaataatatcacaaaaaaacgaaacgcgacgacaacgaaacgttatcgaccaataccttccgtaaaattactcgccgaatcgttaaaccctatcgacctataaacgaacgaacgaaccaacgaacaaaactacgaataaaactaaactaacgaacgaccgacaaaaaaaacgcccgaactacgaaccgctaaacccaaccgcgctaccgccgccgaccgtcgtaaaaccgaaataacgcaaaaccgaaataacgcgaacgctcgacgctaaactaccgaataaaatcctatccccgcccctcgccttacgacctaacgccgaccgctactacccgaaaaccgaaacgacgaaccgcctttacccaaaacacacgctctaacgtttattcctttaaacgtaacgccaacttcaacgaatacgcgactttcccgacgaatactaatctccgaatcgctattatcacgcgaactactatcctccaaattcaaaccgataaatctaaaaaacccgaattaatcttaaaaaaacaacgactacgcaaataactcgataacctcaaa

SEQ ID NO: 20765 - DNA, 565 bp, Artificial Sequence
  chemically treated genomic DNA (Homo sapiens) CpG-island No: 20765
tcggtcgcggtttatatttatttttttcgggtagataggcgcggtagtcgttgtttacggtcgcgagggtttagaggagttggtagaggttcgcggttcggagttttagggtgtagggcgggcgggtttttcgagagtgtcggggagcggagagcggggagcgttagttggcgtttcgggtaagtagttggggttacgcggggtagatggatcgattttagggcgcgcggggtagtcggagtgattttaggaagggcgtaggggtcgttgggacgatttcgggatgtgggagcgcgtgttaggggggattcgcgtgtaggcgatagcgagcgggattcgggtggttgtagggtcgggagtgcgggcgttcgatttaggaaggaggggagttgaggttgaagttggggttggtttaggttgagtagaagcgggcgggtaggggcggggttggtttggcgggcgtacggcgtggcgtttacgtggtcgtttttaggtggttattatagcgtttgtagtcgtttagcgggttttttggtttcggcgttggtttttagttttaggtgta

SEQ ID NO: 20766 - DNA, 565 bp, Artificial Sequence
  chemically treated genomic DNA (Homo sapiens) CpG-island No: 20766
tacacctaaaactaaaaaccaacgccgaaaccaaaaaacccgctaaacgactacaaacgctataataaccacctaaaaacgaccacgtaaacgccacgccgtacgcccgccaaaccaaccccgcccctacccgcccgcttctactcaacctaaaccaaccccaacttcaacctcaactcccctccttcctaaatcgaacgcccgcactcccgaccctacaaccacccgaatcccgctcgctatcgcctacacgcgaatcccccctaacacgcgctcccacatcccgaaatcgtcccaacgacccctacgcccttcctaaaatcactccgactaccccgcgcgccctaaaatcgatccatctaccccgcgtaaccccaactacttacccgaaacgccaactaacgctccccgctctccgctccccgacactctcgaaaaacccgcccgccctacaccctaaaactccgaaccgcgaacctctaccaactcctctaaaccctcgcgaccgtaaacaacgactaccgcgcctatctacccgaaaaaaataaatataaaccgcgaccga

SEQ ID NO: 20767 - DNA, 565 bp, Artificial Sequence
  chemically treated genomic DNA (Homo sapiens) CpG-island No: 20767
tgtatttggggttgggagttagcgtcggagttaggaggttcgttaggcggttgtaggcgttgtgatggttatttgggggcggttacgtgagcgttacgtcgtgcgttcgttaggttagtttcgtttttgttcgttcgtttttgtttaatttagattagttttagttttagttttagttttttttttttttggatcgagcgttcgtattttcggttttgtagttattcgagtttcgttcgttgtcgtttgtacgcgagttttttttggtacgcgtttttatatttcgggatcgttttaacggtttttgcgttttttttgggattatttcgattgtttcgcgcgttttgggatcggtttatttatttcgcgtggttttagttgtttgttcggagcgttagttagcgtttttcgtttttcgtttttcggtattttcggggggttcgttcgttttgtattttggagtttcgggtcgcgagtttttgttaatttttttggattttcgcggtcgtgggtagcggttgtcgcgtttgtttgttcgagggaggtaggtgtggatcgcggtcgg

SEQ ID NO: 20768 - DNA, 565 bp, Artificial Sequence
  chemically treated genomic DNA (Homo sapiens) CpG-island No: 20768
ccgaccgcgatccacacctacctccctcgaacaaacaaacgcgacaaccgctacccacgaccgcgaaaatccaaaaaaattaacaaaaactcgcgacccgaaactccaaaatacaaaacgaacgaaccccccgaaaataccgaaaaacgaaaaacgaaaaacgctaactaacgctccgaacaaacaactaaaaccacgcgaaataaataaaccgatcccaaaacgcgcgaaacaatcgaaataatcccaaaaaaaacgcaaaaaccgttaaaacgatcccgaaatataaaaacgcgtaccaaaaaaaactcgcgtacaaacgacaacgaacgaaactcgaataactacaaaaccgaaaatacgaacgctcgatccaaaaaaaaaaaaaactaaaactaaaactaaaactaatctaaattaaacaaaaacgaacgaacaaaaacgaaactaacctaacgaacgcacgacgtaacgctcacgtaaccgcccccaaataaccatcacaacgcctacaaccgcctaacgaacctcctaactccgacgctaactcccaaccccaaataca

SEQ ID NO: 20769 - DNA, 631 bp, Artificial Sequence
  chemically treated genomic DNA (Homo sapiens) CpG-island No: 20769
cggcgcgtagtttttgttttcggtgttagttttagtgcgtcgggtatacgcgcgtttcgtaattttttttttatttttttttcgttgtttaattttcgttagtcgcggtcgttgtatcgttagagagttgtaagagggaggtagtaaggtgcggtcgttagtagtgatattatgtgatcggtacggtttattgatacgtagttttggttaaagagcgggcgtataggaggggaggagatcgcgcgcgggacggggaggaatggtttgttcgcgttaaattattataagttatggttgcggaagggttacgcgttttttagtaggagaatgatttcgattcgtgatttttagcgtcggtgtatgtcgatgtaagtgcgaggtcggcgagtagagtgtgagtgggggttggtggtgaggggagattttgatgtaatcggttcggaaaggaggagagttaggcgagcgcggattggggcggttacgttatttcgttagaaggtcgttaggagttttcgttttttattttttttcgaaattcgttaggttacgttaagttttttgtttaatttttattgacgggggttatattttttcggttttcgtagttagattttgatataaaggatattaa

SEQ ID NO: 20770 - DNA, 631 bp, Artificial Sequence
  chemically treated genomic DNA (Homo sapiens) CpG-island No: 20770
ttaatatcctttatatcaaaatctaactacgaaaaccgaaaaaatataacccccgtcaataaaaattaaacaaaaaacttaacgtaacctaacgaatttcgaaaaaaaataaaaaacgaaaactcctaacgaccttctaacgaaataacgtaaccgccccaatccgcgctcgcctaactctcctcctttccgaaccgattacatcaaaatctcccctcaccaccaacccccactcacactctactcgccgacctcgcacttacatcgacatacaccgacgctaaaaatcacgaatcgaaatcattctcctactaaaaaacgcgtaacccttccgcaaccataacttataataatttaacgcgaacaaaccattcctccccgtcccgcgcgcgatctcctcccctcctatacgcccgctctttaaccaaaactacgtatcaataaaccgtaccgatcacataatatcactactaacgaccgcaccttactacctccctcttacaactctctaacgatacaacgaccgcgactaacgaaaattaaacaacgaaaaaaaaataaaaaaaaaattacgaaacgcgcgtatacccgacgcactaaaactaacaccgaaaacaaaaactacgcgccg

SEQ ID NO: 20771 - DNA, 631 bp, Artificial Sequence
  chemically treated genomic DNA (Homo sapiens) CpG-island No: 20771
ttgatgttttttgtgttaaggtttggttgcggaggtcgggaaaatgtggttttcgttagtaagggttgggtagggagtttggcgtggtttggcggatttcggaggaaggtgaagggcggaggtttttggcgattttttggcggagtggcgtggtcgttttagttcgcgttcgtttggtttttttttttttcgggtcgattgtattagaatttttttttattattaatttttatttatattttgttcgtcggtttcgtatttatatcgatatgtatcggcgttgagggttacgaatcggagttatttttttattgggggacgcgtggttttttcgtaattatggtttgtgatggtttaacgcggataggttattttttttcgtttcgcgcgcggttttttttttttttgtgcgttcgttttttaattaaagttgcgtgttagtgagtcgtgtcggttatatggtgttattgttggcggtcgtattttgttgttttttttttgtagttttttgacgatgtagcgatcgcggttggcggagattgagtaacggggaaagggtgagggaggggttgcggggcgcgcgtgtgttcggcgtattgaagttggtatcgggagtagaggttgcgcgtcg

SEQ ID NO: 20772 - DNA, 631 bp, Artificial Sequence
  chemically treated genomic DNA (Homo sapiens) CpG-island No: 20772
cgacgcgcaacctctactcccgataccaacttcaatacgccgaacacacgcgcgccccgcaacccctccctcaccctttccccgttactcaatctccgccaaccgcgatcgctacatcgtcaaaaaactacaaaaaaaaaacaacaaaatacgaccgccaacaataacaccatataaccgacacgactcactaacacgcaactttaattaaaaaacgaacgcacaaaaaaaaaaaaaaccgcgcgcgaaacgaaaaaaaataacctatccgcgttaaaccatcacaaaccataattacgaaaaaaccacgcgtcccccaataaaaaaataactccgattcgtaaccctcaacgccgatacatatcgatataaatacgaaaccgacgaacaaaatataaataaaaattaataataaaaaaaaattctaatacaatcgacccgaaaaaaaaaaaaaccaaacgaacgcgaactaaaacgaccacgccactccgccaaaaaatcgccaaaaacctccgcccttcaccttcctccgaaatccgccaaaccacgccaaactccctacccaacccttactaacgaaaaccacattttcccgacctccgcaaccaaaccttaacacaaaaaacatcaa

SEQ ID NO: 20773 - DNA, 768 bp, Artificial Sequence
  chemically treated genomic DNA (Homo sapiens) CpG-island No: 20773
tacggttcgattcgttcgaattttttttcggggttagcgtcgcgttgcgtcgttcggttgatttagttcgggcgggcgggcgggaggttttcgattgggcgggaaggtgcgggaaggttcgcggcggcggggtcggggaggtgtaaaaggatgaaaagttcgtggaagcggagttgagtagattcgagtcgggttggcggtagagaaatcgtagggagagttttattgttgagcgtttttcgacggcggagcggtagtagttttcgtggtttttagtattcgataagaagttttagttatgtaggttttacgggagttcgcggtgggtatcgatttgggtattatttattcgtgcgtgggcgtgttttagtagggtcgcgtggagattttggttaacgattagggtaatcggtattacgtttagttacgtggtttttatcgatatcgagcggttggtcggggacgcggttaagagttaggcggttttgaatttttataatatcgtgttcgatgttaagcggttgatcgggcgtaagttcgcggatattacggtgtagtcggatatgaagtattggtttttttaggtggtgagcgagggcggtaagtttaaggtgcgcgtatgttatcgcggggaggataagacgttttatttcgaggagatttcgtttatggtgttgagtaagatgaaagagacggcgcgagcgtattttggttaattcgtgaagtacgtattgattatcgggtttatttatgttaggtatttgtaat

SEQ ID NO: 20774 - DNA, 768 bp, Artificial Sequence
  chemically treated genomic DNA (Homo sapiens) CpG-island No: 20774
attacaaatacctaacataaataaacccgataatcaatacgtacttcacgaattaaccaaaatacgctcgcgccgtctctttcatcttactcaacaccataaacgaaatctcctcgaaataaaacgtcttatcctccccgcgataacatacgcgcaccttaaacttaccgccctcgctcaccacctaaaaaaaccaatacttcatatccgactacaccgtaatatccgcgaacttacgcccgatcaaccgcttaacatcgaacacgatattataaaaattcaaaaccgcctaactcttaaccgcgtccccgaccaaccgctcgatatcgataaaaaccacgtaactaaacgtaataccgattaccctaatcgttaaccaaaatctccacgcgaccctactaaaacacgcccacgcacgaataaataatacccaaatcgatacccaccgcgaactcccgtaaaacctacataactaaaacttcttatcgaatactaaaaaccacgaaaactactaccgctccgccgtcgaaaaacgctcaacaataaaactctccctacgatttctctaccgccaacccgactcgaatctactcaactccgcttccacgaacttttcatccttttacacctccccgaccccgccgccgcgaaccttcccgcaccttcccgcccaatcgaaaacctcccgcccgcccgcccgaactaaatcaaccgaacgacgcaacgcgacgctaaccccgaaaaaaaattcgaacgaatcgaaccgta

SEQ ID NO: 20775 - DNA, 768 bp, Artificial Sequence
  chemically treated genomic DNA (Homo sapiens) CpG-island No: 20775
gttgtaagtatttgatataggtgggttcggtgattaatgcgtgttttacgggttggttagggtacgttcgcgtcgttttttttattttgtttagtattatggacgagattttttcggggtagaacgttttgtttttttcgcggtagtatacgcgtattttgggtttgtcgttttcgtttattatttggaagggttagtgttttatgttcgattgtatcgtggtgttcgcgaatttgcgttcgattagtcgtttggtatcgaatacggtgttgtgggggtttagggtcgtttggtttttggtcgcgttttcgattagtcgttcggtgtcggtgaaggttacgtagttgggcgtggtgtcggttgttttggtcgttggttaggatttttacgcggttttgttgaaatacgtttacgtacgagtaggtggtgtttaggtcgatgtttatcgcgagttttcgtggggtttgtatggttgaagttttttgtcggatgttggaggttacggaggttgttgtcgtttcgtcgtcgaggggcgtttagtagtgaggttttttttgcggtttttttgtcgttagttcggttcggatttgtttagtttcgtttttacgggttttttatttttttgtattttttcgatttcgtcgtcgcgaattttttcgtattttttcgtttagtcgagagtttttcgttcgttcgttcgggttgagttagtcgggcggcgtagcgcggcgttgatttcgggagaaggttcgggcggatcgggtcgtg

SEQ ID NO: 20776 - DNA, 768 bp, Artificial Sequence
  chemically treated genomic DNA (Homo sapiens) CpG-island No: 20776
cacgacccgatccgcccgaaccttctcccgaaatcaacgccgcgctacgccgcccgactaactcaacccgaacgaacgaacgaaaaactctcgactaaacgaaaaaatacgaaaaaattcgcgacgacgaaatcgaaaaaatacaaaaaaataaaaaacccgtaaaaacgaaactaaacaaatccgaaccgaactaacgacaaaaaaaccgcaaaaaaaacctcactactaaacgcccctcgacgacgaaacgacaacaacctccgtaacctccaacatccgacaaaaaacttcaaccatacaaaccccacgaaaactcgcgataaacatcgacctaaacaccacctactcgtacgtaaacgtatttcaacaaaaccgcgtaaaaatcctaaccaacgaccaaaacaaccgacaccacgcccaactacgtaaccttcaccgacaccgaacgactaatcgaaaacgcgaccaaaaaccaaacgaccctaaacccccacaacaccgtattcgataccaaacgactaatcgaacgcaaattcgcgaacaccacgatacaatcgaacataaaacactaacccttccaaataataaacgaaaacgacaaacccaaaatacgcgtatactaccgcgaaaaaaacaaaacgttctaccccgaaaaaatctcgtccataatactaaacaaaataaaaaaaacgacgcgaacgtaccctaaccaacccgtaaaacacgcattaatcaccgaacccacctatatcaaatacttacaac

SEQ ID NO: 20777 - DNA, 650 bp, Artificial Sequence
  chemically treated genomic DNA (Homo sapiens) CpG-island No: 20777
agtgtgcgtttttagatcggagtaattatcggtgtcgttcgaattttagtaatcgtgtttaagggtgacgttaagattttgttggcgatagaggttcgtcgtatcgttgcgtacgttacgttttagttagttattttttttgtcgttacgggttagtcgggtaaaggtgtcgttattttgcggacgcgtcgtagttatatcggatgcgattatggcgtttttgtaggtttttagcgtttgcgttggatcgttcgtttgcgttttaaatttcgtattattacgtagtattatcgcgttttttatcgacggtggttgagattttgtttgcgggattaatttattaaacgttcgttgcgttgttgcggtatcgttaagttgcgtttgtgttagcgttacgcgtcgttgtgtgtttagcgaggcgttatcggtagcgggtagtttcgttagttggttacgtgtcgtcgttttgttatcggtagtaatatttattttcgttagattaagaatggcgtcggcgttagttggttttcgcgttaggatattttgatatgtagcgcgggcggcggtgtaattacgtcgttgttgcgtttagttagttagcgtgaggttaatacgcgtggaaggtggttgttggcgtagtatcgttttcg

SEQ ID NO: 20778 - DNA, 650 bp, Artificial Sequence
  chemically treated genomic DNA (Homo sapiens) CpG-island No: 20778
cgaaaacgatactacgccaacaaccaccttccacgcgtattaacctcacgctaactaactaaacgcaacaacgacgtaattacaccgccgcccgcgctacatatcaaaatatcctaacgcgaaaaccaactaacgccgacgccattcttaatctaacgaaaataaatattactaccgataacaaaacgacgacacgtaaccaactaacgaaactacccgctaccgataacgcctcgctaaacacacaacgacgcgtaacgctaacacaaacgcaacttaacgataccgcaacaacgcaacgaacgtttaataaattaatcccgcaaacaaaatctcaaccaccgtcgataaaaaacgcgataatactacgtaataatacgaaatttaaaacgcaaacgaacgatccaacgcaaacgctaaaaacctacaaaaacgccataatcgcatccgatataactacgacgcgtccgcaaaataacgacacctttacccgactaacccgtaacgacaaaaaaaataactaactaaaacgtaacgtacgcaacgatacgacgaacctctatcgccaacaaaatcttaacgtcacccttaaacacgattactaaaattcgaacgacaccgataattactccgatctaaaaacgcacact

SEQ ID NO: 20779 - DNA, 650 bp, Artificial Sequence
  chemically treated genomic DNA (Homo sapiens) CpG-island No: 20779
cgaaagcgatgttgcgttagtaattattttttacgcgtattgattttacgttggttgattgggcgtaataacgacgtgattatatcgtcgttcgcgttgtatattagaatgttttgacgcgggagttagttaacgtcgacgttatttttggtttgacggaagtggatattgttgtcggtgataaagcggcggtacgtagttagttggcgaaattgttcgttatcgataacgtttcgttgaatatatagcggcgcgtggcgttggtataggcgtagtttggcgatatcgtagtagcgtagcggacgtttaataagttgatttcgtaggtaaaattttagttatcgtcgatggaaagcgcgatggtgttgcgtgatggtgcgaagtttgaagcgtaggcgggcgatttaacgtaggcgttggaaatttataaagacgttatggtcgtattcggtgtgattacgacgcgttcgtaggataacgatatttttattcgattgattcgtaacgataagaaagatgattggttgaaacgtggcgtgcgtagcgatgcggcggatttttatcgttagtaggattttaacgttatttttgagtacgattattggggttcgagcggtatcggtggttatttcgatttgaaagcgtatatt

SEQ ID NO: 20780 - DNA, 650 bp, Artificial Sequence
  chemically treated genomic DNA (Homo sapiens) CpG-island No: 20780
aatatacgctttcaaatcgaaataaccaccgataccgctcgaaccccaataatcgtactcaaaaataacgttaaaatcctactaacgataaaaatccgccgcatcgctacgcacgccacgtttcaaccaatcatctttcttatcgttacgaatcaatcgaataaaaatatcgttatcctacgaacgcgtcgtaatcacaccgaatacgaccataacgtctttataaatttccaacgcctacgttaaatcgcccgcctacgcttcaaacttcgcaccatcacgcaacaccatcgcgctttccatcgacgataactaaaattttacctacgaaatcaacttattaaacgtccgctacgctactacgatatcgccaaactacgcctataccaacgccacgcgccgctatatattcaacgaaacgttatcgataacgaacaatttcgccaactaactacgtaccgccgctttatcaccgacaacaatatccacttccgtcaaaccaaaaataacgtcgacgttaactaactcccgcgtcaaaacattctaatatacaacgcgaacgacgatataatcacgtcgttattacgcccaatcaaccaacgtaaaatcaatacgcgtaaaaaataattactaacgcaacatcgctttcg

SEQ ID NO: 20781 - DNA, 645 bp, Artificial Sequence
  chemically treated genomic DNA (Homo sapiens) CpG-island No: 20781
cggagtagagtagcgcggtgttaaaatcgttgttcgttgtgtcgtttattattaggttgtgcgtttttttcgggttgttttgtgaagaggttgggttgagttgattttttacgttcgtttcgatattaaagttttgcggaatggtacgggtaataaagtttattacgtcgtttacgttttgcggttcgtaacgtatcgtattattatcgcgtattacgttaatggtatttatgttgtcgagcgaaacgggagttagtgaaagttgcggttgatcgtaaggggcgaaggggacggggatgtcgtttattaggacggtcgagcggttggcgaggcgcgggtttaggtttcggatgttaaagtttatcgttaggtcgtggttgtcggtgtcgttgtttttcggcgcgttgacgttagggatgcggttaagtattttacgtatggtggttgcgtcggttttggcgaaatttttacggcggattacgttacgcgcgttagtatgtttaatacgtcgtttttacgcgtattatttagttagtcgtcgattacggttagggtatttttttttttggtgcgggcgcgggttttagcgtttagttgttatttttttagcggttttattttggcgtcgttgtcgtttagcggttg

SEQ ID NO: 20782 - DNA, 645 bp, Artificial Sequence
  chemically treated genomic DNA (Homo sapiens) CpG-island No: 20782
caaccgctaaacgacaacgacgccaaaataaaaccgctaaaaaaataacaactaaacgctaaaacccgcgcccgcaccaaaaaaaaaaataccctaaccgtaatcgacgactaactaaataatacgcgtaaaaacgacgtattaaacatactaacgcgcgtaacgtaatccgccgtaaaaatttcgccaaaaccgacgcaaccaccatacgtaaaatacttaaccgcatccctaacgtcaacgcgccgaaaaacaacgacaccgacaaccacgacctaacgataaactttaacatccgaaacctaaacccgcgcctcgccaaccgctcgaccgtcctaataaacgacatccccgtccccttcgccccttacgatcaaccgcaactttcactaactcccgtttcgctcgacaacataaataccattaacgtaatacgcgataataatacgatacgttacgaaccgcaaaacgtaaacgacgtaataaactttattacccgtaccattccgcaaaactttaatatcgaaacgaacgtaaaaaatcaactcaacccaacctcttcacaaaacaacccgaaaaaaacgcacaacctaataataaacgacacaacgaacaacgattttaacaccgcgctactctactccg

SEQ ID NO: 20783 - DNA, 645 bp, Artificial Sequence
  chemically treated genomic DNA (Homo sapiens) CpG-island No: 20783
taatcgttggacggtagcgacgttaaggtaaaatcgttggggaaataatagttggacgttggagttcgcgttcgtattaaaaaagaagatgttttgatcgtggtcggcgattggttgggtgatgcgcgtgaaaacgacgtattgaatatgttggcgcgcgtgacgtgattcgtcgtgaggatttcgttaaaatcggcgtaattattatgcgtgaggtatttaatcgtatttttggcgttagcgcgtcggaaaataacggtatcggtagttacgatttggcgatgaattttggtattcggggtttgaattcgcgtttcgttagtcgttcgatcgttttgatggacggtattttcgtttttttcgttttttacggttagtcgtagtttttattggttttcgtttcgttcggtaatatggatgttattgacgtggtacgcggtggtggtgcggtgcgttacggatcgtagagcgtgggcggcgtggtgaattttgttattcgtgttatttcgtaggattttggtatcgaggcgggcgtggaaggttagtttagtttaatttttttataaaataattcgaaagagacgtataatttgatggtgggcggtatagcggataacggttttggtatcgcgttgttttatttcg

SEQ ID NO: 20784 - DNA, 645 bp, Artificial Sequence
  chemically treated genomic DNA (Homo sapiens) CpG-island No: 20784
cgaaataaaacaacgcgataccaaaaccgttatccgctataccgcccaccatcaaattatacgtctctttcgaattattttataaaaaaattaaactaaactaaccttccacgcccgcctcgataccaaaatcctacgaaataacacgaataacaaaattcaccacgccgcccacgctctacgatccgtaacgcaccgcaccaccaccgcgtaccacgtcaataacatccatattaccgaacgaaacgaaaaccaataaaaactacgactaaccgtaaaaaacgaaaaaaacgaaaataccgtccatcaaaacgatcgaacgactaacgaaacgcgaattcaaaccccgaataccaaaattcatcgccaaatcgtaactaccgataccgttattttccgacgcgctaacgccaaaaatacgattaaatacctcacgcataataattacgccgattttaacgaaatcctcacgacgaatcacgtcacgcgcgccaacatattcaatacgtcgttttcacgcgcatcacccaaccaatcgccgaccacgatcaaaacatcttcttttttaatacgaacgcgaactccaacgtccaactattatttccccaacgattttaccttaacgtcgctaccgtccaacgatta

SEQ ID NO: 20785 - DNA, 635 bp, Artificial Sequence
  chemically treated genomic DNA (Homo sapiens) CpG-island No: 20785
agacgcgttagcgtcgtattaggtaatcggttcgggcgttagatgttggatgcggcgtaatcgttttatttaatttacggggtggagtattttatagcggtgtaggtttgataagacgcgttagcgtcgtattaggtaatcggtttgggcgttagatgtcggatgcggcgtaatcgttttattcgatttacggggtggagtattttatagcggtgtaggtttgataagacgcgttagcgtcgtattaggtaatcggttcggacgttggatgtcggatgcggcgtaatcgttttatttaatttacggggtggagtattttatagcggtgtaggtttgataagacgcgttagcgtcgtattaggtaatcggtttgggcgttagatgtcggatgcggcgtaatcgttttattcgatttacggggtggagtattttatagcggtgtaggtttgataagacgcgttagcgtcgtattaggtaatcggttcgggcgttggatgtcggatgcggcgtgatcgttttgtttgatttacggggtgtcgtattatatagcggtgtaggtttgataagacgcgttagcgtcgtattaggtaatcggttcgggcgtgggatgtcggatgcggcgggatcgttttgtt

SEQ ID NO: 20786 - DNA, 635 bp, Artificial Sequence
  chemically treated genomic DNA (Homo sapiens) CpG-island No: 20786
aacaaaacgatcccgccgcatccgacatcccacgcccgaaccgattacctaatacgacgctaacgcgtcttatcaaacctacaccgctatataatacgacaccccgtaaatcaaacaaaacgatcacgccgcatccgacatccaacgcccgaaccgattacctaatacgacgctaacgcgtcttatcaaacctacaccgctataaaatactccaccccgtaaatcgaataaaacgattacgccgcatccgacatctaacgcccaaaccgattacctaatacgacgctaacgcgtcttatcaaacctacaccgctataaaatactccaccccgtaaattaaataaaacgattacgccgcatccgacatccaacgtccgaaccgattacctaatacgacgctaacgcgtcttatcaaacctacaccgctataaaatactccaccccgtaaatcgaataaaacgattacgccgcatccgacatctaacgcccaaaccgattacctaatacgacgctaacgcgtcttatcaaacctacaccgctataaaatactccaccccgtaaattaaataaaacgattacgccgcatccaacatctaacgcccgaaccgattacctaatacgacgctaacgcgtct

SEQ ID NO: 20787 - DNA, 635 bp, Artificial Sequence
  chemically treated genomic DNA (Homo sapiens) CpG-island No: 20787
gataaggcggtttcgtcgtattcgatattttacgttcgagtcggttgtttgatgcgacgttggcgcgttttattaggtttatatcgttgtgtagtgcggtatttcgtaggttagataaggcggttacgtcgtattcgatatttaacgttcgagtcggttgtttgatgcgacgttggcgcgttttattaggtttatatcgttgtgaagtgttttatttcgtaggtcggataaggcggttacgtcgtattcgatatttaacgtttaagtcggttgtttgatgcgacgttggcgcgttttattaggtttatatcgttgtgaagtgttttatttcgtaggttggataaggcggttacgtcgtattcgatatttaacgttcgagtcggttgtttgatgcgacgttggcgcgttttattaggtttatatcgttgtgaagtgttttatttcgtaggtcggataaggcggttacgtcgtattcgatatttaacgtttaagtcggttgtttgatgcgacgttggcgcgttttattaggtttatatcgttgtgaagtgttttatttcgtaggttggataaggcggttacgtcgtatttaatatttaacgttcgagtcggttgtttgatgcgacgttggcgcgttt

SEQ ID NO: 20788 - DNA, 635 bp, Artificial Sequence
  chemically treated genomic DNA (Homo sapiens) CpG-island No: 20788
aaacgcgccaacgtcgcatcaaacaaccgactcgaacgttaaatattaaatacgacgtaaccgccttatccaacctacgaaataaaacacttcacaacgatataaacctaataaaacgcgccaacgtcgcatcaaacaaccgacttaaacgttaaatatcgaatacgacgtaaccgccttatccgacctacgaaataaaacacttcacaacgatataaacctaataaaacgcgccaacgtcgcatcaaacaaccgactcgaacgttaaatatcgaatacgacgtaaccgccttatccaacctacgaaataaaacacttcacaacgatataaacctaataaaacgcgccaacgtcgcatcaaacaaccgacttaaacgttaaatatcgaatacgacgtaaccgccttatccgacctacgaaataaaacacttcacaacgatataaacctaataaaacgcgccaacgtcgcatcaaacaaccgactcgaacgttaaatatcgaatacgacgtaaccgccttatctaacctacgaaataccgcactacacaacgatataaacctaataaaacgcgccaacgtcgcatcaaacaaccgactcgaacgtaaaatatcgaatacgacgaaaccgccttatc

SEQ ID NO: 20789 - DNA, 1234 bp, Artificial Sequence
  chemically treated genomic DNA (Homo sapiens) CpG-island No: 20789
gagtattacggcgcgcggagttcggcggttttttcgaaaggttgtttttcgtagattcgtttcgtatagttttcggtcggcgggtttggttttcgagggttcgcgggaacggttttttttttttcgattttttttgatcgcgtttttagaggtcgttttttcgcgtttagagttttttcgtttttttttcggttcgttcgtcgcgtcgcgtttttagagattcgtttcggggcgggaaaggggttttttcgcgtttcggcggtagagggggacgtaggggtcggcggcggtgttcgatttttttttgtttcgcggttaggcgcgtatttattttttagtagtcgggtgatgaggttgtttacgtttagtttttcgttcgttattttgtcggtatagatttttttttttagtagcgggaataagggtttttcggcggcggaggttgcggcgacggttcggcgtttttttatttataagttacgcggcgtttcgatttcggttttaatttttttttttttcgggttttttttttatttttttttcgtcgggtagcgagagcgcgcgtatattcggaggtatttacggaaaataaataaataaataagagaggttttttcgaatagggtcgcgttagatttaggtcgttattttttttttttcggtatcgtttagtttcgtaaagtttattagcgtcgtcgacggttttattcgtagcgttatttatttcgtacgttttttgcgcgtcgtcgcgttacgtagtttttcgcgtaggcgcgcggtgcgtttttcgtcgaggtttttttcgacgtttgggtcgtcgcgtaatcgtattggagcggtttttttcgttgtcgttttcgcgtaggtgcgtcgttttttttttacgtttacggcgtcgagtttcgtcgcggtggcgtaggcgttagggaggtttttcggttttgtcgcgcggaggaagtttcggttacgtagagcgcgttggggtagggttgatttttttttttttttattttattggttttttttagacgtggtggttgcgttttttcggtttcgtttttcgttttttggttttattttttagatttgtaaatagtttttcgtgtttttttcgttagtcgggaaacgcgaattgtagcgtttgggattcgggtttgcgcgtgtggaaagtaaaaggggttattttgttggagttcgatattgtaaataaaggtttttattttcggcggtttta

SEQ ID NO: 20790 - DNA, 1234 bp, Artificial Sequence
  chemically treated genomic DNA (Homo sapiens) CpG-island No: 20790
taaaaccgccgaaaataaaaacctttatttacaatatcgaactccaacaaaataaccccttttactttccacacgcgcaaacccgaatcccaaacgctacaattcgcgtttcccgactaacgaaaaaaacacgaaaaactatttacaaatctaaaaaataaaaccaaaaaacgaaaaacgaaaccgaaaaaacgcaaccaccacgtctaaaaaaaaccaataaaataaaaaaaaaaaaaaatcaaccctaccccaacgcgctctacgtaaccgaaacttcctccgcgcgacaaaaccgaaaaacctccctaacgcctacgccaccgcgacgaaactcgacgccgtaaacgtaaaaaaaaaacgacgcacctacgcgaaaacgacaacgaaaaaaaccgctccaatacgattacgcgacgacccaaacgtcgaaaaaaacctcgacgaaaaacgcaccgcgcgcctacgcgaaaaactacgtaacgcgacgacgcgcaaaaaacgtacgaaataaataacgctacgaataaaaccgtcgacgacgctaataaactttacgaaactaaacgataccgaaaaaaaaaaaataacgacctaaatctaacgcgaccctattcgaaaaaacctctcttatttatttatttattttccgtaaatacctccgaatatacgcgcgctctcgctacccgacgaaaaaaaaataaaaaaaaaacccgaaaaaaaaaaaaattaaaaccgaaatcgaaacgccgcgtaacttataaataaaaaaacgccgaaccgtcgccgcaacctccgccgccgaaaaacccttattcccgctactaaaaaaaaaaatctataccgacaaaataacgaacgaaaaactaaacgtaaacaacctcatcacccgactactaaaaaataaatacgcgcctaaccgcgaaacaaaaaaaaatcgaacaccgccgccgacccctacgtccccctctaccgccgaaacgcgaaaaaacccctttcccgccccgaaacgaatctctaaaaacgcgacgcgacgaacgaaccgaaaaaaaaacgaaaaaactctaaacgcgaaaaaacgacctctaaaaacgcgatcaaaaaaaatcgaaaaaaaaaaaaccgttcccgcgaaccctcgaaaaccaaacccgccgaccgaaaactatacgaaacgaatctacgaaaaacaacctttcgaaaaaaccgccgaactccgcgcgccgtaatactc

SEQ ID NO: 20791 - DNA, 1234 bp, Artificial Sequence
  chemically treated genomic DNA (Homo sapiens) CpG-island No: 20791
tagaatcgtcggggataaagatttttatttgtaatgtcgaattttagtagagtaattttttttgttttttatacgcgtaaattcgggttttaaacgttgtagttcgcgtttttcggttaacggaagaaatacgaggaattgtttgtagatttaggggatgaagttaaaaaacggaaagcgaggtcgaaagggcgtaattattacgtttggaggaggttagtgaagtagagaaaggggaaggttagttttgttttagcgcgttttgcgtaatcgggatttttttcgcgcggtaaagtcggggaatttttttggcgtttgcgttatcgcggcgagattcggcgtcgtggacgtggagagagggcgacgtatttgcgcgaagacggtagcgggagaagtcgttttagtgcggttgcgcggcggtttaggcgtcgaggggagtttcggcggggagcgtatcgcgcgtttgcgcggagagttgcgtgacgcggcggcgcgtaagggacgtgcggagtgagtggcgttgcgggtggggtcgtcggcggcgttggtgagttttgcggagttgggcggtgtcgaggaggaggaggtggcggtttgggtttgacgcggttttgttcgagggggttttttttgtttatttatttatttttcgtgggtgttttcgagtgtgcgcgcgttttcgttattcggcggggagggggtggggggagggttcgggaaaagggggagttggagtcggggtcgaaacgtcgcgtgatttgtaggtgagagaacgtcgagtcgtcgtcgtagttttcgtcgtcgagaagtttttgttttcgttgttgggaaggagagtttgtgtcgataagatggcggacggggagttgaacgtggatagttttattattcggttgttggagggtgagtgcgcgtttggtcgcgggatagagggaggtcgggtatcgtcgtcgatttttgcgtttttttttgtcgtcggaacgcgaggggatttttttttcgtttcgagacgagtttttgggagcgcggcgcggcggacgaatcgaggagggggcgaggaggttttgggcgcgggggagcggtttttgggagcgcggttaggggagatcgggggagagggggtcgttttcgcggattttcgggggttaggttcgtcggtcgaaggttgtgcggagcgggtttgcgggagatagtttttcggaaaggtcgtcgggtttcgcgcgtcgtggtgttt

SEQ ID NO: 20792 - DNA, 1234 bp, Artificial Sequence
  chemically treated genomic DNA (Homo sapiens) CpG-island No: 20792
aaacaccacgacgcgcgaaacccgacgacctttccgaaaaactatctcccgcaaacccgctccgcacaaccttcgaccgacgaacctaacccccgaaaatccgcgaaaacgaccccctctcccccgatctcccctaaccgcgctcccaaaaaccgctcccccgcgcccaaaacctcctcgccccctcctcgattcgtccgccgcgccgcgctcccaaaaactcgtctcgaaacgaaaaaaaaatcccctcgcgttccgacgacaaaaaaaaacgcaaaaatcgacgacgatacccgacctccctctatcccgcgaccaaacgcgcactcaccctccaacaaccgaataataaaactatccacgttcaactccccgtccgccatcttatcgacacaaactctccttcccaacaacgaaaacaaaaacttctcgacgacgaaaactacgacgacgactcgacgttctctcacctacaaatcacgcgacgtttcgaccccgactccaactcccccttttcccgaaccctccccccaccccctccccgccgaataacgaaaacgcgcgcacactcgaaaacacccacgaaaaataaataaataaacaaaaaaaaccccctcgaacaaaaccgcgtcaaacccaaaccgccacctcctcctcctcgacaccgcccaactccgcaaaactcaccaacgccgccgacgaccccacccgcaacgccactcactccgcacgtcccttacgcgccgccgcgtcacgcaactctccgcgcaaacgcgcgatacgctccccgccgaaactcccctcgacgcctaaaccgccgcgcaaccgcactaaaacgacttctcccgctaccgtcttcgcgcaaatacgtcgccctctctccacgtccacgacgccgaatctcgccgcgataacgcaaacgccaaaaaaattccccgactttaccgcgcgaaaaaaatcccgattacgcaaaacgcgctaaaacaaaactaaccttcccctttctctacttcactaacctcctccaaacgtaataattacgccctttcgacctcgctttccgttttttaacttcatcccctaaatctacaaacaattcctcgtatttcttccgttaaccgaaaaacgcgaactacaacgtttaaaacccgaatttacgcgtataaaaaacaaaaaaaattactctactaaaattcgacattacaaataaaaatctttatccccgacgattcta

SEQ ID NO: 20793 - DNA, 677 bp, Artificial Sequence
  chemically treated genomic DNA (Homo sapiens) CpG-island No: 20793
gtagtcgcgcgtcgcgaatttcggtttatttgtaagtaaggcgggtcgggggtagagggcgtcgggttgtgcgggggaatcggttcgcgtttcgggattggggggcggtggaagagagagcgagcgggtatgcgtagtggggcggaggaggtggcgatggtcgggggaggcggggggattgttgtttatttgtagttgggttaatttcgcggcgtaggcggcggcggagcgcggggagttcgcggcgggtttagttgtcgtagtattatgttcgagttttttttcgggtagacgtcgcgcgtcgtcggggtttcggtaggggaggatgttagacgttcgggagaggttagggtagtagcggcggcggcggcgcgatggtggtgattatttttgttcgaggcggcggcggggatcgtatattttttcggcggcggggttgcgggttagcgtcggtcggggtcgcggcgttgttggtcggggtaagttgtttgtgttacggtcgttttttgtagggcgagttcgtgtacgacgacgtgtgggcgatcgtgaataatttcgacgtgcggttcggcgtttcgtttcgttggggtatttttattaacgatttttggggtaagggtatggtcgagaatattagttataagttttatcggtcgttttgcgtttttatttttaag

SEQ ID NO: 20794 - DNA, 677 bp, Artificial Sequence
  chemically treated genomic DNA (Homo sapiens) CpG-island No: 20794
cttaaaaataaaaacgcaaaacgaccgataaaacttataactaatattctcgaccatacccttaccccaaaaatcgttaataaaaataccccaacgaaacgaaacgccgaaccgcacgtcgaaattattcacgatcgcccacacgtcgtcgtacacgaactcgccctacaaaaaacgaccgtaacacaaacaacttaccccgaccaacaacgccgcgaccccgaccgacgctaacccgcaaccccgccgccgaaaaaatatacgatccccgccgccgcctcgaacaaaaataatcaccaccatcgcgccgccgccgccgctactaccctaacctctcccgaacgtctaacatcctcccctaccgaaaccccgacgacgcgcgacgtctacccgaaaaaaaactcgaacataatactacgacaactaaacccgccgcgaactccccgcgctccgccgccgcctacgccgcgaaattaacccaactacaaataaacaacaatccccccgcctcccccgaccatcgccacctcctccgccccactacgcatacccgctcgctctctcttccaccgccccccaatcccgaaacgcgaaccgattcccccgcacaacccgacgccctctacccccgacccgccttacttacaaataaaccgaaattcgcgacgcgcgactac

SEQ ID NO: 20795 - DNA, 677 bp, Artificial Sequence
  chemically treated genomic DNA (Homo sapiens) CpG-island No: 20795
tttgaaggtgaggacgtagagcggtcggtaggatttgtggttggtgttttcggttatgtttttgttttagaagtcgttggtgaagatgttttagcggagcggggcgtcgggtcgtacgtcggggttgtttacgatcgtttatacgtcgtcgtgtacgaattcgttttgtagggagcggtcgtagtataggtagtttgtttcggttagtagcgtcgcggtttcggtcggcgttagttcgtagtttcgtcgtcgggagggtgtgcggttttcgtcgtcgtttcgggtagaggtggttattattatcgcgtcgtcgtcgtcgttgttgttttggtttttttcgggcgtttggtatttttttttatcggggtttcggcggcgcgcggcgtttgttcggaggggggttcgggtatggtgttgcggtagttggattcgtcgcgagtttttcgcgtttcgtcgtcgtttgcgtcgcggagttggtttagttgtaaataaatagtagttttttcgtttttttcggttatcgttatttttttcgttttattgcgtatgttcgttcgtttttttttttatcgttttttaatttcgggacgcgggtcggttttttcgtatagttcggcgttttttgttttcggttcgttttgtttgtaggtggatcggggttcgcggcgcgcggttgt

SEQ ID NO: 20796 - DNA, 677 bp, Artificial Sequence
  chemically treated genomic DNA (Homo sapiens) CpG-island No: 20796
acaaccgcgcgccgcgaaccccgatccacctacaaacaaaacgaaccgaaaacaaaaaacgccgaactatacgaaaaaaccgacccgcgtcccgaaattaaaaaacgataaaaaaaaaaacgaacgaacatacgcaataaaacgaaaaaaataacgataaccgaaaaaaacgaaaaaactactatttatttacaactaaaccaactccgcgacgcaaacgacgacgaaacgcgaaaaactcgcgacgaatccaactaccgcaacaccatacccgaacccccctccgaacaaacgccgcgcgccgccgaaaccccgataaaaaaaaataccaaacgcccgaaaaaaaccaaaacaacaacgacgacgacgacgcgataataataaccacctctacccgaaacgacgacgaaaaccgcacaccctcccgacgacgaaactacgaactaacgccgaccgaaaccgcgacgctactaaccgaaacaaactacctatactacgaccgctccctacaaaacgaattcgtacacgacgacgtataaacgatcgtaaacaaccccgacgtacgacccgacgccccgctccgctaaaacatcttcaccaacgacttctaaaacaaaaacataaccgaaaacaccaaccacaaatcctaccgaccgctctacgtcctcaccttcaaa

SEQ ID NO: 20797 - DNA, 1569 bp, Artificial Sequence
  chemically treated genomic DNA (Homo sapiens) CpG-island No: 20797
tgcgtatttcgttgttttgttttcgtttatcgttttttagcggttttttttaacggcgtcgtttgtttagtatagtttcgtattgcgttattaaatgagttaagcggaaggatcggtattttttcgggaaaattaggtattaatatacggtgtatttaattgaatttaaattcgggaatagtgtaggtagtgttaataaagcgcggtgttgggtttcgagcgtttaaaggtttttgttagtttttagacgcggttaaatttataggattttaaaaggtgatttggtcggtatcgtagagcggtaggcggcgtagagggtagagttcgatcggttttcgtttcgcgttcgtttcgtacggttatcggttttttcgcggacgttatttcggcgggagtcgagttgagttcgatttttcgtttttcgaagaggttcgaaagtcgcgttacgtgcggggtcgaaatttcgcggtcggggtcgggtggttggcgggtgggaggtaggtacggcggtcggggggtagttcgcgcgttcggtgatttatcggtcgttttcgagtgcggttgtaagcgaaggggtcggcgcgttaggcggggttcgtgtttttggggttattttcgcgtttgttattaataatttagcgtttggaggcgaaagtttcggtgggcgtagtcgtaaagttcgtacgcggaataaataataatgttattaaatcgcgttcgagcgttagttcggttagaaagcggcgggagggcgttatcgggagttgattttgtttggagtttgtatttcgtttttcgcgcgtttttatagcgtttttcgcgtttttgagggggtttagcgtcgtcgtagttttggttttattcgttagttcgttaggttttagttcgttgttcgcgtcgatttcgtatagtacgaagtagtgcgcgaagcggtaggcggtcggggaggagttcgagttcgggtcgggcgtcgcgtagttttcgtttatttcggtcgcgttgttttaggggtcgtcgtcgtcgtcgttcgggaaggttttttgcggaggttgttattatcgtttcggttgtggtttgtgcgttcgttttagggcgatattggcgcgtttatggtcgcgtagtcgtttttcgtcgtcgtagtttgttttttcgttcggcgcgggggaagcggtcgcgggttcgcgcgcggcgggttcggagttcggtcgggtgggggaggggcgcggggggagtgtcggtttgagaggttttcgtagtcgtagttgcgttcgcgagttgagagtcgtcgcgtttggcgttcgcgggttagttgagcggcgttcgggttgtgggagcgcggggcgggcgggggcgtcggggttcggcgcgtgcgacggagaggggtggggggcgcgttcgcgagggacggaggcgcgcgtttttatcgtgcgcgcgcgtttagcgggttcggaggttaagtttggcgtggggtcgtattcgtgtttattggtttcggttgcggtatcgagggcgattttgtatatattttttttcgttttggttagtcgataagagggttagttttagtgt

SEQ ID NO: 20798 - DNA, 1569 bp, Artificial Sequence
  chemically treated genomic DNA (Homo sapiens) CpG-island No: 20798
acactaaaactaaccctcttatcgactaaccaaaacgaaaaaaaatatatacaaaatcgccctcgataccgcaaccgaaaccaataaacacgaatacgaccccacgccaaacttaacctccgaacccgctaaacgcgcgcgcacgataaaaacgcgcgcctccgtccctcgcgaacgcgccccccacccctctccgtcgcacgcgccgaaccccgacgcccccgcccgccccgcgctcccacaacccgaacgccgctcaactaacccgcgaacgccaaacgcgacgactctcaactcgcgaacgcaactacgactacgaaaacctctcaaaccgacactccccccgcgcccctcccccacccgaccgaactccgaacccgccgcgcgcgaacccgcgaccgcttcccccgcgccgaacgaaaaaacaaactacgacgacgaaaaacgactacgcgaccataaacgcgccaatatcgccctaaaacgaacgcacaaaccacaaccgaaacgataataacaacctccgcaaaaaaccttcccgaacgacgacgacgacgacccctaaaacaacgcgaccgaaataaacgaaaactacgcgacgcccgacccgaactcgaactcctccccgaccgcctaccgcttcgcgcactacttcgtactatacgaaatcgacgcgaacaacgaactaaaacctaacgaactaacgaataaaaccaaaactacgacgacgctaaaccccctcaaaaacgcgaaaaacgctataaaaacgcgcgaaaaacgaaatacaaactccaaacaaaatcaactcccgataacgccctcccgccgctttctaaccgaactaacgctcgaacgcgatttaataacattattatttattccgcgtacgaactttacgactacgcccaccgaaactttcgcctccaaacgctaaattattaataacaaacgcgaaaataaccccaaaaacacgaaccccgcctaacgcgccgaccccttcgcttacaaccgcactcgaaaacgaccgataaatcaccgaacgcgcgaactaccccccgaccgccgtacctacctcccacccgccaaccacccgaccccgaccgcgaaatttcgaccccgcacgtaacgcgactttcgaacctcttcgaaaaacgaaaaatcgaactcaactcgactcccgccgaaataacgtccgcgaaaaaaccgataaccgtacgaaacgaacgcgaaacgaaaaccgatcgaactctaccctctacgccgcctaccgctctacgataccgaccaaatcaccttttaaaatcctataaatttaaccgcgtctaaaaactaacaaaaacctttaaacgctcgaaacccaacaccgcgctttattaacactacctacactattcccgaatttaaattcaattaaatacaccgtatattaatacctaattttcccgaaaaaataccgatccttccgcttaactcatttaataacgcaatacgaaactatactaaacaaacgacgccgttaaaaaaaaccgctaaaaaacgataaacgaaaacaaaacaacgaaatacgca

SEQ ID NO: 20799 - DNA, 1569 bp, Artificial Sequence
  chemically treated genomic DNA (Homo sapiens) CpG-island No: 20799
atattgaggttagtttttttatcggttggttagggcgaggaggggtgtgtgtagggtcgttttcgatgtcgtagtcggggttagtgggtacgaatgcggttttacgttaggtttggttttcgaattcgttaggcgcgcgcgtacggtagaagcgcgcgttttcgtttttcgcgagcgcgttttttattttttttcgtcgtacgcgtcgagtttcggcgttttcgttcgtttcgcgtttttatagttcgagcgtcgtttagttgattcgcgggcgttagacgcggcggtttttagttcgcgagcgtagttgcggttgcgagggttttttaggtcgatatttttttcgcgttttttttttattcggtcgggtttcggattcgtcgcgcgcgagttcgcggtcgtttttttcgcgtcgagcgaggaggtaggttgcggcggcgagaggcggttgcgcggttatgggcgcgttagtgtcgttttagggcgggcgtatagattatagtcggagcggtggtggtagttttcgtagaaagttttttcgggcggcggcggcggcggtttttggagtagcgcggtcgggatgagcgggagttgcgcggcgttcggttcgggttcgggttttttttcggtcgtttgtcgtttcgcgtattatttcgtgttgtgcgggatcgacgcggatagcgggttggagtttgacgagttggcgggtaaggttagggttgcggcggcgttgagtttttttaggggcgcgggggacgttgtggggacgcgcgggaggcggggtgtaggttttagataaagttagttttcggtggcgttttttcgtcgttttttggtcgaattggcgttcgggcgcgatttaatgatattgttatttatttcgcgtgcgggttttgcggttgcgtttatcggggttttcgtttttaggcgttgggttattaataataggcgcgggggtggttttaagggtacggatttcgtttggcgcgtcggttttttcgtttgtagtcgtattcggaggcggtcggtgagttatcgggcgcgcgggttgtttttcgatcgtcgtgtttgttttttattcgttagttattcggtttcggtcgcgaagtttcggtttcgtacgtgacgcggttttcgggttttttcgggagacggggagtcggatttagttcggttttcgtcggggtagcgttcgcggaggagtcggtggtcgtgcggagcgagcgcggggcggggatcggtcggattttgttttttgcgtcgtttgtcgttttgcggtgtcggttaagttattttttggaattttgtggatttggtcgcgtttgggagttggtagggatttttggacgttcgggatttagtatcgcgttttgttgatattgtttatattgttttcgagtttaaatttagttgggtgtatcgtgtgttagtgtttggttttttcggaggggtatcggttttttcgtttgatttatttgatggcgtagtgcggggttgtgttgggtaaacgacgtcgttaaaaggggtcgttaaagggcgatgggcgggggtagggtagcggagtgcgta

SEQ ID NO: 20800 - DNA, 1569 bp, Artificial Sequence
  chemically treated genomic DNA (Homo sapiens) CpG-island No: 20800
tacgcactccgctaccctacccccgcccatcgccctttaacgaccccttttaacgacgtcgtttacccaacacaaccccgcactacgccatcaaataaatcaaacgaaaaaaccgatacccctccgaaaaaaccaaacactaacacacgatacacccaactaaatttaaactcgaaaacaatataaacaatatcaacaaaacgcgatactaaatcccgaacgtccaaaaatccctaccaactcccaaacgcgaccaaatccacaaaattccaaaaaataacttaaccgacaccgcaaaacgacaaacgacgcaaaaaacaaaatccgaccgatccccgccccgcgctcgctccgcacgaccaccgactcctccgcgaacgctaccccgacgaaaaccgaactaaatccgactccccgtctcccgaaaaaacccgaaaaccgcgtcacgtacgaaaccgaaacttcgcgaccgaaaccgaataactaacgaataaaaaacaaacacgacgatcgaaaaacaacccgcgcgcccgataactcaccgaccgcctccgaatacgactacaaacgaaaaaaccgacgcgccaaacgaaatccgtacccttaaaaccacccccgcgcctattattaataacccaacgcctaaaaacgaaaaccccgataaacgcaaccgcaaaacccgcacgcgaaataaataacaatatcattaaatcgcgcccgaacgccaattcgaccaaaaaacgacgaaaaaacgccaccgaaaactaactttatctaaaacctacaccccgcctcccgcgcgtccccacaacgtcccccgcgcccctaaaaaaactcaacgccgccgcaaccctaaccttacccgccaactcgtcaaactccaacccgctatccgcgtcgatcccgcacaacacgaaataatacgcgaaacgacaaacgaccgaaaaaaaacccgaacccgaaccgaacgccgcgcaactcccgctcatcccgaccgcgctactccaaaaaccgccgccgccgccgcccgaaaaaactttctacgaaaactaccaccaccgctccgactataatctatacgcccgccctaaaacgacactaacgcgcccataaccgcgcaaccgcctctcgccgccgcaacctacctcctcgctcgacgcgaaaaaaacgaccgcgaactcgcgcgcgacgaatccgaaacccgaccgaataaaaaaaaaacgcgaaaaaaatatcgacctaaaaaaccctcgcaaccgcaactacgctcgcgaactaaaaaccgccgcgtctaacgcccgcgaatcaactaaacgacgctcgaactataaaaacgcgaaacgaacgaaaacgccgaaactcgacgcgtacgacgaaaaaaaataaaaaacgcgctcgcgaaaaacgaaaacgcgcgcttctaccgtacgcgcgcgcctaacgaattcgaaaaccaaacctaacgtaaaaccgcattcgtacccactaaccccgactacgacatcgaaaacgaccctacacacacccctcctcgccctaaccaaccgataaaaaaactaacctcaatat

SEQ ID NO: 20801 - DNA, 891 bp, Artificial Sequence
  chemically treated genomic DNA (Homo sapiens) CpG-island No: 20801
  unsure (587, 622, 691, 781)
gtcgtggacgggttgttattcgagtttattttatgtttcgagattgttagcggtttgcgcggtgcgtcggttatatttgtaaatttcgagatgtttttatttttgtgagggttagttacgttgttttttaatttcgtcgagttgttgtttttttttattcgtcgtatttttgtataatatattttttaatgcgtttatatgggttatatttttttattttttcgtatggggtacgcgttgcgtggcgttttttagtttttgttttttatttcgggtttcgtttttttcgttgtattgtttatcgtgtgaataatattgttcgttgtttacgtgttcgtttttttacgatttttcggtgttcggttagttgtaggttagtggtgcgatttgcggtgggtagttggtttgatttttattgcgttttttttcgtttgtgtcgtggcgtcggatgcgtcgggttttttacgttaggtataaaattgtgtgtaaattcgtgtattgatgtgtatgtttaatttttacggttcggtttatttgtgtttttttcgcgtttattataattgcgttttgtcgttcgtcgtgttttnttgcgtcgttttcgcgtttatacgtcgtatttcgngtgttttttatgttttttttttttcgtgtttttatattttttttatatttttatttcgtcggatgtttntgttgtcgtgatcggttgtcgtgtagtttttaacgcgtgttgtttttattgtttttttttcgttttttgttcgtagtcgttttttttttnttttttttttatcggtattgggcgcgggattacgcgtcgtgtttcgttttatttttttcgtttgtgttttttttcgttttagttatttttgtgttttcgtgttttgtgtt

SEQ ID NO: 20802 - DNA, 891 bp, Artificial Sequence
  chemically treated genomic DNA (Homo sapiens) CpG-island No: 20802
  unsure (111, 201, 270, 305)
aacacaaaacacgaaaacacaaaaataactaaaacgaaaaaaaacacaaacgaaaaaaataaaacgaaacacgacgcgtaatcccgcgcccaataccgataaaaaaaaaanaaaaaaaaaacgactacgaacaaaaaacgaaaaaaaaacaataaaaacaacacgcgttaaaaactacacgacaaccgatcacgacaacanaaacatccgacgaaataaaaatataaaaaaaatataaaaacacgaaaaaaaaaaaacataaaaaacacncgaaatacgacgtataaacgcgaaaacgacgcaanaaaacacgacgaacgacaaaacgcaattataataaacgcgaaaaaaacacaaataaaccgaaccgtaaaaattaaacatacacatcaatacacgaatttacacacaattttatacctaacgtaaaaaacccgacgcatccgacgccacgacacaaacgaaaaaaaacgcaataaaaatcaaaccaactacccaccgcaaatcgcaccactaacctacaactaaccgaacaccgaaaaatcgtaaaaaaacgaacacgtaaacaacgaacaatattattcacacgataaacaatacaacgaaaaaaacgaaacccgaaataaaaaacaaaaactaaaaaacgccacgcaacgcgtaccccatacgaaaaaataaaaaaatataacccatataaacgcattaaaaaatatattatacaaaaatacgacgaataaaaaaaaacaacaactcgacgaaattaaaaaacaacgtaactaaccctcacaaaaataaaaacatctcgaaatttacaaatataaccgacgcaccgcgcaaaccgctaacaatctcgaaacataaaataaactcgaataacaacccgtccacgac

SEQ ID NO: 20803 - DNA, 891 bp, Artificial Sequence
  chemically treated genomic DNA (Homo sapiens) CpG-island No: 20803
  unsure (111, 201, 270, 305)
aatataagatacgggaatatagagatggttgaaacgggaagagatatagacgagaggggtaggacgaaatacgacgcgtagtttcgcgtttaatgtcgatgaaggaagagnaggaaaagagcggttgcgggtaaggaacggaaagggagtagtggagataatacgcgttggagattatacggtaatcggttacgataatanggatattcggcgaggtgagggtgtggaagaggtgtgggggtacggaagaaagggagtatgagaagtatncggggtgcgacgtgtgggcgcgaagacggcgtagnagagtacggcgagcgataagacgtaattgtggtgggcgcggggagggtataggtgaatcgaatcgtaagggttaagtatatatattagtgtacgggtttgtatataattttatatttaacgtaaggggttcgacgtattcggcgttacgatataagcggaggagggcgtagtgaggattaggttaattgtttatcgtagatcgtattattaatttgtaattaatcggatatcgggagatcgtggaggaacgggtacgtaaataacgagtaatgttatttatacggtagatagtgtaacggagaaggcgggattcggggtggggagtaaaagttgaggagcgttacgtaacgcgtattttatacgggaaagtgggaggatataatttatgtgagcgtattgggagatatgttatgtaggagtgcggcgggtaaggagggatagtaattcgacggggttgaaaaataacgtgattaatttttataggaatgagagtatttcggagtttgtaagtgtgatcggcgtatcgcgtaagtcgttaatagtttcggggtatgaaatggattcgggtaatagttcgtttacggt

SEQ ID NO: 20804 - DNA, 891 bp, Artificial Sequence
  chemically treated genomic DNA (Homo sapiens) CpG-island No: 20804
  unsure (587, 622, 691, 781)
accgtaaacgaactattacccgaatccatttcataccccgaaactattaacgacttacgcgatacgccgatcacacttacaaactccgaaatactctcattcctataaaaattaatcacgttatttttcaaccccgtcgaattactatccctccttacccgccgcactcctacataacatatctcccaatacgctcacataaattatatcctcccactttcccgtataaaatacgcgttacgtaacgctcctcaacttttactccccaccccgaatcccgccttctccgttacactatctaccgtataaataacattactcgttatttacgtacccgttcctccacgatctcccgatatccgattaattacaaattaataatacgatctacgataaacaattaacctaatcctcactacgccctcctccgcttatatcgtaacgccgaatacgtcgaaccccttacgttaaatataaaattatatacaaacccgtacactaatatatatacttaacccttacgattcgattcacctataccctccccgcgcccaccacaattacgtcttatcgctcgccgtactctnctacgccgtcttcgcgcccacacgtcgcaccccgnatacttctcatactccctttcttccgtacccccacacctcttccacaccctcacctcgccgaatatccntattatcgtaaccgattaccgtataatctccaacgcgtattatctccactactccctttccgttccttacccgcaaccgctcttttcctnctcttccttcatcgacattaaacgcgaaactacgcgtcgtatttcgtcctacccctctcgtctatatctcttcccgtttcaaccatctctatattcccgtatcttatatt

SEQ ID NO: 20805 - DNA, 599 bp, Artificial Sequence
  chemically treated genomic DNA (Homo sapiens) CpG-island No: 20805
ttttcgcgcgtttatagtcgagtatatcgtttttagtttcgtttcgtattatttcgggaatcgggcgagcgtacgtttcgatattaagttatcgatagtatattttcgattaaaaatcgtatcgtaagtttattgaatcgaagtaatcgaaacgcgcgtagtattatttatttcggcgcgatttttcggcgtaggagaggacgggcgagcgttcgtttcggagacgcggaattttcgtattcgagcgaaggaattagcgattagtaagcgcgttcgattcgatatattaatcgttttttatgtcgtcgcgaattcgcgtttttttttttttacgttttcgcgtttcgtttaacgatatcggttatgtttaaacgtttcgatcggttcgtggttcgtttttttgcgttgttttattcgtcgtcgtttattttttatttcgcgtttattcggtcgagtttagcgaatttttatttatcgtatttcgcgttcgggtatcgacggaacgcggaagttatttttaaacgagttttataatatagacgatatcgtatttattttcgattcgcgttcgagtcgagttttttagtataagtataata

SEQ ID NO: 20806 - DNA, 599 bp, Artificial Sequence
  chemically treated genomic DNA (Homo sapiens) CpG-island No: 20806
tattatacttatactaaaaaactcgactcgaacgcgaatcgaaaataaatacgatatcgtctatattataaaactcgtttaaaaataacttccgcgttccgtcgatacccgaacgcgaaatacgataaataaaaattcgctaaactcgaccgaataaacgcgaaataaaaaataaacgacgacgaataaaacaacgcaaaaaaacgaaccacgaaccgatcgaaacgtttaaacataaccgatatcgttaaacgaaacgcgaaaacgtaaaaaaaaaaaaacgcgaattcgcgacgacataaaaaacgattaatatatcgaatcgaacgcgcttactaatcgctaattccttcgctcgaatacgaaaattccgcgtctccgaaacgaacgctcgcccgtcctctcctacgccgaaaaatcgcgccgaaataaataatactacgcgcgtttcgattacttcgattcaataaacttacgatacgatttttaatcgaaaatatactatcgataacttaatatcgaaacgtacgctcgcccgattcccgaaataatacgaaacgaaactaaaaacgatatactcgactataaacgcgcgaaaa

SEQ ID NO: 20807 - DNA, 599 bp, Artificial Sequence
  chemically treated genomic DNA (Homo sapiens) CpG-island No: 20807
tgttgtgtttgtgttggggggttcgattcgaacgcgggtcgggggtggatacggtgtcgtttgtattatgggattcgtttgggggtggttttcgcgtttcgtcggtgttcgggcgcggagtacgatggataggggttcgttgggttcgatcggatggacgcgggataagggataggcggcgacgggtggaataacgtagagaagcgggttacgggtcgatcggggcgtttgggtatgatcggtgtcgttggacgggacgcgggggcgtggggggaaaggggcgcgggttcgcggcggtatggggggcggttggtgtatcggatcgagcgcgtttgttagtcgttgattttttcgttcgggtacgggggtttcgcgttttcggggcgggcgttcgttcgtttttttttgcgtcggagggtcgcgtcggggtgggtggtgttgcgcgcgtttcggttgtttcggtttagtgagtttgcggtacggtttttggtcgggggtgtgttatcggtgatttggtatcggggcgtgcgttcgttcggttttcggagtggtgcggggcggggttgggggcggtgtgttcggttatgggcgcgcgggga

SEQ ID NO: 20808 - DNA, 599 bp, Artificial Sequence
  chemically treated genomic DNA (Homo sapiens) CpG-island No: 20808
tccccgcgcgcccataaccgaacacaccgcccccaaccccgccccgcaccactccgaaaaccgaacgaacgcacgccccgataccaaatcaccgataacacacccccgaccaaaaaccgtaccgcaaactcactaaaccgaaacaaccgaaacgcgcgcaacaccacccaccccgacgcgaccctccgacgcaaaaaaaaacgaacgaacgcccgccccgaaaacgcgaaacccccgtacccgaacgaaaaaatcaacgactaacaaacgcgctcgatccgatacaccaaccgccccccataccgccgcgaacccgcgcccctttccccccacgcccccgcgtcccgtccaacgacaccgatcatacccaaacgccccgatcgacccgtaacccgcttctctacgttattccacccgtcgccgcctatcccttatcccgcgtccatccgatcgaacccaacgaacccctatccatcgtactccgcgcccgaacaccgacgaaacgcgaaaaccacccccaaacgaatcccataatacaaacgacaccgtatccacccccgacccgcgttcgaatcgaaccccccaacacaaacacaaca

SEQ ID NO: 20809 - DNA, 865 bp, Artificial Sequence
  chemically treated genomic DNA (Homo sapiens) CpG-island No: 20809
tagtgtgcggttttcggcgcgggtcggcgtttttttcgcgtcgttttttttttttttttttttttttcggtcgttttttgtcggtgggcggtatagggatgcgcgagtcggggtttttttttttgtttttggattcggtcgagattgcgtgttttcggcgagttttttttttttttttttttggggggttcgttcgggggtttattttttttttttttgcgggcgcgtgcggcggcgtaaaaaaagattaaaaaattcgcgtttttttttcgttttgtcgtttttttttttttttttttttttcgttcggttttttcgttcggtttcgttttttcgttttgtttttgcgtttttcggcgtgcgttcgcgggtttcgcggtcgttcgcgtttcggcggtggcgttcggttcgtcgttttgtgttcgtcgtttgtcgtttcgtcgttttcgtttcgtcgagtattttttcgttcgttttcgtttttttcgtttcggggtgtttcgtcgttcgtgcgtcgcggggcggcgcgtggttatttcggtcgcgttttcgtggtcggtgtttcggttgtttgttgcgtagttcgcgtcgagcgtttgttttgtgtttcgcgcgttcgtttttcggcgcgttttcgtttttttttttttcggcgtcgtttttttcgtcgtttcgttttttttttcgagaatattcgtttcgcgcgcgattcgcgcgttttttttttcgtcgttcgcgcgcgttttttcgcgcgtttcgttttgggtttttgattcggcgttgttttcgcggtgttttgttgtgtcgttcgtcgcggcgtatcgggtttttttcggggttttttcgtttcggcgtcgcgcgttcg

SEQ ID NO: 20810 - DNA, 865 bp, Artificial Sequence
  chemically treated genomic DNA (Homo sapiens) CpG-island No: 20810
cgaacgcgcgacgccgaaacgaaaaaaccccgaaaaaaacccgatacgccgcgacgaacgacacaacaaaacaccgcgaaaacaacgccgaatcaaaaacccaaaacgaaacgcgcgaaaaaacgcgcgcgaacgacgaaaaaaaaaacgcgcgaatcgcgcgcgaaacgaatattctcgaaaaaaaaaacgaaacgacgaaaaaaacgacgccgaaaaaaaaaaaaacgaaaacgcgccgaaaaacgaacgcgcgaaacacaaaacaaacgctcgacgcgaactacgcaacaaacaaccgaaacaccgaccacgaaaacgcgaccgaaataaccacgcgccgccccgcgacgcacgaacgacgaaacaccccgaaacgaaaaaaacgaaaacgaacgaaaaaatactcgacgaaacgaaaacgacgaaacgacaaacgacgaacacaaaacgacgaaccgaacgccaccgccgaaacgcgaacgaccgcgaaacccgcgaacgcacgccgaaaaacgcaaaaacaaaacgaaaaaacgaaaccgaacgaaaaaaccgaacgaaaaaaaaaaaaaaaaaaaaaaacgacaaaacgaaaaaaaaacgcgaattttttaatctttttttacgccgccgcacgcgcccgcaaaaaaaaaaaaaataaacccccgaacgaaccccccaaaaaaaaaaaaaaaaaaaactcgccgaaaacacgcaatctcgaccgaatccaaaaacaaaaaaaaaaaccccgactcgcgcatccctataccgcccaccgacaaaaaacgaccgaaaaaaaaaaaaaaaaaaaaaaaacgacgcgaaaaaaacgccgacccgcgccgaaaaccgcacacta

SEQ ID NO: 20811 - DNA, 865 bp, Artificial Sequence
  chemically treated genomic DNA (Homo sapiens) CpG-island No: 20811
cggacgcgcggcgtcgaaacgggggagtttcggaaggagttcgatacgtcgcggcggacggtatagtagagtatcgcgaggataacgtcggattagaggtttaaagcggagcgcgcgggggggcgcgcgcgagcggcggggagaggagcgcgcgggtcgcgcgcggggcgggtattttcggaggggggggcggggcggcggggggggcgacgtcgggaggggggggggcgggggcgcgtcggggggcgagcgcgcggggtatagggtaggcgttcggcgcgggttgcgtagtaagtagtcggggtatcggttacggaggcgcggtcgggatggttacgcgtcgtttcgcggcgtacgggcggcggggtatttcgggacggggggggcggaggcgagcgagggggtgttcgacgaagcgggggcggcggaacggtaggcgacgggtatagggcggcgggtcgggcgttatcgtcggggcgcgggcggtcgcgagattcgcggacgtacgtcggagagcgtaaaagtaagacgggggggcgaggtcgggcgaaggaatcgggcgggagaaagaaaagggggggggggcggtaggacgaggggagggcgcgggttttttgatttttttttgcgtcgtcgtacgcgttcgtagaaggaggggagataagttttcgggcgggttttttaagggagagaggggaggggattcgtcgggagtacgtaatttcggtcgggtttaaaggtaggggaaaaaatttcggttcgcgtatttttgtgtcgtttatcgataggaagcggtcgaaggaaggaaaaaagaaaggggagcggcgcggggggggcgtcgattcgcgtcgggggtcgtatatta

SEQ ID NO: 20812 - DNA, 865 bp, Artificial Sequence
  chemically treated genomic DNA (Homo sapiens) CpG-island No: 20812
taatatacgacccccgacgcgaatcgacgccccccccgcgccgctcccctttcttttttccttccttcgaccgcttcctatcgataaacgacacaaaaatacgcgaaccgaaattttttcccctacctttaaacccgaccgaaattacgtactcccgacgaatcccctcccctctctcccttaaaaaacccgcccgaaaacttatctcccctccttctacgaacgcgtacgacgacgcaaaaaaaaatcaaaaaacccgcgccctcccctcgtcctaccgcccccccccccttttctttctcccgcccgattccttcgcccgacctcgcccccccgtcttacttttacgctctccgacgtacgtccgcgaatctcgcgaccgcccgcgccccgacgataacgcccgacccgccgccctatacccgtcgcctaccgttccgccgcccccgcttcgtcgaacaccccctcgctcgcctccgccccccccgtcccgaaataccccgccgcccgtacgccgcgaaacgacgcgtaaccatcccgaccgcgcctccgtaaccgataccccgactacttactacgcaacccgcgccgaacgcctaccctataccccgcgcgctcgccccccgacgcgcccccgcccccccccctcccgacgtcgccccccccgccgccccgcccccccctccgaaaatacccgccccgcgcgcgacccgcgcgctcctctccccgccgctcgcgcgcgcccccccgcgcgctccgctttaaacctctaatccgacgttatcctcgcgatactctactataccgtccgccgcgacgtatcgaactccttccgaaactcccccgtttcgacgccgcgcgtccg

SEQ ID NO: 20813 - DNA, 1078 bp, Artificial Sequence
  chemically treated genomic DNA (Homo sapiens) CpG-island No: 20813
  unsure (120, 249, 285, 299, 693)
tggtgggcgatcgagttatcgtaaatttattaataaaaatataattgttacgtcgtcgcgtcgggcgacgcgcgcgggggtttaaaggcggcgcgttcgcggtacgcggggggcggtggnacgatgggatttcggcgttttcgcggtgttgttcggtttcgtcgggatatggtggtttaataacgttatattaggggtgttagcgttcgcgtttttatttaattaatatattaaacgttttttgttttnttttttttcgcgcggggggggtcgacgaggcggggnaaaagcggcgcgangttttagcgagaaaataacggggggggggggcggggtttttaaggatacgcgagaggggtagggggcgaggcggtatcgggggaaaaaaaaaaaaaaaaaattcgggcgggcggcgcgcgttaggaggtacgaaggcggcggggagaggtcggtgggcgcgcggggcgcgtacgtttcggtttcggaatacgtggtagcggcggcgatttgcgttaacggtacgggacgttttttcgtaggggagggtggaagtacgatttacgaatagcgcggcgcgagtcgcgcgggagggcgtcgtcgacgggcgcgggtttttacgcgaggagggaggattacggcggacgtttcgcgggggtggatcggggtgcgggggcggagtagggaacggagggnagggttcggggcggtcgcgtacgcgggacgcggtcgtagttgcgggggatttagcgttcggagggcgggggaggtcggcggaacggttacgataagagtcgcgtcgtcgatatttagtttagtgtaaggtcgtcgtcgggtgaaggttgttcgatcgtcgtttcgtcgacgggcgtttcgtggtcgatattttcggggaggagatcgggttaacgggtatattaagaggtgcgaggggttcgttcggcgtagcgattattagatagcgcgggcgcgagttaagtatcgcgtgggatatttgcgtcgtacgcgtatcgtttcgattgagaattagtcgttttatatcgaatattagcgcgtaaagtcgtcgggaggtgtgacgttg

SEQ ID NO: 20814 - DNA, 1078 bp, Artificial Sequence
  chemically treated genomic DNA (Homo sapiens) CpG-island No: 20814
  unsure (386, 780, 794, 830, 959)
caacgtcacacctcccgacgactttacgcgctaatattcgatataaaacgactaattctcaatcgaaacgatacgcgtacgacgcaaatatcccacgcgatacttaactcgcgcccgcgctatctaataatcgctacgccgaacgaacccctcgcacctcttaatatacccgttaacccgatctcctccccgaaaatatcgaccacgaaacgcccgtcgacgaaacgacgatcgaacaaccttcacccgacgacgaccttacactaaactaaatatcgacgacgcgactcttatcgtaaccgttccgccgacctcccccgccctccgaacgctaaatcccccgcaactacgaccgcgtcccgcgtacgcgaccgccccgaaccctnccctccgttccctactccgcccccgcaccccgatccacccccgcgaaacgtccgccgtaatcctccctcctcgcgtaaaaacccgcgcccgtcgacgacgccctcccgcgcgactcgcgccgcgctattcgtaaatcgtacttccaccctcccctacgaaaaaacgtcccgtaccgttaacgcaaatcgccgccgctaccacgtattccgaaaccgaaacgtacgcgccccgcgcgcccaccgacctctccccgccgccttcgtacctcctaacgcgcgccgcccgcccgaattttttttttttttttttcccccgataccgcctcgccccctacccctctcgcgtatccttaaaaaccccgccccccccccccgttattttctcgctaaaacntcgcgccgcttttnccccgcctcgtcgaccccccccgcgcgaaaaaaaanaaaacaaaaaacgtttaatatattaattaaataaaaacgcgaacgctaacacccctaatataacgttattaaaccaccatatcccgacgaaaccgaacaacaccgcgaaaacgccgaaatcccatcgtnccaccgccccccgcgtaccgcgaacgcgccgcctttaaacccccgcgcgcgtcgcccgacgcgacgacgtaacaattatatttttattaataaatttacgataactcgatcgcccacca

SEQ ID NO: 20815 - DNA, 1078 bp, Artificial Sequence
  chemically treated genomic DNA (Homo sapiens) CpG-island No: 20815
  unsure (386, 780, 794, 830, 959)
tagcgttatatttttcggcgattttgcgcgttggtgttcggtgtggggcggttggtttttaatcggagcggtgcgcgtgcggcgtaagtgttttacgcggtgtttggttcgcgttcgcgttgtttgatgatcgttgcgtcgggcggatttttcgtattttttggtgtgttcgttagttcggtttttttttcgggggtgtcgattacggggcgttcgtcggcgaggcggcggtcgagtagtttttattcggcggcggttttatattaggttaggtgtcggcggcgcggtttttgtcgtggtcgtttcgtcgatttttttcgtttttcgggcgttaggtttttcgtagttgcgatcgcgtttcgcgtacgcggtcgtttcgggttttntttttcgttttttgtttcgttttcgtatttcggtttattttcgcggggcgttcgtcgtagtttttttttttcgcgtgagggttcgcgttcgtcggcggcgttttttcgcgcggttcgcgtcgcgttattcgtgagtcgtgtttttatttttttttgcggaagggcgtttcgtgtcgttggcgtaggtcgtcgtcgttgttacgtgtttcggggtcggggcgtgcgcgtttcgcgcgtttatcggttttttttcgtcgttttcgtgttttttggcgcgcgtcgttcgttcgggttttttttttttttttttttttcggtgtcgtttcgttttttgtttttttcgcgtgtttttgggggtttcgtttttttttttcgttgttttttcgttggggtntcgcgtcgtttttntttcgtttcgtcggtttttttcgcgcgaaaaagagngaggtaaaaaacgtttggtgtgttggttgggtgggggcgcgaacgttgatatttttgatataacgttgttgggttattatgtttcggcgggatcgaatagtatcgcgggggcgtcggggttttatcgtnttatcgtttttcgcgtgtcgcgggcgcgtcgtttttgggttttcgcgcgcgtcgttcggcgcgacggcgtaataattgtgtttttattggtggatttgcggtggttcggtcgtttatta

SEQ ID NO: 20816 - DNA, 1078 bp, Artificial Sequence
  chemically treated genomic DNA (Homo sapiens) CpG-island No: 20816
  unsure (120, 249, 285, 299, 693)
taataaacgaccgaaccaccgcaaatccaccaataaaaacacaattattacgccgtcgcgccgaacgacgcgcgcgaaaacccaaaaacgacgcgcccgcgacacgcgaaaaacgataanacgataaaaccccgacgcccccgcgatactattcgatcccgccgaaacataataacccaacaacgttatatcaaaaatatcaacgttcgcgcccccacccaaccaacacaccaaacgttttttacctcnctctttttcgcgcgaaaaaaaccgacgaaacgaaanaaaaacgacgcganaccccaacgaaaaaacaacgaaaaaaaaaaacgaaacccccaaaaacacgcgaaaaaaacaaaaaacgaaacgacaccgaaaaaaaaaaaaaaaaaaaaaacccgaacgaacgacgcgcgccaaaaaacacgaaaacgacgaaaaaaaaccgataaacgcgcgaaacgcgcacgccccgaccccgaaacacgtaacaacgacgacgacctacgccaacgacacgaaacgcccttccgcaaaaaaaaataaaaacacgactcacgaataacgcgacgcgaaccgcgcgaaaaaacgccgccgacgaacgcgaaccctcacgcgaaaaaaaaaaactacgacgaacgccccgcgaaaataaaccgaaatacgaaaacgaaacaaaaaacgaaaaanaaaacccgaaacgaccgcgtacgcgaaacgcgatcgcaactacgaaaaacctaacgcccgaaaaacgaaaaaaatcgacgaaacgaccacgacaaaaaccgcgccgccgacacctaacctaatataaaaccgccgccgaataaaaactactcgaccgccgcctcgccgacgaacgccccgtaatcgacacccccgaaaaaaaaaccgaactaacgaacacaccaaaaaatacgaaaaatccgcccgacgcaacgatcatcaaacaacgcgaacgcgaaccaaacaccgcgtaaaacacttacgccgcacgcgcaccgctccgattaaaaaccaaccgccccacaccgaacaccaacgcgcaaaatcgccgaaaaatataacgcta

SEQ ID NO: 20817 - DNA, 862 bp, Artificial Sequence
  chemically treated genomic DNA (Homo sapiens) CpG-island No: 20817
atttcgcggttggttttttcgtttacgaagtgaaggttaagtatttcgtgcgtttcgaatttggcgaggcgtagtagtgagcgtagcgcgacgcgggttttggtttgtagcgcggtattgtgtttcgttttggtgaatattattagtaggtggtagtttatcggttcggtatcgtcgttttttaagtttttggttttcgcgtcgggggttggcgttacggagtttcgcgttagttttagcgcgggcggcgagggcgcggcgggagtttcggcgcgggttttttttagttttttggtggcgttggagaaggtttttcggtttgagtcgaggtagtagaaggcgtagacggttagcgtcgcggttagtagtagggcgtagtagtgggagcgtatagcgtttaggcgcgttatggttcgagcgtatgggagttcgtttcggaggaggtttatgcgttacgagatcgcggcgttagcggtgttagtaacgcgggagagttttcgggtattcggacgtcggcggttatttagtttcggcgttaggcggcggttatgaaaggggcggggtcgcgtcgtttggagttaatcgcgggcgtcggtgcgcggaggggcggggtcgggcgtgtcgaaatcgttgggttttaggttttaagggtattagaggaggggttagggtgggattcggcgttcggcgttgggagggggggatttcggattttagcgtgttgagggttggttcgttgtttcggttgagaaatggcgttttacgcggcgagttttagaggatatttaagttgagtgttgaagggaatggaggcgttcgaatagaggaatttaggttagttaaaagcgaagttggaggtatt

SEQ ID NO: 20818 - DNA, 862 bp, Artificial Sequence
  chemically treated genomic DNA (Homo sapiens) CpG-island No: 20818
aatacctccaacttcgcttttaactaacctaaattcctctattcgaacgcctccattcccttcaacactcaacttaaatatcctctaaaactcgccgcgtaaaacgccatttctcaaccgaaacaacgaaccaaccctcaacacgctaaaatccgaaatccccccctcccaacgccgaacgccgaatcccaccctaacccctcctctaatacccttaaaacctaaaacccaacgatttcgacacgcccgaccccgcccctccgcgcaccgacgcccgcgattaactccaaacgacgcgaccccgcccctttcataaccgccgcctaacgccgaaactaaataaccgccgacgtccgaatacccgaaaactctcccgcgttactaacaccgctaacgccgcgatctcgtaacgcataaacctcctccgaaacgaactcccatacgctcgaaccataacgcgcctaaacgctatacgctcccactactacgccctactactaaccgcgacgctaaccgtctacgccttctactacctcgactcaaaccgaaaaaccttctccaacgccaccaaaaaactaaaaaaaacccgcgccgaaactcccgccgcgccctcgccgcccgcgctaaaactaacgcgaaactccgtaacgccaacccccgacgcgaaaaccaaaaacttaaaaaacgacgataccgaaccgataaactaccacctactaataatattcaccaaaacgaaacacaataccgcgctacaaaccaaaacccgcgtcgcgctacgctcactactacgcctcgccaaattcgaaacgcacgaaatacttaaccttcacttcgtaaacgaaaaaaccaaccgcgaaat

SEQ ID NO: 20819 - DNA, 862 bp, Artificial Sequence
  chemically treated genomic DNA (Homo sapiens) CpG-island No: 20819
ggtgtttttagtttcgtttttggttaatttaagtttttttgttcgggcgtttttattttttttaatatttagtttggatattttttggggttcgtcgcgtagggcgttattttttagtcgggatagcgggttagtttttagtacgttggagttcggaattttttttttttaacgtcgggcgtcggattttattttaattttttttttaatatttttggaatttaggatttagcggtttcggtacgttcggtttcgttttttcgcgtatcggcgttcgcgattggttttaggcggcgcggtttcgttttttttatggtcgtcgtttggcgtcggggttaagtggtcgtcggcgttcgggtattcgagggttttttcgcgttgttggtatcgttggcgtcgcggtttcgtagcgtatgggtttttttcgaggcgggtttttatgcgttcgggttatggcgcgtttgggcgttgtgcgtttttattattgcgttttgttgttggtcgcggcgttggtcgtttgcgttttttattatttcggtttaggtcgggagattttttttagcgttattaagaggttgaaggaggttcgcgtcggggttttcgtcgcgttttcgtcgttcgcgttggagttagcgcggggtttcgtggcgttagttttcggcgcgaaggttaagagtttggagggcggcggtgtcgggtcggtggattattatttgttgatgatgtttattaaggcggagtataatgtcgcgttgtaggttaaggttcgcgtcgcgttgcgtttattgttgcgtttcgttaagttcgaggcgtacgaggtgtttaatttttatttcgtgagcgaggaggttagtcgcgaggt

SEQ ID NO: 20820 - DNA, 862 bp, Artificial Sequence
  chemically treated genomic DNA (Homo sapiens) CpG-island No: 20820
acctcgcgactaacctcctcgctcacgaaataaaaattaaacacctcgtacgcctcgaacttaacgaaacgcaacaataaacgcaacgcgacgcgaaccttaacctacaacgcgacattatactccgccttaataaacatcatcaacaaataataatccaccgacccgacaccgccgccctccaaactcttaaccttcgcgccgaaaactaacgccacgaaaccccgcgctaactccaacgcgaacgacgaaaacgcgacgaaaaccccgacgcgaacctccttcaacctcttaataacgctaaaaaaaatctcccgacctaaaccgaaataataaaaaacgcaaacgaccaacgccgcgaccaacaacaaaacgcaataataaaaacgcacaacgcccaaacgcgccataacccgaacgcataaaaacccgcctcgaaaaaaacccatacgctacgaaaccgcgacgccaacgataccaacaacgcgaaaaaaccctcgaatacccgaacgccgacgaccacttaaccccgacgccaaacgacgaccataaaaaaaacgaaaccgcgccgcctaaaaccaatcgcgaacgccgatacgcgaaaaaacgaaaccgaacgtaccgaaaccgctaaatcctaaattccaaaaatattaaaaaaaaaattaaaataaaatccgacgcccgacgttaaaaaaaaaaaattccgaactccaacgtactaaaaactaacccgctatcccgactaaaaaataacgccctacgcgacgaaccccaaaaaatatccaaactaaatattaaaaaaaataaaaacgcccgaacaaaaaaacttaaattaaccaaaaacgaaactaaaaacacc

SEQ ID NO: 20821 - DNA, 822 bp, Artificial Sequence
  chemically treated genomic DNA (Homo sapiens) CpG-island No: 20821
cgagtttttttcgtaattaaggacgtcgggttttaggttagcgttagggatagatttagtattagggcggttttcggagtcggtttttggcggtttcgggttttttgttaaattttttatcggcgttaggatatcgaggggttatttttattacgcggttttaatagatacgttttttatattggttgcggaggttcgtcgggtgtgacggggatcgggcggattggaaaggatgtggttggggtttcggggaggattaggtaggagcgacgggttttttacgtagttttttttcgatcgtgttgtcgtatcgttcgttttagcggttcggtttcgttttgtttaaagggtttattaaagtcggtttatcggcggtttaggaaggaaatgatcgttcgtcgtagtttcgtcgattgttttttagtttagtgttttcgaaattataagggcgggcggggttagaggaggaaaaaaaatatttcgcgggagttttaggtttgggggttgtagtcgcgcgtatttcgtcggtcgggggtcgggcgcgtagacgcggtgtagcggcgtttttaggcggtcgcgcggggtattgtattcggttcgtgtgtcggtttcgggcgggggagggatcgcgtcgcggaggaggggttagtttcgtttaacgttcgacgttcgcggttttttttttttagacggggggtttcgtgttgatcgtagtcgcggagttcgtagcgtatatttcggagtataggataaaatttgtgtttgtatcggagtttttattcggttttcgtaatattgatttttttgggtagtttcgggtat

SEQ ID NO: 20822 - DNA, 822 bp, Artificial Sequence
  chemically treated genomic DNA (Homo sapiens) CpG-island No: 20822
atacccgaaactacccaaaaaaatcaatattacgaaaaccgaataaaaactccgatacaaacacaaattttatcctatactccgaaatatacgctacgaactccgcgactacgatcaacacgaaaccccccgtctaaaaaaaaaaaaccgcgaacgtcgaacgttaaacgaaactaacccctcctccgcgacgcgatccctcccccgcccgaaaccgacacacgaaccgaatacaataccccgcgcgaccgcctaaaaacgccgctacaccgcgtctacgcgcccgacccccgaccgacgaaatacgcgcgactacaacccccaaacctaaaactcccgcgaaatattttttttcctcctctaaccccgcccgcccttataatttcgaaaacactaaactaaaaaacaatcgacgaaactacgacgaacgatcatttccttcctaaaccgccgataaaccgactttaataaaccctttaaacaaaacgaaaccgaaccgctaaaacgaacgatacgacaacacgatcgaaaaaaaactacgtaaaaaacccgtcgctcctacctaatcctccccgaaaccccaaccacatcctttccaatccgcccgatccccgtcacacccgacgaacctccgcaaccaatataaaaaacgtatctattaaaaccgcgtaataaaaataacccctcgatatcctaacgccgataaaaaatttaacaaaaaacccgaaaccgccaaaaaccgactccgaaaaccgccctaatactaaatctatccctaacgctaacctaaaacccgacgtccttaattacgaaaaaaactcg

SEQ ID NO: 20823 - DNA, 822 bp, Artificial Sequence
  chemically treated genomic DNA (Homo sapiens) CpG-island No: 20823
gtgttcgaggttgtttaggggggttagtgttgcgggagtcggatgggggtttcggtgtaggtataggttttgttttgtgtttcgggatgtgcgttgcgggtttcgcggttgcggttagtacggggtttttcgtttggagaggaggggtcgcgggcgtcgggcgttgggcggggttggtttttttttcgcggcgcggtttttttttcgttcggggtcgatatacgggtcgagtgtagtgtttcgcgcggtcgtttgggggcgtcgttgtatcgcgtttgcgcgttcgattttcggtcggcgaggtgcgcgcggttgtagtttttaagtttgaggttttcgcggggtgttttttttttttttttagtttcgttcgtttttgtggtttcgaaagtattgaattgaaaggtagtcggcggggttgcggcgggcggttattttttttttgggtcgtcggtaaatcggttttgatgagttttttggataaggcggggtcgagtcgttgggacgggcgatgcggtagtacggtcggagggaggttgcgtgggaggttcgtcgtttttgtttggtttttttcggggttttagttatattttttttagttcgttcggttttcgttatattcggcgggttttcgtagttagtgtgggaaacgtgtttgttggagtcgcgtggtgggggtggtttttcggtattttggcgtcggtggggaatttggtaaaagattcgaggtcgttagaggtcggtttcgggggtcgttttggtgttgggtttgtttttggcgttggtttggagttcggcgtttttaattgcgggagggattcg

SEQ ID NO: 20824 - DNA, 822 bp, Artificial Sequence
  chemically treated genomic DNA (Homo sapiens) CpG-island No: 20824
cgaatccctcccgcaattaaaaacgccgaactccaaaccaacgccaaaaacaaacccaacaccaaaacgacccccgaaaccgacctctaacgacctcgaatcttttaccaaattccccaccgacgccaaaataccgaaaaaccacccccaccacgcgactccaacaaacacgtttcccacactaactacgaaaacccgccgaatataacgaaaaccgaacgaactaaaaaaaatataactaaaaccccgaaaaaaaccaaacaaaaacgacgaacctcccacgcaacctccctccgaccgtactaccgcatcgcccgtcccaacgactcgaccccgccttatccaaaaaactcatcaaaaccgatttaccgacgacccaaaaaaaaaataaccgcccgccgcaaccccgccgactacctttcaattcaatactttcgaaaccacaaaaacgaacgaaactaaaaaaaaaaaaaaaacaccccgcgaaaacctcaaacttaaaaactacaaccgcgcgcacctcgccgaccgaaaatcgaacgcgcaaacgcgatacaacgacgcccccaaacgaccgcgcgaaacactacactcgacccgtatatcgaccccgaacgaaaaaaaaaccgcgccgcgaaaaaaaaaccaaccccgcccaacgcccgacgcccgcgacccctcctctccaaacgaaaaaccccgtactaaccgcaaccgcgaaacccgcaacgcacatcccgaaacacaaaacaaaacctatacctacaccgaaacccccatccgactcccgcaacactaacccccctaaacaacctcgaacac

SEQ ID NO: 20825 - DNA, 972 bp, Artificial Sequence
  chemically treated genomic DNA (Homo sapiens) CpG-island No: 20825
gcgtacgttaaatttatcggagtagtttaggaatcgtttgttttagcgtttcgggagataggcgcgtatgcgtaatttttttttttcgcggattagattgtgcgtagtcgtattgcggcggcgcgcgttaggtttcgttttcgtttcgttatatttcggtaggcgcgtttttttgcgcgtgttcgtttgttgagaaggcggaaaggaggggcgggggaggaaggttgagggaagagagggtattttcgggcgttagggtgtattgtgggaaggaggcggtagcgtttcgggcgggcgggaggtgtattagcggcggcggcggcggtaaattttttcggtcgtttatagtattgtggagtcgcgtttttagttcggtttcggatcgcggtattttttttggttttcgcggtttttagttcgttcgtttttttttcgcgcgtcggttttgtcgagtcggtcggtcggtttggttttttttttcggtttcgacgggcgggcggattgttttgaggaggcggggaggggagggttgggtcggtcggcgggcgggcgacgatgtcgaatttttgcgttgtttttaattgtacgcggaagagtacgtagttcgatttggttttttttaggttttcgcgggattttgttaggtaagcggcgggcgtagagcgggcggttcgggtttattttcgcggtgagcgttgttagtcgtcggtttttggcgggttttcgggttggttgagaggggcgtaggaggcgggcgtagcgtattgtcgtcgattttagcgttggatcgagatggggagtcggtttcgagtcgtgggcgggcgggcgttcggggatttcggagtacgtgcgttggtgggggttttgcgcggaggatattattttaaacgcgagggagttggggcggcgcgcggacgcgggatgttgtgggttttcgtcgtggtttatttgttgtgtgatttcgggggagtt

SEQ ID NO: 20826 - DNA, 972 bp, Artificial Sequence
  chemically treated genomic DNA (Homo sapiens) CpG-island No: 20826
aactcccccgaaatcacacaacaaataaaccacgacgaaaacccacaacatcccgcgtccgcgcgccgccccaactccctcgcgtttaaaataatatcctccgcgcaaaacccccaccaacgcacgtactccgaaatccccgaacgcccgcccgcccacgactcgaaaccgactccccatctcgatccaacgctaaaatcgacgacaatacgctacgcccgcctcctacgcccctctcaaccaacccgaaaacccgccaaaaaccgacgactaacaacgctcaccgcgaaaataaacccgaaccgcccgctctacgcccgccgcttacctaacaaaatcccgcgaaaacctaaaaaaaaccaaatcgaactacgtactcttccgcgtacaattaaaaacaacgcaaaaattcgacatcgtcgcccgcccgccgaccgacccaaccctcccctccccgcctcctcaaaacaatccgcccgcccgtcgaaaccgaaaaaaaaaaccaaaccgaccgaccgactcgacaaaaccgacgcgcgaaaaaaaaacgaacgaactaaaaaccgcgaaaaccaaaaaaaataccgcgatccgaaaccgaactaaaaacgcgactccacaatactataaacgaccgaaaaaatttaccgccgccgccgccgctaatacacctcccgcccgcccgaaacgctaccgcctccttcccacaatacaccctaacgcccgaaaataccctctcttccctcaaccttcctcccccgcccctcctttccgccttctcaacaaacgaacacgcgcaaaaaaacgcgcctaccgaaatataacgaaacgaaaacgaaacctaacgcgcgccgccgcaatacgactacgcacaatctaatccgcgaaaaaaaaaaattacgcatacgcgcctatctcccgaaacgctaaaacaaacgattcctaaactactccgataaatttaacgtacgc

SEQ ID NO: 20827 - DNA, 972 bp, Artificial Sequence
  chemically treated genomic DNA (Homo sapiens) CpG-island No: 20827
gattttttcgaggttatatagtaagtgagttacggcgagaatttatagtatttcgcgttcgcgcgtcgttttagttttttcgcgtttggggtggtgtttttcgcgtagagtttttattagcgtacgtgtttcgaggttttcggacgttcgttcgtttacggttcggggtcggttttttatttcggtttaacgttggggtcgacggtagtgcgttgcgttcgttttttgcgttttttttagttagttcgggagttcgttaggggtcggcggttggtagcgtttatcgcgaaggtgggttcgggtcgttcgttttgcgttcgtcgtttatttggtagggtttcgcgggaatttgaagaaggttaagtcggattgcgtgttttttcgcgtgtagttgggggtagcgtagaagttcggtatcgtcgttcgttcgtcggtcggtttagttttttttttttcgtttttttagggtagttcgttcgttcgtcggggtcggggaggggagttaggtcggtcggtcggttcggtagggtcgacgcgcgggggaggggcgggcgggttagaagtcgcgagggttaggaggggtgtcgcggttcgaggtcgggttggggacgcggttttatagtgttgtgagcggtcgggaggatttatcgtcgtcgtcgtcgttggtgtatttttcgttcgttcgagacgttgtcgttttttttttataatgtattttgacgttcgggggtgttttttttttttttagtttttttttttcgtttttttttttcgtttttttagtaggcgggtacgcgtaaggaagcgcgtttgtcggggtgtggcgaggcggaggcgggatttggcgcgcgtcgtcgtagtgcgattgcgtatagtttaattcgcggggagagagaattgcgtatgcgcgtttgtttttcgggacgttagagtaggcggtttttgggttgtttcggtaggtttggcgtgcgt

SEQ ID NO: 20828 - DNA, 972 bp, Artificial Sequence
  chemically treated genomic DNA (Homo sapiens) CpG-island No: 20828
acgcacgccaaacctaccgaaacaacccaaaaaccgcctactctaacgtcccgaaaaacaaacgcgcatacgcaattctctctccccgcgaattaaactatacgcaatcgcactacgacgacgcgcgccaaatcccgcctccgcctcgccacaccccgacaaacgcgcttccttacgcgtacccgcctactaaaaaaacgaaaaaaaaaaacgaaaaaaaaaaactaaaaaaaaaaaaaacacccccgaacgtcaaaatacattataaaaaaaaaacgacaacgtctcgaacgaacgaaaaatacaccaacgacgacgacgacgataaatcctcccgaccgctcacaacactataaaaccgcgtccccaacccgacctcgaaccgcgacacccctcctaaccctcgcgacttctaacccgcccgcccctcccccgcgcgtcgaccctaccgaaccgaccgaccgacctaactcccctccccgaccccgacgaacgaacgaactaccctaaaaaaacgaaaaaaaaaaaactaaaccgaccgacgaacgaacgacgataccgaacttctacgctacccccaactacacgcgaaaaaacacgcaatccgacttaaccttcttcaaattcccgcgaaaccctaccaaataaacgacgaacgcaaaacgaacgacccgaacccaccttcgcgataaacgctaccaaccgccgacccctaacgaactcccgaactaactaaaaaaaacgcaaaaaacgaacgcaacgcactaccgtcgaccccaacgttaaaccgaaataaaaaaccgaccccgaaccgtaaacgaacgaacgtccgaaaacctcgaaacacgtacgctaataaaaactctacgcgaaaaacaccaccccaaacgcgaaaaaactaaaacgacgcgcgaacgcgaaatactataaattctcgccgtaactcacttactatataacctcgaaaaaatc

SEQ ID NO: 20829 - DNA, 577 bp, Artificial Sequence
  chemically treated genomic DNA (Homo sapiens) CpG-island No: 20829
aagattttcgtgttttagttttttttgttttttatttttttcgtttatggttttcgtttttttaagtcgtttttcggaattttttgtcgggtcggcgggaagcgtggacggagcgggttttggtcgcgtttttttcggttaggtttggtttagttcgcgtagcgttcgcgtagttcgttagggggatttcggttcgtcgggcggtatttgaggagaaagcgttcgaggggcgtggagttagggttttgcggtgtttgtttcgggaatattgcgagtcggttggagttttttagtcgtttcggagaattgggggagtcgggtttttggttcggtaatcggtggtttcgcggtagttagaggcgggttttacgggtgggtgtgttcgttttcgtacgttagttttttagttcgggaagagcgtttgtaagcgggtattttgtttttaaagatgggttttgtttgcgggtgatttgggttttcgaagtgtaattttgtggtcgggacgcggatcggtcggtttgggtttttgtagagtagattttgtttgcgttttttaggaggagtgggtggtaggatt

SEQ ID NO: 20830 - DNA, 577 bp, Artificial Sequence
  chemically treated genomic DNA (Homo sapiens) CpG-island No: 20830
aatcctaccacccactcctcctaaaaaacgcaaacaaaatctactctacaaaaacccaaaccgaccgatccgcgtcccgaccacaaaattacacttcgaaaacccaaatcacccgcaaacaaaacccatctttaaaaacaaaatacccgcttacaaacgctcttcccgaactaaaaaactaacgtacgaaaacgaacacacccacccgtaaaacccgcctctaactaccgcgaaaccaccgattaccgaaccaaaaacccgactcccccaattctccgaaacgactaaaaaactccaaccgactcgcaatattcccgaaacaaacaccgcaaaaccctaactccacgcccctcgaacgctttctcctcaaataccgcccgacgaaccgaaatccccctaacgaactacgcgaacgctacgcgaactaaaccaaacctaaccgaaaaaaacgcgaccaaaacccgctccgtccacgcttcccgccgacccgacaaaaaattccgaaaaacgacttaaaaaaacgaaaaccataaacgaaaaaaataaaaaacaaaaaaaactaaaacacgaaaatctt

SEQ ID NO: 20831 - DNA, 577 bp, Artificial Sequence
  chemically treated genomic DNA (Homo sapiens) CpG-island No: 20831
agttttgttatttattttttttggaggacgtagataggatttgttttgtaggagtttaggtcggtcgattcgcgtttcggttataaagttgtatttcgagagtttaaattattcgtagataaaatttatttttgggaataaagtattcgtttgtaggcgtttttttcgggttggaaggttggcgtgcggaaacggatatatttattcgtggggttcgtttttagttatcgcgggattatcggttatcgagttagggattcggtttttttagtttttcggagcggttggggagttttagtcgattcgtagtattttcggagtaggtatcgtaggattttggttttacgtttttcggacgttttttttttagatgtcgttcggcgggtcggggtttttttggcgggttgcgcgggcgttgcgcgagttaaattaaatttggtcggaaaagacgcggttaaggttcgtttcgtttacgtttttcgtcggttcggtaaggggtttcggagaacggtttgggggggcgagaattatgggcgggggaaatggaagatagagggaattgaagtacgggggtttt

SEQ ID NO: 20832 - DNA, 577 bp, Artificial Sequence
  chemically treated genomic DNA (Homo sapiens) CpG-island No: 20832
aaaacccccgtacttcaattccctctatcttccatttcccccgcccataattctcgcccccccaaaccgttctccgaaaccccttaccgaaccgacgaaaaacgtaaacgaaacgaaccttaaccgcgtcttttccgaccaaatttaatttaactcgcgcaacgcccgcgcaacccgccaaaaaaaccccgacccgccgaacgacatctaaaaaaaaaacgtccgaaaaacgtaaaaccaaaatcctacgatacctactccgaaaatactacgaatcgactaaaactccccaaccgctccgaaaaactaaaaaaaccgaatccctaactcgataaccgataatcccgcgataactaaaaacgaaccccacgaataaatatatccgtttccgcacgccaaccttccaacccgaaaaaaacgcctacaaacgaatactttattcccaaaaataaattttatctacgaataatttaaactctcgaaatacaactttataaccgaaacgcgaatcgaccgacctaaactcctacaaaacaaatcctatctacgtcctccaaaaaaaataaataacaaaact

SEQ ID NO: 20833 - DNA, 609 bp, Artificial Sequence
  chemically treated genomic DNA (Homo sapiens) CpG-island No: 20833
cggggtcgtaggcgcgtagttacgtttttggaagttcgtttcggttttcgtttttaattcgttttttcggggttttatggcgtgaggtttggggttgggatttatttggagtcgagtagaaaattttttttttttcgttttcggttttttttgttttttttggacgcggtggcggcgtcgtttgagcggcgatttttttttttttgttcggtttgttgcgttcggtgtttttcgagggtaggcgcgtttggattttgcgttcggatggcggcggttttttgtgagtatcggtagcggcgtattttttgtttcgaggttttcggtgttttttcggcgcgggtataggggcgtttttatttttcgttcgtttgtattttttgttattcgttttttcgtttgatttattcgttcgcggtggtcgttcgagttttgggatggggagggagatcgcggttgttcgcggcggtcgagattttcgttgacgttttcgattttgtcgtttttttcgttcgtttttagaggcgttcgacgtttcgatagtttttggagtgagattaggattgagaatagggagaggcgattcgatttttagggttcggtgtttaggat

SEQ ID NO: 20834 - DNA, 609 bp, Artificial Sequence
  chemically treated genomic DNA (Homo sapiens) CpG-island No: 20834
atcctaaacaccgaaccctaaaaatcgaatcgcctctccctattctcaatcctaatctcactccaaaaactatcgaaacgtcgaacgcctctaaaaacgaacgaaaaaaacgacaaaatcgaaaacgtcaacgaaaatctcgaccgccgcgaacaaccgcgatctccctccccatcccaaaactcgaacgaccaccgcgaacgaataaatcaaacgaaaaaacgaataacaaaaaatacaaacgaacgaaaaataaaaacgcccctatacccgcgccgaaaaaacaccgaaaacctcgaaacaaaaaatacgccgctaccgatactcacaaaaaaccgccgccatccgaacgcaaaatccaaacgcgcctaccctcgaaaaacaccgaacgcaacaaaccgaacaaaaaaaaaaaaatcgccgctcaaacgacgccgccaccgcgtccaaaaaaaacaaaaaaaaccgaaaacgaaaaaaaaaaaattttctactcgactccaaataaatcccaaccccaaacctcacgccataaaaccccgaaaaaacgaattaaaaacgaaaaccgaaacgaacttccaaaaacgtaactacgcgcctacgaccccg

SEQ ID NO: 20835 - DNA, 609 bp, Artificial Sequence
  chemically treated genomic DNA (Homo sapiens) CpG-island No: 20835
gttttgagtatcgggttttgggggtcgggtcgtttttttttgtttttagttttggttttattttaggagttgtcgggacgtcgggcgtttttggaggcggacgaagaaggcggtagggtcgggggcgttagcgggaatttcggtcgtcgcgggtagtcgcggtttttttttttattttagggttcgggcggttatcgcgggcggatgagttaggcgagggggcgggtggtaaggggtgtaagcggacggagggtgggggcgtttttatgttcgcgtcgggggggtatcggaggtttcggggtaggggatgcgtcgttgtcggtgtttatagagggtcgtcgttattcgggcgtagagtttaggcgcgtttgttttcggagggtatcgggcgtagtaagtcgggtaggggagagggagtcgtcgtttaggcggcgtcgttatcgcgtttaagaaagataaaagggatcgggaacgggaggggaaaagttttttgttcggttttagatggattttagttttaaattttacgttataaagtttcgaagaggcgggttgggggcgggggtcggggcggatttttaggggcgtggttgcgcgtttgcgatttcg

SEQ ID NO: 20836 - DNA, 609 bp, Artificial Sequence
  chemically treated genomic DNA (Homo sapiens) CpG-island No: 20836
cgaaatcgcaaacgcgcaaccacgcccctaaaaatccgccccgacccccgcccccaacccgcctcttcgaaactttataacgtaaaatttaaaactaaaatccatctaaaaccgaacaaaaaacttttcccctcccgttcccgatcccttttatctttcttaaacgcgataacgacgccgcctaaacgacgactccctctcccctacccgacttactacgcccgataccctccgaaaacaaacgcgcctaaactctacgcccgaataacgacgaccctctataaacaccgacaacgacgcatcccctaccccgaaacctccgatacccccccgacgcgaacataaaaacgcccccaccctccgtccgcttacaccccttaccacccgccccctcgcctaactcatccgcccgcgataaccgcccgaaccctaaaataaaaaaaaaaaccgcgactacccgcgacgaccgaaattcccgctaacgcccccgaccctaccgccttcttcgtccgcctccaaaaacgcccgacgtcccgacaactcctaaaataaaaccaaaactaaaaacaaaaaaaaacgacccgacccccaaaacccgatactcaaaac

SEQ ID NO: 20837 - DNA, 632 bp, Artificial Sequence
  chemically treated genomic DNA (Homo sapiens) CpG-island No: 20837
gaaaagtcggtgttcgtttacgtagttttggcgcgtacgggttcggcgttcgtatttttgcgttacgcgggttcggggtgattagtaagtatttcgaaaagggacggggttggggagattatttaggagggttcgcggggtggcgtaggggttttcgggcgagttgatttttcggaatgtttggttgatggcgagaggtggatattagagattgggttcgttttgtaaaaagaaaaatgggtcgacggggcgtaggggatattaagagagttattcgttaaagtatttgtttttcgggttttcgttgatttttttttatcgttttcgtggggtgaggatacgcgtttttcgagcgtttgttttgagttggttttacgttcgtttcggagggaggtgagcgcggcgtcggcggggtcggtaggttggtgcgtcgcgttcgttttcgttgttttcgggtttttttttgtcgcggttgttagggggtttatagaggcgtttttttcgttgtcgcggcgttttttcggtcggtcgtttgggggcggtgtgcgtatttttattaaggggttcggggaggatagttgttttttattcgaattttaaggaaatttattcgtatttagtttttataagtt

SEQ ID NO: 20838 - DNA, 632 bp, Artificial Sequence
  chemically treated genomic DNA (Homo sapiens) CpG-island No: 20838
aacttataaaaactaaatacgaataaatttccttaaaattcgaataaaaaacaactatcctccccgaaccccttaataaaaatacgcacaccgcccccaaacgaccgaccgaaaaaacgccgcgacaacgaaaaaaacgcctctataaaccccctaacaaccgcgacaaaaaaaaacccgaaaacaacgaaaacgaacgcgacgcaccaacctaccgaccccgccgacgccgcgctcacctccctccgaaacgaacgtaaaaccaactcaaaacaaacgctcgaaaaacgcgtatcctcaccccacgaaaacgataaaaaaaaatcaacgaaaacccgaaaaacaaatactttaacgaataactctcttaatatcccctacgccccgtcgacccatttttctttttacaaaacgaacccaatctctaatatccacctctcgccatcaaccaaacattccgaaaaatcaactcgcccgaaaacccctacgccaccccgcgaaccctcctaaataatctccccaaccccgtcccttttcgaaatacttactaatcaccccgaacccgcgtaacgcaaaaatacgaacgccgaacccgtacgcgccaaaactacgtaaacgaacaccgacttttc

SEQ ID NO: 20839 - DNA, 632 bp, Artificial Sequence
  chemically treated genomic DNA (Homo sapiens) CpG-island No: 20839
ggtttgtggaaattggatacgagtaagtttttttaaaattcgagtagaaagtagttgtttttttcgggttttttgatgagaatacgtatatcgtttttaagcggtcggtcgagggagcgtcgcggtagcgggagaggcgtttttgtgggttttttggtagtcgcggtaggaaagggttcgaaggtagcgaaggcgaacgcggcgtattaatttgtcggtttcgtcgacgtcgcgtttattttttttcggggcgggcgtggggttagtttaggataggcgttcgggggacgcgtgtttttattttacggggacggtggaggagagttagcgagggttcgaggggtaggtattttaacgaatggtttttttggtgttttttgcgtttcgtcggtttatttttttttttataaaacgggtttagtttttagtatttatttttcgttattaattaggtatttcgggagattagttcgttcgaaagtttttgcgttatttcgcgggtttttttaggtggtttttttagtttcgttttttttcgggatgtttgttgattatttcgagttcgcgtggcgtaagagtacgagcgtcgagttcgtgcgcgttaaggttgcgtgggcgggtatcgatttttt

SEQ ID NO: 20840 - DNA, 632 bp, Artificial Sequence
  chemically treated genomic DNA (Homo sapiens) CpG-island No: 20840
aaaaaatcgatacccgcccacgcaaccttaacgcgcacgaactcgacgctcgtactcttacgccacgcgaactcgaaataatcaacaaacatcccgaaaaaaaacgaaactaaaaaaaccacctaaaaaaacccgcgaaataacgcaaaaactttcgaacgaactaatctcccgaaatacctaattaataacgaaaaataaatactaaaaactaaacccgttttataaaaaaaaaaataaaccgacgaaacgcaaaaaacaccaaaaaaaccattcgttaaaatacctacccctcgaaccctcgctaactctcctccaccgtccccgtaaaataaaaacacgcgtcccccgaacgcctatcctaaactaaccccacgcccgccccgaaaaaaaataaacgcgacgtcgacgaaaccgacaaattaatacgccgcgttcgccttcgctaccttcgaaccctttcctaccgcgactaccaaaaaacccacaaaaacgcctctcccgctaccgcgacgctccctcgaccgaccgcttaaaaacgatatacgtattctcatcaaaaaacccgaaaaaaacaactactttctactcgaattttaaaaaaacttactcgtatccaatttccacaaacc

SEQ ID NO: 20841 - DNA, 1390 bp, Artificial Sequence
  chemically treated genomic DNA (Homo sapiens) CpG-island No: 20841
cgtttgtacggagttatagaatatagcgttatcgttcgttcgagtttaggtattttttttttttttcggggtttgcgtcgtttgtacgttttttcgtagattttcgcggaaacgtgtatagtagggttttgaatagaatttaggttgttttgagtcgaatttttttcggttcggggttgatcgtgtttatttaagtcgtcgtttcgtttttcgtattttcgacgcggggttatttttttttatttttttttttatttaggcgtttttttcgatagcggagggatagttaaaaatttataattcggcggcgggattttgtcggttttagttgggcgatttgggcgtattcgtcggcgacgtagtttcgggttttagcgtatagaattcggtcgttcgtagtttttttcgttagttacgttttttgggttttttattggttaagtcgttcgcgttttcgcgtgattttattggtttgcgtcgggggtttagataaagggagtagtcgcggagggcggtgattgggcggggttgggggcgggtcgggcgggcgcgcgggtcgggcgggagtcgcgcgttggagaggcggggagtacggcgttgggggaggggcgcggtgtttcgggttcgggatcgggaggcgcgggtgtgcggcgaggttcgggtgttttttttcgtgggggcggggcggcgggggcggggcggttttacgtgggtggggttgggcgtttcggagggcggcggtcgcggggcgcggggcgttgggatttcgttcgttttttcgttttgtatttttttcgtttcggggtttttgttcggacggcggtcgtcgtcgtttcgtttttttcgagggtttcgcgttcgttttcgtagttcggtcgggaatttgggaattcggacgtagaaggacgcgttcgagttaggattcgtcgcggggtttttttggtgggtcgtggtcggggagaggacgcgggttttggcggtcgaagacggacgtagcgttcggaaaggcgagttaggttttcggtttttggcgttttttgtgagttggttcggcggggtgcgtcgtcggggagggagggattggtcgtggggcgagtagtcgggcggggagtggtttttgggggttttcgttagcggagggttcgcgaggtcgttttcggagcgtcgttaggtacgtgcgttttttttgtttttcgcgtttttagagcgtattttcggtagggaacgaataaaatttcggttggtgtgtaagagtttttcgttgtaaacgtgtttttttgcgggattcggggagtcgtcgaacgcggggtagatttcggtttaaagtgtttttgtagtttttattagggatttttttttatttttattttgggttcggagcgggtgttag

SEQ ID NO: 20842 - DNA, 1390 bp, Artificial Sequence
  chemically treated genomic DNA (Homo sapiens) CpG-island No: 20842
ctaacacccgctccgaacccaaaataaaaataaaaaaaaatccctaataaaaactacaaaaacactttaaaccgaaatctaccccgcgttcgacgactccccgaatcccgcaaaaaaacacgtttacaacgaaaaactcttacacaccaaccgaaattttattcgttccctaccgaaaatacgctctaaaaacgcgaaaaacaaaaaaaacgcacgtacctaacgacgctccgaaaacgacctcgcgaaccctccgctaacgaaaacccccaaaaaccactccccgcccgactactcgccccacgaccaatccctccctccccgacgacgcaccccgccgaaccaactcacaaaaaacgccaaaaaccgaaaacctaactcgcctttccgaacgctacgtccgtcttcgaccgccaaaacccgcgtcctctccccgaccacgacccaccaaaaaaaccccgcgacgaatcctaactcgaacgcgtccttctacgtccgaattcccaaattcccgaccgaactacgaaaacgaacgcgaaaccctcgaaaaaaacgaaacgacgacgaccgccgtccgaacaaaaaccccgaaacgaaaaaaatacaaaacgaaaaaacgaacgaaatcccaacgccccgcgccccgcgaccgccgccctccgaaacgcccaaccccacccacgtaaaaccgccccgcccccgccgccccgcccccacgaaaaaaaacacccgaacctcgccgcacacccgcgcctcccgatcccgaacccgaaacaccgcgcccctcccccaacgccgtactccccgcctctccaacgcgcgactcccgcccgacccgcgcgcccgcccgacccgcccccaaccccgcccaatcaccgccctccgcgactactccctttatctaaacccccgacgcaaaccaataaaatcacgcgaaaacgcgaacgacttaaccaataaaaaacccaaaaaacgtaactaacgaaaaaaactacgaacgaccgaattctatacgctaaaacccgaaactacgtcgccgacgaatacgcccaaatcgcccaactaaaaccgacaaaatcccgccgccgaattataaatttttaactatccctccgctatcgaaaaaaacgcctaaataaaaaaaaaaataaaaaaaaataaccccgcgtcgaaaatacgaaaaacgaaacgacgacttaaataaacacgatcaaccccgaaccgaaaaaaattcgactcaaaacaacctaaattctattcaaaaccctactatacacgtttccgcgaaaatctacgaaaaaacgtacaaacgacgcaaaccccgaaaaaaaaaaaaaatacctaaactcgaacgaacgataacgctatattctataactccgtacaaacg

SEQ ID NO: 20843 - DNA, 1390 bp, Artificial Sequence
  chemically treated genomic DNA (Homo sapiens) CpG-island No: 20843
ttggtattcgtttcgagtttaaggtgagggtggagaagggtttttggtggaagttgtaggaatattttgggtcggggtttatttcgcgttcggcggtttttcgaatttcgtagaaagatacgtttgtagcgaaaggtttttatatattagtcgggattttattcgttttttatcgagagtgcgttttgggagcgcgggaaataaggaaaacgtacgtatttggcggcgtttcgagggcggtttcgcgggtttttcgttggcgaaggtttttagaagttatttttcgttcggttgttcgttttacggttagttttttttttttcggcgacgtatttcgtcgagttagtttataggaagcgttaggagtcggagatttggttcgttttttcgggcgttgcgttcgttttcgatcgttagggttcgcgtttttttttcggttacggtttattagagggatttcgcggcgggttttggttcgggcgcgtttttttgcgttcgagtttttaggttttcggtcgagttgcggagacggacgcggagttttcggggaagacgaggcggcggcggtcgtcgttcgggtaggagtttcggggcgggaggggtgtagggcggaggagcgggcgggattttagcgtttcgcgtttcgcggtcgtcgtttttcggggcgtttagttttatttacgtggaatcgtttcgttttcgtcgtttcgtttttacgagggaaggtattcgagtttcgtcgtatattcgcgtttttcggtttcgggttcgaaatatcgcgttttttttttagcgtcgtgtttttcgtttttttagcgcgcggttttcgttcgattcgcgcgttcgttcgattcgtttttaatttcgtttaattatcgtttttcgcggttgttttttttgtttgagttttcggcgtaggttaatggaattacgcggaggcgcgggcggtttggttaatggaaggtttagggggcgtggttggcgggaggggttgcgggcggtcgggttttatgcgttgagattcgagattgcgtcgtcggcgggtgcgtttaggtcgtttagttagagtcggtaggatttcgtcgtcgggttgtgggtttttgattattttttcgttgtcgggagaagcgtttgagtggggagggaggtgggaggaggtggtttcgcgtcgggggtgcggggagcgggacggcggtttggatggatacggttagtttcgggtcggagagggttcggtttagagtagtttgggttttgtttagagttttattgtgtacgttttcgcgaggatttgcggagagacgtgtaggcgacgtaggtttcgggaaggaaggagggtatttgggttcggacgagcgataacgttgtgttttgtgatttcgtataaacg

SEQ ID NO: 20844 - DNA, 1390 bp, Artificial Sequence
  chemically treated genomic DNA (Homo sapiens) CpG-island No: 20844
cgtttatacgaaatcacaaaacacaacgttatcgctcgtccgaacccaaataccctccttccttcccgaaacctacgtcgcctacacgtctctccgcaaatcctcgcgaaaacgtacacaataaaactctaaacaaaacccaaactactctaaaccgaaccctctccgacccgaaactaaccgtatccatccaaaccgccgtcccgctccccgcacccccgacgcgaaaccacctcctcccacctccctccccactcaaacgcttctcccgacaacgaaaaaataatcaaaaacccacaacccgacgacgaaatcctaccgactctaactaaacgacctaaacgcacccgccgacgacgcaatctcgaatctcaacgcataaaacccgaccgcccgcaacccctcccgccaaccacgccccctaaaccttccattaaccaaaccgcccgcgcctccgcgtaattccattaacctacgccgaaaactcaaacaaaaaaaacaaccgcgaaaaacgataattaaacgaaattaaaaacgaatcgaacgaacgcgcgaatcgaacgaaaaccgcgcgctaaaaaaacgaaaaacacgacgctaaaaaaaaaacgcgatatttcgaacccgaaaccgaaaaacgcgaatatacgacgaaactcgaataccttccctcgtaaaaacgaaacgacgaaaacgaaacgattccacgtaaataaaactaaacgccccgaaaaacgacgaccgcgaaacgcgaaacgctaaaatcccgcccgctcctccgccctacacccctcccgccccgaaactcctacccgaacgacgaccgccgccgcctcgtcttccccgaaaactccgcgtccgtctccgcaactcgaccgaaaacctaaaaactcgaacgcaaaaaaacgcgcccgaaccaaaacccgccgcgaaatccctctaataaaccgtaaccgaaaaaaaaacgcgaaccctaacgatcgaaaacgaacgcaacgcccgaaaaaacgaaccaaatctccgactcctaacgcttcctataaactaactcgacgaaatacgtcgccgaaaaaaaaaaaactaaccgtaaaacgaacaaccgaacgaaaaataacttctaaaaaccttcgccaacgaaaaacccgcgaaaccgccctcgaaacgccgccaaatacgtacgttttccttatttcccgcgctcccaaaacgcactctcgataaaaaacgaataaaatcccgactaatatataaaaacctttcgctacaaacgtatctttctacgaaattcgaaaaaccgccgaacgcgaaataaaccccgacccaaaatattcctacaacttccaccaaaaacccttctccaccctcaccttaaactcgaaacgaataccaa

SEQ ID NO: 20845 - DNA, 1141 bp, Artificial Sequence
  chemically treated genomic DNA (Homo sapiens) CpG-island No: 20845
tggtttcgcggttttaaagcggtttaaggtcgtttgatgaaaggagataagttggggatcgtttttaggattttcgcgggtcgatcggggtagttcgggagtcgaggtgcggcggagagttcgcggattaaaggaatttggagagaaaggggaagcgggcggtcggtttcggtcggttttttttttcgtaggttacgtcgatttggggtggggggttgcgggtcgcgggcggggatttcgggatttttcgtttgtttgagtcggggtttacgtcggcgttcgtttcgggcggttcggttcggaggggagtttcggagagttcggggttcgtaggtaagtatcggcgtttcgcgggtcgggtcggggacgtaggataaggcgcggggtttatttcggttggttcgggagtggcggtcgcgcgggttcggttttcgttttcggcgtttttcggtttcggcggtcgggatttttcgcggtcgagtttttggttaggttttaggtcggcgttttcggaagcgacgtttggcgggtcgcggggtacgagggggagagtcgggaagcgtaaattttcgaagcgcgcggagattcgattagcgcgcggttatttattaggttgggggcgattgaattaggtttttgggcgcggtcgtcggttgggggtgtgtggcgtcgattttcgggtttttgtcgtggtttcgggaggttggagtagcgagtagcggttttagcgagtgtgtcgggaaagcgggtgttttcgggtttcggtttcgcgggtataggcggaggttgttcgtttttcgcgtatatcgaggacggtcggttcggtttcggagaaatggcgtttgagaaaggaggggaggggaaggttttcggattttgggtagggattcgtcgtcggggattcgcggagtttttcggggatggaggaggcgcgagttggaagcggcgcgcgagttcgagcgcggggttaatatcgtggggtttagttttttttggttcgggtaagtggacgcgtttcgaggtttcgggtttacgtagggcgtttttcgtagacggcgtattttttatttttttaaggaatcgagtttttattattgttttcgatgagtttgttttcggattaggaattttttttaagtta

SEQ ID NO: 20846 - DNA, 1141 bp, Artificial Sequence
  chemically treated genomic DNA (Homo sapiens) CpG-island No: 20846
taacttaaaaaaaattcctaatccgaaaacaaactcatcgaaaacaataataaaaactcgattccttaaaaaaataaaaaatacgccgtctacgaaaaacgccctacgtaaacccgaaacctcgaaacgcgtccacttacccgaaccaaaaaaaactaaaccccacgatattaaccccgcgctcgaactcgcgcgccgcttccaactcgcgcctcctccatccccgaaaaactccgcgaatccccgacgacgaatccctacccaaaatccgaaaaccttcccctcccctcctttctcaaacgccatttctccgaaaccgaaccgaccgtcctcgatatacgcgaaaaacgaacaacctccgcctatacccgcgaaaccgaaacccgaaaacacccgctttcccgacacactcgctaaaaccgctactcgctactccaacctcccgaaaccacgacaaaaacccgaaaatcgacgccacacacccccaaccgacgaccgcgcccaaaaacctaattcaatcgcccccaacctaataaataaccgcgcgctaatcgaatctccgcgcgcttcgaaaatttacgcttcccgactctccccctcgtaccccgcgacccgccaaacgtcgcttccgaaaacgccgacctaaaacctaaccaaaaactcgaccgcgaaaaatcccgaccgccgaaaccgaaaaacgccgaaaacgaaaaccgaacccgcgcgaccgccactcccgaaccaaccgaaataaaccccgcgccttatcctacgtccccgacccgacccgcgaaacgccgatacttacctacgaaccccgaactctccgaaactcccctccgaaccgaaccgcccgaaacgaacgccgacgtaaaccccgactcaaacaaacgaaaaatcccgaaatccccgcccgcgacccgcaaccccccaccccaaatcgacgtaacctacgaaaaaaaaaaccgaccgaaaccgaccgcccgcttcccctttctctccaaattcctttaatccgcgaactctccgccgcacctcgactcccgaactaccccgatcgacccgcgaaaatcctaaaaacgatccccaacttatctcctttcatcaaacgaccttaaaccgctttaaaaccgcgaaacca

SEQ ID NO: 20847 - DNA, 1141 bp, Artificial Sequence
  chemically treated genomic DNA (Homo sapiens) CpG-island No: 20847
taatttgaaaaaggtttttgattcggaaataggtttatcggaggtagtgatgggaattcggttttttaggagagtaggaaatgcgtcgtttgcgaggggcgttttgcgtggattcggggtttcggggcgcgtttatttattcgagttaggagagattgggttttacggtgttagtttcgcgttcgggttcgcgcgtcgtttttagttcgcgttttttttattttcggagggtttcgcgggttttcggcgacgggtttttgtttagggttcgggaattttttttttttttttttttttaagcgttattttttcggagtcgggtcggtcgttttcggtgtacgcgggaagcgggtagttttcgtttgtattcgcggggtcgggattcggaggtattcgttttttcgatatattcgttggggtcgttgttcgttgttttagtttttcgaggttacggtaagagttcgggggtcggcgttatatatttttagtcggcgatcgcgtttagggatttaatttaatcgtttttagtttaatgaatagtcgcgcgttaatcggattttcgcgcgtttcggggatttacgtttttcggttttttttttcgtgtttcgcggttcgttagacgtcgttttcgaaggcgtcggtttggggtttggttaggggttcggtcgcggggggtttcggtcgtcggagtcgggagacgtcggagacgggagtcgggttcgcgcgatcgttattttcgagttagtcggggtgggtttcgcgttttgttttgcgttttcggttcggttcgcggagcgtcggtgtttatttgcgagtttcgggtttttcggagttttttttcgggtcgagtcgttcgaagcgggcgtcggcgtaggtttcgatttaggtaggcgggaaatttcggagttttcgttcgcggttcgtagttttttattttaggtcggcgtggtttgcgggggggaaggtcggtcggggtcggtcgttcgttttttttttttttttagatttttttgattcgcgggtttttcgtcgtatttcggttttcgggttgtttcggtcggttcgcggggattttggaaacggtttttagtttatttttttttattaagcggttttgggtcgttttgaaatcgcggagtta

SEQ ID NO: 20848 - DNA, 1141 bp, Artificial Sequence
  chemically treated genomic DNA (Homo sapiens) CpG-island No: 20848
taactccgcgatttcaaaacgacccaaaaccgcttaataaaaaaaaataaactaaaaaccgtttccaaaatccccgcgaaccgaccgaaacaacccgaaaaccgaaatacgacgaaaaacccgcgaatcaaaaaaatctaaaaaaaaaaaaaaaacgaacgaccgaccccgaccgaccttcccccccgcaaaccacgccgacctaaaataaaaaactacgaaccgcgaacgaaaactccgaaatttcccgcctacctaaatcgaaacctacgccgacgcccgcttcgaacgactcgacccgaaaaaaaactccgaaaaacccgaaactcgcaaataaacaccgacgctccgcgaaccgaaccgaaaacgcaaaacaaaacgcgaaacccaccccgactaactcgaaaataacgatcgcgcgaacccgactcccgtctccgacgtctcccgactccgacgaccgaaaccccccgcgaccgaacccctaaccaaaccccaaaccgacgccttcgaaaacgacgtctaacgaaccgcgaaacacgaaaaaaaaaaccgaaaaacgtaaatccccgaaacgcgcgaaaatccgattaacgcgcgactattcattaaactaaaaacgattaaattaaatccctaaacgcgatcgccgactaaaaatatataacgccgacccccgaactcttaccgtaacctcgaaaaactaaaacaacgaacaacgaccccaacgaatatatcgaaaaaacgaatacctccgaatcccgaccccgcgaatacaaacgaaaactacccgcttcccgcgtacaccgaaaacgaccgacccgactccgaaaaaataacgcttaaaaaaaaaaaaaaaaaaaaaattcccgaaccctaaacaaaaacccgtcgccgaaaacccgcgaaaccctccgaaaataaaaaaaacgcgaactaaaaacgacgcgcgaacccgaacgcgaaactaacaccgtaaaacccaatctctcctaactcgaataaataaacgcgccccgaaaccccgaatccacgcaaaacgcccctcgcaaacgacgcatttcctactctcctaaaaaaccgaattcccatcactacctccgataaacctatttccgaatcaaaaacctttttcaaatta

SEQ ID NO: 20849 - DNA, 910 bp, Artificial Sequence
  chemically treated genomic DNA (Homo sapiens) CpG-island No: 20849
ttcgcgaggtcgcggcgtattttggtttttttttttcgttataatagtcgttttgttttcgtagaaagcgtttcgttgttttagtttcggaacgttttagggaggtgaatgtagaatgtagaaaagaggttttcgtggaatttagatttgtaggagggggcgggggagggtggcgaggcgcggaaaggttttaattttagtcggtttcggggttgttttttcgagattttcgggggagggtggttagggaagggtttttttaagtcgcggcgacgtagtttggggggttggcgggacgcgcggtttcgtttagcgtttaggtagttatcgcggtcggggtcgggaaatgaaattaaagtttttttgttttcgggagcggaggggtgggcgttttgtttcgttttcgaacgttttcgtttcgcgttcgtttcggtcgagtattgatttgtgtgcgaagttatgggtaacggcgacgggaagtattttttcggttggaagtgtgcggggggttgcgcggcgggtttagtcggggcgagacgcgcggcggtagcggcgttgcggtggtttaggttttcgcgtttcgatagtagatgcggcggcggcgtaaagtcgcggttatttatgtcgggtttcggtttcggttcgtcgtcgttttttcggagtagcgcggtcggggttcgggggcggttcggcgcgcgggcggcgtagaggcggcggcgttcggggttataggcggtggtggcggcggggtcggttagtacgcgggaggattgggtttttcggcgggcggtcgcgtatcgagttagcggtcgttgtgcgggtttatggtttgtggaggtaaaagtagaggagatacgggtgattggggggttcggttcgttcgggggttttcgtttcgttcgtttattta

SEQ ID NO: 20850 - DNA, 910 bp, Artificial Sequence
  chemically treated genomic DNA (Homo sapiens) CpG-island No: 20850
taaataaacgaacgaaacgaaaacccccgaacgaaccgaaccccccaatcacccgtatctcctctacttttacctccacaaaccataaacccgcacaacgaccgctaactcgatacgcgaccgcccgccgaaaaacccaatcctcccgcgtactaaccgaccccgccgccaccaccgcctataaccccgaacgccgccgcctctacgccgcccgcgcgccgaaccgcccccgaaccccgaccgcgctactccgaaaaaacgacgacgaaccgaaaccgaaacccgacataaataaccgcgactttacgccgccgccgcatctactatcgaaacgcgaaaacctaaaccaccgcaacgccgctaccgccgcgcgtctcgccccgactaaacccgccgcgcaaccccccgcacacttccaaccgaaaaaatacttcccgtcgccgttacccataacttcgcacacaaatcaatactcgaccgaaacgaacgcgaaacgaaaacgttcgaaaacgaaacaaaacgcccacccctccgctcccgaaaacaaaaaaactttaatttcatttcccgaccccgaccgcgataactacctaaacgctaaacgaaaccgcgcgtcccgccaaccccccaaactacgtcgccgcgacttaaaaaaacccttccctaaccaccctcccccgaaaatctcgaaaaaacaaccccgaaaccgactaaaattaaaacctttccgcgcctcgccaccctcccccgccccctcctacaaatctaaattccacgaaaacctcttttctacattctacattcacctccctaaaacgttccgaaactaaaacaacgaaacgctttctacgaaaacaaaacgactattataacgaaaaaaaaaaaccaaaatacgccgcgacctcgcgaa

SEQ ID NO: 20851 - DNA, 910 bp, Artificial Sequence
  chemically treated genomic DNA (Homo sapiens) CpG-island No: 20851
tgggtgagcgggcggggcggggattttcgggcgagtcgagttttttagttattcgtgttttttttgtttttgtttttatagattatggattcgtatagcggtcgttggttcggtgcgcggtcgttcgtcgagaagtttagttttttcgcgtgttgatcggtttcgtcgttattatcgtttgtgatttcggacgtcgtcgtttttgcgtcgttcgcgcgtcgagtcgttttcgggtttcggtcgcgttgtttcgaggaagcggcggcggatcggggtcggggttcggtatggatggtcgcgattttgcgtcgtcgtcgtatttgttgtcggagcgcgggagtttgggttatcgtagcgtcgttgtcgtcgcgcgtttcgtttcggttgggttcgtcgcgtagtttttcgtatatttttagtcgggaaagtatttttcgtcgtcgttgtttatggtttcgtatataggttagtgttcggtcggggcgggcgcgggacgggagcgttcgagagcggaatagggcgtttattttttcgttttcgggagtagagaagttttggttttatttttcggtttcggtcgcggtggttgtttgggcgttgagcggggtcgcgcgtttcgttagttttttaggttgcgtcgtcgcggtttagagaggtttttttttggttattttttttcgggggtttcggaggggtagtttcggagtcggttgaaattaaagttttttcgcgtttcgttattttttttcgtttttttttgtagatttaaattttacggaaattttttttttgtattttgtatttatttttttaagacgtttcggggttgggataacgaggcgttttttgcggaaataaaacggttgttgtggcggggggaggggattagggtacgtcgcggtttcgcgga

SEQ ID NO: 20852 - DNA, 910 bp, Artificial Sequence
  chemically treated genomic DNA (Homo sapiens) CpG-island No: 20852
tccgcgaaaccgcgacgtaccctaatcccctccccccgccacaacaaccgttttatttccgcaaaaaacgcctcgttatcccaaccccgaaacgtcttaaaaaaataaatacaaaatacaaaaaaaaaatttccgtaaaatttaaatctacaaaaaaaaacgaaaaaaaataacgaaacgcgaaaaaactttaatttcaaccgactccgaaactacccctccgaaacccccgaaaaaaaataaccaaaaaaaaacctctctaaaccgcgacgacgcaacctaaaaaactaacgaaacgcgcgaccccgctcaacgcccaaacaaccaccgcgaccgaaaccgaaaaataaaaccaaaacttctctactcccgaaaacgaaaaaataaacgccctattccgctctcgaacgctcccgtcccgcgcccgccccgaccgaacactaacctatatacgaaaccataaacaacgacgacgaaaaatactttcccgactaaaaatatacgaaaaactacgcgacgaacccaaccgaaacgaaacgcgcgacgacaacgacgctacgataacccaaactcccgcgctccgacaacaaatacgacgacgacgcaaaatcgcgaccatccataccgaaccccgaccccgatccgccgccgcttcctcgaaacaacgcgaccgaaacccgaaaacgactcgacgcgcgaacgacgcaaaaacgacgacgtccgaaatcacaaacgataataacgacgaaaccgatcaacacgcgaaaaaactaaacttctcgacgaacgaccgcgcaccgaaccaacgaccgctatacgaatccataatctataaaaacaaaaacaaaaaaaacacgaataactaaaaaactcgactcgcccgaaaatccccgccccgcccgctcaccca

SEQ ID NO: 20853 - DNA, 625 bp, Artificial Sequence
  chemically treated genomic DNA (Homo sapiens) CpG-island No: 20853
gtcgttcgtttttttttcgcgtgggtagggggtagtcgcgacgtcggtttagcgttttcgagtcgggaatcgtatagtattcggcgatggtttcgagtttcgcgcgttcgaagttacggcgtcgttcgttgggggtttcgggacggtagggacggttgggggtggcgcggatcgcgttttcgaggcgcgtagcgcgcgatcgaattacgcgtttcgttcgttgcggttttttaatagtttttcgcgtcgttttacgtggggtcgtacgggttggcggtttttttattcgattggtcgtcgtatagttaattagagagcggaggcgatagcggtcgcgtcgattggttgcggcgggtcggttcgggggagggggcgggattttttttgtttttttcgtattttcgggttcgcgcgattgtgagcgttttcgtttcggagtaggggttcgcgttgggggttcggagggcgggggcgcggttcgacgttttatttttagtttgtttattgtcgttagggtttagcgtttgaagcgcgggtttttcgttgggacgagcgtttttattttcgttttttagtttttttttttttgttttttttttgtgttttgggagttatggggaagttt

SEQ ID NO: 20854 - DNA, 625 bp, Artificial Sequence
  chemically treated genomic DNA (Homo sapiens) CpG-island No: 20854
aaacttccccataactcccaaaacacaaaaaaaaaacaaaaaaaaaaaaactaaaaaacgaaaataaaaacgctcgtcccaacgaaaaacccgcgcttcaaacgctaaaccctaacgacaataaacaaactaaaaataaaacgtcgaaccgcgcccccgccctccgaacccccaacgcgaacccctactccgaaacgaaaacgctcacaatcgcgcgaacccgaaaatacgaaaaaaacaaaaaaaatcccgccccctcccccgaaccgacccgccgcaaccaatcgacgcgaccgctatcgcctccgctctctaattaactatacgacgaccaatcgaataaaaaaaccgccaacccgtacgaccccacgtaaaacgacgcgaaaaactattaaaaaaccgcaacgaacgaaacgcgtaattcgatcgcgcgctacgcgcctcgaaaacgcgatccgcgccacccccaaccgtccctaccgtcccgaaacccccaacgaacgacgccgtaacttcgaacgcgcgaaactcgaaaccatcgccgaatactatacgattcccgactcgaaaacgctaaaccgacgtcgcgactaccccctacccacgcgaaaaaaaaacgaacgac

SEQ ID NO: 20855 - DNA, 625 bp, Artificial Sequence
  chemically treated genomic DNA (Homo sapiens) CpG-island No: 20855
gagtttttttataatttttaggatatagggagaagataaggggagggaaattgagggacggagatgaaagcgttcgttttagcgaaggattcgcgttttaggcgttgggttttggcggtagtgaataagttgggggtggggcgtcgggtcgcgttttcgtttttcggatttttagcgcggatttttgtttcggggcgggggcgtttatagtcgcgcgaattcggaggtgcggagagaataaaaggggtttcgttttttttttcgggtcggttcgtcgtagttaatcggcgcggtcgttatcgttttcgttttttgattggttgtgcggcggttaatcgggtgagggggtcgttagttcgtgcggttttacgtggggcggcgcgaggggttgttagaggatcgtagcgggcggggcgcgtggttcgatcgcgcgttacgcgtttcggggacgcggttcgcgttatttttagtcgtttttgtcgtttcgaggtttttagcgagcggcgtcgtggtttcgggcgcgcggggttcggggttatcgtcgggtgttgtgcggttttcggttcggaggcgttgggtcggcgtcgcggttgttttttgtttacgcgggagggaagcgagcggt

SEQ ID NO: 20856 - DNA, 625 bp, Artificial Sequence
  chemically treated genomic DNA (Homo sapiens) CpG-island No: 20856
accgctcgcttccctcccgcgtaaacaaaaaacaaccgcgacgccgacccaacgcctccgaaccgaaaaccgcacaacacccgacgataaccccgaaccccgcgcgcccgaaaccacgacgccgctcgctaaaaacctcgaaacgacaaaaacgactaaaaataacgcgaaccgcgtccccgaaacgcgtaacgcgcgatcgaaccacgcgccccgcccgctacgatcctctaacaacccctcgcgccgccccacgtaaaaccgcacgaactaacgaccccctcacccgattaaccgccgcacaaccaatcaaaaaacgaaaacgataacgaccgcgccgattaactacgacgaaccgacccgaaaaaaaaaacgaaaccccttttattctctccgcacctccgaattcgcgcgactataaacgcccccgccccgaaacaaaaatccgcgctaaaaatccgaaaaacgaaaacgcgacccgacgccccacccccaacttattcactaccgccaaaacccaacgcctaaaacgcgaatccttcgctaaaacgaacgctttcatctccgtccctcaatttccctccccttatcttctccctatatcctaaaaattataaaaaaactc

SEQ ID NO: 20857 - DNA, 1186 bp, Artificial Sequence
  chemically treated genomic DNA (Homo sapiens) CpG-island No: 20857
gttaggttgcgtttggcgcgagtcgcgcgggtggtatcgggcggatagtcggcgaagttcgggcgtcgttagcgtgcgtttagttttgggtgatttacgaacgaattttaatattcgtttttttattttgttttttttttcggaatagttttgggttggttttgttcggtcggttcgcggcgaggggaattggtcgggtcgtggtatttacggtcgttgttttgaggggtttttcgggtcgaagttaggggtcggggaggggaatggttatggcgagtttttcgggttttcgtttttaatttagaatttttttttttcggagaagtgggggtggaggagggggatcgagtaaggtcggcgtagcggggcgtttttatcgcgcgcgttcgggacggcgcgcggggttcgggttacggttcgtgtggcggggttcgcgggttggtttttttcgggcgcgggggttaggcgcgattttagtttttatgatttttttagggagcgggtgcggttgtttcgtagggagcgggttttgcggcgacggtcgagttattcgcgttttaaggcgcgtttggttttagttcggtttgtaggttttatcgcgttcgcgttttcggagacgacgtcggagggaggtagacgggttagagttttggttttcggtaggcgggcgaggagagagcgggtttttagatgtaaaagtaggaaataaagtaaatttgtagaagttttagattttggagcgcgttagttacgtttggggtcgcggtaagagggatcggcggttttagggttacgttttgttttttcgggagggagttttgtgtttttaggtttagtttttttcgaaatgttttcgttagcgatttttcgttcgttcggggttttttgttcgtcgttatttttcgttttatttttttttttagtttagttcgatttggcgttgcggcgtcgttttcgcggtttttcggcgcggttttttttggagttgggttgggagtgggtttcgggtttcggtattcggcgggtggcggcgtcgtcgttgcgggattgtgggatttttagttcgggtcgtgtggtcgttttttttcgttttattttttggtcgttttaggttttttaggttttcgaagttcggcgcgggtagacgcggaggcgcggcgcggttttttttcgggaggagagaata

SEQ ID NO: 20858 - DNA, 1186 bp, Artificial Sequence
  chemically treated genomic DNA (Homo sapiens) CpG-island No: 20858
tattctctcctcccgaaaaaaaaccgcgccgcgcctccgcgtctacccgcgccgaacttcgaaaacctaaaaaacctaaaacgaccaaaaaataaaacgaaaaaaaacgaccacacgacccgaactaaaaatcccacaatcccgcaacgacgacgccgccacccgccgaataccgaaacccgaaacccactcccaacccaactccaaaaaaaaccgcgccgaaaaaccgcgaaaacgacgccgcaacgccaaatcgaactaaactaaaaaaaaaaataaaacgaaaaataacgacgaacaaaaaaccccgaacgaacgaaaaatcgctaacgaaaacatttcgaaaaaaactaaacctaaaaacacaaaactccctcccgaaaaaacaaaacgtaaccctaaaaccgccgatccctcttaccgcgaccccaaacgtaactaacgcgctccaaaatctaaaacttctacaaatttactttatttcctacttttacatctaaaaacccgctctctcctcgcccgcctaccgaaaaccaaaactctaacccgtctacctccctccgacgtcgtctccgaaaacgcgaacgcgataaaacctacaaaccgaactaaaaccaaacgcgccttaaaacgcgaataactcgaccgtcgccgcaaaacccgctccctacgaaacaaccgcacccgctccctaaaaaaatcataaaaactaaaatcgcgcctaacccccgcgcccgaaaaaaaccaacccgcgaaccccgccacacgaaccgtaacccgaaccccgcgcgccgtcccgaacgcgcgcgataaaaacgccccgctacgccgaccttactcgatccccctcctccacccccacttctccgaaaaaaaaaaattctaaattaaaaacgaaaacccgaaaaactcgccataaccattcccctccccgacccctaacttcgacccgaaaaacccctcaaaacaacgaccgtaaataccacgacccgaccaattcccctcgccgcgaaccgaccgaacaaaaccaacccaaaactattccgaaaaaaaaaacaaaataaaaaaacgaatattaaaattcgttcgtaaatcacccaaaactaaacgcacgctaacgacgcccgaacttcgccgactatccgcccgataccacccgcgcgactcgcgccaaacgcaacctaac

SEQ ID NO: 20859 - DNA, 1186 bp, Artificial Sequence
  chemically treated genomic DNA (Homo sapiens) CpG-island No: 20859
tgtttttttttttcggggagaggtcgcgtcgcgttttcgcgtttgttcgcgtcgggtttcgggggtttggggagtttgaggcggttaggaagtggggcgaggaagggcggttatacggttcgagttgggagttttatagtttcgtagcggcgacgtcgttattcgtcgagtgtcgaggttcggggtttatttttagtttagttttaggagaggtcgcgtcggaggatcgcgaggacggcgtcgtagcgttaggtcgggttgagttaagggaggaaatggagcgaaaagtggcggcgggtagagggtttcgggcgggcggagaatcgttgacgagggtatttcggaaggaattgaatttaggagtatagggttttttttcgggaaggtagggcgtgattttggagtcgtcggttttttttgtcgcggttttaggcgtggttggcgcgttttaggatttggagtttttataagtttgttttgttttttgtttttgtatttaaaaattcgtttttttttcgttcgtttgtcggagattaggattttggttcgtttgttttttttcggcgtcgttttcgggagcgcgggcgcggtggggtttgtaggtcgggttgggattaggcgcgttttggggcgcgagtggttcggtcgtcgtcgtagaattcgttttttgcgaaatagtcgtattcgttttttgggagagttatgagaattggggtcgcgtttgattttcgcgttcgaagaaaattagttcgcggatttcgttatacgggtcgtgattcgagtttcgcgcgtcgtttcgaacgcgcgcggtgaaaacgtttcgttgcgtcggttttgttcggttttttttttttatttttattttttcggaaaaaaaaaattttgaattgggaacgaagattcgaaaaattcgttatgattattttttttttcggtttttagtttcggttcggaaggttttttagggtagcggtcgtgggtattacgattcggttagtttttttcgtcgcggatcgatcgggtagggttaatttaggattgtttcggggaggggagtagggtaggggagcgaatgttggggttcgttcgtgggttatttagaattgggcgtacgttggcggcgttcggatttcgtcgattgttcgttcggtgttattcgcgcggttcgcgttagacgtagtttggt

SEQ ID NO: 20860 - DNA, 1186 bp, Artificial Sequence
  chemically treated genomic DNA (Homo sapiens) CpG-island No: 20860
accaaactacgtctaacgcgaaccgcgcgaataacaccgaacgaacaatcgacgaaatccgaacgccgccaacgtacgcccaattctaaataacccacgaacgaaccccaacattcgctcccctaccctactcccctccccgaaacaatcctaaattaaccctacccgatcgatccgcgacgaaaaaaactaaccgaatcgtaatacccacgaccgctaccctaaaaaaccttccgaaccgaaactaaaaaccgaaaaaaaaaataatcataacgaatttttcgaatcttcgttcccaattcaaaattttttttttccgaaaaaataaaaataaaaaaaaaaaaccgaacaaaaccgacgcaacgaaacgttttcaccgcgcgcgttcgaaacgacgcgcgaaactcgaatcacgacccgtataacgaaatccgcgaactaattttcttcgaacgcgaaaatcaaacgcgaccccaattctcataactctcccaaaaaacgaatacgactatttcgcaaaaaacgaattctacgacgacgaccgaaccactcgcgccccaaaacgcgcctaatcccaacccgacctacaaaccccaccgcgcccgcgctcccgaaaacgacgccgaaaaaaaacaaacgaaccaaaatcctaatctccgacaaacgaacgaaaaaaaaacgaatttttaaatacaaaaacaaaaaacaaaacaaacttataaaaactccaaatcctaaaacgcgccaaccacgcctaaaaccgcgacaaaaaaaaccgacgactccaaaatcacgccctaccttcccgaaaaaaaaccctatactcctaaattcaattccttccgaaataccctcgtcaacgattctccgcccgcccgaaaccctctacccgccgccacttttcgctccatttcctcccttaactcaacccgacctaacgctacgacgccgtcctcgcgatcctccgacgcgacctctcctaaaactaaactaaaaataaaccccgaacctcgacactcgacgaataacgacgtcgccgctacgaaactataaaactcccaactcgaaccgtataaccgcccttcctcgccccacttcctaaccgcctcaaactccccaaacccccgaaacccgacgcgaacaaacgcgaaaacgcgacgcgacctctccccgaaaaaaaaaaaca

SEQ ID NO: 20861 - DNA, 732 bp, Artificial Sequence
  chemically treated genomic DNA (Homo sapiens) CpG-island No: 20861
gggttcgaaatatcgcgttttttttttagcgtcgtgtttttcgtttttttagcgcgcggttttcgttcgattcgcgcgttcgttcgattcgtttttaatttcgtttaattatcgtttttcgcggttgttttttttgtatgagttttcggcgtaggttaatggaattacgcggaggcgcgggcggtttggttaatggaaggtttagggggcgtggttggcgggaggggttgcgggcggtcgggttttatgcgttgagattcgagattgcgtcgtcggcgggtgcgtttaggtcgtttagttagagtcggtaggatttcgtcgtcgggttgtgggtttttgattattttttcgttgtcgggagaagcgtttgagtggggagggaggtgggaggaggtggtttttcgtcgggggtgcggggagcgggacggcggtttggatggatacggttagtttcgggtcggagagggttcggtttatagtagtttgggttttgtttagagttttattgtgtacgttttcgcgaggatttgcggagagacgtgtaggcgacgtacgtttcgggaaggaaggagggtatttgggttttgacgagcgataacgttgtgttttgtgatttcgtataaacggattttgtagtgtagggaaagcgttttacgtttttagttcgggtagggttcgtgggattggcgttcgttgttttaggtttatttcgaatggaggagtgatttttgt

SEQ ID NO: 20862 - DNA, 732 bp, Artificial Sequence
  chemically treated genomic DNA (Homo sapiens) CpG-island No: 20862
acaaaaatcactcctccattcgaaataaacctaaaacaacgaacgccaatcccacgaaccctacccgaactaaaaacgtaaaacgctttccctacactacaaaatccgtttatacgaaatcacaaaacacaacgttatcgctcgtcaaaacccaaataccctccttccttcccgaaacgtacgtcgcctacacgtctctccgcaaatcctcgcgaaaacgtacacaataaaactctaaacaaaacccaaactactataaaccgaaccctctccgacccgaaactaaccgtatccatccaaaccgccgtcccgctccccgcacccccgacgaaaaaccacctcctcccacctccctccccactcaaacgcttctcccgacaacgaaaaaataatcaaaaacccacaacccgacgacgaaatcctaccgactctaactaaacgacctaaacgcacccgccgacgacgcaatctcgaatctcaacgcataaaacccgaccgcccgcaacccctcccgccaaccacgccccctaaaccttccattaaccaaaccgcccgcgcctccgcgtaattccattaacctacgccgaaaactcatacaaaaaaaacaaccgcgaaaaacgataattaaacgaaattaaaaacgaatcgaacgaacgcgcgaatcgaacgaaaaccgcgcgctaaaaaaacgaaaaacacgacgctaaaaaaaaaacgcgatatttcgaaccc

SEQ ID NO: 20863 - DNA, 732 bp, Artificial Sequence
  chemically treated genomic DNA (Homo sapiens) CpG-island No: 20863
ataggggttatttttttattcggggtaagtttgggatagcggacgttaattttacgaattttgttcgggttgggggcgtgggacgttttttttgtattataggattcgtttgtacggagttatagaatatagcgttatcgttcgttagagtttaggtattttttttttttttcggggcgtgcgtcgtttgtacgttttttcgtagattttcgcggaaacgtgtatagtagggttttgaatagaatttaggttgttgtgagtcgaatttttttcggttcggggttgatcgtgtttatttaagtcgtcgtttcgtttttcgtattttcgacggggggttatttttttttatttttttttttatttaggcgtttttttcgatagcggagggatagttaaaaatttataattcggcggcgggattttgtcggttttagttgggcgatttgggcgtattcgtcggcgacgtagtttcgggttttagcgtatagaattcggtcgttcgtagtttttttcgttagttacgttttttgggttttttattggttaagtcgttcgcgttttcgcgtgattttattggtttgcgtcgggggtttatataaagggagtagtcgcggagggcggtgattgggcggggttgggggcgggtcgggcgggcgcgcgggtcgggcgggagtcgcgcgttggagaggcggggagtacggcgttgggggaggggcgcggtgtttcgggttt

SEQ ID NO: 20864 - DNA, 732 bp, Artificial Sequence
  chemically treated genomic DNA (Homo sapiens) CpG-island No: 20864
aaacccgaaacaccgcgcccctcccccaacgccgtactccccgcctctccaacgcgcgactcccgcccgacccgcgcgcccgcccgacccgcccccaaccccgcccaatcaccgccctccgcgactactccctttatataaacccccgacgcaaaccaataaaatcacgcgaaaacgcgaacgacttaaccaataaaaaacccaaaaaacgtaactaacgaaaaaaactacgaacgaccgaattctatacgctaaaacccgaaactacgtcgccgacgaatacgcccaaatcgcccaactaaaaccgacaaaatcccgccgccgaattataaatttttaactatccctccgctatcgaaaaaaacgcctaaataaaaaaaaaaataaaaaaaaataaccccccgtcgaaaatacgaaaaacgaaacgacgacttaaataaacacgatcaaccccgaaccgaaaaaaattcgactcacaacaacctaaattctattcaaaaccctactatacacgtttccgcgaaaatctacgaaaaaacgtacaaacgacgcacgccccgaaaaaaaaaaaaaatacctaaactctaacgaacgataacgctatattctataactccgtacaaacgaatcctataatacaaaaaaaacgtcccacgcccccaacccgaacaaaattcgtaaaattaacgtccgctatcccaaacttaccccgaataaaaaaataacccctat

SEQ ID NO: 20865 - DNA, 928 bp, Artificial Sequence
  chemically treated genomic DNA (Homo sapiens) CpG-island No: 20865
ttttttcggcgagatatttttaggaaggttttttcggggtggtcgtaacgttacggtaaagttatcggggaaagtaaaagggcggtttcgcgtatttttaataggatatagttagtttttaggttcggacgcgttcgagaggagggggaagggagtgttttcgtcgaatttcgagaaaggtcgcgggatttattttcggttttttttcgcgttcgtttaggttttatttttttcggttcgtataaagtttttcgagggcgggggtcggttaggggggagatcgttaggacgcggtcgggtcgggtttagtgattcgcgggcggtttcggtcgcgtaggttgtggtttttcgacgcgtttggagtgtttgttcgggaagggaaggacgcgagtttagcgttttcgtcgtttcgagttttcggttttgacggcgagagtatttcgagaaggttcggcgcgttttacgtagtttcgtttgtcgcgttcgaggtggcggttaattgcgtggagggtcgcgagttcgaggggcgtgtagacgtcgtcgggggcgcgggtgaatcgtttagtggtaggcgttttttcgcgtttcgtcgaggttttaattcgaggttttatatgagtttttttagttcgcgaatcgttttttttttcgggtatttgaggaaggcggttaaataatgcgggggcggattcgggggaggggggaggaaggcgggatgtcgagggagtgggggacggcgtcggtcgttttcgcgtttttcggttttttagcgtttcgttttttatcggggttatacgcgggcgcgtatttacgtttatttttttgttcggtgcgagaagatggtcgtttttgttttatataaaagttttttgttgcggttatataaaagcggttaagttttatttttttagtaggttttttggataaa

SEQ ID NO: 20866 - DNA, 928 bp, Artificial Sequence
  chemically treated genomic DNA (Homo sapiens) CpG-island No: 20866
tttatccaaaaaacctactaaaaaaataaaacttaaccgcttttatataaccgcaacaaaaaacttttatataaaacaaaaacgaccatcttctcgcaccgaacaaaaaaataaacgtaaatacgcgcccgcgtataaccccgataaaaaacgaaacgctaaaaaaccgaaaaacgcgaaaacgaccgacgccgtcccccactccctcgacatcccgccttcctcccccctcccccgaatccgcccccgcattatttaaccgccttcctcaaatacccgaaaaaaaaaacgattcgcgaactaaaaaaactcatataaaacctcgaattaaaacctcgacgaaacgcgaaaaaacgcctaccactaaacgattcacccgcgcccccgacgacgtctacacgcccctcgaactcgcgaccctccacgcaattaaccgccacctcgaacgcgacaaacgaaactacgtaaaacgcgccgaaccttctcgaaatactctcgccgtcaaaaccgaaaactcgaaacgacgaaaacgctaaactcgcgtccttcccttcccgaacaaacactccaaacgcgtcgaaaaaccacaacctacgcgaccgaaaccgcccgcgaatcactaaacccgacccgaccgcgtcctaacgatctcccccctaaccgacccccgccctcgaaaaactttatacgaaccgaaaaaaataaaacctaaacgaacgcgaaaaaaaaccgaaaataaatcccgcgacctttctcgaaattcgacgaaaacactcccttccccctcctctcgaacgcgtccgaacctaaaaactaactatatcctattaaaaatacgcgaaaccgcccttttactttccccgataactttaccgtaacgttacgaccaccccgaaaaaaccttcctaaaaatatctcgccgaaaaaa

SEQ ID NO: 20867 - DNA, 928 bp, Artificial Sequence
  chemically treated genomic DNA (Homo sapiens) CpG-island No: 20867
tttgtttaaagggtttattggaaaagtggggtttggtcgtttttgtgtgatcgtaataaagagtttttatatgaggtagaaacggttattttttcgtatcgggtaggagggtgggcgtgagtgcgcgttcgcgtgtggtttcgatgggaggcgaggcgttgggaggtcggggggcgcgggggcggtcggcgtcgttttttattttttcgatatttcgttttttttttttttttttcgggttcgttttcgtattgtttggtcgttttttttaggtgttcgggggaaaggacggttcgcgaattgggggaatttatgtgaggtttcgagttagggtttcggcggggcgcgaaggggcgtttgttattgagcgatttattcgcgttttcgacggcgtttgtacgtttttcgagttcgcggttttttacgtagttggtcgttatttcggacgcggtaggcgggattgcgtggggcgcgtcgagttttttcggggtgttttcgtcgttaaggtcgagggttcggggcggcgggaacgttgggttcgcgttttttttttttcggataggtattttagacgcgtcggggagttatagtttgcgcggtcggagtcgttcgcgggttattgggttcggttcggtcgcgttttgacggttttttttttggtcggttttcgttttcggaaggttttgtgcgagtcgggggaggtggggtttgggcgggcgcgggagggagtcggaggtgggtttcgcggtttttttcgggattcggcggggatattttttttttttttttttcgggcgcgttcgggtttgggaattggttgtgttttattggaagtgcgcggggtcgtttttttgtttttttcggtaattttgtcgtagcgttgcggttatttcgaggggatttttttgaaggtgtttcgtcggagagg

SEQ ID NO: 20868 - DNA, 928 bp, Artificial Sequence
  chemically treated genomic DNA (Homo sapiens) CpG-island No: 20868
cctctccgacgaaacaccttcaaaaaaatcccctcgaaataaccgcaacgctacgacaaaattaccgaaaaaaacaaaaaaacgaccccgcgcacttccaataaaacacaaccaattcccaaacccgaacgcgcccgaaaaaaaaaaaaaaaaaatatccccgccgaatcccgaaaaaaaccgcgaaacccacctccgactccctcccgcgcccgcccaaaccccacctcccccgactcgcacaaaaccttccgaaaacgaaaaccgaccaaaaaaaaaaccgtcaaaacgcgaccgaaccgaacccaataacccgcgaacgactccgaccgcgcaaactataactccccgacgcgtctaaaatacctatccgaaaaaaaaaaaacgcgaacccaacgttcccgccgccccgaaccctcgaccttaacgacgaaaacaccccgaaaaaactcgacgcgccccacgcaatcccgcctaccgcgtccgaaataacgaccaactacgtaaaaaaccgcgaactcgaaaaacgtacaaacgccgtcgaaaacgcgaataaatcgctcaataacaaacgccccttcgcgccccgccgaaaccctaactcgaaacctcacataaattcccccaattcgcgaaccgtcctttcccccgaacacctaaaaaaaacgaccaaacaatacgaaaacgaacccgaaaaaaaaaaaaaaaaaacgaaatatcgaaaaaataaaaaacgacgccgaccgcccccgcgccccccgacctcccaacgcctcgcctcccatcgaaaccacacgcgaacgcgcactcacgcccaccctcctacccgatacgaaaaaataaccgtttctacctcatataaaaactctttattacgatcacacaaaaacgaccaaaccccacttttccaataaaccctttaaacaaa

SEQ ID NO: 20869 - DNA, 754 bp, Artificial Sequence
  chemically treated genomic DNA (Homo sapiens) CpG-island No: 20869
  unsure (358, 367, 373, 389, 413, 510)
cgtgttttttaagggtttttcggcgtcgcggtttagttcggcgttatttgtagttcggttcgtagtcgtttgtttttcgtgtttagtttggtttcgcggcggtttatggataataatttttggtttttgttgacgcgaaagatttcgtatttttttttgagtcgttcgtattcggtcgtcgcgtattttagttttggtatcgacgagttagtggatttgaagttggtttttagtagttcggtcgcgtttatttcggggggtagcgattcgggttcggtttttgttgtcgttttcgcgtttcggcggaacgagttgcgtagtaggcgggttttgggttttatttttatcgggatttcgnaggtttcgncggcgnttcgttcgtacgtggnttcgattatttttttcgtcgcggngtttacgagcgacgaggcgggtttttatggcgttcggtgtcgtttattattttagggagtattagttaggattgggtatacgggaatcgaaatcggnatcgggttgggggttaaaagaaatcggaatcgggacgggggtcggggttataggtaatacgggacggggaacgggggcggggtttaatcgggaaatggaattcgtggttcgcgaaaatttagagaatcggggtcgggaattatacgggggaatcggggcgggagattaacggggaaattcggggtttaaaggacggggggaaaacgcgggaattgtggttcgggggaaaaaaacgagagggggt

SEQ ID NO: 20870 - DNA, 754 bp, Artificial Sequence
  chemically treated genomic DNA (Homo sapiens) CpG-island No: 20870
  unsure (245, 342, 366, 382, 388, 397)
accccctctcgtttttttcccccgaaccacaattcccgcgttttccccccgtcctttaaaccccgaatttccccgttaatctcccgccccgattcccccgtataattcccgaccccgattctctaaattttcgcgaaccacgaattccatttcccgattaaaccccgcccccgttccccgtcccgtattacctataaccccgacccccgtcccgattccgatttcttttaacccccaacccgatnccgatttcgattcccgtatacccaatcctaactaatactccctaaaataataaacgacaccgaacgccataaaaacccgcctcgtcgctcgtaaacnccgcgacgaaaaaaataatcgaanccacgtacgaacgaancgccgncgaaacctncgaaatcccgataaaaataaaacccaaaacccgcctactacgcaactcgttccgccgaaacgcgaaaacgacaacaaaaaccgaacccgaatcgctaccccccgaaataaacgcgaccgaactactaaaaaccaacttcaaatccactaactcgtcgataccaaaactaaaatacgcgacgaccgaatacgaacgactcaaaaaaaaatacgaaatctttcgcgtcaacaaaaaccaaaaattattatccataaaccgccgcgaaaccaaactaaacacgaaaaacaaacgactacgaaccgaactacaaataacgccgaactaaaccgcgacgccgaaaaacccttaaaaaacacg

SEQ ID NO: 20871 - DNA, 754 bp, Artificial Sequence
  chemically treated genomic DNA (Homo sapiens) CpG-island No: 20871
  unsure (245, 342, 366, 382, 388, 397)
gttttttttcgtttttttttttcgggttataattttcgcgtttttttttcgttttttgggtttcgggttttttcgttggtttttcgtttcggttttttcgtgtggttttcggtttcgattttttgggttttcgcgggttacgggttttatttttcggttgggtttcgttttcgtttttcgtttcgtgttatttatggtttcggttttcgtttcggtttcggttttttttggtttttaattcggtntcggtttcggttttcgtgtgtttagttttggttggtattttttagggtagtaagcggtatcggacgttatgggggttcgtttcgtcgttcgtgagtntcgcggcgggggaagtgatcgagnttacgtacgggcgggncgtcgncgaggtttncgagatttcggtgaaggtgaagtttaaggttcgtttgttgcgtaattcgtttcgtcgaggcgcgggggcggtagtaggggtcgggttcgggtcgttgtttttcggggtgggcgcggtcgggttgttgggggttagttttaagtttattggttcgtcggtgttagagttggagtacgcggcggtcgagtacgagcggtttaggaaggagtacgagatttttcgcgttagtaagaattaggagttgttgtttatgggtcgtcgcgaggttaagttggatacggagaataagcggttgcgggtcgaattgtaggtaacgtcgggttgggtcgcgacgtcgggagatttttgggaagtacg

SEQ ID NO: 20872 - DNA, 754 bp, Artificial Sequence
  chemically treated genomic DNA (Homo sapiens) CpG-island No: 20872
  unsure (358, 367, 373, 389, 413, 510)
cgtacttcccaaaaatctcccgacgtcgcgacccaacccgacgttacctacaattcgacccgcaaccgcttattctccgtatccaacttaacctcgcgacgacccataaacaacaactcctaattcttactaacgcgaaaaatctcgtactccttcctaaaccgctcgtactcgaccgccgcgtactccaactctaacaccgacgaaccaataaacttaaaactaacccccaacaacccgaccgcgcccaccccgaaaaacaacgacccgaacccgacccctactaccgcccccgcgcctcgacgaaacgaattacgcaacaaacgaaccttaaacttcaccttcaccgaaatctcgnaaacctcgncgacgncccgcccgtacgtaanctcgatcacttcccccgccgcganactcacgaacgacgaaacgaacccccataacgtccgataccgcttactaccctaaaaaataccaaccaaaactaaacacacgaaaaccgaaaccganaccgaattaaaaaccaaaaaaaaccgaaaccgaaacgaaaaccgaaaccataaataacacgaaacgaaaaacgaaaacgaaacccaaccgaaaaataaaacccgtaacccgcgaaaacccaaaaaatcgaaaccgaaaaccacacgaaaaaaccgaaacgaaaaaccaacgaaaaaacccgaaacccaaaaaacgaaaaaaaaacgcgaaaattataacccgaaaaaaaaaaacgaaaaaaaac

SEQ ID NO: 20873 - DNA, 540 bp, Artificial Sequence
  chemically treated genomic DNA (Homo sapiens) CpG-island No: 20873
tcgtcgggagtcggtttggcgcgtttcgtttaggtatttcgatcgtgggtagtttgcgttcgtttgggttttatcgtttcggttcggtagatatttgagcggtggttagggtaggttttcgtttttgtcgatgtttatgttttgggatatagcgacgatgtagtttagcgaattaattatgatagtagcgggaggattttcgagttcgttcgttatagtagaacgcgcggttaagtttggcgcgaaattgtggtcgtttcgttttttcgtttttatttgtgtaggcgaggtttcgttttttcgtttcggcgtacgtagggtcgcggcgtgttcgcgttcgtagacgtttgggaattgcggtcgcgggttcgcgtttttcgtcgggttttgtcgtcgggttgttatttttgttttgttatgtttcgtcggaagtttgcgtcgggcggtttcgttgtttttagtttagtttttgcgaggtaagcggttttgagtcgatttttttagtttacgggaagtttgaaatttatttttttttttata

SEQ ID NO: 20874 - DNA, 540 bp, Artificial Sequence
  chemically treated genomic DNA (Homo sapiens) CpG-island No: 20874
tataaaaaaaaaaataaatttcaaacttcccgtaaactaaaaaaatcgactcaaaaccgcttacctcgcaaaaactaaactaaaaacaacgaaaccgcccgacgcaaacttccgacgaaacataacaaaacaaaaataacaacccgacgacaaaacccgacgaaaaacgcgaacccgcgaccgcaattcccaaacgtctacgaacgcgaacacgccgcgaccctacgtacgccgaaacgaaaaaacgaaacctcgcctacacaaataaaaacgaaaaaacgaaacgaccacaatttcgcgccaaacttaaccgcgcgttctactataacgaacgaactcgaaaatcctcccgctactatcataattaattcgctaaactacatcgtcgctatatcccaaaacataaacatcgacaaaaacgaaaacctaccctaaccaccgctcaaatatctaccgaaccgaaacgataaaacccaaacgaacgcaaactacccacgatcgaaatacctaaacgaaacgcgccaaaccgactcccgacga

SEQ ID NO: 20875 - DNA, 540 bp, Artificial Sequence
  chemically treated genomic DNA (Homo sapiens) CpG-island No: 20875
tgtggaggaggaggtggattttaggtttttcgtagattggaagaatcggtttaaaatcgtttgtttcgtaggggttgagttggaggtagcgaggtcgttcgacgtaggttttcggcgagatatggtagggtaaggatggtagttcggcggtagggttcggcgaggagcgcgaattcgcggtcgtagtttttaggcgtttgcgggcgcgagtacgtcgcgattttgcgtgcgtcggggcgggggggcggggtttcgtttgtataaatagggacgagggggcggggcggttataatttcgcgttaaatttgatcgcgcgttttgttgtaacgagcgggttcggaggttttttcgttgttgttatggttggttcgttaaattgtatcgtcgttgtgttttagaatatgggtatcggtaagaacggggatttgttttggttatcgtttaggtatttgtcgggtcggggcgatgggatttaaacgggcgtaggttgtttacggtcggggtatttgggcgggacgcgttaggtcgattttcggcga

SEQ ID NO: 20876 - DNA, 540 bp, Artificial Sequence
  chemically treated genomic DNA (Homo sapiens) CpG-island No: 20876
tcgccgaaaatcgacctaacgcgtcccgcccaaataccccgaccgtaaacaacctacgcccgtttaaatcccatcgccccgacccgacaaatacctaaacgataaccaaaacaaatccccgttcttaccgatacccatattctaaaacacaacgacgatacaatttaacgaaccaaccataacaacaacgaaaaaacctccgaacccgctcgttacaacaaaacgcgcgatcaaatttaacgcgaaattataaccgccccgccccctcgtccctatttatacaaacgaaaccccgcccccccgccccgacgcacgcaaaatcgcgacgtactcgcgcccgcaaacgcctaaaaactacgaccgcgaattcgcgctcctcgccgaaccctaccgccgaactaccatccttaccctaccatatctcgccgaaaacctacgtcgaacgacctcgctacctccaactcaacccctacgaaacaaacgattttaaaccgattcttccaatctacgaaaaacctaaaatccacctcctcctccaca

SEQ ID NO: 20877 - DNA, 578 bp, Artificial Sequence
  chemically treated genomic DNA (Homo sapiens) CpG-island No: 20877
tggcgagcgtgtgggttttttgtgtgtgtatattcgggtgagcgtgtgggttttgtgtgtgtatattcgggtgagcgtgtgggttttttgtgtgtgtatattcgggtgagcgtgtgggttttgtgtgtgtatattcgggtgagcgtgtgggttttttgtgtgtgtatattcgggtgagcgtgtgggttttgtgtgtgtatattcgggtgagcgtgtgggttttttgtgtgtgtatattcgggtgagcgtgtgggttttgtgtgtgtatattcgggtgagcgtgtgggttttttgtgtgtgtgtatattttggcgagcgtgtgggttttttgtgtgtatattttggcgagcgtgtgggttttttgtgtgtgtatattcgggtgagcgtgtgggttttttgtgtgtgtgtatattttggcgagcgtgtgggttttgtgtgtgtatattcgggtgagcgtgtgggtgtgtttattttttatgtatcgtttagtcgttatacgggaaatgagttagggtgtgtgaagtgttcgtaggaatgtttggtcgtaaggtggatttaaattttgtttattttgtttt

SEQ ID NO: 20878 - DNA, 578 bp, Artificial Sequence
  chemically treated genomic DNA (Homo sapiens) CpG-island No: 20878
aaaacaaaataaacaaaatttaaatccaccttacgaccaaacattcctacgaacacttcacacaccctaactcatttcccgtataacgactaaacgatacataaaaaataaacacacccacacgctcacccgaatatacacacacaaaacccacacgctcgccaaaatatacacacacacaaaaaacccacacgctcacccgaatatacacacacaaaaaacccacacgctcgccaaaatatacacacaaaaaacccacacgctcgccaaaatatacacacacacaaaaaacccacacgctcacccgaatatacacacacaaaacccacacgctcacccgaatatacacacacaaaaaacccacacgctcacccgaatatacacacacaaaacccacacgctcacccgaatatacacacacaaaaaacccacacgctcacccgaatatacacacacaaaacccacacgctcacccgaatatacacacacaaaaaacccacacgctcacccgaatatacacacacaaaacccacacgctcacccgaatatacacacacaaaaaacccacacgctcgcca

SEQ ID NO: 20879 - DNA, 578 bp, Artificial Sequence
  chemically treated genomic DNA (Homo sapiens) CpG-island No: 20879
ggagtagaatgagtaaagtttgagtttattttgcggttaggtatttttacgggtattttatatattttagtttatttttcgtatggcgattggacgatgtatagagaatgaatatatttatacgtttattcgagtgtgtatatatagaatttatacgttcgttagagtgtgtatatatatagagaatttatacgtttattcgagtgtgtatatatagagaatttatacgttcgttagagtgtgtatatagagaatttatacgttcgttagagtgtgtatatatatagagaatttatacgtttattcgagtgtgtatatatagaatttatacgtttattcgagtgtgtatatatagagaatttatacgtttattcgagtgtgtatatatagaatttatacgtttattcgagtgtgtatatatagagaatttatacgtttattcgagtgtgtatatatagaatttatacgtttattcgagtgtgtatatatagagaatttatacgtttattcgagtgtgtatatatagaatttatacgtttattcgagtgtgtatatatagagaatttatacgttcgtta

SEQ ID NO: 20880 - DNA, 578 bp, Artificial Sequence
  chemically treated genomic DNA (Homo sapiens) CpG-island No: 20880
taacgaacgtataaattctctatatatacacactcgaataaacgtataaattctatatatacacactcgaataaacgtataaattctctatatatacacactcgaataaacgtataaattctatatatacacactcgaataaacgtataaattctctatatatacacactcgaataaacgtataaattctatatatacacactcgaataaacgtataaattctctatatatacacactcgaataaacgtataaattctatatatacacactcgaataaacgtataaattctctatatatatacacactctaacgaacgtataaattctctatatacacactctaacgaacgtataaattctctatatatacacactcgaataaacgtataaattctctatatatatacacactctaacgaacgtataaattctatatatacacactcgaataaacgtataaatatattcattctctatacatcgtccaatcgccatacgaaaaataaactaaaatatataaaatacccgtaaaaatacctaaccgcaaaataaactcaaactttactcattctactcc

SEQ ID NO: 20881 - DNA, 1524 bp, Artificial Sequence
  chemically treated genomic DNA (Homo sapiens) CpG-island No: 20881
  unsure (227, 633, 676, 772, 842, 869, 923, 929, 956, 967, 990, 1013)
  unsure (1023, 1035, 1087, 1089, 1101, 1103, 1142, 1185, 1189, 1198)
  unsure (1229, 1241, 1248, 1254, 1299, 1318..1319, 1322, 1325, 1327)
  unsure (1331, 1338, 1356, 1394, 1437, 1447)
ttcgtcgagtttttacgggtacgcgcggacgacgtaaaaggaataataaaacgaaggaagatcgttagagtatttttataacgcgtacgtatacgtacgcgtttcgatacgcgtttattatttttattttttttcgtcgttcgtatcgttcgagtcgtttgtggggcggtcgcgaggcggatcggagttggttggggcgtgtcggcgaggttgttcgatttcgcgtntacggttttttcggcggtcgtttttcgcggcggttttttattttttttttttcgtacgcggatcgttttattagtatttttattttcgttttacgtttttcgtcgtacggagttgcgacgttttttttcgtcgttcgttcgtcgttagtttttttttgttaattatattttatcggatacggtaaattttttttcgtatttatcgtttttaattttttcgtattcgtagatttttacgtttttatcgtatagtatatttcgtttcgtttttggtagttttttttttcgacgacgtgattagtattatatttcgttttataagtgagttttcgtcgtttttttttttttttttatatttcgtttcgttcgttgatttcgtaacgcgattcgtcgtattcgtcgttanagagtcgttttttttcgtgtgtatttattcgtttacggttaantttacgttttttttttgatagtaattcgttatttcgtattaaaacgtatttagatttacgatataagggagagttattttttacgcgattcggttntcgatcgtgacgttcgtcgtaagacgcgattcgttacgttacggttaatttatatttcgtatattattanttattttatagtcgtttttcgtcgcgnatcgtcgttcgtttatatggatcgcgtatagattacgacgtcgacgtcgcgtantatcgngtacgtatttttcgtttttcgtaattnatatttcgttntttattacgcgacgttcgttatntatacgcgtattgcggcgatgtngatatatagntcgatagatatncgttattatatttcgacgacgttcgtcgcgcgcgttattacgattaggtgtntnagaggtcgcgtntncgacgcgttcgaatattatcgcgatataacgtattatanacgcgtcgcgcgtcgttgttagattagtgtggtacgttatttncgtnatattttanttagtacgttaatatattcgcgtacgttatncgtttgacgttnttttttncgttantcgttgcgtttacgtattagtttcgtagagatcgatagtaggttntttgcgttcgcgtgacgannttncgntntcgnatagcgntcgttgcgagtttacgtnattcgtatatgtatatagtcgcgtttatacgcgttttngtagttttacgtttagttacgcgattttaagattcgacgtttntgagtttcgnagattacgaattattttacgtaatgatattatcgtagcgcgtgtttttcggtcgtttagtacgtcgtttcgtagcga

SEQ ID NO: 20882 - DNA, 1524 bp, Artificial Sequence
  chemically treated genomic DNA (Homo sapiens) CpG-island No: 20882
  unsure (78, 88, 131, 169, 187, 194, 198, 200, 203, 206..207, 226)
  unsure (271, 277, 284, 296, 327, 336, 340, 383, 422, 424, 436, 438)
  unsure (490, 502, 512, 535, 558, 569, 596, 602, 656, 683, 753, 849)
  unsure (892, 1298)
tcgctacgaaacgacgtactaaacgaccgaaaaacacgcgctacgataatatcattacgtaaaataattcgtaatctncgaaactcanaaacgtcgaatcttaaaatcgcgtaactaaacgtaaaactacnaaaacgcgtataaacgcgactatatacatatacgaatnacgtaaactcgcaacgancgctatncganancgnaanntcgtcacgcgaacgcaaanaacctactatcgatctctacgaaactaatacgtaaacgcaacgantaacgnaaaaaanaacgtcaaacgnataacgtacgcgaatatattaacgtactaantaaaatatnacgnaaataacgtaccacactaatctaacaacgacgcgcgacgcgtntataatacgttatatcgcgataatattcgaacgcgtcgnanacgcgacctctnanacacctaatcgtaataacgcgcgcgacgaacgtcgtcgaaatataataacgnatatctatcganctatatatcnacatcgccgcaatacgcgtatanataacgaacgtcgcgtaataaanaacgaaatatnaattacgaaaaacgaaaaatacgtacncgatantacgcgacgtcgacgtcgtaatctatacgcgatccatataaacgaacgacgatncgcgacgaaaaacgactataaaataantaataatatacgaaatataaattaaccgtaacgtaacgaatcgcgtcttacgacgaacgtcacgatcganaaccgaatcgcgtaaaaaataactctcccttatatcgtaaatctaaatacgttttaatacgaaataacgaattactatcaaaaaaaaaacgtaaanttaaccgtaaacgaataaatacacacgaaaaaaaacgactctntaacgacgaatacgacgaatcgcgttacgaaatcaacgaacgaaacgaaatataaaaaaaaaaaaaaaaacgacgaaaactcacttataaaacgaaatataatactaatcacgtcgtcgaaaaaaaaaactaccaaaaacgaaacgaaatatactatacgataaaaacgtaaaaatctacgaatacgaaaaaattaaaaacgataaatacgaaaaaaaatttaccgtatccgataaaatataattaacaaaaaaaaactaacgacgaacgaacgacgaaaaaaaacgtcgcaactccgtacgacgaaaaacgtaaaacgaaaataaaaatactaataaaacgatccgcgtacgaaaaaaaaaaaataaaaaaccgccgcgaaaaacgaccgccgaaaaaaccgtanacgcgaaatcgaacaacctcgccgacacgccccaaccaactccgatccgcctcgcgaccgccccacaaacgactcgaacgatacgaacgacgaaaaaaaataaaaataataaacgcgtatcgaaacgcgtacgtatacgtacgcgttataaaaatactctaacgatcttccttcgttttattattccttttacgtcgtccgcgcgtacccgtaaaaactcgacgaa

SEQ ID NO: 20883 - DNA, 1524 bp, Artificial Sequence
  chemically treated genomic DNA (Homo sapiens) CpG-island No: 20883
  unsure (78, 88, 131, 169, 187, 194, 198, 200, 203, 206..207, 226)
  unsure (271, 277, 284, 296, 327, 336, 340, 383, 422, 424, 436, 438)
  unsure (490, 502, 512, 535, 558, 569, 596, 602, 656, 683, 753, 849)
  unsure (892, 1298)
tcgttgcgaagcggcgtattggacggtcgggagatacgcgttgcggtggtgttattgcgtggggtagttcgtggtttncgagatttangggcgtcggattttgagatcgcgtggttgagcgtagagttatnagaacgcgtgtggacgcggttgtgtgtatgtgcgagtnacgtgaattcgtaacgancgttgtncganancgnaanntcgttacgcggacgtaganggtttattatcggtttttgcgggattggtacgtgagcgtaacgantgacgngagaagnggcgttagacgngtgacgtacgcgaatgtattggcgtgttgantggagtatngcgnggatgacgtgttatattagtttagtagcggcgcgcgacgcgtntatagtgcgttgtgtcgcggtgatgttcggacgcgtcgnanacgcgatttttnangtatttagtcgtggtgacgcgcgcggcgagcgtcgtcggggtgtgatgacgngtgtttgtcganttgtgtgttngtatcgtcgtagtgcgcgtgtgnatggcggacgtcgcgtggtgagnagcgaggtgtnggttgcgagagacgagggatgcgtgtncgatantgcgcggcgtcgacgtcgtgatttgtacgcggtttatataggcgggcgacgatncgcggcggagagcgattgtagagtgantgatagtgtgcgaggtgtggattggtcgtagcgtagcggatcgcgttttgcggcgagcgttacgatcggnggtcgagtcgcgtggagggtggtttttttttgtgtcgtgggtttgggtgcgttttgatgcggaatagcgggttgttattagggggggggcgtgagnttggtcgtggacgggtaggtgtatacggggaggggcgattttntggcggcgggtgcgacgggtcgcgttacggggttagcgggcgagacgagatgtggagagagggaggagggcggcgagggtttatttatagagcgggatgtaatgttggttacgtcgtcggggagggggattattaggagcggagcggggtgtgttatgcggtgggggcgtaggagtttacgggtgcgggagggttgggggcggtgggtgcggagggaggtttgtcgtgttcgatgaaatgtggttggtagagaggggttgacggcgggcgggcgacgaggaggagcgtcgtagtttcgtgcggcgaggggcgtggagcggaggtaggggtgttggtggggcggttcgcgtgcggaaaaaaaagaatggggggtcgtcgcggggggcggtcgtcggaggggtcgtgngcgcggggtcgggtagtttcgtcgatacgttttaattaatttcgattcgtttcgcggtcgttttataggcggttcggacggtgcgaacgacggggggggatgggaataataggcgcgtgtcggggcgcgtgcgtgtgcgtacgcgttatggggatgttttggcggttttttttcgttttgttattttttttgcgtcgttcgcgcgtgttcgtgggagttcggcggg

SEQ ID NO: 20884 - DNA, 1524 bp, Artificial Sequence
  chemically treated genomic DNA (Homo sapiens) CpG-island No: 20884
  unsure (227, 633, 676, 772, 842, 869, 923, 929, 956, 967, 990, 1013)
  unsure (1023, 1035, 1087, 1089, 1101, 1103, 1142, 1185, 1189, 1198)
  unsure (1229, 1241, 1248, 1254, 1299, 1318..1319, 1322, 1325, 1327)
  unsure (1331, 1338, 1356, 1394, 1437, 1447)
cccgccgaactcccacgaacacgcgcgaacgacgcaaaaaaaataacaaaacgaaaaaaaaccgccaaaacatccccataacgcgtacgcacacgcacgcgccccgacacgcgcctattattcccatccccccccgtcgttcgcaccgtccgaaccgcctataaaacgaccgcgaaacgaatcgaaattaattaaaacgtatcgacgaaactacccgaccccgcgcncacgacccctccgacgaccgccccccgcgacgaccccccattcttttttttccgcacgcgaaccgccccaccaacacccctacctccgctccacgcccctcgccgcacgaaactacgacgctcctcctcgtcgcccgcccgccgtcaacccctctctaccaaccacatttcatcgaacacgacaaacctccctccgcacccaccgcccccaaccctcccgcacccgtaaactcctacgcccccaccgcataacacaccccgctccgctcctaataatccccctccccgacgacgtaaccaacattacatcccgctctataaataaaccctcgccgccctcctccctctctccacatctcgtctcgcccgctaaccccgtaacgcgacccgtcgcacccgccgccanaaaatcgcccctccccgtatacacctacccgtccacgaccaanctcacgccccccccctaataacaacccgctattccgcatcaaaacgcacccaaacccacgacacaaaaaaaaaccaccctccacgcgactcgaccnccgatcgtaacgctcgccgcaaaacgcgatccgctacgctacgaccaatccacacctcgcacactatcantcactctacaatcgctctccgccgcgnatcgtcgcccgcctatataaaccgcgtacaaatcacgacgtcgacgccgcgcantatcgnacacgcatccctcgtctctcgcaaccnacacctcgctnctcaccacgcgacgtccgccatncacacgcgcactacgacgatacnaacacacaantcgacaaacacncgtcatcacaccccgacgacgctcgccgcgcgcgtcaccacgactaaatacntnaaaaatcgcgtntncgacgcgtccgaacatcaccgcgacacaacgcactatanacgcgtcgcgcgccgctactaaactaatataacacgtcatccncgcnatactccantcaacacgccaatacattcgcgtacgtcacncgtctaacgccncttctcncgtcantcgttacgctcacgtaccaatcccgcaaaaaccgataataaaccntctacgtccgcgtaacgannttncgntntcgnacaacgntcgttacgaattcacgtnactcgcacatacacacaaccgcgtccacacgcgttctnataactctacgctcaaccacgcgatctcaaaatccgacgcccntaaatctcgnaaaccacgaactaccccacgcaataacaccaccgcaacgcgtatctcccgaccgtccaatacgccgcttcgcaacga

SEQ ID NO: 20885 - DNA, 1070 bp, Artificial Sequence
  chemically treated genomic DNA (Homo sapiens) CpG-island No: 20885
  unsure (47, 115, 138, 255, 261, 289, 296, 374, 478, 482, 516, 538)
  unsure (553, 582, 628, 688, 723, 773, 967, 1013, 1046, 1053, 1069)
gtcgattcgtaatacgcgggcggggcggggcggtcgttattaaaagnagtaaattagagacgagtattgatttcgtcgtttcgtcgttcgcgtcgtgtaaaaaagtttacgcgantaaaatttcgcgtcgcgcgtcgncgttgcgtcgtattacgtgttatcgtagtaggtcgcggtcgatcgtcgcgtttttttatggcgcgtaggtagggacgtcgacgattgttaggcgagtgttataagcgttagatagtngattanacgttattgtcgatcgtgatatagcgangttcgtnaatagtcgcgatgtgttttcgcggtagtaaatgagcgcgtatagagtgcgagagtatatcgattatttattatgttanacgcgcgcgtatcgtagcgagcgatcgttcgttatgttgttcgagatatatcgtttagatagtacgagagatcgtaagtacgaagacgatagagagattgagtnagtnatcgtcgtagatatgacgatacgcgcgagagaangattgatcgttagtagaacganatagaggtaggcgtncgagtgatagcgagatagttcgttagtantgcgattattcgtcgagtacgcgcgacggacgtcgcgttatcgttntagacgtacgtcgatagacgtagcgatgttgcgaggtggttcgtgcgacggagagcggtngttcggtcgatacgatcgtcgtttacgtttcgcgntcgagcgcgggatttcgttgatgggtagcggcgcgttgcgcgagcgatantaggtcgagcgtgcgttgtagtatagcggcggtgcggataagatttttatattaacgtcgttattcgcggtcgaacgtcgatggagaatagcgttcgataatatattggtagcgacgtatttattcgtagatgaaagcgaagtagttcgtagttcgttagttacgttcgtagatgcgtattcgtagtcgacganagtcgagttgtattagtcgtagtcgcgacgatggtagagatgaganatgagtcgggtgagtatatacgtcgtattatantagtaantaacgataatagttana

SEQ ID NO: 20886 - DNA, 1070 bp, Artificial Sequence
  chemically treated genomic DNA (Homo sapiens) CpG-island No: 20886
  unsure (2, 18, 25, 58, 104, 298, 348, 383, 443, 489, 518, 533, 555)
  unsure (589, 593, 697, 775, 782, 810, 816, 933, 956, 1024)
tntaactattatcgttanttactantataatacgacgtatatactcacccgactcatntctcatctctaccatcgtcgcgactacgactaatacaactcgactntcgtcgactacgaatacgcatctacgaacgtaactaacgaactacgaactacttcgctttcatctacgaataaatacgtcgctaccaatatattatcgaacgctattctccatcgacgttcgaccgcgaataacgacgttaatataaaaatcttatccgcaccgccgctatactacaacgcacgctcgacctantatcgctcgcgcaacgcgccgctacccatcaacgaaatcccgcgctcgancgcgaaacgtaaacgacgatcgtatcgaccgaacnaccgctctccgtcgcacgaaccacctcgcaacatcgctacgtctatcgacgtacgtctanaacgataacgcgacgtccgtcgcgcgtactcgacgaataatcgcantactaacgaactatctcgctatcactcgnacgcctacctctatntcgttctactaacgatcaatcnttctctcgcgcgtatcgtcatatctacgacgatnactnactcaatctctctatcgtcttcgtacttacgatctctcgtactatctaaacgatatatctcgaacaacataacgaacgatcgctcgctacgatacgcgcgcgtntaacataataaataatcgatatactctcgcactctatacgcgctcatttactaccgcgaaaacacatcgcgactattnacgaacntcgctatatcacgatcgacaataacgtntaatcnactatctaacgcttataacactcgcctaacaatcgtcgacgtccctacctacgcgccataaaaaaacgcgacgatcgaccgcgacctactacgataacacgtaatacgacgcaacgncgacgcgcgacgcgaaattttantcgcgtaaacttttttacacgacgcgaacgacgaaacgacgaaatcaatactcgtctctaatttactncttttaataacgaccgccccgccccgcccgcgtattacgaatcgac

SEQ ID NO: 20887 - DNA, 1070 bp, Artificial Sequence
  chemically treated genomic DNA (Homo sapiens) CpG-island No: 20887
  unsure (2, 18, 25, 58, 104, 298, 348, 383, 443, 489, 518, 533, 555)
  unsure (589, 593, 697, 775, 782, 810, 816, 933, 956, 1024)
tntagttgttgtcgttanttgttantatagtacggcgtgtgtgtttattcggtttatnttttatttttgttatcgtcgcggttgcgattggtatagttcgattntcgtcgattgcgggtgcgtatttacgagcgtggttgacgagttacggattgtttcgtttttatttgcgagtgagtgcgtcgttattagtgtgttatcggacgttgttttttatcgacgttcggtcgcgggtgacggcgttggtgtgagagttttgttcgtatcgtcgttgtgttgtagcgtacgttcggtttgntgtcgttcgcgtagcgcgtcgttgtttattagcgagatttcgcgttcgancgcggagcgtgagcgacggtcgtgtcggtcgaatnatcgtttttcgtcgtacggattatttcgtagtatcgttgcgtttatcggcgtgcgtttgngacgatggcgcggcgttcgtcgcgcgtgttcggcgaatagtcgtantattggcgagttatttcgttgttattcgngcgtttatttttgtntcgttttgttggcgattagttnttttttcgcgcgtatcgttatgtttgcggcggtngttngtttagtttttttgtcgttttcgtgtttgcgatttttcgtgttatttgagcgatgtgtttcgagtagtatggcgagcgatcgttcgttgcggtgcgcgcgcgtntgatatggtgggtagtcggtatgttttcgtattttgtgcgcgtttatttgttgtcgcggaggtatatcgcggttgttngcgagtntcgttgtgttacggtcgatagtggcgtntgattnattatttagcgtttatgatattcgtttgatagtcgtcggcgtttttgtttacgcgttatagaagggcgcggcggtcggtcgcggtttgttgcggtaatacgtggtgcgacgtagcgncggcgcgcggcgcggagttttgntcgcgtggatttttttgtacggcgcggacggcggggcgacgaggttagtgttcgtttttagtttgttntttttggtggcggtcgtttcgtttcgttcgcgtgttgcgggtcggt

SEQ ID NO: 20888 - DNA, 1070 bp, Artificial Sequence
  chemically treated genomic DNA (Homo sapiens) CpG-island No: 20888
  unsure (47, 115, 138, 255, 261, 289, 296, 374, 478, 482, 516, 538)
  unsure (553, 582, 628, 688, 723, 773, 967, 1013, 1046, 1053, 1069)
accgacccgcaacacgcgaacgaaacgaaacgaccgccaccaaaaanaacaaactaaaaacgaacactaacctcgtcgccccgccgtccgcgccgtacaaaaaaatccacgcgancaaaactccgcgccgcgcgccgncgctacgtcgcaccacgtattaccgcaacaaaccgcgaccgaccgccgcgcccttctataacgcgtaaacaaaaacgccgacgactatcaaacgaatatcataaacgctaaataatnaatcanacgccactatcgaccgtaacacaacganactcgcnaacaaccgcgatatacctccgcgacaacaaataaacgcgcacaaaatacgaaaacataccgactacccaccatatcanacgcgcgcgcaccgcaacgaacgatcgctcgccatactactcgaaacacatcgctcaaataacacgaaaaatcgcaaacacgaaaacgacaaaaaaactaaacnaacnaccgccgcaaacataacgatacgcgcgaaaaaanaactaatcgccaacaaaacganacaaaaataaacgcncgaataacaacgaaataactcgccaatantacgactattcgccgaacacgcgcgacgaacgccgcgccatcgtcncaaacgcacgccgataaacgcaacgatactacgaaataatccgtacgacgaaaaacgatnattcgaccgacacgaccgtcgctcacgctccgcgntcgaacgcgaaatctcgctaataaacaacgacgcgctacgcgaacgacancaaaccgaacgtacgctacaacacaacgacgatacgaacaaaactctcacaccaacgccgtcacccgcgaccgaacgtcgataaaaaacaacgtccgataacacactaataacgacgcactcactcgcaaataaaaacgaaacaatccgtaactcgtcaaccacgctcgtaaatacgcacccgcaatcgacganaatcgaactataccaatcgcaaccgcgacgataacaaaaataaaanataaaccgaataaacacacacgccgtactatantaacaantaacgacaacaactana

SEQ ID NO: 20889 - DNA, 710 bp, Artificial Sequence
  chemically treated genomic DNA (Homo sapiens) CpG-island No: 20889
  unsure (204, 240, 370, 373, 561, 591, 663)
tcgttttttcgtttaacgagatacgcgcgtacgtcgtttaatatttaattcgatcgttatcggtattagtattttttttcgtcgtagtattattttcggttagatttaaataaagacgaagatatacgatatacgattcgacgacgtaataattattagataatagtaatacgcgttcggttcgacgtatataatttcgcgcgnatatagtatataattatatcgagacgtattcgtttntaacgatattacgtttgatatcgaaaattttattaagatataagaaatatcgaagagaattcgtcgcgtttttcgacgttttaaacgcgcgaaattcgtcggcggagttaggtataacgcgcgatacggntanatcgttacgacgttatattttataatcgatatgtaattatatattatagattttatgtcgaagcgacgcgtaagatcgattagttcggatcgcgtaaatcgcgcggttattagaataacgacgaatatcgtgtaatgtatcgtttttttgcgtttgtcgttttattattagagttaggagtaatagtngaacgagacgtagcgattagaggcgggttnatagataacgatatacgatacgtaagttagagcgttatatttataaagacgagtaagttagtattttaattntttcgagagtacggtttataaggtgtaattaatgagtatttagtatt

SEQ ID NO: 20890 - DNA, 710 bp, Artificial Sequence
  chemically treated genomic DNA (Homo sapiens) CpG-island No: 20890
  unsure (48, 120, 150, 338, 341, 471, 507)
aatactaaatactcattaattacaccttataaaccgtactctcgaaanaattaaaatactaacttactcgtctttataaatataacgctctaacttacgtatcgtatatcgttatctatnaacccgcctctaatcgctacgtctcgttcnactattactcctaactctaataataaaacgacaaacgcaaaaaaacgatacattacacgatattcgtcgttattctaataaccgcgcgatttacgcgatccgaactaatcgatcttacgcgtcgcttcgacataaaatctataatatataattacatatcgattataaaatataacgtcgtaacgatntanccgtatcgcgcgttatacctaactccgccgacgaatttcgcgcgtttaaaacgtcgaaaaacgcgacgaattctcttcgatatttcttatatcttaataaaattttcgatatcaaacgtaatatcgttanaaacgaatacgtctcgatataattatatactatatncgcgcgaaattatatacgtcgaaccgaacgcgtattactattatctaataattattacgtcgtcgaatcgtatatcgtatatcttcgtctttatttaaatctaaccgaaaataatactacgacgaaaaaaaatactaataccgataacgatcgaattaaatattaaacgacgtacgcgcgtatctcgttaaacgaaaaaacga

SEQ ID NO: 20891 - DNA, 710 bp, Artificial Sequence
  chemically treated genomic DNA (Homo sapiens) CpG-island No: 20891
  unsure (48, 120, 150, 338, 341, 471, 507)
ggtattgggtgtttattggttgtattttgtgggtcgtattttcgaggnggttggagtattagtttattcgtttttgtgggtgtggcgttttggtttgcgtgtcgtgtgtcgttatttatnggttcgtttttaatcgttgcgtttcgtttnattattgtttttggttttggtagtagagcggtaggcgtaggagggcggtatattgtacggtgttcgtcgttgttttggtgatcgcgcgatttgcgcggttcgggttagtcggttttgcgcgtcgtttcggtatgggatttgtggtatgtggttgtatgtcggttgtggggtgtggcgtcgtggcggtntgntcgtgtcgcgcgttgtgtttggtttcgtcggcggatttcgcgcgtttggggcgtcggggagcgcggcgagtttttttcggtgttttttgtgttttggtggggttttcggtgttaggcgtggtgtcgttgnagacgagtgcgtttcgatatggttgtgtgttgtgtncgcgcggggttgtgtgcgtcgggtcgggcgcgtgttgttgttgtttggtggttgttgcgtcgtcgagtcgtgtgtcgtgtgttttcgtttttgtttgggtttggtcgggggtggtgttgcggcgaggggggatgttggtgtcggtggcggtcgggttggatgttgggcgacgtgcgcgcgtgtttcgttgggcgggagggcgg

SEQ ID NO: 20892 - DNA, 710 bp, Artificial Sequence
  chemically treated genomic DNA (Homo sapiens) CpG-island No: 20892
  unsure (204, 240, 370, 373, 561, 591, 663)
ccgccctcccgcccaacgaaacacgcgcgcacgtcgcccaacatccaacccgaccgccaccgacaccaacatcccccctcgccgcaacaccacccccgaccaaacccaaacaaaaacgaaaacacacgacacacgactcgacgacgcaacaaccaccaaacaacaacaacacgcgcccgacccgacgcacacaaccccgcgcgnacacaacacacaaccatatcgaaacgcactcgtctncaacgacaccacgcctaacaccgaaaaccccaccaaaacacaaaaaacaccgaaaaaaactcgccgcgctccccgacgccccaaacgcgcgaaatccgccgacgaaaccaaacacaacgcgcgacacgancanaccgccacgacgccacaccccacaaccgacatacaaccacataccacaaatcccataccgaaacgacgcgcaaaaccgactaacccgaaccgcgcaaatcgcgcgatcaccaaaacaacgacgaacaccgtacaatataccgccctcctacgcctaccgctctactaccaaaaccaaaaacaataatnaaacgaaacgcaacgattaaaaacgaaccnataaataacgacacacgacacgcaaaccaaaacgccacacccacaaaaacgaataaactaatactccaaccncctcgaaaatacgacccacaaaatacaaccaataaacacccaatacc

SEQ ID NO: 20893 - DNA, 900 bp, Artificial Sequence
  chemically treated genomic DNA (Homo sapiens) CpG-island No: 20893
  unsure (249, 363, 366, 414, 512, 648, 838, 846, 849)
cgacgcgcgcgtagtcgttacgcgcgggtagtcggggaacgaaaaataagaaagggcgcgtacgcggcggcggcgtcggtagtcgcgcgacgacgattcgcggttattagcggagtcgagtcgttcgtaggcggcgaggagcggagaagtcgtcggacgcggcggaggagtcgggtcgtcgattcgtcgttatttagcgagaaacgacgtagacgtcgagagaagattacggaatacgtagcgaatagnagagtcgcgatcgtatcgtatcgtagtcgtattcgattcggagacgggagacgagttaaggagaagacgataagcgacgggaggcgtgagacgagcgcgggcggaagtcggganttngattcgcgtcgacgtagcggaagcggcgatcgaaggaaatcgaataantatgacgcgaaagacggagcgtaggcgtcgcggtcgtatattaagatacgcgaatattacggagcgcgagcgtagcgcgacgaaatatcggcggtatnataacgagagtaaggtatagagtagcgagtttattagtagagaacgggtaggtcgatatagggataggaaggaggggagacggtcgagtcgcgaatagatacgaagtagtagcgggggcgaagaggcgggaggtantagaggagggtagcgtcgttcgtagacgcgcggtcgatagggagtcgggatagcgtataaataagtcgcgcgcgagggaggcgagggagagggtagtattcgaggagacgaacggttatcgcgagcgggcgtcgcgcgacgagaaggcgagtacgggcggagtagtatttagtaagcggcgaggagcgtnggcgcgtngtnacggcgtcgcgtagacgagttagagaagcgatacgagatacgacggagtag

SEQ ID NO: 20894 - DNA, 900 bp, Artificial Sequence
  chemically treated genomic DNA (Homo sapiens) CpG-island No: 20894
  unsure (52, 55, 63, 253, 389, 487, 535, 538, 652)
ctactccgtcgtatctcgtatcgcttctctaactcgtctacgcgacgccgtnacnacgcgccnacgctcctcgccgcttactaaatactactccgcccgtactcgccttctcgtcgcgcgacgcccgctcgcgataaccgttcgtctcctcgaatactaccctctccctcgcctccctcgcgcgcgacttatttatacgctatcccgactccctatcgaccgcgcgtctacgaacgacgctaccctcctctantacctcccgcctcttcgcccccgctactacttcgtatctattcgcgactcgaccgtctcccctccttcctatccctatatcgacctacccgttctctactaataaactcgctactctataccttactctcgttatnataccgccgatatttcgtcgcgctacgctcgcgctccgtaatattcgcgtatcttaatatacgaccgcgacgcctacgctccgtctttcgcgtcatanttattcgatttccttcgatcgccgcttccgctacgtcgacgcgaatcnaantcccgacttccgcccgcgctcgtctcacgcctcccgtcgcttatcgtcttctccttaactcgtctcccgtctccgaatcgaatacgactacgatacgatacgatcgcgactctnctattcgctacgtattccgtaatcttctctcgacgtctacgtcgtttctcgctaaataacgacgaatcgacgacccgactcctccgccgcgtccgacgacttctccgctcctcgccgcctacgaacgactcgactccgctaataaccgcgaatcgtcgtcgcgcgactaccgacgccgccgccgcgtacgcgccctttcttatttttcgttccccgactacccgcgcgtaacgactacgcgcgcgtcg

SEQ ID NO: 20895 - DNA, 900 bp, Artificial Sequence
  chemically treated genomic DNA (Homo sapiens) CpG-island No: 20895
  unsure (52, 55, 63, 253, 389, 487, 535, 538, 652)
ttgtttcgtcgtgtttcgtgtcgtttttttggttcgtttgcgcggcgtcgtngtngcgcgttngcgtttttcgtcgtttgttgggtgttgtttcgttcgtgttcgttttttcgtcgcgcggcgttcgttcgcggtggtcgttcgttttttcgggtgttgttttttttttcgtttttttcgcgcgcggtttgtttgtgcgttgtttcggttttttgtcggtcgcgcgtttgcgagcggcgttgtttttttttgntgtttttcgttttttcgttttcgttgttgtttcgtgtttattcgcggttcggtcgtttttttttttttttgtttttgtgtcggtttgttcgttttttgttggtgggttcgttgttttatgttttgttttcgttgtngtgtcgtcggtgtttcgtcgcgttgcgttcgcgtttcgtagtgttcgcgtgttttagtgtgcggtcgcggcgtttgcgtttcgtttttcgcgttatgnttgttcggtttttttcggtcgtcgttttcgttgcgtcggcgcgggttnggntttcggttttcgttcgcgttcgttttacgtttttcgtcgtttgtcgttttttttttggttcgtttttcgttttcgggtcgggtgcggttgcggtgcggtgcggtcgcggttttnttgttcgttgcgtgtttcgtggttttttttcggcgtttgcgtcgtttttcgttgggtggcggcgggtcggcggttcggttttttcgtcgcgttcggcggttttttcgtttttcgtcgtttgcgggcggttcggtttcgttggtggtcgcgggtcgtcgtcgcgcggttgtcggcgtcgtcgtcgcgtgcgcgtttttttttgtttttcgtttttcggttgttcgcgcgtggcggttgcgcgcgcgtcg

SEQ ID NO: 20896 - DNA, 900 bp, Artificial Sequence
  chemically treated genomic DNA (Homo sapiens) CpG-island No: 20896
  unsure (249, 363, 366, 414, 512, 648, 838, 846, 849)
cgacgcgcgcgcaaccgccacgcgcgaacaaccgaaaaacgaaaaacaaaaaaaaacgcgcacgcgacgacgacgccgacaaccgcgcgacgacgacccgcgaccaccaacgaaaccgaaccgcccgcaaacgacgaaaaacgaaaaaaccgccgaacgcgacgaaaaaaccgaaccgccgacccgccgccacccaacgaaaaacgacgcaaacgccgaaaaaaaaccacgaaacacgcaacgaacaanaaaaccgcgaccgcaccgcaccgcaaccgcacccgacccgaaaacgaaaaacgaaccaaaaaaaaaacgacaaacgacgaaaaacgtaaaacgaacgcgaacgaaaaccgaaanccnaacccgcgccgacgcaacgaaaacgacgaccgaaaaaaaccgaacaancataacgcgaaaaacgaaacgcaaacgccgcgaccgcacactaaaacacgcgaacactacgaaacgcgaacgcaacgcgacgaaacaccgacgacacnacaacgaaaacaaaacataaaacaacgaacccaccaacaaaaaacgaacaaaccgacacaaaaacaaaaaaaaaaaaaaacgaccgaaccgcgaataaacacgaaacaacaacgaaaacgaaaaaacgaaaaacancaaaaaaaaacaacgccgctcgcaaacgcgcgaccgacaaaaaaccgaaacaacgcacaaacaaaccgcgcgcgaaaaaaacgaaaaaaaaaacaacacccgaaaaaacgaacgaccaccgcgaacgaacgccgcgcgacgaaaaaacgaacacgaacgaaacaacacccaacaaacgacgaaaaacgcnaacgcgcnacnacgacgccgcgcaaacgaaccaaaaaaacgacacgaaacacgacgaaacaa

SEQ ID NO: 20897 - DNA, 1296 bp, Artificial Sequence
  chemically treated genomic DNA (Homo sapiens) CpG-island No: 20897
  unsure (21, 57, 94, 615, 854, 912, 965, 1163, 1207)
gttttaaaataaaattatttnttcggttcgtatttttcgcgtttcgatcgagtcgtncgttcggtcggcgcgtcgtcgacgttcgttttttttngatagttttattttttatttttcgtgcgtcgtttcggtttaattaattaattcggcgtatcgggcgtacgcgttcggggagcgaaatttattttattatcgcgcgttatatacgagataacgtcgtcgggcgtagcggatcgtcgagcgggtagtcggcgcgataggtcggtaggttagtcgggttcgttttttaattatacgcgtatgcgttttcgttttttgaggtgggttttttcggaggggcggggtcgggggcggggttcgacgcgtcgttcgttttcgtcgtatcggggggcggtcgtttttcgcgtacgcgcgggcgtgcgtaagcgcgtttcgtttttcggttcgtataagaaaaaaaaaaagtttttttcgcgcgtcggggtcgcggatttcgtcgtttcgtcgggcgagggaattaacgttatcgagtacgtcgggtttcgcggttcgcgattttagtacgttacgcgtcgagcgtcgtaggtcgatcgggtttttattattcgatttcgnataaggtacgcgcgtttcgtcgtttttacgagtattgttagcgtatttacgttagttcggagtatcgcgtttaggcgtatcgtagattttataacgtacggttacgttaggcgttttgcgagtcgagattattatttattcgattatatcgtttataggcggatttaagcggcgatgcgcggcgcgggcgcgggtcggagcgcgtgtaggaggcgttcgattttagatagacgacgttntttagttttaggcggttgtaattcgatcgcgattttcgttcgtcgtcgcgttagcgtncggatcgagcgcgttttagtgtcggtgcgggcggtcgtgttgcgcgtcgcgtngtcggcgtggattcgatatcgattttttaggcgtatatgtagcgcgggtcgcgtagcggagatacgggattcgttcgagcgttttagttcgtattttcgttatttttatatcgtgcgcgcgatttagacgataagatacgttttatagtcgttagcggtacggaatcggcgtaggttacgttaaatacgcgtttacgncgtttcgatcgtattcgttcgcgcgcgcgtttcgtttttatagnataagagagtggtcggtgcggggcgtcggagaggcgttaaggaacgaggtatcgttaattcgcgttttaggacgcgttcgcggcgtaat

SEQ ID NO: 20898 - DNA, 1296 bp, Artificial Sequence
  chemically treated genomic DNA (Homo sapiens) CpG-island No: 20898
  unsure (90, 134, 332, 385, 443, 682, 1203, 1240, 1276)
attacgccgcgaacgcgtcctaaaacgcgaattaacgatacctcgttccttaacgcctctccgacgccccgcaccgaccactctcttatnctataaaaacgaaacgcgcgcgcgaacgaatacgatcgaaacgncgtaaacgcgtatttaacgtaacctacgccgattccgtaccgctaacgactataaaacgtatcttatcgtctaaatcgcgcgcacgatataaaaataacgaaaatacgaactaaaacgctcgaacgaatcccgtatctccgctacgcgacccgcgctacatatacgcctaaaaaatcgatatcgaatccacgccgacnacgcgacgcgcaacacgaccgcccgcaccgacactaaaacgcgctcgatccgnacgctaacgcgacgacgaacgaaaatcgcgatcgaattacaaccgcctaaaactaaanaacgtcgtctatctaaaatcgaacgcctcctacacgcgctccgacccgcgcccgcgccgcgcatcgccgcttaaatccgcctataaacgatataatcgaataaataataatctcgactcgcaaaacgcctaacgtaaccgtacgttataaaatctacgatacgcctaaacgcgatactccgaactaacgtaaatacgctaacaatactcgtaaaaacgacgaaacgcgcgtaccttatncgaaatcgaataataaaaacccgatcgacctacgacgctcgacgcgtaacgtactaaaatcgcgaaccgcgaaacccgacgtactcgataacgttaattccctcgcccgacgaaacgacgaaatccgcgaccccgacgcgcgaaaaaaactttttttttttcttatacgaaccgaaaaacgaaacgcgcttacgcacgcccgcgcgtacgcgaaaaacgaccgccccccgatacgacgaaaacgaacgacgcgtcgaaccccgcccccgaccccgcccctccgaaaaaacccacctcaaaaaacgaaaacgcatacgcgtataattaaaaaacgaacccgactaacctaccgacctatcgcgccgactacccgctcgacgatccgctacgcccgacgacgttatctcgtatataacgcgcgataataaaataaatttcgctccccgaacgcgtacgcccgatacgccgaattaattaattaaaccgaaacgacgcacgaaaaataaaaaataaaactatcnaaaaaaaacgaacgtcgacgacgcgccgaccgaacgnacgactcgatcgaaacgcgaaaaatacgaaccgaanaaataattttattttaaaac

SEQ ID NO: 20899 - DNA, 1296 bp, Artificial Sequence
  chemically treated genomic DNA (Homo sapiens) CpG-island No: 20899
  unsure (90, 134, 332, 385, 443, 682, 1203, 1240, 1276)
gttgcgtcgcgggcgcgttttggggcgcgaattagcgatgtttcgttttttggcgttttttcggcgtttcgtatcggttatttttttatnttatgggggcggggcgcgcgcgcgggcgggtgcggtcggggcgncgtgggcgcgtgtttggcgtggtttgcgtcggtttcgtgtcgttgacgattgtggggcgtgttttgtcgtttaggtcgcgcgtacggtgtaggaatggcgggggtgcgggttggagcgttcgggcggatttcgtattttcgttgcgcggttcgcgttgtatgtgcgtttaggaagtcggtgtcgggtttacgtcgatngcgcgacgcgtagtacggtcgttcgtatcggtattggagcgcgttcgattcgnacgttgacgcggcggcggacgggggtcgcggtcgagttgtagtcgtttggggttgggnagcgtcgtttgtttagagtcgggcgttttttgtacgcgtttcggttcgcgttcgcgtcgcgtatcgtcgtttgggttcgtttgtgggcggtgtggtcgggtgggtggtggtttcggttcgtagggcgtttggcgtggtcgtacgttgtggggtttgcggtgcgtttgggcgcggtgtttcgggttggcgtgggtgcgttggtagtgttcgtgagggcggcggggcgcgcgtgttttgtncggggtcgggtggtgggggttcggtcggtttgcggcgttcggcgcgtggcgtgttgggatcgcgggtcgcggggttcggcgtgttcggtggcgttagttttttcgttcggcggggcggcgggattcgcggtttcggcgcgcgggaggggtttttttttttttttgtgcgggtcggggggcggggcgcgtttacgtacgttcgcgcgtgcgcggggggcggtcgtttttcggtgcggcgggggcgggcggcgcgtcgggtttcgttttcggtttcgttttttcggagaagtttattttaaagggcgggggcgtatgcgcgtgtggttggggggcgggttcggttggtttgtcggtttatcgcgtcggttgttcgttcggcggttcgttgcgttcggcggcgttgtttcgtgtgtggcgcgcggtggtggggtgggtttcgtttttcgggcgcgtgcgttcggtgcgtcgggttggttggttgggtcggggcggcgtacgggggatggagggtggaattgttnggaaagggcgggcgtcggcggcgcgtcggtcgggcgngcggttcgatcggggcgcgaggagtgcgagtcgggngggtggttttgttttggggt

SEQ ID NO: 20900 - DNA, 1296 bp, Artificial Sequence
  chemically treated genomic DNA (Homo sapiens) CpG-island No: 20900
  unsure (21, 57, 94, 615, 854, 912, 965, 1163, 1207)
accccaaaacaaaaccacccncccgactcgcactcctcgcgccccgatcgaaccgcncgcccgaccgacgcgccgccgacgcccgccctttccnaacaattccaccctccatcccccgtacgccgccccgacccaaccaaccaacccgacgcaccgaacgcacgcgcccgaaaaacgaaacccaccccaccaccgcgcgccacacacgaaacaacgccgccgaacgcaacgaaccgccgaacgaacaaccgacgcgataaaccgacaaaccaaccgaacccgccccccaaccacacgcgcatacgcccccgccctttaaaataaacttctccgaaaaaacgaaaccgaaaacgaaacccgacgcgccgcccgcccccgccgcaccgaaaaacgaccgccccccgcgcacgcgcgaacgtacgtaaacgcgccccgccccccgacccgcacaaaaaaaaaaaaaaacccctcccgcgcgccgaaaccgcgaatcccgccgccccgccgaacgaaaaaactaacgccaccgaacacgccgaaccccgcgacccgcgatcccaacacgccacgcgccgaacgccgcaaaccgaccgaacccccaccacccgaccccgnacaaaacacgcgcgccccgccgccctcacgaacactaccaacgcacccacgccaacccgaaacaccgcgcccaaacgcaccgcaaaccccacaacgtacgaccacgccaaacgccctacgaaccgaaaccaccacccacccgaccacaccgcccacaaacgaacccaaacgacgatacgcgacgcgaacgcgaaccgaaacgcgtacaaaaaacgcccgactctaaacaaacgacgctncccaaccccaaacgactacaactcgaccgcgacccccgtccgccgccgcgtcaacgtncgaatcgaacgcgctccaataccgatacgaacgaccgtactacgcgtcgcgcnatcgacgtaaacccgacaccgacttcctaaacgcacatacaacgcgaaccgcgcaacgaaaatacgaaatccgcccgaacgctccaacccgcacccccgccattcctacaccgtacgcgcgacctaaacgacaaaacacgccccacaatcgtcaacgacacgaaaccgacgcaaaccacgccaaacacgcgcccacgncgccccgaccgcacccgcccgcgcgcgcgccccgcccccataanataaaaaaataaccgatacgaaacgccgaaaaaacgccaaaaaacgaaacatcgctaattcgcgccccaaaacgcgcccgcgacgcaac

SEQ ID NO: 20901 - DNA, 921 bp, Artificial Sequence
  chemically treated genomic DNA (Homo sapiens) CpG-island No: 20901
  unsure (576)
gatcgtcgcgtagtgtttagagagtcgcgttcgcgcgtttacgcgtcggttgtcgacgcggtattatcgagtttttttttttttttattttaaaatcgagatagggggaggggaggcgatcggacgtatattttaaatataataggggggggggggcgcgtcgtttaatttataatataataaatacgattaaatcggcgttcgaaaagaataaaaataaaaagtcgtcgtcgcgcggtcgatcggggagttagatataatcgcgattagacgttagcgttcggagagagtttacggcgcgaaatcgcggacgggatagcgttaggcgatacggagggtacggcgtcggcgaggtgcgcgtcggcggttagtagggtttagggacgggagagacgtacgatagcgcgtcgggaaacgatcggtataggtcggttcgcgtttagtacgcggtcgttcggaatatatagtacgcgatataagtgcgtagcggaggagcgggacggcggaggagggacgtagaagtatcgtaattaacgagagcgcggaagggacgagagagataagttaagggtagtngcggatagagcgaggagtttcgtcgttacgcggagggacgcgacgggcggcgaagggcgagggagggatcgttagggcggggagaggttgggagcggaattttacgtttcgcggcggtcgtcgcgacgttacgcgtgatatgtatcgtttatttcgcgttaaagagagcggtcgatagaagcgacgagtattataggggcggggcggagatgtagaggatgagagtaagtacgcgttcgcgcggcgtaatagttcggttagtcgtcgttgacgcgagagtattatttcgggaatagaggtttcggtacgggatttaggagttacgcgaaagaagagaagcgcgta

SEQ ID NO: 20902 - DNA, 921 bp, Artificial Sequence
  chemically treated genomic DNA (Homo sapiens) CpG-island No: 20902
  unsure (346)
tacgcgcttctcttctttcgcgtaactcctaaatcccgtaccgaaacctctattcccgaaataatactctcgcgtcaacgacgactaaccgaactattacgccgcgcgaacgcgtacttactctcatcctctacatctccgccccgcccctataatactcgtcgcttctatcgaccgctctctttaacgcgaaataaacgatacatatcacgcgtaacgtcgcgacgaccgccgcgaaacgtaaaattccgctcccaacctctccccgccctaacgatccctccctcgcccttcgccgcccgtcgcgtccctccgcgtaacgacgaaactcctcgctctatccgcnactacccttaacttatctctctcgtcccttccgcgctctcgttaattacgatacttctacgtccctcctccgccgtcccgctcctccgctacgcacttatatcgcgtactatatattccgaacgaccgcgtactaaacgcgaaccgacctataccgatcgtttcccgacgcgctatcgtacgtctctcccgtccctaaaccctactaaccgccgacgcgcacctcgccgacgccgtaccctccgtatcgcctaacgctatcccgtccgcgatttcgcgccgtaaactctctccgaacgctaacgtctaatcgcgattatatctaactccccgatcgaccgcgcgacgacgactttttatttttattcttttcgaacgccgatttaatcgtatttattatattataaattaaacgacgcgcccccccccccctattatatttaaaatatacgtccgatcgcctcccctccccctatctcgattttaaaataaaaaaaaaaaaaaactcgataataccgcgtcgacaaccgacgcgtaaacgcgcgaacgcgactctctaaacactacgcgacgatc

SEQ ID NO: 20903 - DNA, 921 bp, Artificial Sequence
  chemically treated genomic DNA (Homo sapiens) CpG-island No: 20903
  unsure (346)
tgcgcgttttttttttttcgcgtggtttttgggtttcgtgtcggggtttttgttttcggggtggtgttttcgcgttagcgacggttggtcgggttgttgcgtcgcgcgggcgcgtgtttgtttttattttttgtattttcgtttcgtttttatggtgttcgtcgtttttgtcgatcgttttttttggcgcggggtgggcggtgtatgttacgcgtggcgtcgcggcggtcgtcgcggggcgtgaggtttcgtttttagttttttttcgttttggcggtttttttttcgtttttcgtcgttcgtcgcgttttttcgcgtggcggcgaggtttttcgttttgttcgtngttgtttttggtttgtttttttcgtttttttcgcgttttcgttgattgcggtgtttttacgtttttttttcgtcgtttcgttttttcgttgcgtatttgtgtcgcgtgttgtgtgtttcgggcggtcgcgtgttgggcgcgggtcggtttgtgtcggtcgtttttcggcgcgttgtcgtacgtttttttcgtttttgggttttgttggtcgtcggcgcgtatttcgtcggcgtcgtgtttttcgtgtcgtttgacgttgtttcgttcgcgatttcgcgtcgtgggtttttttcgggcgttagcgtttggtcgcggttgtgtttaatttttcgatcggtcgcgcggcggcggttttttgtttttgtttttttcgagcgtcggtttggtcgtgtttgttgtattgtggattgggcggcgcgtttttttttttttgttgtgtttagggtgtgcgttcgatcgttttttttttttttgtttcggttttaaaataaaaaaaaaaaagggttcggtggtgtcgcgtcggtaatcggcgcgtgggcgcgcgggcgcggttttttgggtattgcgcggcgatt

SEQ ID NO: 20904 - DNA, 921 bp, Artificial Sequence
  chemically treated genomic DNA (Homo sapiens) CpG-island No: 20904
  unsure (576)
aatcgccgcgcaatacccaaaaaaccgcgcccgcgcgcccacgcgccgattaccgacgcgacaccaccgaacccttttttttttttattttaaaaccgaaacaaaaaaaaaaaaaacgatcgaacgcacaccctaaacacaacaaaaaaaaaaaaacgcgccgcccaatccacaatacaacaaacacgaccaaaccgacgctcgaaaaaaacaaaaacaaaaaaccgccgccgcgcgaccgatcgaaaaattaaacacaaccgcgaccaaacgctaacgcccgaaaaaaacccacgacgcgaaatcgcgaacgaaacaacgtcaaacgacacgaaaaacacgacgccgacgaaatacgcgccgacgaccaacaaaacccaaaaacgaaaaaaacgtacgacaacgcgccgaaaaacgaccgacacaaaccgacccgcgcccaacacgcgaccgcccgaaacacacaacacgcgacacaaatacgcaacgaaaaaacgaaacgacgaaaaaaaaacgtaaaaacaccgcaatcaacgaaaacgcgaaaaaaacgaaaaaaacaaaccaaaaacaacnacgaacaaaacgaaaaacctcgccgccacgcgaaaaaacgcgacgaacgacgaaaaacgaaaaaaaaaccgccaaaacgaaaaaaaactaaaaacgaaacctcacgccccgcgacgaccgccgcgacgccacgcgtaacatacaccgcccaccccgcgccaaaaaaaacgatcgacaaaaacgacgaacaccataaaaacgaaacgaaaatacaaaaaataaaaacaaacacgcgcccgcgcgacgcaacaacccgaccaaccgtcgctaacgcgaaaacaccaccccgaaaacaaaaaccccgacacgaaacccaaaaaccacgcgaaaaaaaaaaaacgcgca

SEQ ID NO: 20905 - DNA, 996 bp, Artificial Sequence
  chemically treated genomic DNA (Homo sapiens) CpG-island No: 20905
  unsure (105, 243, 771)
gagaggagcggtttcgagggggggataggggaaagttcgattataggttcgtaggcgtcggggcgggcggtttatagagcgcgcgttttttataaaaaatagtgngggtggcgagaggggaggtgttcgcgatatatcgtaacgtgcgcgtttaggttcgaagggtcgcgtaggtatattaaaagaaatggttttcgttacgtatttcgtttttttttttttttttttttttttttttcgttnaattttatttattatatttttattataaaaaaattaaaatacggggggcgcgcgtcgtttaattatatattttatattttattttcggtataagaaaaaaaaaaaaaaatatcgcggatttcgacgaattcgtcgcgcgtttttcgttcggcggttttaagatataaaaattttattcgatttaatttttcgataatattagatcggcgtttttacgtatatttattagttaatcgcgtttcgtttattagaatatcgcgagttagacgcggttatattagcggtcgtcgtttatcgagagattcgatttcgttcgacgataatttacgggcgtattcgttcgtcgttagattcgataaggattcgcgagttttaaaattcgttcgtcgatacgtttcgttttattagtagaggtatattatttaattttgatatataacgaatcgattcgaatttttagatattcgttttattttattaagtcgaagcgttaagtagttacgagcgaacgaataacgatttatgatntaattattttcggtttcgcgcgcgatcgttttagtcgaaacggtcggttttattcgtcgaacgtcgtttcgaagcgtcgaggaattttaagatatagtatacgtaggtttcgtaggatacgcgcgttttgattcgttcgtatagggtgcgcgcgcgtcgtttttatttttttcgaattcgttttttagcgttagatagttcgtaatcggcgttaattattagtat

SEQ ID NO: 20906 - DNA, 996 bp, Artificial Sequence
  chemically treated genomic DNA (Homo sapiens) CpG-island No: 20906
  unsure (226, 754, 892)
atactaataattaacgccgattacgaactatctaacgctaaaaaacgaattcgaaaaaaataaaaacgacgcgcgcgcaccctatacgaacgaatcaaaacgcgcgtatcctacgaaacctacgtatactatatcttaaaattcctcgacgcttcgaaacgacgttcgacgaataaaaccgaccgtttcgactaaaacgatcgcgcgcgaaaccgaaaataattanatcataaatcgttattcgttcgctcgtaactacttaacgcttcgacttaataaaataaaacgaatatctaaaaattcgaatcgattcgttatatatcaaaattaaataatatacctctactaataaaacgaaacgtatcgacgaacgaattttaaaactcgcgaatccttatcgaatctaacgacgaacgaatacgcccgtaaattatcgtcgaacgaaatcgaatctctcgataaacgacgaccgctaatataaccgcgtctaactcgcgatattctaataaacgaaacgcgattaactaataaatatacgtaaaaacgccgatctaatattatcgaaaaattaaatcgaataaaatttttatatcttaaaaccgccgaacgaaaaacgcgcgacgaattcgtcgaaatccgcgatatttttttttttttttcttataccgaaaataaaatataaaatatataattaaacgacgcgcgccccccgtattttaatttttttataataaaaatataataaataaaattnaacgaaaaaaaaaaaaaaaaaaaaaaaaaaaaacgaaatacgtaacgaaaaccatttcttttaatatacctacgcgacccttcgaacctaaacgcgcacgttacgatatatcgcgaacacctcccctctcgccacccncactattttttataaaaaacgcgcgctctataaaccgcccgccccgacgcctacgaacctataatcgaactttcccctatccccccctcgaaaccgctcctctc

SEQ ID NO: 20907 - DNA, 996 bp, Artificial Sequence
  chemically treated genomic DNA (Homo sapiens) CpG-island No: 20907
  unsure (226, 754, 892)
gtgttggtggttggcgtcggttacgggttatttggcgttggggggcgaattcgagggaggtaggggcggcgcgcgcgtattttgtgcggacgggttagggcgcgcgtgttttgcggggtttgcgtgtgttgtgttttggggtttttcggcgtttcggggcggcgttcggcgggtgaggtcggtcgtttcggttggggcggtcgcgcgcgaggtcggggatggttgngttatgggtcgttgttcgttcgttcgtggttgtttggcgtttcggtttggtggggtggggcgggtatttgggggttcgagtcgattcgttatgtgttagagttgggtggtgtgtttttattggtggggcggggcgtgtcggcgggcgggttttggggttcgcgggtttttgtcggatttggcggcgagcgggtgcgttcgtgggttgtcgtcgagcggggtcgggtttttcggtgggcggcggtcgttggtgtggtcgcgtttggttcgcggtgttttggtgggcggggcgcggttggttggtgggtgtgcgtgggggcgtcggtttggtgttgtcggaggattgggtcgggtggggtttttgtgttttggggtcgtcgggcggggggcgcgcggcgaattcgtcggggttcgcggtgttttttttttttttttttatatcggggatggggtgtggggtgtgtggttgggcggcgcgcgtttttcgtgttttggtttttttgtggtgggggtgtggtgggtggggttnggcggggagaaaaaaaagaggggggggggggggcggggtgcgtggcgggggttattttttttggtgtgtttgcgcgatttttcgggtttgggcgcgtacgttgcggtgtgtcgcgggtattttttttttcgttatttntattattttttgtggggggcgcgcgttttgtgggtcgttcgtttcggcgtttgcgagtttgtagtcgggtttttttttgtttttttttcggggtcgtttttttt

SEQ ID NO: 20908 - DNA, 996 bp, Artificial Sequence
  chemically treated genomic DNA (Homo sapiens) CpG-island No: 20908
  unsure (105, 243, 771)
aaaaaaaacgaccccgaaaaaaaaacaaaaaaaaacccgactacaaactcgcaaacgccgaaacgaacgacccacaaaacgcgcgccccccacaaaaaataatanaaataacgaaaaaaaaaatacccgcgacacaccgcaacgtacgcgcccaaacccgaaaaatcgcgcaaacacaccaaaaaaaataacccccgccacgcaccccgcccccccccccccctcttttttttctccccgccnaaccccacccaccacacccccaccacaaaaaaaccaaaacacgaaaaacgcgcgccgcccaaccacacaccccacaccccatccccgatataaaaaaaaaaaaaaaaaacaccgcgaaccccgacgaattcgccgcgcgccccccgcccgacgaccccaaaacacaaaaaccccacccgacccaatcctccgacaacaccaaaccgacgcccccacgcacacccaccaaccaaccgcgccccgcccaccaaaacaccgcgaaccaaacgcgaccacaccaacgaccgccgcccaccgaaaaacccgaccccgctcgacgacaacccacgaacgcacccgctcgccgccaaatccgacaaaaacccgcgaaccccaaaacccgcccgccgacacgccccgccccaccaataaaaacacaccacccaactctaacacataacgaatcgactcgaacccccaaatacccgccccaccccaccaaaccgaaacgccaaacaaccacgaacgaacgaacaacgacccataacncaaccatccccgacctcgcgcgcgaccgccccaaccgaaacgaccgacctcacccgccgaacgccgccccgaaacgccgaaaaaccccaaaacacaacacacgcaaaccccgcaaaacacgcgcgccctaacccgtccgcacaaaatacgcgcgcgccgcccctacctccctcgaattcgccccccaacgccaaataacccgtaaccgacgccaaccaccaacac

SEQ ID NO: 20909 - DNA, 542 bp, Artificial Sequence
  chemically treated genomic DNA (Homo sapiens) CpG-island No: 20909
  unsure (262, 514)
atcgacgagtcgtcgtagcgataatagttaggagaatcgacggggagagaggaggaacgaaatagtagattttcgttcggttagaaggagcgattacgaagcgagaagttaataaagaaagttcggaagcgagaaaaattagcggatatagacgtattatagagacgttcggtatgtttttagcgcgtttatcgaagaacgcgagaagcgaacggaagaaaatcgttatacgatatttagttttataagacgtatcgtttancggtcggaaagagcgtgcgattcgagcgtagagcgatcgacgcggatcgaagagttcgagtcgtaaaataagatcgaaacggttagaaggagaataacgattagtcgtattacgtcgttaagtataatagagatataattcgatcgttaatatcgttttttagagatgattatagcgagataagagttatcgagtagcgtaatattacgattcgcgattaagagatcgttagcgaaatttatagcgttttanaacgacggtattagtttttacggaagat

SEQ ID NO: 20910 - DNA, 542 bp, Artificial Sequence
  chemically treated genomic DNA (Homo sapiens) CpG-island No: 20910
  unsure (29, 281)
atcttccgtaaaaactaataccgtcgttntaaaacgctataaatttcgctaacgatctcttaatcgcgaatcgtaatattacgctactcgataactcttatctcgctataatcatctctaaaaaacgatattaacgatcgaattatatctctattatacttaacgacgtaatacgactaatcgttattctccttctaaccgtttcgatcttattttacgactcgaactcttcgatccgcgtcgatcgctctacgctcgaatcgcacgctctttccgaccgntaaacgatacgtcttataaaactaaatatcgtataacgattttcttccgttcgcttctcgcgttcttcgataaacgcgctaaaaacataccgaacgtctctataatacgtctatatccgctaatttttctcgcttccgaactttctttattaacttctcgcttcgtaatcgctccttctaaccgaacgaaaatctactatttcgttcctcctctctccccgtcgattctcctaactattatcgctacgacgactcgtcgat

SEQ ID NO: 20911 - DNA, 542 bp, Artificial Sequence
  chemically treated genomic DNA (Homo sapiens) CpG-island No: 20911
  unsure (29, 281)
gtttttcgtaggggttggtgtcgtcgttntggggcgttgtgggtttcgttggcggttttttggtcgcgggtcgtggtgttgcgttgttcggtggtttttgtttcgttgtgattatttttggggggcggtgttggcggtcgggttgtgtttttgttgtgtttggcggcgtggtgcggttggtcgttgttttttttttggtcgtttcggttttgttttgcggttcgggtttttcggttcgcgtcggtcgttttacgttcgggtcgtacgtttttttcggtcgntgggcggtgcgttttgtggggttggatatcgtgtggcggttttttttcgttcgtttttcgcgtttttcggtgggcgcgttgggggtatgtcgggcgtttttgtggtgcgtttatgttcgttggtttttttcgttttcgggttttttttgttggtttttcgtttcgtggtcgttttttttggtcgggcgggggtttgttgtttcgtttttttttttttttcgtcggtttttttggttgttgtcgttgcggcggttcgtcggt

SEQ ID NO: 20912 - DNA, 542 bp, Artificial Sequence
  chemically treated genomic DNA (Homo sapiens) CpG-island No: 20912
  unsure (262, 514)
accgacgaaccgccgcaacgacaacaaccaaaaaaaccgacgaaaaaaaaaaaaaaacgaaacaacaaacccccgcccgaccaaaaaaaacgaccacgaaacgaaaaaccaacaaaaaaaacccgaaaacgaaaaaaaccaacgaacataaacgcaccacaaaaacgcccgacatacccccaacgcgcccaccgaaaaacgcgaaaaacgaacgaaaaaaaaccgccacacgatatccaaccccacaaaacgcaccgcccancgaccgaaaaaaacgtacgacccgaacgtaaaacgaccgacgcgaaccgaaaaacccgaaccgcaaaacaaaaccgaaacgaccaaaaaaaaaacaacgaccaaccgcaccacgccgccaaacacaacaaaaacacaacccgaccgccaacaccgccccccaaaaataatcacaacgaaacaaaaaccaccgaacaacgcaacaccacgacccgcgaccaaaaaaccgccaacgaaacccacaacgccccanaacgacgacaccaacccctacgaaaaac

SEQ ID NO: 20913 - DNA, 754 bp, Artificial Sequence
  chemically treated genomic DNA (Homo sapiens) CpG-island No: 20913
  unsure (248, 289, 392)
ggtcggtttaaataatttacgtttaaaagcgggtcgtcggtcgcgtttcggtcgttcggggtattttcgtttatcgtattaaagtatatttcgttcggttcggtcgttacgcgtatcgcgcgttttttcgtatatagtattcgcgtttcgttatcggtcggggtacgcgttaattatcggattatttatcgtcgaacgggtcgcgtcgcgcggttcgcgtcgtatttttttacgtcgtagttacgttngggttttattaacgacgcgtacgcgcgttcgtcgggtcgtntttttcggagtcgcgtatttttcggtttcgcgttcgtttcgcgttttttattttcgttcgtttttcgttagtatcgtttatcgatcgttcgtcgtatattcgntttgggggttcgttttataggagtcgcgcgcgcgcgcggttatagttcgcgtacgggatatcgatttagtcgagttttattttaggcgggagggtcggcggcgttcgtttagcggttatcgtcgtttcgtttcgagtagggagggggcgagcgcggtcgttcgttttcgagatgagcgcgcgtcgttattatttcgataaggttcgtcgtcgtaattcgatcggtcggcgggagcgagggtacgtttcgtaagcgtcggagtcgcgttttagacggcgtatcgcggatcgtttaggtattcggtagggggttcggagattcgcgggtcgacgttcggagataagttcgtttcgtttcgtatt

SEQ ID NO: 20914 - DNA, 754 bp, Artificial Sequence
  chemically treated genomic DNA (Homo sapiens) CpG-island No: 20914
  unsure (363, 466, 507)
aatacgaaacgaaacgaacttatctccgaacgtcgacccgcgaatctccgaaccccctaccgaatacctaaacgatccgcgatacgccgtctaaaacgcgactccgacgcttacgaaacgtaccctcgctcccgccgaccgatcgaattacgacgacgaaccttatcgaaataataacgacgcgcgctcatctcgaaaacgaacgaccgcgctcgccccctccctactcgaaacgaaacgacgataaccgctaaacgaacgccgccgaccctcccgcctaaaataaaactcgactaaatcgatatcccgtacgcgaactataaccgcgcgcgcgcgcgactcctataaaacgaacccccaaancgaatatacgacgaacgatcgataaacgatactaacgaaaaacgaacgaaaataaaaaacgcgaaacgaacgcgaaaccgaaaaatacgcgactccgaaaaanacgacccgacgaacgcgcgtacgcgtcgttaataaaacccnaacgtaactacgacgtaaaaaaatacgacgcgaaccgcgcgacgcgacccgttcgacgataaataatccgataattaacgcgtaccccgaccgataacgaaacgcgaatactatatacgaaaaaacgcgcgatacgcgtaacgaccgaaccgaacgaaatatactttaatacgataaacgaaaataccccgaacgaccgaaacgcgaccgacgacccgcttttaaacgtaaattatttaaaccgacc

SEQ ID NO: 20915 - DNA, 754 bp, Artificial Sequence
  chemically treated genomic DNA (Homo sapiens) CpG-island No: 20915
  unsure (363, 466, 507)
ggtgcggggcggggcgggtttgttttcgggcgtcggttcgcgagttttcgggttttttgtcgggtgtttgggcggttcgcggtgcgtcgtttggagcgcggtttcggcgtttgcggggcgtgttttcgttttcgtcggtcggtcgggttgcggcggcgggttttgtcggggtggtggcggcgcgcgtttatttcgggggcgggcggtcgcgttcgttttttttttgttcggggcggggcggcggtggtcgttgggcgggcgtcgtcggttttttcgtttggggtggggttcgattgggtcggtgtttcgtgcgcgggttgtggtcgcgcgcgcgcgcggtttttgtggggcgggtttttaggncgggtgtgcggcgggcgatcggtgggcggtattggcggggggcgggcgggggtggggggcgcggggcgggcgcggggtcggggggtgcgcggtttcggggggnacggttcggcgggcgcgcgtgcgcgtcgttggtggggtttnggcgtggttgcggcgtgggggggtgcggcgcgggtcgcgcggcgcggttcgttcggcggtgggtggttcggtggttggcgcgtgtttcggtcggtggcggggcgcgggtgttgtgtgcgggggggcgcgcggtgcgcgtggcggtcgggtcgggcggggtgtgttttggtgcggtgggcgggggtgtttcgggcggtcggggcgcggtcggcggttcgtttttgggcgtgggttgtttgggtcggtt

SEQ ID NO: 20916 - DNA, 754 bp, Artificial Sequence
  chemically treated genomic DNA (Homo sapiens) CpG-island No: 20916
  unsure (248, 289, 392)
aaccgacccaaacaacccacgcccaaaaacgaaccgccgaccgcgccccgaccgcccgaaacacccccgcccaccgcaccaaaacacaccccgcccgacccgaccgccacgcgcaccgcgcgcccccccgcacacaacacccgcgccccgccaccgaccgaaacacgcgccaaccaccgaaccacccaccgccgaacgaaccgcgccgcgcgacccgcgccgcacccccccacgccgcaaccacgccnaaaccccaccaacgacgcgcacgcgcgcccgccgaaccgtnccccccgaaaccgcgcaccccccgaccccgcgcccgccccgcgccccccacccccgcccgccccccgccaataccgcccaccgatcgcccgccgcacacccgncctaaaaacccgccccacaaaaaccgcgcgcgcgcgcgaccacaacccgcgcacgaaacaccgacccaatcgaaccccaccccaaacgaaaaaaccgacgacgcccgcccaacgaccaccgccgccccgccccgaacaaaaaaaaaacgaacgcgaccgcccgcccccgaaataaacgcgcgccgccaccaccccgacaaaacccgccgccgcaacccgaccgaccgacgaaaacgaaaacacgccccgcaaacgccgaaaccgcgctccaaacgacgcaccgcgaaccgcccaaacacccgacaaaaaacccgaaaactcgcgaaccgacgcccgaaaacaaacccgccccgccccgcacc

SEQ ID NO: 20917 - DNA, 905 bp, Artificial Sequence
  chemically treated genomic DNA (Homo sapiens) CpG-island No: 20917
  unsure (608)
ttttttcgcgtcgggggagagttaatttcgcgatttagtttttttatcgttaatattttttattttacgattaatcgggagcgcgtcggggtttcggggcggtcggtttttttagtttcgttttttttttttttcgcgttatagttttcggcgtagattcgtttcggtcgtatatatatttcgcgggcgcgtttatacgcgcgcgcgttcgttttttttttattcgtcgcggttaaaaattttttttttcgacgaaaggttttttttatcgttttcgggttcgttttattttttcgcgatcgcggttcggttttatttcggttttttcgtcgatttttttcgttcgcgttttatcgttattcgtttcgacgggcgaaagtttataggtacgtttttttataagggagtttttatttttttcggttacgcgtcgcggcgtcgttaagaaaaagttcgcgagtacgttttacgttttcgttcgacgtcgtcggtcgtataggcgcgaggtagcgttcggagtgattacggttttaagagtatttttttttattatagtacgataattcgtttttcgggcgagtcgtcgcgcgtattcggagcgattttanttacgtcgacggagagggtttcgcgtatttagtcggttcgcgtcgcgcgggtagtaggtttcgttggcgcgtcggtatcggatcgtattcgcgattattttcggcggggttcgtttcgtttaggggtcgtttttttcgtcgtcgagtttttcgttttagttagcgggttcgcggtttttttttcgcgacgcgttacgtttcgtattcgttttaacgaattagatttcgatttcgatagtaggtcgttttttcgatataagaagttcgtaggcgtttttttttcgtttttcgtaggta

SEQ ID NO: 20918 - DNA, 905 bp, Artificial Sequence
  chemically treated genomic DNA (Homo sapiens) CpG-island No: 20918
  unsure (298)
tacctacgaaaaacgaaaaaaaaacgcctacgaacttcttatatcgaaaaaacgacctactatcgaaatcgaaatctaattcgttaaaacgaatacgaaacgtaacgcgtcgcgaaaaaaaaaccgcgaacccgctaactaaaacgaaaaactcgacgacgaaaaaaacgacccctaaacgaaacgaaccccgccgaaaataatcgcgaatacgatccgataccgacgcgccaacgaaacctactacccgcgcgacgcgaaccgactaaatacgcgaaaccctctccgtcgacgtaantaaaatcgctccgaatacgcgcgacgactcgcccgaaaaacgaattatcgtactataataaaaaaaaatactcttaaaaccgtaatcactccgaacgctacctcgcgcctatacgaccgacgacgtcgaacgaaaacgtaaaacgtactcgcgaactttttcttaacgacgccgcgacgcgtaaccgaaaaaaataaaaactcccttataaaaaaacgtacctataaactttcgcccgtcgaaacgaataacgataaaacgcgaacgaaaaaaatcgacgaaaaaaccgaaataaaaccgaaccgcgatcgcgaaaaaataaaacgaacccgaaaacgataaaaaaaacctttcgtcgaaaaaaaaaatttttaaccgcgacgaataaaaaaaaaacgaacgcgcgcgcgtataaacgcgcccgcgaaatatatatacgaccgaaacgaatctacgccgaaaactataacgcgaaaaaaaaaaaaaacgaaactaaaaaaaccgaccgccccgaaaccccgacgcgctcccgattaatcgtaaaataaaaaatattaacgataaaaaaactaaatcgcgaaattaactctcccccgacgcgaaaaaa

SEQ ID NO: 20919 - DNA, 905 bp, Artificial Sequence
  chemically treated genomic DNA (Homo sapiens) CpG-island No: 20919
  unsure (298)
tatttgcggggggcggggggggggcgtttgcgggttttttgtatcgggagggcggtttgttgtcggggtcggagtttggttcgttggggcgggtgcggggcgtggcgcgtcgcggggggggggtcgcgggttcgttggttggggcgggggattcggcgacggggggggcggtttttaggcggggcgggtttcgtcgggggtggtcgcgggtacggttcggtgtcggcgcgttagcggggtttgttgttcgcgcggcgcgggtcggttgggtgcgcggggtttttttcgtcggcgtggntggagtcgtttcgggtgcgcgcggcggttcgttcggggggcgggttgtcgtgttgtggtgggggggggtgtttttggggtcgtggttatttcgggcgttgtttcgcgtttgtgcggtcggcggcgtcgggcgggggcgtggggcgtgttcgcgggtttttttttggcggcgtcgcggcgcgtggtcgaggggggtgggagtttttttgtgggggggcgtgtttgtgagttttcgttcgtcggggcgggtggcggtggggcgcgggcggggggggtcggcgggggggtcggggtggggtcgggtcgcggtcgcgggggggtggggcgggttcgggggcggtggggggggtttttcgtcgggggggggggtttttggtcgcggcgggtgggggggaggcgggcgcgcgcgcgtgtgggcgcgttcgcggggtgtgtgtgcggtcggggcgggtttgcgtcgggggttgtggcgcgggaaaaaaaaggggcggggttgggggggtcggtcgtttcggggtttcggcgcgttttcggttggtcgtggggtggggggtgttggcggtgggggggttgggtcgcggggttggttttttttcggcgcggggggg

SEQ ID NO: 20920 - DNA, 905 bp, Artificial Sequence
  chemically treated genomic DNA (Homo sapiens) CpG-island No: 20920
  unsure (608)
cccccccgcgccgaaaaaaaaccaaccccgcgacccaacccccccaccgccaacaccccccaccccacgaccaaccgaaaacgcgccgaaaccccgaaacgaccgacccccccaaccccgccccttttttttcccgcgccacaacccccgacgcaaacccgccccgaccgcacacacaccccgcgaacgcgcccacacgcgcgcgcgcccgcctcccccccacccgccgcgaccaaaaacccccccccccgacgaaaaaccccccccaccgcccccgaacccgccccacccccccgcgaccgcgacccgaccccaccccgacccccccgccgaccccccccgcccgcgccccaccgccacccgccccgacgaacgaaaactcacaaacacgcccccccacaaaaaaactcccacccccctcgaccacgcgccgcgacgccgccaaaaaaaaacccgcgaacacgccccacgcccccgcccgacgccgccgaccgcacaaacgcgaaacaacgcccgaaataaccacgaccccaaaaacacccccccccaccacaacacgacaacccgccccccgaacgaaccgccgcgcgcacccgaaacgactccanccacgccgacgaaaaaaaccccgcgcacccaaccgacccgcgccgcgcgaacaacaaaccccgctaacgcgccgacaccgaaccgtacccgcgaccacccccgacgaaacccgccccgcctaaaaaccgccccccccgtcgccgaatcccccgccccaaccaacgaacccgcgaccccccccccgcgacgcgccacgccccgcacccgccccaacgaaccaaactccgaccccgacaacaaaccgccctcccgatacaaaaaacccgcaaacgccccccccccgccccccgcaaata

SEQ ID NO: 20921 - DNA, 576 bp, Artificial Sequence
  chemically treated genomic DNA (Homo sapiens) CpG-island No: 20921
  unsure (490)
aatatatcggttttcgttcgggcgtaaaaaaaagataaaaagtttcggttcgtcggtttcgcgtcggcgtttttacgttagagtattcgtttatagttttatttagcgcgcggggcggggcggttacgatacggcgcgtttcggcgcgttatagtaatataaggtttttcgcgtatcggagcgcggggatagggcgggggggcgcgggtttataggagacggataaagtatttcgagagagggtggattcgataagaggaaacgttaaatagaaaggtatttttcgtaacgcgatttaataaagaacgatacgcgagtcgagagcgaatataacgagataaggtatcgttaattacgtacgggcgcggtttattaatatttttacgttttcgtttttagatcggcgcgttgtagaggacgtattagagtatttcgaacgggacgagttgcgtcgggcggaagcgttcgcgataatacgcgacgcgtaatnacgtatagaggaaggttcggtaattttatagagggaaaaagtcgtagttttttaatagtttagggatttaggttacgtataagggt

SEQ ID NO: 20922 - DNA, 576 bp, Artificial Sequence
  chemically treated genomic DNA (Homo sapiens) CpG-island No: 20922
  unsure (87)
acccttatacgtaacctaaatccctaaactattaaaaaactacgactttttccctctataaaattaccgaaccttcctctatacgtnattacgcgtcgcgtattatcgcgaacgcttccgcccgacgcaactcgtcccgttcgaaatactctaatacgtcctctacaacgcgccgatctaaaaacgaaaacgtaaaaatattaataaaccgcgcccgtacgtaattaacgataccttatctcgttatattcgctctcgactcgcgtatcgttctttattaaatcgcgttacgaaaaatacctttctatttaacgtttcctcttatcgaatccaccctctctcgaaatactttatccgtctcctataaacccgcgcccccccgccctatccccgcgctccgatacgcgaaaaaccttatattactataacgcgccgaaacgcgccgtatcgtaaccgccccgccccgcgcgctaaataaaactataaacgaatactctaacgtaaaaacgccgacgcgaaaccgacgaaccgaaactttttatcttttttttacgcccgaacgaaaaccgatatatt

SEQ ID NO: 20923 - DNA, 576 bp, Artificial Sequence
  chemically treated genomic DNA (Homo sapiens) CpG-island No: 20923
  unsure (87)
atttttgtacgtggtttgggtttttgggttgttggggggttgcggttttttttttttgtggggttgtcgagtttttttttgtgcgtngttgcgcgtcgcgtgttgtcgcgggcgttttcgttcggcgtagttcgtttcgttcggggtgttttggtgcgttttttgtagcgcgtcggtttgggggcgggggcgtgggggtgttggtgggtcgcgttcgtgcgtggttggcggtgttttgtttcgttgtgttcgttttcggttcgcgtgtcgttttttgttgggtcgcgttgcggggggtgtttttttgtttggcgtttttttttgtcgggtttattttttttcggggtgttttgttcgttttttgtgggttcgcgttttttcgttttgttttcgcgtttcggtgcgcggggggttttgtgttgttgtggcgcgtcggggcgcgtcgtgtcgtggtcgtttcgtttcgcgcgttgggtggggttgtgggcgggtgttttggcgtgggggcgtcggcgcggggtcggcgggtcggggttttttgttttttttttgcgttcgggcgggggtcggtgtgtt

SEQ ID NO: 20924 - DNA, 576 bp, Artificial Sequence
  chemically treated genomic DNA (Homo sapiens) CpG-island No: 20924
  unsure (490)
aacacaccgacccccgcccgaacgcaaaaaaaaaacaaaaaaccccgacccgccgaccccgcgccgacgcccccacgccaaaacacccgcccacaaccccacccaacgcgcgaaacgaaacgaccacgacacgacgcgccccgacgcgccacaacaacacaaaaccccccgcgcaccgaaacgcgaaaacaaaacgaaaaaacgcgaacccacaaaaaacgaacaaaacaccccgaaaaaaaataaacccgacaaaaaaaaacgccaaacaaaaaaacaccccccgcaacgcgacccaacaaaaaacgacacgcgaaccgaaaacgaacacaacgaaacaaaacaccgccaaccacgcacgaacgcgacccaccaacacccccacgcccccgcccccaaaccgacgcgctacaaaaaacgcaccaaaacaccccgaacgaaacgaactacgccgaacgaaaacgcccgcgacaacacgcgacgcgcaacnacgcacaaaaaaaaactcgacaaccccacaaaaaaaaaaaaccgcaaccccccaacaacccaaaaacccaaaccacgtacaaaaat

SEQ ID NO: 20925 - DNA, 651 bp, Artificial Sequence
  chemically treated genomic DNA (Homo sapiens) CpG-island No: 20925
  unsure (40, 354, 600)
cgattagttagtatcgagatcgtaagatggagagataganacgtcgttcgcggtagaggtagaagggagatataacgcgatagagatcgtggcgagagagcggttagaataacgaacgtcgaaatatacgaatcgtattagaagaacgagtattttacgggaatcgtattcgtcgtaagggcgcgtaggcgtatacgacgtaaagtaataagcgagagagagaaaagagaagagagtagatttacgaggatcgagaacgtaaatagagaggtaacgttatatagcgatatatattttagagacgtttattttacgaagaacgtattcgtttttattatttcggtcgagaggagngaagcgacgatcgaacgatacgggatgttacgtacgttagacgcgaggcggaagggtcgggacgagaagaaaataagttacgcgtaagtcgtacgaagtatcgaatagcggcgagaattaaagtagaaaagaatacgagtacgaaaattagtaaacgcgacgtcgcgggtcgttttacgatatgagagtatataacgacgtaggcgacggcgataagtagagaagaagttataggagaggagacgntagaggtcgttcgtatggaagtcggacggaaggataatatataagacgagt

SEQ ID NO: 20926 - DNA, 651 bp, Artificial Sequence
  chemically treated genomic DNA (Homo sapiens) CpG-island No: 20926
  unsure (52, 298, 612)
actcgtcttatatattatccttccgtccgacttccatacgaacgacctctancgtctcctctcctataacttcttctctacttatcgccgtcgcctacgtcgttatatactctcatatcgtaaaacgacccgcgacgtcgcgtttactaattttcgtactcgtattcttttctactttaattctcgccgctattcgatacttcgtacgacttacgcgtaacttattttcttctcgtcccgacccttccgcctcgcgtctaacgtacgtaacatcccgtatcgttcgatcgtcgcttcnctcctctcgaccgaaataataaaaacgaatacgttcttcgtaaaataaacgtctctaaaatatatatcgctatataacgttacctctctatttacgttctcgatcctcgtaaatctactctcttctcttttctctctctcgcttattactttacgtcgtatacgcctacgcgcccttacgacgaatacgattcccgtaaaatactcgttcttctaatacgattcgtatatttcgacgttcgttattctaaccgctctctcgccacgatctctatcgcgttatatctcccttctacctctaccgcgaacgacgtntctatctctccatcttacgatctcgatactaactaatcg

SEQ ID NO: 20927 - DNA, 651 bp, Artificial Sequence
  chemically treated genomic DNA (Homo sapiens) CpG-island No: 20927
  unsure (52, 298, 612)
gttcgttttgtgtgttattttttcgttcggtttttatgcgggcgatttttgncgtttttttttttgtggttttttttttgtttgtcgtcgtcgtttacgtcgttgtgtatttttatgtcgtggggcggttcgcggcgtcgcgtttgttgattttcgtgttcgtgtttttttttgttttggttttcgtcgttgttcgatgtttcgtgcggtttgcgcgtagtttgtttttttttcgtttcgattttttcgtttcgcgtttagcgtgcgtggtatttcgtgtcgttcggtcgtcgttttntttttttcggtcggggtggtgggggcgggtgcgtttttcgtggggtgggcgtttttggggtgtgtgtcgttgtatggcgttgtttttttgtttgcgttttcggttttcgtgggtttgttttttttttttttttttttttcgtttgttgttttgcgtcgtgtgcgtttgcgcgtttttgcggcgggtgcggttttcgtggggtgttcgtttttttggtgcggttcgtgtgtttcggcgttcgttgttttgatcgttttttcgttacggtttttgtcgcgttgtgttttttttttatttttgtcgcgggcggcgtntttgtttttttattttgcgatttcggtgttggttggtcg

SEQ ID NO: 20928 - DNA, 651 bp, Artificial Sequence
  chemically treated genomic DNA (Homo sapiens) CpG-island No: 20928
  unsure (40, 354, 600)
cgaccaaccaacaccgaaatcgcaaaataaaaaaacaaanacgccgcccgcgacaaaaataaaaaaaaaacacaacgcgacaaaaaccgtaacgaaaaaacgatcaaaacaacgaacgccgaaacacacgaaccgcaccaaaaaaacgaacaccccacgaaaaccgcacccgccgcaaaaacgcgcaaacgcacacgacgcaaaacaacaaacgaaaaaaaaaaaaaaaaaaaaaacaaacccacgaaaaccgaaaacgcaaacaaaaaaacaacgccatacaacgacacacaccccaaaaacgcccaccccacgaaaaacgcacccgcccccaccaccccgaccgaaaaaaanaaaacgacgaccgaacgacacgaaataccacgcacgctaaacgcgaaacgaaaaaatcgaaacgaaaaaaaaacaaactacgcgcaaaccgcacgaaacatcgaacaacgacgaaaaccaaaacaaaaaaaaacacgaacacgaaaatcaacaaacgcgacgccgcgaaccgccccacgacataaaaatacacaacgacgtaaacgacgacgacaaacaaaaaaaaaaccacaaaaaaaaaaacgncaaaaatcgcccgcataaaaaccgaacgaaaaaataacacacaaaacgaac

SEQ ID NO: 20929 - DNA, 524 bp, Artificial Sequence
  chemically treated genomic DNA (Homo sapiens) CpG-island No: 20929
ttttttattttttaaatacgttttttttttcgtttattatatttattatcgtatttttatagtattatatttttttttttatcgacgttttttttatttattttttaaattcgcgtttttttatttttcgttaattatttatttatagtacgtttttttcgttttttataatcgtataattttgtattattttatataaattattacgttattttatttattatttttattattttatttttttttaattttttattcgtcgatttattattatcgttcgttttaattttattttcgtttcgatttatttatatcgttaagtttatattatttttattaaatttttttttatttttataattttatattattatattatcgtttcgattcgattatattaataattttttatataatttttttatttttttatatatatttattttttattttattttatcgttatatttatattatattatgtattatattatttttaaattaattttttatttttcgttttt

SEQ ID NO: 20930 - DNA, 524 bp, Artificial Sequence
  chemically treated genomic DNA (Homo sapiens) CpG-island No: 20930
aaaaacgaaaaataaaaaattaatttaaaaataatataatacataatataatataaatataacgataaaataaaataaaaaataaatatatataaaaaaataaaaaaattatataaaaaattattaatataatcgaatcgaaacgataatataataatataaaattataaaaataaaaaaaaatttaataaaaataatataaacttaacgatataaataaatcgaaacgaaaataaaattaaaacgaacgataataataaatcgacgaataaaaaattaaaaaaaaataaaataataaaaataataaataaaataacgtaataatttatataaaataatacaaaattatacgattataaaaaacgaaaaaaacgtactataaataaataattaacgaaaaataaaaaaacgcgaatttaaaaaataaataaaaaaaacgtcgataaaaaaaaaaatataatactataaaaatacgataataaatataataaacgaaaaaaaaaacgtatttaaaaaataaaaaa

SEQ ID NO: 20931 - DNA, 524 bp, Artificial Sequence
  chemically treated genomic DNA (Homo sapiens) CpG-island No: 20931
gggggcgagggatgggaggttagtttgggggtggtgtggtgtatagtgtggtgtgggtgtggcgatggggtggggtagggggtagatgtgtatgggggggtgggggggttgtgtggggggttgttggtgtgatcgggtcggggcggtggtgtggtggtatggagttgtgggggtgggggggggtttggtgggggtggtgtggatttggcgatgtgggtgggtcggggcggaggtggagttgaggcgggcggtggtagtgggtcggcgggtggggggttgggagggggtggggtggtaggggtgatggatgggatggcgtggtggtttgtgtggggtagtgtagggttgtgcggttatggggaacgaggggggcgtgttgtgagtgagtggttggcgggaggtgggggggcgcgggtttggggggtgggtggggggggcgtcgatgggagggggggtgtggtgttgtgggggtgcggtggtgagtgtggtgggcgggggggggggcgtgtttggggggtgggggg

SEQ ID NO: 20932 - DNA, 524 bp, Artificial Sequence
  chemically treated genomic DNA (Homo sapiens) CpG-island No: 20932
ccccccaccccccaaacacgcccccccccccgcccaccacactcaccaccgcacccccacaacaccacaccccccctcccatcgacgccccccccacccaccccccaaacccgcgcccccccacctcccgccaaccactcactcacaacacgcccccctcgttccccataaccgcacaaccctacactaccccacacaaaccaccacgccatcccatccatcacccctaccaccccaccccctcccaaccccccacccgccgacccactaccaccgcccgcctcaactccacctccgccccgacccacccacatcgccaaatccacaccacccccaccaaacccccccccacccccacaactccataccaccacaccaccgccccgacccgatcacaccaacaaccccccacacaacccccccacccccccatacacatctaccccctaccccaccccatcgccacacccacaccacactatacaccacaccacccccaaactaacctcccatccctcgccccc

SEQ ID NO: 20933 - DNA, 663 bp, Artificial Sequence
  chemically treated genomic DNA (Homo sapiens) CpG-island No: 20933
cgagcgcgcgcgggcgagcgtagggggcgcggcgcgggggaaaaaaaaaaaaagcgggggggttcgtcgtcggcgcgggtgcggaggcggggcggggcgtcggtcgttcgcgttacggcgggggcgacgggacgtaggcgggcgcgcgttcgggcgggggggacgagatcgtcgcggggcgggcggtcgtcggcggggtcgtcgtcgggcgggtggtcgaggagttacgacgcgcgtttcgttcggttcgtcgcgacgaggatataggcgcggcggttagcgcggacggggggggcggcgggaggagaaaggaggggaatagtcggggcgtagcgagggagggcgcggggtacgttcgggtcggcgcggaggtcgggaatcgggcgggggattagcggggcgtcgggcgttcgcgtcggtcgcgcgtcgcggcggcggcgcggcgcgtcggtttcggcgcggcgtttcgggcggggggggggcgggcgagtttaagggaacgtaaaagcggggagggggcgtcgtttcgaggggcgggcgcggtacgcgcgggcggcgacgggagaggggcggtcgttttcgaggcggcgggggcgtcgcggcgtagcgggggcgggggggggacgcgtcgtcgtcgggtatggagtcgtttttcggtatatt

SEQ ID NO: 20934 - DNA, 663 bp, Artificial Sequence
  chemically treated genomic DNA (Homo sapiens) CpG-island No: 20934
aatataccgaaaaacgactccatacccgacgacgacgcgtcccccccccgcccccgctacgccgcgacgcccccgccgcctcgaaaacgaccgcccctctcccgtcgccgcccgcgcgtaccgcgcccgcccctcgaaacgacgccccctccccgcttttacgttcccttaaactcgcccgccccccccccgcccgaaacgccgcgccgaaaccgacgcgccgcgccgccgccgcgacgcgcgaccgacgcgaacgcccgacgccccgctaatcccccgcccgattcccgacctccgcgccgacccgaacgtaccccgcgccctccctcgctacgccccgactattcccctcctttctcctcccgccgccccccccgtccgcgctaaccgccgcgcctatatcctcgtcgcgacgaaccgaacgaaacgcgcgtcgtaactcctcgaccacccgcccgacgacgaccccgccgacgaccgcccgccccgcgacgatctcgtcccccccgcccgaacgcgcgcccgcctacgtcccgtcgcccccgccgtaacgcgaacgaccgacgccccgccccgcctccgcacccgcgccgacgacgaacccccccgctttttttttttttcccccgcgccgcgccccctacgctcgcccgcgcgcgctcg

SEQ ID NO: 20935 - DNA, 663 bp, Artificial Sequence
  chemically treated genomic DNA (Homo sapiens) CpG-island No: 20935
ggtgtgtcggggagcgattttatattcggcggcggcgcgtttttttttcgttttcgttacgtcgcggcgttttcgtcgtttcgggggcggtcgtttttttttcgtcgtcgttcgcgcgtgtcgcgttcgtttttcggggcggcgtttttttttcgtttttgcgtttttttgggttcgttcgtttttttttcgttcggggcgtcgcgtcggggtcggcgcgtcgcgtcgtcgtcgcggcgcgcggtcggcgcgggcgttcggcgtttcgttggtttttcgttcggttttcggttttcgcgtcggttcgggcgtgtttcgcgttttttttcgttgcgtttcggttgtttttttttttttttttttcgtcgtttttttcgttcgcgttggtcgtcgcgtttgtgttttcgtcgcggcgggtcgggcggggcgcgcgtcgtggtttttcggttattcgttcggcggcggtttcgtcggcggtcgttcgtttcgcggcggtttcgtttttttcgttcgggcgcgcgttcgtttgcgtttcgtcgttttcgtcgtggcgcgggcggtcggcgtttcgtttcgttttcgtattcgcgtcggcggcgggttttttcgttttttttttttttttttcgcgtcgcgttttttgcgttcgttcgcgcgcgttcg

SEQ ID NO: 20936 - DNA, 663 bp, Artificial Sequence
  chemically treated genomic DNA (Homo sapiens) CpG-island No: 20936
cgaacgcgcgcgaacgaacgcaaaaaacgcgacgcgaaaaaaaaaaaaaaaaaacgaaaaaacccgccgccgacgcgaatacgaaaacgaaacgaaacgccgaccgcccgcgccacgacgaaaacgacgaaacgcaaacgaacgcgcgcccgaacgaaaaaaacgaaaccgccgcgaaacgaacgaccgccgacgaaaccgccgccgaacgaataaccgaaaaaccacgacgcgcgccccgcccgacccgccgcgacgaaaacacaaacgcgacgaccaacgcgaacgaaaaaaacgacgaaaaaaaaaaaaaaaaaaacaaccgaaacgcaacgaaaaaaaacgcgaaacacgcccgaaccgacgcgaaaaccgaaaaccgaacgaaaaaccaacgaaacgccgaacgcccgcgccgaccgcgcgccgcgacgacgacgcgacgcgccgaccccgacgcgacgccccgaacgaaaaaaaaacgaacgaacccaaaaaaacgcaaaaacgaaaaaaaaacgccgccccgaaaaacgaacgcgacacgcgcgaacgacgacgaaaaaaaaacgaccgcccccgaaacgacgaaaacgccgcgacgtaacgaaaacgaaaaaaaaacgcgccgccgccgaatataaaatcgctccccgacacacc

SEQ ID NO: 20937 - DNA, 599 bp, Artificial Sequence
  chemically treated genomic DNA (Homo sapiens) CpG-island No: 20937
gggggttgttcgggtcggtgaatcgatagggcgttaggattcggggcgcgttcggattcggggcgagaacgcgaggtcgggatcgcggtgaaaggttcgcggcggagagttcggtcgtcgttaggtaatcgttttgacgtaacgtagggggaaaaaaaaaagtttttttcgaaaggagtagcgtcgagaatttatcggagttcggggaggcgaggcgggagttttgagttgaggtcgggtagcgcggattcgcgtaggaggaggcggcggggatatcggcgagtttttagtagggtttttgggttttcggaaggtgggttcgcgtcggcggcggggatttttttagggattgggaggtgtggtcgcggcgggcggcgtagtttgggtaggggttgaggcgtcgtaggtttttagcgcgagtagtggttcggagtagttcgattttaaagttttttggaggggacgcgtttttatcgttttttcgggagaggtcgtttatgcgttttcgcgggttcgttgtttttttagaggagtcgggtagttagggttggattttattttttagttttttgttggtcgtgttcgggttcggattttgg

SEQ ID NO: 20938 - DNA, 599 bp, Artificial Sequence
  chemically treated genomic DNA (Homo sapiens) CpG-island No: 20938
ccaaaatccgaacccgaacacgaccaacaaaaaactaaaaaataaaatccaaccctaactacccgactcctctaaaaaaacaacgaacccgcgaaaacgcataaacgacctctcccgaaaaaacgataaaaacgcgtcccctccaaaaaactttaaaatcgaactactccgaaccactactcgcgctaaaaacctacgacgcctcaacccctacccaaactacgccgcccgccgcgaccacacctcccaatccctaaaaaaatccccgccgccgacgcgaacccaccttccgaaaacccaaaaaccctactaaaaactcgccgatatccccgccgcctcctcctacgcgaatccgcgctacccgacctcaactcaaaactcccgcctcgcctccccgaactccgataaattctcgacgctactcctttcgaaaaaaacttttttttttccccctacgttacgtcaaaacgattacctaacgacgaccgaactctccgccgcgaacctttcaccgcgatcccgacctcgcgttctcgccccgaatccgaacgcgccccgaatcctaacgccctatcgattcaccgacccgaacaaccccc

SEQ ID NO: 20939 - DNA, 599 bp, Artificial Sequence
  chemically treated genomic DNA (Homo sapiens) CpG-island No: 20939
ttagaattcgagttcggatacggttagtaaggagttaggagatgaagtttagttttggttgttcggtttttttgggagggtagcgaattcgcgggagcgtatgagcggtttttttcgggggggcggtaggagcgcgttttttttagggagttttgggatcgggttgtttcgggttattgttcgcgttggggatttgcgacgttttagtttttgtttagattgcgtcgttcgtcgcggttatattttttagtttttgggaaagttttcgtcgtcggcgcgaatttatttttcgggagtttaggggttttgttggggattcgtcggtgttttcgtcgtttttttttgcgcgggttcgcgttgttcggttttagtttagggttttcgtttcgttttttcgagtttcggtgaattttcggcgttgtttttttcggaaaggatttttttttttttttttgcgttgcgttagggcggttgtttggcgacggtcgagtttttcgtcgcgagttttttatcgcgatttcggtttcgcgttttcgtttcgggttcgagcgcgtttcgggttttagcgttttgtcggtttatcggttcgggtagttttt

SEQ ID NO: 20940 - DNA, 599 bp, Artificial Sequence
  chemically treated genomic DNA (Homo sapiens) CpG-island No: 20940
aaaaactacccgaaccgataaaccgacaaaacgctaaaacccgaaacgcgctcgaacccgaaacgaaaacgcgaaaccgaaatcgcgataaaaaactcgcgacgaaaaactcgaccgtcgccaaacaaccgccctaacgcaacgcaaaaaaaaaaaaaaaaatcctttccgaaaaaaacaacgccgaaaattcaccgaaactcgaaaaaacgaaacgaaaaccctaaactaaaaccgaacaacgcgaacccgcgcaaaaaaaaacgacgaaaacaccgacgaatccccaacaaaacccctaaactcccgaaaaataaattcgcgccgacgacgaaaactttcccaaaaactaaaaaatataaccgcgacgaacgacgcaatctaaacaaaaactaaaacgtcgcaaatccccaacgcgaacaataacccgaaacaacccgatcccaaaactccctaaaaaaaacgcgctcctaccgcccccccgaaaaaaaccgctcatacgctcccgcgaattcgctaccctcccaaaaaaaccgaacaaccaaaactaaacttcatctcctaactccttactaaccgtatccgaactcgaattctaa

SEQ ID NO: 20941 - DNA, 957 bp, Artificial Sequence
  chemically treated genomic DNA (Homo sapiens) CpG-island No: 20941
gtcgtaaaataaatacggtcgcgtcgttaatcgttagttcggaggaaataaaatagcgttgcgttgggggatttgggtaaaattagtttttttttttttcgttttttcgtcgcggttttttttttttcgcgttgttttcgttcgtttggtttagtttagtttagtttagcgtagtttcgcggtcgttaagtcgaggcgggtacggttttcgagtcgcggacgttagtttcgagtttttttttttcgtcgcgttttcgttaggtcgcgttttcgtcgggattatttcgggtaggagtcgcgtggcgaaggtttgcggtcgcggtataaagttgggggtcgcgaagatgaggttgttttcggcgtttttgaagttgagtcggatttcggtattgttggttttggcgttgtttttggtcgcggcgttggtttttttcgacgagattttggataaagtgtttaagttagagggttattgtagtcgtattttgcgcgtttagggtacgcggcgcgagggttatatcgagtttagttttcgcgtggagggcgatttcgatttttataagtcgggaattagttatcgcggtaagtggtcgttcggcgtggtattaggagagcgggattcggttttcggagggcgtcgatttcgcggtgtcggaggagggcgcgcggttttcgggcgcgtggcgcgggtgtagttcggtaagggtttttttgttttggttgttttcggtttttgtagtcgcgagttcggcgcggattataatttagcgtttcgggtcgtcgcgggggtcgtagttaggagaggtatttcgcgttttcgacgcgcggtttttaggcggaggatgtaattgagttacgcgttacgtcggtttgattgtaagggaggttcgtttttttttcggtcgtttgtaggagggaagtaaaattgtttttttttaaatcggtttggaggggatt

SEQ ID NO: 20942 - DNA, 957 bp, Artificial Sequence
  chemically treated genomic DNA (Homo sapiens) CpG-island No: 20942
aatcccctccaaaccgatttaaaaaaaaacaattttacttccctcctacaaacgaccgaaaaaaaaacgaacctcccttacaatcaaaccgacgtaacgcgtaactcaattacatcctccgcctaaaaaccgcgcgtcgaaaacgcgaaatacctctcctaactacgacccccgcgacgacccgaaacgctaaattataatccgcgccgaactcgcgactacaaaaaccgaaaacaaccaaaacaaaaaaacccttaccgaactacacccgcgccacgcgcccgaaaaccgcgcgccctcctccgacaccgcgaaatcgacgccctccgaaaaccgaatcccgctctcctaataccacgccgaacgaccacttaccgcgataactaattcccgacttataaaaatcgaaatcgccctccacgcgaaaactaaactcgatataaccctcgcgccgcgtaccctaaacgcgcaaaatacgactacaataaccctctaacttaaacactttatccaaaatctcgtcgaaaaaaaccaacgccgcgaccaaaaacaacgccaaaaccaacaataccgaaatccgactcaacttcaaaaacgccgaaaacaacctcatcttcgcgacccccaactttataccgcgaccgcaaaccttcgccacgcgactcctacccgaaataatcccgacgaaaacgcgacctaacgaaaacgcgacgaaaaaaaaaaactcgaaactaacgtccgcgactcgaaaaccgtacccgcctcgacttaacgaccgcgaaactacgctaaactaaactaaactaaaccaaacgaacgaaaacaacgcgaaaaaaaaaaaaccgcgacgaaaaaacgaaaaaaaaaaaaactaattttacccaaatcccccaacgcaacgctattttatttcctccgaactaacgattaacgacgcgaccgtatttattttacgac

SEQ ID NO: 20943 - DNA, 957 bp, Artificial Sequence
  chemically treated genomic DNA (Homo sapiens) CpG-island No: 20943
ggttttttttagatcgatttggagaaaggtagttttattttttttttgtagacggtcgggggagaagcgagttttttttgtagttaggtcggcgtgacgcgtggtttagttatatttttcgtttgggaatcgcgcgtcggaaacgcggggtgttttttttggttgcggttttcgcgacggttcgggacgttggattatgattcgcgtcgagttcgcgattgtaagggtcgagggtagttaggatagaagggtttttgtcgggttgtattcgcgttacgcgttcggagatcgcgcgttttttttcggtatcgcgaggtcggcgtttttcggggatcgggtttcgtttttttaatgttacgtcgggcggttatttatcgcggtagttggttttcggtttgtagaagtcggggtcgttttttacgcggaggttgaattcggtgtagttttcgcgtcgcgtgttttgggcgcgtaggatacggttgtagtagttttttgatttgggtattttgtttagggtttcgtcggagaaggttagcgtcgcggttaggggtagcgttagggttagtagtgtcggagttcggtttagttttaggggcgtcggggatagttttattttcgcggtttttaattttgtgtcgcggtcgtaggttttcgttacgcgatttttgttcgaagtggtttcgacgaaggcgcgatttggcggaggcgcggcggagagagggagttcggagttggcgttcgcgattcggagatcgtgttcgtttcggtttggcggtcgcggagttgcgttgagttgagttgagttgagttaagcgaacgagagtagcgcgaggaggggagggtcgcggcgaaggagcgggaggagggagggttgattttgtttagattttttagcgtagcgttgttttgtttttttcgaattggcgattagcggcgcggtcgtgtttattttgcgat

SEQ ID NO: 20944 - DNA, 957 bp, Artificial Sequence
  chemically treated genomic DNA (Homo sapiens) CpG-island No: 20944
atcgcaaaataaacacgaccgcgccgctaatcgccaattcgaaaaaaacaaaacaacgctacgctaaaaaatctaaacaaaatcaaccctccctcctcccgctccttcgccgcgaccctcccctcctcgcgctactctcgttcgcttaactcaactcaactcaactcaacgcaactccgcgaccgccaaaccgaaacgaacacgatctccgaatcgcgaacgccaactccgaactccctctctccgccgcgcctccgccaaatcgcgccttcgtcgaaaccacttcgaacaaaaatcgcgtaacgaaaacctacgaccgcgacacaaaattaaaaaccgcgaaaataaaactatccccgacgcccctaaaactaaaccgaactccgacactactaaccctaacgctacccctaaccgcgacgctaaccttctccgacgaaaccctaaacaaaatacccaaatcaaaaaactactacaaccgtatcctacgcgcccaaaacacgcgacgcgaaaactacaccgaattcaacctccgcgtaaaaaacgaccccgacttctacaaaccgaaaaccaactaccgcgataaataaccgcccgacgtaacattaaaaaaacgaaacccgatccccgaaaaacgccgacctcgcgataccgaaaaaaaacgcgcgatctccgaacgcgtaacgcgaatacaacccgacaaaaacccttctatcctaactaccctcgacccttacaatcgcgaactcgacgcgaatcataatccaacgtcccgaaccgtcgcgaaaaccgcaaccaaaaaaaacaccccgcgtttccgacgcgcgattcccaaacgaaaaatataactaaaccacgcgtcacgccgacctaactacaaaaaaaactcgcttctcccccgaccgtctacaaaaaaaaaataaaactacctttctccaaatcgatctaaaaaaaacc

SEQ ID NO: 20945 - DNA, 506 bp, Artificial Sequence
  chemically treated genomic DNA (Homo sapiens) CpG-island No: 20945
gtcggcgtttttttttcgttcgttttttacgatcgtttcggcggtttagtttttttcgaaggttgcggtcggggggcggggggtcgttttaggttcgtttttatttcggaaaggtttttatttcgaggaatttttttcgtttttttttttcgttttcgaataaataatcggggttgtaagtggtaggggcgtcggtcgggcgcggagaggtttttaggttttttttaggttttgcgttttcgtcgtttcgttttcgtcgcgcggggattaacggcgtttttttggtttttttttttattgttttttcgttacggcggagcgcgaggtaaacgttcgttcggcgttcgggggcgggggaggtgcgggtcgtggggaaatttagttaagttgaagtttttcgaggcgagtaaataaataaaagttttcgcgggcgtttggcggggtcgaggtcgaggggatcgggtcgtcggggcgggggcgcggtcgggtcgtgggttttttaggtt

SEQ ID NO: 20946 - DNA, 506 bp, Artificial Sequence
  chemically treated genomic DNA (Homo sapiens) CpG-island No: 20946
aacctaaaaaacccacgacccgaccgcgcccccgccccgacgacccgatcccctcgacctcgaccccgccaaacgcccgcgaaaacttttatttatttactcgcctcgaaaaacttcaacttaactaaatttccccacgacccgcacctcccccgcccccgaacgccgaacgaacgtttacctcgcgctccgccgtaacgaaaaaacaataaaaaaaaaaaccaaaaaaacgccgttaatccccgcgcgacgaaaacgaaacgacgaaaacgcaaaacctaaaaaaaacctaaaaacctctccgcgcccgaccgacgcccctaccacttacaaccccgattatttattcgaaaacgaaaaaaaaaaacgaaaaaaattcctcgaaataaaaacctttccgaaataaaaacgaacctaaaacgaccccccgccccccgaccgcaaccttcgaaaaaaactaaaccgccgaaacgatcgtaaaaaacgaacgaaaaaaaaacgccgac

SEQ ID NO: 20947 - DNA, 506 bp, Artificial Sequence
  chemically treated genomic DNA (Homo sapiens) CpG-island No: 20947
ggtttgggagatttacggttcggtcgcgttttcgtttcggcggttcggttttttcggtttcggtttcgttaggcgttcgcgggggtttttgtttgtttattcgtttcggggggttttaatttggttgagtttttttacgattcgtatttttttcgttttcgggcgtcgggcgagcgtttgtttcgcgtttcgtcgtggcgaggagataatgggagagaaaattagagaaacgtcgttagttttcgcgcggcgaggacggggcggcgggggcgtagggtttggagggaatttgggagttttttcgcgttcggtcggcgtttttgttatttgtagtttcggttgtttattcgggagcgggggaggggagcggggggagtttttcggagtgaaaattttttcgaagtgggagcgaatttggggcggtttttcgtttttcggtcgtagttttcggaggagattgggtcgtcgaggcggtcgtgagagacggacggagaggaagcgtcggt

SEQ ID NO: 20948 - DNA, 506 bp, Artificial Sequence
  chemically treated genomic DNA (Homo sapiens) CpG-island No: 20948
accgacgcttcctctccgtccgtctctcacgaccgcctcgacgacccaatctcctccgaaaactacgaccgaaaaacgaaaaaccgccccaaattcgctcccacttcgaaaaaattttcactccgaaaaactccccccgctcccctcccccgctcccgaataaacaaccgaaactacaaataacaaaaacgccgaccgaacgcgaaaaaactcccaaattccctccaaaccctacgcccccgccgccccgtcctcgccgcgcgaaaactaacgacgtttctctaattttctctcccattatctcctcgccacgacgaaacgcgaaacaaacgctcgcccgacgcccgaaaacgaaaaaaatacgaatcgtaaaaaaactcaaccaaattaaaaccccccgaaacgaataaacaaacaaaaacccccgcgaacgcctaacgaaaccgaaaccgaaaaaaccgaaccgccgaaacgaaaacgcgaccgaaccgtaaatctcccaaacc

SEQ ID NO: 20949 - DNA, 654 bp, Artificial Sequence
  chemically treated genomic DNA (Homo sapiens) CpG-island No: 20949
tcgttttcgtttttgtttttggtcgggtaaggcgatgttgtagaggttggcgatttttagtttttacgaattcgtacgtttttttattatttatcgcgttcgtttattgggtttcggggcggtcggcggtcgggtttttcgggtttcgcgtgtcgttcgagtcgtcgtcggagcgagggtttttgttttttggggagcggtttttagtcgtttcgaagtcgttttttttttttttcgtgagttagaaataaaggcgggggggcggggggagcgttcgagttgcggtttcgcgattcgttttttattttgaattcgtaacgttagcggttcgcggatggagttgcggggtgcggattgggtcgtttatagcgtatcgggtcgggggagcggtcgcgttgggtcgggcgggcgggtggcgggggtgcgttcggggattcgggtcgcgtgggcgtcgggatggagggcgttaaggggcggggagcgggcgtgcgtgtgtgtgcgagtgcgaatgcgagggaggtcggttttgagtgaaatcggagttataaagaaggggagagttcgggagcgggagggcgcgagggaggagcggcggcgtcggggtagtttcgacgttttttcgcggggaaggagttttcgcggtgtcgtcgaggt

SEQ ID NO: 20950 - DNA, 654 bp, Artificial Sequence
  chemically treated genomic DNA (Homo sapiens) CpG-island No: 20950
acctcgacgacaccgcgaaaactccttccccgcgaaaaaacgtcgaaactaccccgacgccgccgctcctccctcgcgccctcccgctcccgaactctccccttctttataactccgatttcactcaaaaccgacctccctcgcattcgcactcgcacacacacgcacgcccgctccccgccccttaacgccctccatcccgacgcccacgcgacccgaatccccgaacgcacccccgccacccgcccgcccgacccaacgcgaccgctcccccgacccgatacgctataaacgacccaatccgcaccccgcaactccatccgcgaaccgctaacgttacgaattcaaaataaaaaacgaatcgcgaaaccgcaactcgaacgctccccccgcccccccgcctttatttctaactcacgaaaaaaaaaaaaaacgacttcgaaacgactaaaaaccgctccccaaaaaacaaaaaccctcgctccgacgacgactcgaacgacacgcgaaacccgaaaaacccgaccgccgaccgccccgaaacccaataaacgaacgcgataaataataaaaaaacgtacgaattcgtaaaaactaaaaatcgccaacctctacaacatcgccttacccgaccaaaaacaaaaacgaaaacga

SEQ ID NO: 20951 - DNA, 654 bp, Artificial Sequence
  chemically treated genomic DNA (Homo sapiens) CpG-island No: 20951
gtttcggcggtatcgcgggggtttttttttcgcgggagggcgtcggagttgtttcggcgtcgtcgtttttttttcgcgttttttcgttttcggattttttttttttttgtagtttcggttttatttaaggtcggtttttttcgtattcgtattcgtatatatacgtacgttcgtttttcgttttttggcgttttttatttcggcgtttacgcggttcgggttttcgagcgtattttcgttattcgttcgttcggtttagcgcggtcgttttttcggttcggtgcgttgtgggcggtttagttcgtatttcgtagttttattcgcgggtcgttgacgttgcgagtttagaataaagggcgaatcgcggagtcgtagttcgggcgtttttttcgttttttcgtttttgtttttgatttacggagggggaagaaggcggtttcgaagcggttggagatcgttttttagggggtagggattttcgtttcggcggcggttcgggcgatacgcggagttcgagagattcggtcgtcggtcgtttcggggtttagtgggcgggcgcggtggataatggagagacgtgcggattcgtgaagattggagatcgttagtttttatagtatcgttttattcgattaaaaataaaaacgagagcgg

SEQ ID NO: 20952 - DNA, 654 bp, Artificial Sequence
  chemically treated genomic DNA (Homo sapiens) CpG-island No: 20952
ccgctctcgtttttatttttaatcgaataaaacgatactataaaaactaacgatctccaatcttcacgaatccgcacgtctctccattatccaccgcgcccgcccactaaaccccgaaacgaccgacgaccgaatctctcgaactccgcgtatcgcccgaaccgccgccgaaacgaaaatccctaccccctaaaaaacgatctccaaccgcttcgaaaccgccttcttccccctccgtaaatcaaaaacaaaaacgaaaaaacgaaaaaaacgcccgaactacgactccgcgattcgccctttattctaaactcgcaacgtcaacgacccgcgaataaaactacgaaatacgaactaaaccgcccacaacgcaccgaaccgaaaaaacgaccgcgctaaaccgaacgaacgaataacgaaaatacgctcgaaaacccgaaccgcgtaaacgccgaaataaaaaacgccaaaaaacgaaaaacgaacgtacgtatatatacgaatacgaatacgaaaaaaaccgaccttaaataaaaccgaaactacaaaaaaaaaaaaaatccgaaaacgaaaaaacgcgaaaaaaaaacgacgacgccgaaacaactccgacgccctcccgcgaaaaaaaaacccccgcgataccgccgaaac

SEQ ID NO: 20953 - DNA, 928 bp, Artificial Sequence
  chemically treated genomic DNA (Homo sapiens) CpG-island No: 20953
gtagttcgcgtagattcgcgtttcgtataggttcggtgggtaggtcgattttggtttcgagtttttttcgcgtttacgtttacgttaagattaatttgttgtcgggtcgtgtagtttaggttttcgatgtcgtgttcggcgtcggttttagtcgcgcgttcgcgcgttggcgatttagagattttggaagtttcgtttcggacgtttggtagcgttttcgttttgtatcgttgcgcgcgtagtttcgttttttttttcggttcgttttcggttcgttttcgtcgcggaagggcggttgcggcggttaatggcgagttttttaggataggacgcgggggttgcggagtaggaattcgtttcgtttatttttcgcgtagtttcgttttcgttacgttaattaatggcgcgcgtcgtcgggtacgtcggttgttgattggcggcgttcggtacgttcggggcgggtagtgcgcgacggcggcggcggcgcgggaggttcggagcgggagttcgggttcgcggacggtatggaggattacgagtaggagttgtgcggcgtcgaggatgatttttataattagttcgcggtcgagttggaggtgttggtagagttggaaggtggggcgcggttttcggtcgttggggaggagttgcgaaagtcgggatagtggcgatttcggggagggcgtgtcgggggtcgaaggggtttttacgtcgtcgttggcgggatttgttgtttcggggcggtcgttgataatttttttttttagtaggggcgtcgatttcgtcgtttttcggggtttttttgtttatcgcgggtcgattttcgcggacgttcgaggaggtttttgttagaggggacgcggtttttagtttcgttttagtcgtatttgtgggtagtagttagggcggcgttaggaagaggtaggtg

SEQ ID NO: 20954 - DNA, 928 bp, Artificial Sequence
  chemically treated genomic DNA (Homo sapiens) CpG-island No: 20954
cacctacctcttcctaacgccgccctaactactacccacaaatacgactaaaacgaaactaaaaaccgcgtcccctctaacaaaaacctcctcgaacgtccgcgaaaatcgacccgcgataaacaaaaaaaccccgaaaaacgacgaaatcgacgcccctactaaaaaaaaaaattatcaacgaccgccccgaaacaacaaatcccgccaacgacgacgtaaaaaccccttcgacccccgacacgccctccccgaaatcgccactatcccgactttcgcaactcctccccaacgaccgaaaaccgcgccccaccttccaactctaccaacacctccaactcgaccgcgaactaattataaaaatcatcctcgacgccgcacaactcctactcgtaatcctccataccgtccgcgaacccgaactcccgctccgaacctcccgcgccgccgccgccgtcgcgcactacccgccccgaacgtaccgaacgccgccaatcaacaaccgacgtacccgacgacgcgcgccattaattaacgtaacgaaaacgaaactacgcgaaaaataaacgaaacgaattcctactccgcaacccccgcgtcctatcctaaaaaactcgccattaaccgccgcaaccgcccttccgcgacgaaaacgaaccgaaaacgaaccgaaaaaaaaaacgaaactacgcgcgcaacgatacaaaacgaaaacgctaccaaacgtccgaaacgaaacttccaaaatctctaaatcgccaacgcgcgaacgcgcgactaaaaccgacgccgaacacgacatcgaaaacctaaactacacgacccgacaacaaattaatcttaacgtaaacgtaaacgcgaaaaaaactcgaaaccaaaatcgacctacccaccgaacctatacgaaacgcgaatctacgcgaactac

SEQ ID NO: 20955 - DNA, 928 bp, Artificial Sequence
  chemically treated genomic DNA (Homo sapiens) CpG-island No: 20955
tatttgtttttttttggcgtcgttttggttgttgtttatagatgcggttggggcgggattggaggtcgcgttttttttggtaagggttttttcgaacgttcgcgggggtcggttcgcggtgaatagggggatttcggagggcgacggagtcgacgtttttgttgggagaggagattgttagcggtcgtttcgagatagtagatttcgttagcggcgacgtggaggttttttcggttttcggtacgtttttttcgaggtcgttattgtttcggttttcgtagtttttttttaacggtcgggggtcgcgttttattttttagttttgttagtatttttagttcggtcgcgaattggttgtggaaattattttcgacgtcgtatagtttttgttcgtagttttttatatcgttcgcgagttcgagttttcgtttcgaatttttcgcgtcgtcgtcgtcgtcgcgtattgttcgtttcgagcgtgtcgggcgtcgttaattagtagtcggcgtgttcggcggcgcgcgttattggttggcgtggcggaggcggggttgcgcgaggggtgggcggggcgagtttttgtttcgtagttttcgcgttttgttttggggagttcgttattggtcgtcgtagtcgttttttcgcggcgggggcgggtcgggggcgggtcgggggggggggcggggttgcgcgcgtagcggtgtagggcggaagcgttgttaggcgttcggagcggagtttttagggtttttgggtcgttagcgcgcgggcgcgcggttggagtcggcgtcgggtacggtatcgggggtttggattgtacggttcggtagtaggttggttttggcgtgggcgtgggcgcgggaggggttcggagttagggtcggtttgtttatcgggtttgtgcggggcgcgggtttgcgcggattgt

SEQ ID NO: 20956 - DNA, 928 bp, Artificial Sequence
  chemically treated genomic DNA (Homo sapiens) CpG-island No: 20956
acaatccgcgcaaacccgcgccccgcacaaacccgataaacaaaccgaccctaactccgaacccctcccgcgcccacgcccacgccaaaaccaacctactaccgaaccgtacaatccaaacccccgataccgtacccgacgccgactccaaccgcgcgcccgcgcgctaacgacccaaaaaccctaaaaactccgctccgaacgcctaacaacgcttccgccctacaccgctacgcgcgcaaccccgcccccccccccgacccgcccccgacccgcccccgccgcgaaaaaacgactacgacgaccaataacgaactccccaaaacaaaacgcgaaaactacgaaacaaaaactcgccccgcccacccctcgcgcaaccccgcctccgccacgccaaccaataacgcgcgccgccgaacacgccgactactaattaacgacgcccgacacgctcgaaacgaacaatacgcgacgacgacgacgacgcgaaaaattcgaaacgaaaactcgaactcgcgaacgatataaaaaactacgaacaaaaactatacgacgtcgaaaataatttccacaaccaattcgcgaccgaactaaaaatactaacaaaactaaaaaataaaacgcgacccccgaccgttaaaaaaaaactacgaaaaccgaaacaataacgacctcgaaaaaaacgtaccgaaaaccgaaaaaacctccacgtcgccgctaacgaaatctactatctcgaaacgaccgctaacaatctcctctcccaacaaaaacgtcgactccgtcgccctccgaaatccccctattcaccgcgaaccgacccccgcgaacgttcgaaaaaacccttaccaaaaaaaacgcgacctccaatcccgccccaaccgcatctataaacaacaaccaaaacgacgccaaaaaaaaacaaata

SEQ ID NO: 20957 - DNA, 646 bp, Artificial Sequence
  chemically treated genomic DNA (Homo sapiens) CpG-island No: 20957
gttcgcgaaggtcgcggcggggtcgggggcggagatcggggtcggagtgggaatcgcggataggtagcgggggtttagcgtagtgggtttcgcgggattcgcgtcgttttcgtttttttggagtttcgggtttttttcggtttttttttttaatataggttttgcggtttgatcggagttcgcggtttttacgtcgttatttatcgggttaagtagtattaggaagaagtcgtcgtcgtcgtcgtcgtcgtcgtcgttaggttgatcggttttcggcgttaataggtttgggttagggtttcgtgatgtcgtgttggttttttcgcgtcgtcgttcgggttcgttattttgggggtttcggagtagtaggaggcggcgcgtggggatttggttagtcggcgagttagggtttcggtggattcggtcgttattcgcggggatatcgtcgtcgtcgtcgttttgtagtgtttcgcgagtcgggagtagtttcgggatttttatttttgcgttcgagaggttcggttggaattagagtcgaggaggaggcgcgatttcgttttttgtcgcgggtttgaatacgtttttgaaaggggaaaaaaaaatgtgtaatgcgtagaaattggttttattagatattaaaacgtat

SEQ ID NO: 20958 - DNA, 646 bp, Artificial Sequence
  chemically treated genomic DNA (Homo sapiens) CpG-island No: 20958
atacgttttaatatctaataaaaccaatttctacgcattacacatttttttttcccctttcaaaaacgtattcaaacccgcgacaaaaaacgaaatcgcgcctcctcctcgactctaattccaaccgaacctctcgaacgcaaaaataaaaatcccgaaactactcccgactcgcgaaacactacaaaacgacgacgacgacgatatccccgcgaataacgaccgaatccaccgaaaccctaactcgccgactaaccaaatccccacgcgccgcctcctactactccgaaacccccaaaataacgaacccgaacgacgacgcgaaaaaaccaacacgacatcacgaaaccctaacccaaacctattaacgccgaaaaccgatcaacctaacgacgacgacgacgacgacgacgacgacttcttcctaatactacttaacccgataaataacgacgtaaaaaccgcgaactccgatcaaaccgcaaaacctatattaaaaaaaaaaaccgaaaaaaacccgaaactccaaaaaaacgaaaacgacgcgaatcccgcgaaacccactacgctaaacccccgctacctatccgcgattcccactccgaccccgatctccgcccccgaccccgccgcgaccttcgcgaac

SEQ ID NO: 20959 - DNA, 646 bp, Artificial Sequence
  chemically treated genomic DNA (Homo sapiens) CpG-island No: 20959
atacgttttaatatttgatagggttagtttttgcgtattgtatatttttttttttttttttaggaacgtgtttaggttcgcggtagggggcgggatcgcgtttttttttcggttttggttttagtcgagtttttcggacgtagagatggaaatttcgaagttgttttcggttcgcgggatattatagggcggcggcggcggcggtattttcgcgggtggcggtcgagtttatcgaggttttgattcgtcggttggttaggtttttacgcgtcgttttttgttgtttcggggtttttaagatggcgggttcgggcggcggcgcgaggaggttagtacggtattacggggttttggtttaagtttgttggcgtcgaggatcgattaatttagcggcggcggcggcggcggcggcgacgatttttttttggtgttgtttgattcggtgggtggcgacgtggagatcgcgggtttcggttaggtcgtagggtttgtgttgagggaggaggtcgaggagggttcggggttttaggggggcgagagcggcgcgaatttcgcggggtttattgcgttaggttttcgttgtttgttcgcggtttttatttcggtttcgattttcgttttcggtttcgtcgcggttttcgcgggt

SEQ ID NO: 20960 - DNA, 646 bp, Artificial Sequence
  chemically treated genomic DNA (Homo sapiens) CpG-island No: 20960
acccgcgaaaaccgcgacgaaaccgaaaacgaaaatcgaaaccgaaataaaaaccgcgaacaaacaacgaaaacctaacgcaataaaccccgcgaaattcgcgccgctctcgcccccctaaaaccccgaaccctcctcgacctcctccctcaacacaaaccctacgacctaaccgaaacccgcgatctccacgtcgccacccaccgaatcaaacaacaccaaaaaaaaatcgtcgccgccgccgccgccgccgccgctaaattaatcgatcctcgacgccaacaaacttaaaccaaaaccccgtaataccgtactaacctcctcgcgccgccgcccgaacccgccatcttaaaaaccccgaaacaacaaaaaacgacgcgtaaaaacctaaccaaccgacgaatcaaaacctcgataaactcgaccgccacccgcgaaaataccgccgccgccgccgccctataatatcccgcgaaccgaaaacaacttcgaaatttccatctctacgtccgaaaaactcgactaaaaccaaaaccgaaaaaaaaacgcgatcccgccccctaccgcgaacctaaacacgttcctaaaaaaaaaaaaaaaaatatacaatacgcaaaaactaaccctatcaaatattaaaacgtat

SEQ ID NO: 20961 - DNA, 1089 bp, Artificial Sequence
  chemically treated genomic DNA (Homo sapiens) CpG-island No: 20961
gttcgaggttttttatttagtcgatcggttttggggattttttttcgttggttcgggttacgcgtttcgggtatttattgtagagcgcgttcggtaatttcgaaaggtcggtcggggatttcggttgggagttaggattttagttttcgggcgcgattcgagaattttgaatttatttcgcgtatattcggtcgcgtgatttttgtcgatcggttggcgcgttatttatttttcgcggttcgcggattagttagtagttgttttagttcgggtttttttttttagttttttcgtcgattttcgtttttttgtagggtcgattttttagcgatcgtttttagagttagcggacggaattattttaaatagtttagtttcgtgttgagagttttttcggttttacgttgagattcgtttattttcgttttggttttttagatgttattttggttcgagtgttacgtcgggcgttttttagagaggattgggataagagttgcggacgcgaagaacgagtaagcggtggtttattttttttgattttattttcgtggtttggttcgatggtcgcgttcggggttgcgagatttgcgtttgcgtagtgcggcgtttagagggaaagcgagagggagacggacgttgagagaacgaggaggaaggagagaaaatggcgtttacgggtgagtatggtggaattgcggtcgcgtcggcggtagtcggaacgtttaaattgggggtcgttcgtttttgggtttggttgggaagattgagtggagttgtcgagagggggttgaggtattcgtcgcggttcgacgagttcggggattcgtatttttttttttttttttaatcgggcgggtcggttttggaatttttcggcgttcgtggcgcgcggggggtttgttgcggcgggggcgcgcggggttcgttttggtttttattgtgtggcggttttcgcgttttgagtttcgggtttttcgttacgtgggcggggtttgcggttttcgaggttttgcgtgaaggggaggatttggttaggttttaagtcggttattatgaaatcgtcggggggttcgtaggttgttgttt

SEQ ID NO: 20962 - DNA, 1089 bp, Artificial Sequence
  chemically treated genomic DNA (Homo sapiens) CpG-island No: 20962
aaacaacaacctacgaaccccccgacgatttcataataaccgacttaaaacctaaccaaatcctccccttcacgcaaaacctcgaaaaccgcaaaccccgcccacgtaacgaaaaacccgaaactcaaaacgcgaaaaccgccacacaataaaaaccaaaacgaaccccgcgcgcccccgccgcaacaaaccccccgcgcgccacgaacgccgaaaaattccaaaaccgacccgcccgattaaaaaaaaaaaaaaaaatacgaatccccgaactcgtcgaaccgcgacgaatacctcaaccccctctcgacaactccactcaatcttcccaaccaaacccaaaaacgaacgacccccaatttaaacgttccgactaccgccgacgcgaccgcaattccaccatactcacccgtaaacgccattttctctccttcctcctcgttctctcaacgtccgtctccctctcgctttccctctaaacgccgcactacgcaaacgcaaatctcgcaaccccgaacgcgaccatcgaaccaaaccacgaaaataaaatcaaaaaaaataaaccaccgcttactcgttcttcgcgtccgcaactcttatcccaatcctctctaaaaaacgcccgacgtaacactcgaaccaaaataacatctaaaaaaccaaaacgaaaataaacgaatctcaacgtaaaaccgaaaaaactctcaacacgaaactaaactatttaaaataattccgtccgctaactctaaaaacgatcgctaaaaaatcgaccctacaaaaaaacgaaaatcgacgaaaaaactaaaaaaaaaaacccgaactaaaacaactactaactaatccgcgaaccgcgaaaaataaataacgcgccaaccgatcgacaaaaatcacgcgaccgaatatacgcgaaataaattcaaaattctcgaatcgcgcccgaaaactaaaatcctaactcccaaccgaaatccccgaccgacctttcgaaattaccgaacgcgctctacaataaatacccgaaacgcgtaacccgaaccaacgaaaaaaaatccccaaaaccgatcgactaaataaaaaacctcgaac

SEQ ID NO: 20963 - DNA, 1089 bp, Artificial Sequence
  chemically treated genomic DNA (Homo sapiens) CpG-island No: 20963
ggatagtagtttgcgggtttttcggcggttttatagtgatcggtttgaggtttggttaaatttttttttttacgtagggtttcgaaggtcgtaggtttcgtttacgtggcgggaggttcggagtttagggcgcgaggatcgttatataatggaggttaaggcgggtttcgcgcgttttcgtcgtagtaagtttttcgcgcgttacgggcgtcggaagattttagaatcggttcgttcggttgggggaggggagaggaatgcggattttcgagttcgtcgggtcgcggcgggtgttttaattttttttcggtaattttatttagtttttttagttaagtttagagacgaacgatttttagtttgggcgtttcggttatcgtcggcgcgatcgtagttttattatatttattcgtggacgttattttttttttttttttttcgtttttttaacgttcgtttttttttcgttttttttttaggcgtcgtattgcgtaggcgtaaatttcgtaatttcgggcgcgattatcgggttaggttacgggggtggggttaggagggatgaattatcgtttattcgtttttcgcgttcgtaatttttgttttagttttttttaaagagcgttcgacgtgatattcgggttaaaatagtatttaaggggttagagcgggggtgagcgggttttagcgtgaaatcggagaggtttttagtacgagattaggttgtttggaatggtttcgttcgttggttttagggacggtcgttgaagagtcggttttgtagggagacggagatcggcgggagggttgggggaagggattcggattagaataattgttgattaattcgcgggtcgcggggaatgggtggcgcgttagtcggtcggtaggggttacgcggtcgggtgtgcgcggaatggatttagggttttcgggtcgcgttcgggagttagagttttgatttttagtcggggttttcgatcggtttttcggggttgtcgggcgcgttttgtagtgagtattcgggacgcgtggttcgggttagcggggaagggtttttaaggtcggtcggttgggtgggaggtttcgaat

SEQ ID NO: 20964 - DNA, 1089 bp, Artificial Sequence
  chemically treated genomic DNA (Homo sapiens) CpG-island No: 20964
attcgaaacctcccacccaaccgaccgaccttaaaaacccttccccgctaacccgaaccacgcgtcccgaatactcactacaaaacgcgcccgacaaccccgaaaaaccgatcgaaaaccccgactaaaaatcaaaactctaactcccgaacgcgacccgaaaaccctaaatccattccgcgcacacccgaccgcgtaacccctaccgaccgactaacgcgccacccattccccgcgacccgcgaattaatcaacaattattctaatccgaatcccttcccccaaccctcccgccgatctccgtctccctacaaaaccgactcttcaacgaccgtccctaaaaccaacgaacgaaaccattccaaacaacctaatctcgtactaaaaacctctccgatttcacgctaaaacccgctcacccccgctctaaccccttaaatactattttaacccgaatatcacgtcgaacgctctttaaaaaaaactaaaacaaaaattacgaacgcgaaaaacgaataaacgataattcatccctcctaaccccacccccgtaacctaacccgataatcgcgcccgaaattacgaaatttacgcctacgcaatacgacgcctaaaaaaaaaacgaaaaaaaaacgaacgttaaaaaaacgaaaaaaaaaaaaaaaaaataacgtccacgaataaatataataaaactacgatcgcgccgacgataaccgaaacgcccaaactaaaaatcgttcgtctctaaacttaactaaaaaaactaaataaaattaccgaaaaaaaattaaaacacccgccgcgacccgacgaactcgaaaatccgcattcctctcccctcccccaaccgaacgaaccgattctaaaatcttccgacgcccgtaacgcgcgaaaaacttactacgacgaaaacgcgcgaaacccgccttaacctccattatataacgatcctcgcgccctaaactccgaacctcccgccacgtaaacgaaacctacgaccttcgaaaccctacgtaaaaaaaaaaatttaaccaaacctcaaaccgatcactataaaaccgccgaaaaacccgcaaactactatcc

SEQ ID NO: 20965 - DNA, 571 bp, Artificial Sequence
  chemically treated genomic DNA (Homo sapiens) CpG-island No: 20965
gtcggaagagtttgagttgtatggtgcggcgtatttcgaggggattcgtaagagcgaagggcggagattagtttttcgggtttgggttacggtcggggatttaatcgattacgttcgggatgcggaggtttgagcgcgcgatcgggattagcgtattttggggggcggggagaggcggtgtagttgcggatcgcggtcgaggtatgttgcgggggtggttattttgtcgtcgcggtttcgtcgttagtaagtttcgttttatggttggtcgattgcggtatttacggtttttttttcgtttcgtttcggcggtcggtttgtcgttcgttttcgcgttgcgcgtttttattttcgtcggaagcggcgtcggagtagcgcggtagggcgcggaaattcgggcgggtggagtggtattaaacggagtgagatcggtttgtttagtcgttttttattttaatttatcgacgtattttattagggagattatattttttataattaacgttcgcgtttttgtttttgttgtttcggttatagttcgaaggatttttttttatgattagatgatttt

SEQ ID NO: 20966 - DNA, 571 bp, Artificial Sequence
  chemically treated genomic DNA (Homo sapiens) CpG-island No: 20966
aaaatcatctaatcataaaaaaaaatccttcgaactataaccgaaacaacaaaaacaaaaacgcgaacgttaattataaaaaatataatctccctaataaaatacgtcgataaattaaaataaaaaacgactaaacaaaccgatctcactccgtttaataccactccacccgcccgaatttccgcgccctaccgcgctactccgacgccgcttccgacgaaaataaaaacgcgcaacgcgaaaacgaacgacaaaccgaccgccgaaacgaaacgaaaaaaaaaccgtaaataccgcaatcgaccaaccataaaacgaaacttactaacgacgaaaccgcgacgacaaaataaccacccccgcaacatacctcgaccgcgatccgcaactacaccgcctctccccgccccccaaaatacgctaatcccgatcgcgcgctcaaacctccgcatcccgaacgtaatcgattaaatccccgaccgtaacccaaacccgaaaaactaatctccgcccttcgctcttacgaatcccctcgaaatacgccgcaccatacaactcaaactcttccgac

SEQ ID NO: 20967 - DNA, 571 bp, Artificial Sequence
  chemically treated genomic DNA (Homo sapiens) CpG-island No: 20967
ggggttatttagttataagggaaaatttttcgggttgtgatcgaagtaataaaggtaaaaacgcggacgttggttatgaagggtgtggtttttttggtggagtacgtcggtgggttgggatggggagcggttggatagatcggttttatttcgtttggtgttattttattcgttcgggttttcgcgttttgtcgcgttgtttcgacgtcgttttcggcggggatgggagcgcgtaacgcggaagcgggcggtagatcggtcgtcggggcgaggcgggggaggggtcgtgagtgtcgtagtcggttagttatggagcggagtttgttggcggcgaggtcgcggcgataaggtagttattttcgtagtatgtttcgatcgcggttcgtagttgtatcgttttttttcgttttttagggtgcgttggtttcggtcgcgcgtttagattttcgtatttcgggcgtggtcggttaagttttcggtcgtgatttaggttcggggagttagttttcgtttttcgtttttacggattttttcggagtacgtcgtattatgtagtttaggttttttcggt

SEQ ID NO: 20968 - DNA, 571 bp, Artificial Sequence
  chemically treated genomic DNA (Homo sapiens) CpG-island No: 20968
accgaaaaaacctaaactacataatacgacgtactccgaaaaaatccgtaaaaacgaaaaacgaaaactaactccccgaacctaaatcacgaccgaaaacttaaccgaccacgcccgaaatacgaaaatctaaacgcgcgaccgaaaccaacgcaccctaaaaaacgaaaaaaaacgatacaactacgaaccgcgatcgaaacatactacgaaaataactaccttatcgccgcgacctcgccgccaacaaactccgctccataactaaccgactacgacactcacgacccctcccccgcctcgccccgacgaccgatctaccgcccgcttccgcgttacgcgctcccatccccgccgaaaacgacgtcgaaacaacgcgacaaaacgcgaaaacccgaacgaataaaataacaccaaacgaaataaaaccgatctatccaaccgctccccatcccaacccaccgacgtactccaccaaaaaaaccacacccttcataaccaacgtccgcgtttttacctttattacttcgatcacaacccgaaaaattttcccttataactaaataacccc

SEQ ID NO: 20969 - DNA, 683 bp, Artificial Sequence
  chemically treated genomic DNA (Homo sapiens) CpG-island No: 20969
ttgcggacggatgcggtgttggtatggcgagcgggaggaggggcgtgtggaggaggggttcgtggaggaggggcgagtgggaggaggggcgcgtggagggggggcgtgtgggggggtgcgtggaggaggggcgcgtggaggaggggcgcgtggaggggggagcgtggggggcgtggaggaggggcgcgtggaggaggggcgcgtggaggggggagcgtggggggcgtggaggaggggcgcgtggaggggggagtgtgggggggcgtggaggaggaggggcgtatgggggggtgtggaggggggcgcgtggaggaggggcgcgtggaggggggagcgtggggggcgtggaggaggggcgcgtggaggggggcgcgtggggggggcgtatgggggggcgtggaggggggtgcgtggaggaggggcgcgtggaggaggaggggcgtatgggggggtgtggaggggggcgcgtggagggggtacgtggaggggtcgcgtggaggaggggcgcgtggagggggtcgtgtgggggggcgtggaggggggcgcgtggaggaggaggggcgtatgggggggtgtggaggggggcgcgtggagggggcgcgtggaggaggggtatatggaggggggggtaagtggagaagttttggtggaggggcgtatggaggaggggttaacggggggtg

SEQ ID NO: 20970 - DNA, 683 bp, Artificial Sequence
  chemically treated genomic DNA (Homo sapiens) CpG-island No: 20970
caccccccgttaacccctcctccatacgcccctccaccaaaacttctccacttacccccccctccatatacccctcctccacgcgccccctccacgcgcccccctccacacccccccatacgcccctcctcctccacgcgcccccctccacgcccccccacacgaccccctccacgcgcccctcctccacgcgacccctccacgtaccccctccacgcgcccccctccacacccccccatacgcccctcctcctccacgcgcccctcctccacgcacccccctccacgcccccccatacgccccccccacgcgcccccctccacgcgcccctcctccacgccccccacgctcccccctccacgcgcccctcctccacgcgcccccctccacacccccccatacgcccctcctcctccacgcccccccacactcccccctccacgcgcccctcctccacgccccccacgctcccccctccacgcgcccctcctccacgcgcccctcctccacgccccccacgctcccccctccacgcgcccctcctccacgcgcccctcctccacgcacccccccacacgccccccctccacgcgcccctcctcccactcgcccctcctccacgaacccctcctccacacgcccctcctcccgctcgccataccaacaccgcatccgtccgcaa

SEQ ID NO: 20971 - DNA, 683 bp, Artificial Sequence
  chemically treated genomic DNA (Homo sapiens) CpG-island No: 20971
tatttttcgttggttttttttttatgcgtttttttattagggtttttttatttgtttttttttttatgtgttttttttttacgcgttttttttacgcgtttttttttatatttttttatgcgtttttttttttttacgcgtttttttttacgtttttttatacggttttttttacgcgttttttttttacgcgatttttttacgtgttttttttacgcgtttttttttatatttttttatgcgtttttttttttttacgcgttttttttttacgtatttttttttacgtttttttatgcgttttttttacgcgtttttttttacgcgttttttttttacgttttttacgtttttttttttacgcgttttttttttacgcgtttttttttatatttttttatgcgtttttttttttttacgtttttttatatttttttttttacgcgttttttttttacgttttttacgtttttttttttacgcgttttttttttacgcgttttttttttacgttttttacgtttttttttttacgcgttttttttttacgcgttttttttttacgtatttttttatacgttttttttttacgcgtttttttttttattcgttttttttttacgggttttttttttatacgttttttttttcgttcgttatattagtatcgtattcgttcgtag

SEQ ID NO: 20972 - DNA, 683 bp, Artificial Sequence
  chemically treated genomic DNA (Homo sapiens) CpG-island No: 20972
ctacgaacgaatacgatactaatataacgaacgaaaaaaaaaacgtataaaaaaaaaacccgtaaaaaaaaaacgaataaaaaaaaaaacgcgtaaaaaaaaaacgtataaaaaaatacgtaaaaaaaaaacgcgtaaaaaaaaaacgcgtaaaaaaaaaaacgtaaaaaacgtaaaaaaaaaacgcgtaaaaaaaaaacgcgtaaaaaaaaaaacgtaaaaaacgtaaaaaaaaaacgcgtaaaaaaaaaaatataaaaaaacgtaaaaaaaaaaaaacgcataaaaaaatataaaaaaaaacgcgtaaaaaaaaaacgcgtaaaaaaaaaaacgtaaaaaacgtaaaaaaaaaacgcgtaaaaaaaaacgcgtaaaaaaaacgcataaaaaaacgtaaaaaaaaatacgtaaaaaaaaaacgcgtaaaaaaaaaaaaacgcataaaaaaatataaaaaaaaacgcgtaaaaaaaacacgtaaaaaaatcgcgtaaaaaaaaaacgcgtaaaaaaaaccgtataaaaaaacgtaaaaaaaaacgcgtaaaaaaaaaaaaacgcataaaaaaatataaaaaaaaacgcgtaaaaaaaacgcgtaaaaaaaaaacacataaaaaaaaaaacaaataaaaaaaccctaataaaaaaacgcataaaaaaaaaaccaacgaaaaata

SEQ ID NO: 20973 - DNA, 598 bp, Artificial Sequence
  chemically treated genomic DNA (Homo sapiens) CpG-island No: 20973
gttttttcgtattggttttgtaatcgttttcgttagacgcgttttcgttttttgtttttcggaaaggtgttcgttttttgtttttcggttcggcgttcgattttcgtttttcgatttagttgtgggttgcgttttacgttagttcgcgtttcgtatggttgtcgtcggggttaggtttgtggagttgggtttcgtcgagtcggcgtcggcgtggcgattgcgtagcgagtagttttttagtaaggtgggcgggcggtcggtatggttgggcgcggtcgggttgtcggggttttaggttttggtttgcgagttgtgcggtcgttcgtttttttttttgttgtaggtgtatgcgtcgttgtttggtcgttcggacgttttttatcgttgtattttttttttttgttgtcgcgagtagtcgtgttgtgtcggtttgcgaggtgagtcgttaaacggggtcgggacggggttatgttttcgacgcgtgcgcggcgttaatttcgggagcgattagggggacggcggtaagtatcgttgtcgttttagttttagagtttttttttcgcgttgttttaggagtattttttttcgggttttttta

SEQ ID NO: 20974 - DNA, 598 bp, Artificial Sequence
  chemically treated genomic DNA (Homo sapiens) CpG-island No: 20974
taaaaaaacccgaaaaaaaatactcctaaaacaacgcgaaaaaaaaactctaaaactaaaacgacaacgatacttaccgccgtccccctaatcgctcccgaaattaacgccgcgcacgcgtcgaaaacataaccccgtcccgaccccgtttaacgactcacctcgcaaaccgacacaacacgactactcgcgacaacaaaaaaaaaaaatacaacgataaaaaacgtccgaacgaccaaacaacgacgcatacacctacaacaaaaaaaaaaacgaacgaccgcacaactcgcaaaccaaaacctaaaaccccgacaacccgaccgcgcccaaccataccgaccgcccgcccaccttactaaaaaactactcgctacgcaatcgccacgccgacgccgactcgacgaaacccaactccacaaacctaaccccgacgacaaccatacgaaacgcgaactaacgtaaaacgcaacccacaactaaatcgaaaaacgaaaatcgaacgccgaaccgaaaaacaaaaaacgaacacctttccgaaaaacaaaaaacgaaaacgcgtctaacgaaaacgattacaaaaccaatacgaaaaaac

SEQ ID NO: 20975 - DNA, 598 bp, Artificial Sequence
  chemically treated genomic DNA (Homo sapiens) CpG-island No: 20975
tggaagggttcgggagaaggtgtttttggggtagcgcggagagggagttttgaggttggggcggtagcggtgtttgtcgtcgtttttttggtcgttttcggaattaacgtcgcgtacgcgtcggaggtatggtttcgtttcgatttcgtttggcggtttatttcgtaggtcggtatagtacggttgttcgcggtagtagaagaggaagatgtagcggtggaaggcgttcgggcggttaggtagcggcgtatatatttgtagtaggaaggagagcgggcggtcgtatagttcgtaggttagggtttggggtttcggtagttcggtcgcgtttagttatgtcggtcgttcgtttattttgttggggaattgttcgttgcgtagtcgttacgtcggcgtcgattcggcgaagtttagttttataggtttggtttcggcggtagttatgcggggcgcgggttggcgtggggcgtagtttatagttgggtcggaaggcggaaatcgggcgtcgggtcggaaggtaagaggcgggtattttttcggaggataggaggcggaaacgcgtttgacgggagcggttgtaggattaatgcgagggaat

SEQ ID NO: 20976 - DNA, 598 bp, Artificial Sequence
  chemically treated genomic DNA (Homo sapiens) CpG-island No: 20976
attccctcgcattaatcctacaaccgctcccgtcaaacgcgtttccgcctcctatcctccgaaaaaatacccgcctcttaccttccgacccgacgcccgatttccgccttccgacccaactataaactacgccccacgccaacccgcgccccgcataactaccgccgaaaccaaacctataaaactaaacttcgccgaatcgacgccgacgtaacgactacgcaacgaacaattccccaacaaaataaacgaacgaccgacataactaaacgcgaccgaactaccgaaaccccaaaccctaacctacgaactatacgaccgcccgctctccttcctactacaaatatatacgccgctacctaaccgcccgaacgccttccaccgctacatcttcctcttctactaccgcgaacaaccgtactataccgacctacgaaataaaccgccaaacgaaatcgaaacgaaaccatacctccgacgcgtacgcgacgttaattccgaaaacgaccaaaaaaacgacgacaaacaccgctaccgccccaacctcaaaactccctctccgcgctaccccaaaaacaccttctcccgaacccttcca

SEQ ID NO: 20977 - DNA, 932 bp, Artificial Sequence
  chemically treated genomic DNA (Homo sapiens) CpG-island No: 20977
cgcgttttttagtttcgcggggggtagacgacggcgggcggggcgcgtagagtatattcgattttcggcggtcgggagcgattacgcgtacgtcgcgcgggttcgggggcgggggcggggcgcgcggttttcgttagggtttaagttttattttcgggggcggtgtttggttcggggagtgttaggaagaggaagagcgcggtcggcggcgttgcgttgagagtaggggttcggttaaggcgagtgtcgcgcgggttattatggttacggacgagttggttattaagttgagtcggcggttgtagatggagggcgagggcggcggcgagatttcggagtagttcgggttgaacggggtagcggcggcggcggcgggggtattcgacgaggcggtcgaggcgttgggtagcgcggattgcgagttgagcgttaagttgttgcggcgcgtagattttaattagggtatcggcgagttttagtcgtttagtcgtcgcgtttttaatttttatatcgagtttaaggagttttttaggaagtagattaaggatatggagaagatgtttaagtagtaagtgttcgcgcgattcggtttttcgttcgtttcgcgattcggtttcgggtttcgaatttttcgattttcggatttcgtttcgtttcgggagtttgtcgttagttaagttttttcgaatttagacgtatcggggttggggattcggcggttttttttagatcgagattcggtattttatcgcgtacgttagtttgggggattttcggtttttggtacgcggcggagattcgtatttgtgttgttttcggtatattatagacgcgtttatagagtgggggattttaggtttttttttagataatcgttaggtttcgcgagttttatttttattattatacgtgtgggtttcgggtttttcgcg

SEQ ID NO: 20978 - DNA, 932 bp, Artificial Sequence
  chemically treated genomic DNA (Homo sapiens) CpG-island No: 20978
cgcgaaaaacccgaaacccacacgtataataataaaaataaaactcgcgaaacctaacgattatctaaaaaaaaacctaaaatcccccactctataaacgcgtctataatataccgaaaacaacacaaatacgaatctccgccgcgtaccaaaaaccgaaaatcccccaaactaacgtacgcgataaaataccgaatctcgatctaaaaaaaaccgccgaatccccaaccccgatacgtctaaattcgaaaaaacttaactaacgacaaactcccgaaacgaaacgaaatccgaaaatcgaaaaattcgaaacccgaaaccgaatcgcgaaacgaacgaaaaaccgaatcgcgcgaacacttactacttaaacatcttctccatatccttaatctacttcctaaaaaactccttaaactcgatataaaaattaaaaacgcgacgactaaacgactaaaactcgccgataccctaattaaaatctacgcgccgcaacaacttaacgctcaactcgcaatccgcgctacccaacgcctcgaccgcctcgtcgaatacccccgccgccgccgccgctaccccgttcaacccgaactactccgaaatctcgccgccgccctcgccctccatctacaaccgccgactcaacttaataaccaactcgtccgtaaccataataacccgcgcgacactcgccttaaccgaacccctactctcaacgcaacgccgccgaccgcgctcttcctcttcctaacactccccgaaccaaacaccgcccccgaaaataaaacttaaaccctaacgaaaaccgcgcgccccgcccccgcccccgaacccgcgcgacgtacgcgtaatcgctcccgaccgccgaaaatcgaatatactctacgcgccccgcccgccgtcgtctaccccccgcgaaactaaaaaacgcg

SEQ ID NO: 20979 - DNA, 932 bp, Artificial Sequence
  chemically treated genomic DNA (Homo sapiens) CpG-island No: 20979
cgcggagggttcgggatttatacgtgtggtggtgggggtggggttcgcggggtttggcgattatttggaaggaagtttggggttttttattttgtggacgcgtttatggtgtatcggaggtagtataaatacgagttttcgtcgcgtgttaggggtcgggggttttttagattaacgtgcgcggtgagatgtcgggtttcgatttggaaggggtcgtcgggtttttaatttcggtgcgtttgggttcggggaagtttggttgacggtaggttttcggggcggagcgggattcggggatcggggggttcggggttcgagatcgggtcgcggggcgggcggggggtcgggtcgcgcgggtatttattgtttgaatattttttttatgtttttgatttgttttttggagaattttttgaattcggtgtaggggttgaagacgcggcggttgggcgattggggttcgtcgatgttttggttgaggtttgcgcgtcgtagtagtttggcgtttagttcgtagttcgcgttgtttagcgtttcggtcgtttcgtcgggtgttttcgtcgtcgtcgtcgttgtttcgtttagttcgggttgtttcggggtttcgtcgtcgttttcgttttttatttgtagtcgtcggtttagtttggtggttagttcgttcgtggttatggtggttcgcgcggtattcgttttggtcgggtttttgtttttagcgtagcgtcgtcggtcgcgttttttttttttttgatatttttcgggttaggtatcgttttcgaaggtgggatttgggttttggcggggatcgcgcgtttcgttttcgttttcgggttcgcgcggcgtgcgcgtgatcgttttcggtcgtcgggggtcgagtgtattttgcgcgtttcgttcgtcgtcgtttgtttttcgcgaggttggggagcgcg

SEQ ID NO: 20980 - DNA, 932 bp, Artificial Sequence
  chemically treated genomic DNA (Homo sapiens) CpG-island No: 20980
cgcgctccccaacctcgcgaaaaacaaacgacgacgaacgaaacgcgcaaaatacactcgacccccgacgaccgaaaacgatcacgcgcacgccgcgcgaacccgaaaacgaaaacgaaacgcgcgatccccgccaaaacccaaatcccaccttcgaaaacgatacctaacccgaaaaatatcaaaaaaaaaaaaaacgcgaccgacgacgctacgctaaaaacaaaaacccgaccaaaacgaataccgcgcgaaccaccataaccacgaacgaactaaccaccaaactaaaccgacgactacaaataaaaaacgaaaacgacgacgaaaccccgaaacaacccgaactaaacgaaacaacgacgacgacgacgaaaacacccgacgaaacgaccgaaacgctaaacaacgcgaactacgaactaaacgccaaactactacgacgcgcaaacctcaaccaaaacatcgacgaaccccaatcgcccaaccgccgcgtcttcaacccctacaccgaattcaaaaaattctccaaaaaacaaatcaaaaacataaaaaaaatattcaaacaataaatacccgcgcgacccgaccccccgcccgccccgcgacccgatctcgaaccccgaaccccccgatccccgaatcccgctccgccccgaaaacctaccgtcaaccaaacttccccgaacccaaacgcaccgaaattaaaaacccgacgaccccttccaaatcgaaacccgacatctcaccgcgcacgttaatctaaaaaacccccgacccctaacacgcgacgaaaactcgtatttatactacctccgatacaccataaacgcgtccacaaaataaaaaaccccaaacttccttccaaataatcgccaaaccccgcgaaccccacccccaccaccacacgtataaatcccgaaccctccgcg

SEQ ID NO: 20981 - DNA, 535 bp, Artificial Sequence
  chemically treated genomic DNA (Homo sapiens) CpG-island No: 20981
taggttttcggttcggttcggttcggttcggaggtcgatgtttcgcggtagtgttttcgcgggttttgcggattcggcgttcgcggggtttatagcgttgtttagtttgtggacgtggagttcgggtcgtatcgtcgtatacgtttcgggtatttttgcgttacgtcgcgcgtttttacggtttcgtttcgtggcgtaattcggggcggggtcgttattttcgattggtcggcgcgttgttattacgtcgcgggaagttggtagggtgtgtgtttgtgtgcgtgtggggtttgttttgttattcgtattttcggtgcgcgttgacgcggtcggtttggtcgagttttttagtattcgtagaagggttttcggcgttgtttttgggatgtttttttatataatgacgcgattggttgaagcgtacgttagcgtagatatcgtatatgtcgtaaattcgggtttttcgattttatatattgttagacgagagtttataatgttatgtcgtacggtatgttttagtagggattataat

SEQ ID NO: 20982 - DNA, 535 bp, Artificial Sequence
  chemically treated genomic DNA (Homo sapiens) CpG-island No: 20982
attataatccctactaaaacataccgtacgacataacattataaactctcgtctaacaatatataaaatcgaaaaacccgaatttacgacatatacgatatctacgctaacgtacgcttcaaccaatcgcgtcattatataaaaaaacatcccaaaaacaacgccgaaaacccttctacgaatactaaaaaactcgaccaaaccgaccgcgtcaacgcgcaccgaaaatacgaataacaaaacaaaccccacacgcacacaaacacacaccctaccaacttcccgcgacgtaataacaacgcgccgaccaatcgaaaataacgaccccgccccgaattacgccacgaaacgaaaccgtaaaaacgcgcgacgtaacgcaaaaatacccgaaacgtatacgacgatacgacccgaactccacgtccacaaactaaacaacgctataaaccccgcgaacgccgaatccgcaaaacccgcgaaaacactaccgcgaaacatcgacctccgaaccgaaccgaaccgaaccgaaaaccta

SEQ ID NO: 20983 - DNA, 535 bp, Artificial Sequence
  chemically treated genomic DNA (Homo sapiens) CpG-island No: 20983
attgtaatttttattagagtatatcgtacggtatggtattgtaggttttcgtttagtaatgtatgaaatcggaaggttcgggtttgcggtatgtgcggtgtttgcgttgacgtgcgttttagttagtcgcgttattatgtaagggagtattttaggaatagcgtcggggatttttttgcggatgttggagagttcggttaggtcgatcgcgttagcgcgtatcgggggtacgaatgataaagtaaattttatacgtatatagatatatattttgttagtttttcgcgacgtggtgatagcgcgtcggttaatcggaggtggcggtttcgtttcgggttacgttacggggcggagtcgtgggggcgcgcgacgtagcgtagagatgttcggggcgtgtgcggcggtgcggttcgggttttacgtttataggttgggtagcgttgtgggtttcgcgggcgtcgagttcgtaggattcgcgagggtattatcgcgaagtatcggttttcgggtcgggtcgggtcggatcgggagtttg

SEQ ID NO: 20984 - DNA, 535 bp, Artificial Sequence
  chemically treated genomic DNA (Homo sapiens) CpG-island No: 20984
caaactcccgatccgacccgacccgacccgaaaaccgatacttcgcgataataccctcgcgaatcctacgaactcgacgcccgcgaaacccacaacgctacccaacctataaacgtaaaacccgaaccgcaccgccgcacacgccccgaacatctctacgctacgtcgcgcgcccccacgactccgccccgtaacgtaacccgaaacgaaaccgccacctccgattaaccgacgcgctatcaccacgtcgcgaaaaactaacaaaatatatatctatatacgtataaaatttactttatcattcgtacccccgatacgcgctaacgcgatcgacctaaccgaactctccaacatccgcaaaaaaatccccgacgctattcctaaaatactcccttacataataacgcgactaactaaaacgcacgtcaacgcaaacaccgcacataccgcaaacccgaaccttccgatttcatacattactaaacgaaaacctacaataccataccgtacgatatactctaataaaaattacaat

SEQ ID NO: 20985 - DNA, 614 bp, Artificial Sequence
  chemically treated genomic DNA (Homo sapiens) CpG-island No: 20985
cggcggcggtagttgaggtgagagacggcggcggcggcgcgggtattcggttttttagcgggaggatgaagcggcggaacgtcgattgtagtaagtttcgtcgttttttaaagcggaatcggattatcgagggtatttacggtaggtgagcggttgtatttttatttcgcgggcgcgggttttgcggtttttttttagtttcgaggggtttggtttcgttatgtaatttcgagtaggtcgtacgttcgcgtcgggggtttttttaaggagcgttggtttcggagtcgttggttcgttcgtcggggttcgtttcgggtgcgcggggcgtggcgagggtcggttcggtcgggcgggtagggcgcggcgggcgttggttgagggagtcgtcgcgtcgtcgttggaagcgtcgggttcgtcggggggaggggcggagagtttttaattagttcggcgttttttagtatttcggttatgtcgttgggtcgggagggtcgttttcgggatttttgattggtcgtcgttggttttcgagtttttcggtggtttgggggtttgtcggtcggagttaggaggcgcgtggattatagcgcgggggggtgggggaggttgataaa

SEQ ID NO: 20986 - DNA, 614 bp, Artificial Sequence
  chemically treated genomic DNA (Homo sapiens) CpG-island No: 20986
tttatcaacctcccccacccccccgcgctataatccacgcgcctcctaactccgaccgacaaacccccaaaccaccgaaaaactcgaaaaccaacgacgaccaatcaaaaatcccgaaaacgaccctcccgacccaacgacataaccgaaatactaaaaaacgccgaactaattaaaaactctccgcccctccccccgacgaacccgacgcttccaacgacgacgcgacgactccctcaaccaacgcccgccgcgccctacccgcccgaccgaaccgaccctcgccacgccccgcgcacccgaaacgaaccccgacgaacgaaccaacgactccgaaaccaacgctccttaaaaaaacccccgacgcgaacgtacgacctactcgaaattacataacgaaaccaaacccctcgaaactaaaaaaaaaccgcaaaacccgcgcccgcgaaataaaaatacaaccgctcacctaccgtaaataccctcgataatccgattccgctttaaaaaacgacgaaacttactacaatcgacgttccgccgcttcatcctcccgctaaaaaaccgaatacccgcgccgccgccgccgtctctcacctcaactaccgccgccg

SEQ ID NO: 20987 - DNA, 614 bp, Artificial Sequence
  chemically treated genomic DNA (Homo sapiens) CpG-island No: 20987
tttgttagttttttttattttttcgcgttgtggtttacgcgttttttggtttcggtcggtaagtttttaggttatcggggggttcgggggttagcggcggttagttagaggtttcggaagcggttttttcggtttagcggtatggtcgggatgttgaggaacgtcgggttggttgggggtttttcgttttttttttcggcgggttcggcgtttttaacggcggcgcggcggtttttttagttagcgttcgtcgcgttttgttcgttcggtcgggtcgattttcgttacgtttcgcgtattcggggcggatttcggcgggcgggttagcggtttcggggttagcgttttttaggagagttttcggcgcgggcgtgcggtttattcggggttatataacggggttaggtttttcggagttggagggggatcgtagggttcgcgttcgcggagtgggggtgtagtcgtttatttgtcgtaaatgttttcggtgattcggtttcgttttagggggcggcggagtttattgtagtcggcgtttcgtcgttttattttttcgttggggggtcgggtgttcgcgtcgtcgtcgtcgttttttattttagttgtcgtcgtcg

SEQ ID NO: 20988 - DNA, 614 bp, Artificial Sequence
  chemically treated genomic DNA (Homo sapiens) CpG-island No: 20988
cgacgacgacaactaaaataaaaaacgacgacgacgacgcgaacacccgaccccccaacgaaaaaataaaacgacgaaacgccgactacaataaactccgccgccccctaaaacgaaaccgaatcaccgaaaacatttacgacaaataaacgactacacccccactccgcgaacgcgaaccctacgatccccctccaactccgaaaaacctaaccccgttatataaccccgaataaaccgcacgcccgcgccgaaaactctcctaaaaaacgctaaccccgaaaccgctaacccgcccgccgaaatccgccccgaatacgcgaaacgtaacgaaaatcgacccgaccgaacgaacaaaacgcgacgaacgctaactaaaaaaaccgccgcgccgccgttaaaaacgccgaacccgccgaaaaaaaaaacgaaaaacccccaaccaacccgacgttcctcaacatcccgaccataccgctaaaccgaaaaaaccgcttccgaaacctctaactaaccgccgctaacccccgaaccccccgataacctaaaaacttaccgaccgaaaccaaaaaacgcgtaaaccacaacgcgaaaaaataaaaaaaactaacaaa

SEQ ID NO: 20989 - DNA, 827 bp, Artificial Sequence
  chemically treated genomic DNA (Homo sapiens) CpG-island No: 20989
tttgcgtcgtagggggttattgttttagtcgttttagtttaagacgcgcgtattttcgtagttttagatttttttattattttttagatcggagttggcgcgtttaataaggtgttaggttcgcggttttttcgttatcgattaattacgagcgagttttttcgtcgtcgtttttcgttaatgggagaaagttcgcgggtcgggtcgacgaggtatacggattttacgagcgcggcggcggcgatagtagcgggttaggtaagagtataatatggcggcgggtaggacggatcgagttatagtagcggtcgcgcgaggaagtgaggtttttggcgaaggcgggaagcgttgttttttttttcgtcgtcgtttttttattattttcgtatagaaattttcgtatatttatatatttttgtttaggagtttaggaagagtaggagtcgttttcgcgtttttacggagtcgggtaatgtagaggtttaggcgcggcggaggggagggggaagtgtgcgttacggagaacggagcgcgcgcgaagcgggggtataagtaagatggcggttacgtcgtttgtatcgtttttttttttttttttttttttttttggcgtttggatttttagtatcgtgcggtgcgtagaagttgtgttttttgaggtttcgcgagaattgggaaggggcgacgatagagggaggcggaatgagatttgagagttttaatttcgttttttttcgggagttcgagatttgagttttgatttcgttttttttcgggggattcggaggcgttgtttagtgatttttattattttgtttatttttgtg

SEQ ID NO: 20990 - DNA, 827 bp, Artificial Sequence
  chemically treated genomic DNA (Homo sapiens) CpG-island No: 20990
cacaaaaataaacaaaataataaaaatcactaaacaacgcctccgaatcccccgaaaaaaaacgaaatcaaaactcaaatctcgaactcccgaaaaaaaacgaaattaaaactctcaaatctcattccgcctccctctatcgtcgccccttcccaattctcgcgaaacctcaaaaaacacaacttctacgcaccgcacgatactaaaaatccaaacgccaaaaaaaaaaaaaaaaaaaaaaaaaaacgatacaaacgacgtaaccgccatcttacttatacccccgcttcgcgcgcgctccgttctccgtaacgcacacttccccctcccctccgccgcgcctaaacctctacattacccgactccgtaaaaacgcgaaaacgactcctactcttcctaaactcctaaacaaaaatatataaatatacgaaaatttctatacgaaaataataaaaaaacgacgacgaaaaaaaaaacaacgcttcccgccttcgccaaaaacctcacttcctcgcgcgaccgctactataactcgatccgtcctacccgccgccatattatactcttacctaacccgctactatcgccgccgccgcgctcgtaaaatccgtatacctcgtcgacccgacccgcgaactttctcccattaacgaaaaacgacgacgaaaaaactcgctcgtaattaatcgataacgaaaaaaccgcgaacctaacaccttattaaacgcgccaactccgatctaaaaaataataaaaaaatctaaaactacgaaaatacgcgcgtcttaaactaaaacgactaaaacaataaccccctacgacgcaaa

SEQ ID NO: 20991 - DNA, 827 bp, Artificial Sequence
  chemically treated genomic DNA (Homo sapiens) CpG-island No: 20991
tataaggataggtagggtggtggaggttattgggtagcgttttcggatttttcgaaagggggcggggttaaaatttagatttcgagttttcgaaagggggcggggttaaaatttttagattttatttcgtttttttttgtcgtcgtttttttttaattttcgcgagattttaaggagtatagtttttgcgtatcgtacgatattgggagtttaggcgttaagggagggggaagggaaaaggggaaacggtgtaaacggcgtggtcgttattttgtttgtgttttcgtttcgcgcgcgtttcgtttttcgtgacgtatatttttttttttttttcgtcgcgtttgggtttttgtattgttcgatttcgtaggagcgcgggggcggtttttgttttttttggatttttgagtagaggtgtgtgagtgtgcgggagtttttgtgcgagggtgatagggaagcggcggcggggggaggggtagcgtttttcgttttcgttagagattttattttttcgcgcggtcgttgttgtagttcggttcgttttgttcgtcgttatgttgtgtttttgtttggttcgttgttgtcgtcgtcgtcgcgttcgtggggttcgtgtgtttcgtcggttcggttcgcgggtttttttttattggcggaaggcgacggcgggggggttcgttcgtgattggtcggtggcggggaggtcgcggatttggtattttattggacgcgttagtttcggtttagggggtgatgaaggaatttgaggttgcggggatgcgcgcgttttgggttagggcggttggggtaatgattttttgcggcgtagg

SEQ ID NO: 20992 - DNA, 827 bp, Artificial Sequence
  chemically treated genomic DNA (Homo sapiens) CpG-island No: 20992
cctacgccgcaaaaaatcattaccccaaccgccctaacccaaaacgcgcgcatccccgcaacctcaaattccttcatcaccccctaaaccgaaactaacgcgtccaataaaataccaaatccgcgacctccccgccaccgaccaatcacgaacgaacccccccgccgtcgccttccgccaataaaaaaaaacccgcgaaccgaaccgacgaaacacacgaaccccacgaacgcgacgacgacgacaacaacgaaccaaacaaaaacacaacataacgacgaacaaaacgaaccgaactacaacaacgaccgcgcgaaaaaataaaatctctaacgaaaacgaaaaacgctacccctccccccgccgccgcttccctatcaccctcgcacaaaaactcccgcacactcacacacctctactcaaaaatccaaaaaaaacaaaaaccgcccccgcgctcctacgaaatcgaacaatacaaaaacccaaacgcgacgaaaaaaaaaaaaaaatatacgtcacgaaaaacgaaacgcgcgcgaaacgaaaacacaaacaaaataacgaccacgccgtttacaccgtttccccttttcccttccccctcccttaacgcctaaactcccaatatcgtacgatacgcaaaaactatactccttaaaatctcgcgaaaattaaaaaaaaacgacgacaaaaaaaaacgaaataaaatctaaaaattttaaccccgccccctttcgaaaactcgaaatctaaattttaaccccgccccctttcgaaaaatccgaaaacgctacccaataacctccaccaccctacctatccttata

SEQ ID NO: 20993 - DNA, 504 bp, Artificial Sequence
  chemically treated genomic DNA (Homo sapiens) CpG-island No: 20993
cgttttcggtttattttcgtttcggtttcgttttttttcgttttattatcggtttggtttcgttttttagtttcgttttattttttatcgttttttttttcgtttttgatttcgttttttttttgattcggttttgttcgtttcgtttttgattaggttttcgttttttattttttatcgttttttttttcgtttttggttcggtttcgttttttttcgttttttagtttatttttcggtttagttcgcgtcgtcggtatttgttttcgggcgggtttttagaggtcggcgtataagatggcggttttggcggtttaaagaaggcggtcgcggtttagtcgtgggttttaacgcggggttgggggtcggagatagatttcgtttaggtgacgggtagtaggggcggcgtcgtttggtttcgtggggtgtaagatttatttgttgttgttttcggattttgtcgttatattagttttgttttggggcggaatcgaaggaaggtcg

SEQ ID NO: 20994 - DNA, 504 bp, Artificial Sequence
  chemically treated genomic DNA (Homo sapiens) CpG-island No: 20994
cgaccttccttcgattccgccccaaaacaaaactaatataacgacaaaatccgaaaacaacaacaaataaatcttacaccccacgaaaccaaacgacgccgcccctactacccgtcacctaaacgaaatctatctccgacccccaaccccgcgttaaaacccacgactaaaccgcgaccgccttctttaaaccgccaaaaccgccatcttatacgccgacctctaaaaacccgcccgaaaacaaataccgacgacgcgaactaaaccgaaaaataaactaaaaaacgaaaaaaaacgaaaccgaaccaaaaacgaaaaaaaaaacgataaaaaataaaaaacgaaaacctaatcaaaaacgaaacgaacaaaaccgaatcaaaaaaaaaacgaaatcaaaaacgaaaaaaaaaacgataaaaaataaaacgaaactaaaaaacgaaaccaaaccgataataaaacgaaaaaaaacgaaaccgaaacgaaaataaaccgaaaacg

SEQ ID NO: 20995 - DNA, 504 bp, Artificial Sequence
  chemically treated genomic DNA (Homo sapiens) CpG-island No: 20995
cgattttttttcggtttcgttttaggatagggttggtgtggcggtaaggttcgggggtaatagtaagtgggttttatattttacgaggttaagcggcgtcgtttttattattcgttatttgggcgaagtttgttttcggtttttagtttcgcgttagagtttacggttgagtcgcggtcgttttttttaggtcgttagagtcgttattttgtgcgtcggtttttggaggttcgttcggaaataggtgtcggcggcgcgggttggatcggagggtgggttggagggcgggagggggcggggtcgagttagaggcggggagaagggcggtgaggggtggggggcgggggtttggttagaggcggggcgggtagggtcgagttagaggaggggcggggttagaggcggggagaagggcggtgaggggtggggcggggttgaggggcggggttagatcggtggtggggcgggagggggcggggtcggggcgggaatggatcgggagcg

SEQ ID NO: 20996 - DNA, 504 bp, Artificial Sequence
  chemically treated genomic DNA (Homo sapiens) CpG-island No: 20996
cgctcccgatccattcccgccccgaccccgccccctcccgccccaccaccgatctaaccccgcccctcaaccccgccccacccctcaccgcccttctccccgcctctaaccccgcccctcctctaactcgaccctacccgccccgcctctaaccaaacccccgccccccacccctcaccgcccttctccccgcctctaactcgaccccgccccctcccgccctccaacccaccctccgatccaacccgcgccgccgacacctatttccgaacgaacctccaaaaaccgacgcacaaaataacgactctaacgacctaaaaaaaacgaccgcgactcaaccgtaaactctaacgcgaaactaaaaaccgaaaacaaacttcgcccaaataacgaataataaaaacgacgccgcttaacctcgtaaaatataaaacccacttactattacccccgaaccttaccgccacaccaaccctatcctaaaacgaaaccgaaaaaaaatcg

SEQ ID NO: 20997 - DNA, 760 bp, Artificial Sequence
  chemically treated genomic DNA (Homo sapiens) CpG-island No: 20997
ttttcgtcggggatgtacggagggcggagttgcggttcgaggacgcgacgcgagtttagtttcggcgaggaggtcgcgttagtgatagcgatggcggcggagtcggcgttttaagttgtggagaagttgtaggcgcgtttggtcgcgaattcggattttaagaaggtaagcgagggggcggcgcgtagcgggatgggcgttgggtcggtgagggtttcgtaacggtcgcggttcgagcgtggcggggttcgggggttgggattttgagttaggtttcgcggggttggggtcgtgaagttcgcggttattgatcgttgttcgcgcgttgggatttcgtgcgtcgggcgtcgggacgcggggtttcggtcgtttttttttttttacgggttcgggatgggggcgcgttcggtgcggatatcgcgtgtttagcgtttttttttagaggcgtttcgtggcgtttcgagttagttgttttttgcgggagagcgtgttcggggcgggagggcgttggtcgtcgtttcgttggtttttcggtgtttgcgttggtgttcggtttttcgcggagcggcgcggattttttagcgggtgcgtgttcgttgggaggagaagacgggcgttcgaacgttgcggagtttggattcgcggtttggttcgcgtttttcggagacgcggttattatttttcggttggatattagagcgtggatttttcgtttttttagtgaattttttttaaaatagaataaagtttcgcgttattt

SEQ ID NO: 20998 - DNA, 760 bp, Artificial Sequence
  chemically treated genomic DNA (Homo sapiens) CpG-island No: 20998
aaataacgcgaaactttattctattttaaaaaaaattcactaaaaaaacgaaaaatccacgctctaatatccaaccgaaaaataataaccgcgtctccgaaaaacgcgaaccaaaccgcgaatccaaactccgcaacgttcgaacgcccgtcttctcctcccaacgaacacgcacccgctaaaaaatccgcgccgctccgcgaaaaaccgaacaccaacgcaaacaccgaaaaaccaacgaaacgacgaccaacgccctcccgccccgaacacgctctcccgcaaaaaacaactaactcgaaacgccacgaaacgcctctaaaaaaaaacgctaaacacgcgatatccgcaccgaacgcgcccccatcccgaacccgtaaaaaaaaaaaaacgaccgaaaccccgcgtcccgacgcccgacgcacgaaatcccaacgcgcgaacaacgatcaataaccgcgaacttcacgaccccaaccccgcgaaacctaactcaaaatcccaacccccgaaccccgccacgctcgaaccgcgaccgttacgaaaccctcaccgacccaacgcccatcccgctacgcgccgccccctcgcttaccttcttaaaatccgaattcgcgaccaaacgcgcctacaacttctccacaacttaaaacgccgactccgccgccatcgctatcactaacgcgacctcctcgccgaaactaaactcgcgtcgcgtcctcgaaccgcaactccgccctccgtacatccccgacgaaaa

SEQ ID NO: 20999 - DNA, 760 bp, Artificial Sequence
  chemically treated genomic DNA (Homo sapiens) CpG-island No: 20999
aggtgacgcgaggttttattttgttttgaaagggatttattgagaaagcgaaaggtttacgttttgatatttagtcggagagtagtaatcgcgttttcgagaggcgcggattagatcgcgagtttaggtttcgtagcgttcgggcgttcgttttttttttttagcgaatacgtattcgttggggagttcgcgtcgtttcgcggggagtcgggtattagcgtaggtatcgggaggttaacgaggcggcggttagcgttttttcgtttcgggtacgttttttcgtaggaaatagttggttcgggacgttacggagcgtttttgggaggaagcgttaggtacgcggtgttcgtatcgggcgcgtttttatttcgggttcgtgagggagggggagcggtcggggtttcgcgtttcgacgttcgacgtacggggttttaacgcgcgggtagcggttaatggtcgcgaattttacgattttagtttcgcggggtttggtttagggttttagttttcgaatttcgttacgttcgggtcgcgatcgttacggggtttttatcgatttaacgtttatttcgttacgcgtcgttttttcgtttatttttttagggttcgggttcgcggttaggcgcgtttgtagtttttttataatttggagcgtcgatttcgtcgttatcgttgttattggcgcggttttttcgtcggaattgggttcgcgtcgcgttttcgggtcgtagtttcgtttttcgtgtattttcggcggaga

SEQ ID NO: 21000 - DNA, 760 bp, Artificial Sequence
  chemically treated genomic DNA (Homo sapiens) CpG-island No: 21000
tctccgccgaaaatacacgaaaaacgaaactacgacccgaaaacgcgacgcgaacccaattccgacgaaaaaaccgcgccaataacaacgataacgacgaaatcgacgctccaaattataaaaaaactacaaacgcgcctaaccgcgaacccgaaccctaaaaaaataaacgaaaaaacgacgcgtaacgaaataaacgttaaatcgataaaaaccccgtaacgatcgcgacccgaacgtaacgaaattcgaaaactaaaaccctaaaccaaaccccgcgaaactaaaatcgtaaaattcgcgaccattaaccgctacccgcgcgttaaaaccccgtacgtcgaacgtcgaaacgcgaaaccccgaccgctccccctccctcacgaacccgaaataaaaacgcgcccgatacgaacaccgcgtacctaacgcttcctcccaaaaacgctccgtaacgtcccgaaccaactatttcctacgaaaaaacgtacccgaaacgaaaaaacgctaaccgccgcctcgttaacctcccgatacctacgctaatacccgactccccgcgaaacgacgcgaactccccaacgaatacgtattcgctaaaaaaaaaaaacgaacgcccgaacgctacgaaacctaaactcgcgatctaatccgcgcctctcgaaaacgcgattactactctccgactaaatatcaaaacgtaaacctttcgctttctcaataaatccctttcaaaacaaaataaaacctcgcgtcacct

SEQ ID NO: 21001 - DNA, 568 bp, Artificial Sequence
  chemically treated genomic DNA (Homo sapiens) CpG-island No: 21001
gttttacgttagtttcgttcgattttatttttttcgttttttcgttttttttttacgcgtatgcgtcgcgtagcggcgttttttacgacgcggtaggcgcggcgcgtttagttgtcggagttgaacggcgcggagttggtttgaggcgagtcgagtcgagcgagcgcggcggtggggtcgagaggacgcgtaggtggcggcgttgttatgtcgtacggttatagttacggcgggggtggttgtcgttgcgtcgtcgaacgggaggagtcgttcgagtagcgcggtttggtttacggtttgtatttgcgtatcgatttggagcggttgtaatgttttaacgagagtcgcgagggtagcggtcgcggcgtttttaagtcgtgggaggagcggatcgatcgttttaaggtgggtcgtttggggtttggggcgggcggggtagggtgcgtgtggggtttcgggtcgtcggtttatttatttttgatgttaagaataacgatagtttggttgttaagcgttttttcgtgtttgttttttgttagttttttgggaggcgagtagcgttgttttt

SEQ ID NO: 21002 - DNA, 568 bp, Artificial Sequence
  chemically treated genomic DNA (Homo sapiens) CpG-island No: 21002
aaaaacaacgctactcgcctcccaaaaaactaacaaaaaacaaacacgaaaaaacgcttaacaaccaaactatcgttattcttaacatcaaaaataaataaaccgacgacccgaaaccccacacgcaccctaccccgcccgccccaaaccccaaacgacccaccttaaaacgatcgatccgctcctcccacgacttaaaaacgccgcgaccgctaccctcgcgactctcgttaaaacattacaaccgctccaaatcgatacgcaaatacaaaccgtaaaccaaaccgcgctactcgaacgactcctcccgttcgacgacgcaacgacaaccacccccgccgtaactataaccgtacgacataacaacgccgccacctacgcgtcctctcgaccccaccgccgcgctcgctcgactcgactcgcctcaaaccaactccgcgccgttcaactccgacaactaaacgcgccgcgcctaccgcgtcgtaaaaaacgccgctacgcgacgcatacgcgtaaaaaaaaaacgaaaaaacgaaaaaaataaaatcgaacgaaactaacgtaaaac

SEQ ID NO: 21003 - DNA, 568 bp, Artificial Sequence
  chemically treated genomic DNA (Homo sapiens) CpG-island No: 21003
ggagataacgttgttcgttttttaaagagttggtaggagataggtacggaaaagcgtttggtaattaggttgtcgttatttttaatattagaaatgagtagatcgacggttcgaggttttatacgtattttgtttcgttcgttttaagttttaggcggtttattttggagcggtcggttcgttttttttacggtttgaagacgtcgcggtcgttgttttcgcggttttcgttaaggtattgtagtcgttttaggtcgatgcgtaggtataggtcgtaggttaggtcgcgttgttcgggcggtttttttcgttcggcggcgtagcggtagttattttcgtcgtggttgtgatcgtgcgatatggtaacgtcgttatttgcgcgttttttcggttttatcgtcgcgttcgttcggttcggttcgttttagattagtttcgcgtcgtttagtttcggtaattaagcgcgtcgcgtttgtcgcgtcgtaaaaagcgtcgttgcgcggcgtatgcgcgtggggagaaggcgggggggcggggggggtggggtcgagcggaattgacgtaggat

SEQ ID NO: 21004 - DNA, 568 bp, Artificial Sequence
  chemically treated genomic DNA (Homo sapiens) CpG-island No: 21004
atcctacgtcaattccgctcgaccccaccccccccgcccccccgccttctccccacgcgcatacgccgcgcaacgacgctttttacgacgcgacaaacgcgacgcgcttaattaccgaaactaaacgacgcgaaactaatctaaaacgaaccgaaccgaacgaacgcgacgataaaaccgaaaaaacgcgcaaataacgacgttaccatatcgcacgatcacaaccacgacgaaaataactaccgctacgccgccgaacgaaaaaaaccgcccgaacaacgcgacctaacctacgacctatacctacgcatcgacctaaaacgactacaataccttaacgaaaaccgcgaaaacaacgaccgcgacgtcttcaaaccgtaaaaaaaacgaaccgaccgctccaaaataaaccgcctaaaacttaaaacgaacgaaacaaaatacgtataaaacctcgaaccgtcgatctactcatttctaatattaaaaataacgacaacctaattaccaaacgcttttccgtacctatctcctaccaactctttaaaaaacgaacaacgttatctcc

SEQ ID NO: 21005 - DNA, 894 bp, Artificial Sequence
  chemically treated genomic DNA (Homo sapiens) CpG-island No: 21005
aagatcgtagttaatatcggtaaagatttttttttttttattttattcgtttagttagaggggacgtggcgtgcgtagcgatataaggggaggtttgagtggtcgtagggtttaagattcggcggcggcgggggagggcggagaagtttcggggaagttcggtattaggcggtgtcgtttgagggaagggtcgagttttattttcgttcgtttgcgtcggttggttcgacgttttttcggagtttttgttattttagtttttatgggggtcgtagatttaggtacgatagtagggtcggtttgaggttttgcggatttcggcggtttcgttaggttttcggggggcgaggttcgcggaggtttttttttgcggggtgtgcgtttttttatcgttttcggttcgatttcggttgggttcgataggttcgcgggttgcgcggttattttagattcgttttcggagtcgtttgttgttttagggttagttttcgtttcggttgttgtcgttgtagtcgtcgtcgtcgcggttgtcgttttttttttagataatatttcgggtcgtcgggtcgtcgacggtcgtaggggtcgttcgttttgtcgtttcgtgggttcgaaaagttttgtttcgtttcgttttacgttgttcgcgcgtcgttaatcgtcgtcgcgtacgtacgcgttaagcgcgttttcgtcgcgtcgggataaaaagggtcggagatatttacgagtttcgtttttttttcgtagttatagagcggcgttttcgcggttagagtggtatcgtagtaaagaacgtgtagtttgtttagagcgttttttcggcgtttggagtgggatttggtatagttcgtggttttagggtttttgggttagattaaattttcgaaggtg

SEQ ID NO: 21006 - DNA, 894 bp, Artificial Sequence
  chemically treated genomic DNA (Homo sapiens) CpG-island No: 21006
caccttcgaaaatttaatctaacccaaaaaccctaaaaccacgaactataccaaatcccactccaaacgccgaaaaaacgctctaaacaaactacacgttctttactacgataccactctaaccgcgaaaacgccgctctataactacgaaaaaaaaacgaaactcgtaaatatctccgaccctttttatcccgacgcgacgaaaacgcgcttaacgcgtacgtacgcgacgacgattaacgacgcgcgaacaacgtaaaacgaaacgaaacaaaacttttcgaacccacgaaacgacaaaacgaacgacccctacgaccgtcgacgacccgacgacccgaaatattatctaaaaaaaaaacgacaaccgcgacgacgacgactacaacgacaacaaccgaaacgaaaactaaccctaaaacaacaaacgactccgaaaacgaatctaaaataaccgcgcaacccgcgaacctatcgaacccaaccgaaatcgaaccgaaaacgataaaaaaacgcacaccccgcaaaaaaaaacctccgcgaacctcgccccccgaaaacctaacgaaaccgccgaaatccgcaaaacctcaaaccgaccctactatcgtacctaaatctacgacccccataaaaactaaaataacaaaaactccgaaaaaacgtcgaaccaaccgacgcaaacgaacgaaaataaaactcgacccttccctcaaacgacaccgcctaataccgaacttccccgaaacttctccgccctcccccgccgccgccgaatcttaaaccctacgaccactcaaacctccccttatatcgctacgcacgccacgtcccctctaactaaacgaataaaataaaaaaaaaaaaatctttaccgatattaactacgatctt

SEQ ID NO: 21007 - DNA, 894 bp, Artificial Sequence
  chemically treated genomic DNA (Homo sapiens) CpG-island No: 21007
tattttcggaggtttagtttggtttagaagttttaagattacggattgtgttaggttttattttaaacgtcggggagacgttttaggtaagttatacgttttttgttgcggtgttattttagtcgcgagaacgtcgttttatggttgcgggggaggggcggggttcgtgggtgttttcgattttttttgtttcggcgcggcgggagcgcgtttggcgcgtgcgtacgcgacggcggttggcggcgcgcgggtagcgtgaagcgaggcgaggtaaggtttttcggatttacggagcgatagagcgagcggtttttacggtcgtcggcggttcggcggttcgagatgttatttgggaagaaggcggtagtcgcggcggcggcggttgtagcggtagtaatcgggacggaggttggttttgggatagtaggcggtttcgagaacgggtttgaggtggtcgcgtagttcgcgggtttgtcgggtttagtcgaggtcgggtcgggggcggtgggggagcgtatatttcgtaagaaagagttttcgcgggtttcgtttttcgggggtttggcggaatcgtcggggttcgtagggttttaggtcggttttattgtcgtgtttgggtttgcgatttttatggaaattggaatagtagagatttcggaggggcgtcggattagtcggcgtaagcgggcgaaggtaaggttcgattttttttttaaacgatatcgtttggtgtcgagttttttcgaggttttttcgttttttttcgtcgtcgtcgggttttgggttttgcgattatttagatttttttttgtatcgttgcgtacgttacgttttttttagttggacgggtggggtgagaaaggaaaagtttttgtcggtgttgattgcggtttt

SEQ ID NO: 21008 - DNA, 894 bp, Artificial Sequence
  chemically treated genomic DNA (Homo sapiens) CpG-island No: 21008
aaaaccgcaatcaacaccgacaaaaacttttcctttctcaccccacccgtccaactaaaaaaaacgtaacgtacgcaacgatacaaaaaaaaatctaaataatcgcaaaacccaaaacccgacgacgacgaaaaaaaacgaaaaaacctcgaaaaaactcgacaccaaacgatatcgtttaaaaaaaaaatcgaaccttaccttcgcccgcttacgccgactaatccgacgcccctccgaaatctctactattccaatttccataaaaatcgcaaacccaaacacgacaataaaaccgacctaaaaccctacgaaccccgacgattccgccaaacccccgaaaaacgaaacccgcgaaaactctttcttacgaaatatacgctcccccaccgcccccgacccgacctcgactaaacccgacaaacccgcgaactacgcgaccacctcaaacccgttctcgaaaccgcctactatcccaaaaccaacctccgtcccgattactaccgctacaaccgccgccgccgcgactaccgccttcttcccaaataacatctcgaaccgccgaaccgccgacgaccgtaaaaaccgctcgctctatcgctccgtaaatccgaaaaaccttacctcgcctcgcttcacgctacccgcgcgccgccaaccgccgtcgcgtacgcacgcgccaaacgcgctcccgccgcgccgaaacaaaaaaaatcgaaaacacccacgaaccccgcccctcccccgcaaccataaaacgacgttctcgcgactaaaataacaccgcaacaaaaaacgtataacttacctaaaacgtctccccgacgtttaaaataaaacctaacacaatccgtaatcttaaaacttctaaaccaaactaaacctccgaaaata

SEQ ID NO: 21009 - DNA, 552 bp, Artificial Sequence
  chemically treated genomic DNA (Homo sapiens) CpG-island No: 21009
acgaggcgcggcgttcgtagttttcggttgggtttcggcggggatgggcgggtagggggcggagcgtagcgtagcgcggggcggcgggaaaggggcggagaggatagtttgggttttggcgggtcgcgggattggtagaatttgcgggcgaggtgggtggttcgttagtcgggacgaagggaaatgaggattatcgtttcggggcgcgagtaggcgcgtggagttcgggggtttagtcgtcgcgttttttttttttgtagttggagattgtaatagcggcgggtgtatcggtagtagcgacgattttgcgcgtaggtgggtattttcgagcgcggcgttttgtcggttttttcggttatcgcgggtcggacgttcgtttttttaggttattgcgtttgggggcgagggttgggtaggtttaggggtagaaggaaggtgtacggtttcgtggtgggcgcgtttttgcgcgcgcgttgtggtaggtgggaaagaggtgtagaaaagttgttttttttagggtttattttttcggttttattgtttttattttat

SEQ ID NO: 21010 - DNA, 552 bp, Artificial Sequence
  chemically treated genomic DNA (Homo sapiens) CpG-island No: 21010
ataaaataaaaacaataaaaccgaaaaaataaaccctaaaaaaaacaacttttctacacctctttcccacctaccacaacgcgcgcgcaaaaacgcgcccaccacgaaaccgtacaccttccttctacccctaaacctacccaaccctcgcccccaaacgcaataacctaaaaaaacgaacgtccgacccgcgataaccgaaaaaaccgacaaaacgccgcgctcgaaaatacccacctacgcgcaaaatcgtcgctactaccgatacacccgccgctattacaatctccaactacaaaaaaaaaaaacgcgacgactaaacccccgaactccacgcgcctactcgcgccccgaaacgataatcctcatttcccttcgtcccgactaacgaaccacccacctcgcccgcaaattctaccaatcccgcgacccgccaaaacccaaactatcctctccgcccctttcccgccgccccgcgctacgctacgctccgccccctacccgcccatccccgccgaaacccaaccgaaaactacgaacgccgcgcctcgt

SEQ ID NO: 21011 - DNA, 552 bp, Artificial Sequence
  chemically treated genomic DNA (Homo sapiens) CpG-island No: 21011
gtggggtggggatagtggaatcgagggagtgaattttaagggaggtagtttttttgtattttttttttatttattatagcgcgcgcgtagaagcgcgtttattacggggtcgtgtattttttttttgtttttggatttatttagttttcgtttttaagcgtagtggtttggaagagcgggcgttcggttcgcggtggtcgggggagtcggtagagcgtcgcgttcgggggtgtttatttgcgcgtagggtcgtcgttgttgtcggtgtattcgtcgttgttgtagtttttagttgtaggaggaagaggcgcggcggttgagttttcggattttacgcgtttattcgcgtttcggagcggtggtttttattttttttcgtttcggttggcgagttatttatttcgttcgtaggttttgttagtttcgcggttcgttagagtttaagttatttttttcgtttttttttcgtcgtttcgcgttgcgttgcgtttcgttttttgttcgtttattttcgtcggggtttagtcgggggttgcgggcgtcgcgtttcgt

SEQ ID NO: 21012 - DNA, 552 bp, Artificial Sequence
  chemically treated genomic DNA (Homo sapiens) CpG-island No: 21012
acgaaacgcgacgcccgcaacccccgactaaaccccgacgaaaataaacgaacaaaaaacgaaacgcaacgcaacgcgaaacgacgaaaaaaaaacgaaaaaaataacttaaactctaacgaaccgcgaaactaacaaaacctacgaacgaaataaataactcgccaaccgaaacgaaaaaaaataaaaaccaccgctccgaaacgcgaataaacgcgtaaaatccgaaaactcaaccgccgcgcctcttcctcctacaactaaaaactacaacaacgacgaatacaccgacaacaacgacgaccctacgcgcaaataaacacccccgaacgcgacgctctaccgactcccccgaccaccgcgaaccgaacgcccgctcttccaaaccactacgcttaaaaacgaaaactaaataaatccaaaaacaaaaaaaaaatacacgaccccgtaataaacgcgcttctacgcgcgcgctataataaataaaaaaaaaatacaaaaaaactacctcccttaaaattcactccctcgattccactatccccaccccac

SEQ ID NO: 21013 - DNA, 652 bp, Artificial Sequence
  chemically treated genomic DNA (Homo sapiens) CpG-island No: 21013
ttcgaaagtgtggaagcggagtgggcggggaatcgtcgcgttattttaaagtcgggggcgaggcggcggtggaattttagagtcgcgaggttaggtggttagtcggtttcggcggggcgggggggtttttgagtttcgattttcgcggttgacggtttttcggatttttttaggtttgggtgtggattcggtgtcggtcggcgtggatgttagtttaggcggcgtaggacgcgatttcggttcgttaggcggggcgttcgagaagcggcgggtgggtatcgcggagcggcgttatattatttgtagtttggattggcggatggggtggggtgggggcgtcgcggaggttcgggtcgggggaggcggcggcggtagtttggagcgttagcgcgtcggggcgcgggcgtcgggtagttgggagcgacggtagacgtttagcggtagttgggagcggcggtacggaggcggcggcggcggcggcggcgcgggaaagtcgggcggtagttgggagcggaggtaggcgggtagcggcgggggaggtagttgggagcggcgttatttcggttttaattcgttcgattcgtaggattttagtttcgacgtttattgtaatttggttattttggttgtagttaatagggtgagttcgagg

SEQ ID NO: 21014 - DNA, 652 bp, Artificial Sequence
  chemically treated genomic DNA (Homo sapiens) CpG-island No: 21014
cctcgaactcaccctattaactacaaccaaaataaccaaattacaataaacgtcgaaactaaaatcctacgaatcgaacgaattaaaaccgaaataacgccgctcccaactacctcccccgccgctacccgcctacctccgctcccaactaccgcccgactttcccgcgccgccgccgccgccgccgcctccgtaccgccgctcccaactaccgctaaacgtctaccgtcgctcccaactacccgacgcccgcgccccgacgcgctaacgctccaaactaccgccgccgcctcccccgacccgaacctccgcgacgcccccaccccaccccatccgccaatccaaactacaaataatataacgccgctccgcgatacccacccgccgcttctcgaacgccccgcctaacgaaccgaaatcgcgtcctacgccgcctaaactaacatccacgccgaccgacaccgaatccacacccaaacctaaaaaaatccgaaaaaccgtcaaccgcgaaaatcgaaactcaaaaacccccccgccccgccgaaaccgactaaccacctaacctcgcgactctaaaattccaccgccgcctcgcccccgactttaaaataacgcgacgattccccgcccactccgcttccacactttcgaa

SEQ ID NO: 21015 - DNA, 652 bp, Artificial Sequence
  chemically treated genomic DNA (Homo sapiens) CpG-island No: 21015
tttcgggtttattttgttggttatagttaggatgattaggttgtagtaggcgtcggggttggggttttgcgggtcgagcgggttggggtcggggtggcgtcgtttttagttgtttttttcgtcgttgttcgtttgttttcgtttttagttatcgttcggttttttcgcgtcgtcgtcgtcgtcgtcgttttcgtgtcgtcgtttttagttgtcgttgaacgtttgtcgtcgtttttagttgttcgacgttcgcgtttcggcgcgttggcgttttaagttgtcgtcgtcgtttttttcggttcgggttttcgcggcgtttttattttattttattcgttagtttaggttgtagatggtgtggcgtcgtttcgcggtgtttattcgtcgtttttcgggcgtttcgtttggcgggtcggggtcgcgttttgcgtcgtttgggttggtatttacgtcggtcggtatcgggtttatatttagatttaggagagttcgggggatcgttagtcgcggggatcgggatttagagattttttcgtttcgtcgaggtcggttggttatttgatttcgcggttttggggttttatcgtcgtttcgttttcggttttaaagtagcgcggcggtttttcgtttatttcgtttttatattttcggg

SEQ ID NO: 21016 - DNA, 652 bp, Artificial Sequence
  chemically treated genomic DNA (Homo sapiens) CpG-island No: 21016
cccgaaaatataaaaacgaaataaacgaaaaaccgccgcgctactttaaaaccgaaaacgaaacgacgataaaaccccaaaaccgcgaaatcaaataaccaaccgacctcgacgaaacgaaaaaatctctaaatcccgatccccgcgactaacgatcccccgaactctcctaaatctaaatataaacccgataccgaccgacgtaaataccaacccaaacgacgcaaaacgcgaccccgacccgccaaacgaaacgcccgaaaaacgacgaataaacaccgcgaaacgacgccacaccatctacaacctaaactaacgaataaaataaaataaaaacgccgcgaaaacccgaaccgaaaaaaacgacgacgacaacttaaaacgccaacgcgccgaaacgcgaacgtcgaacaactaaaaacgacgacaaacgttcaacgacaactaaaaacgacgacacgaaaacgacgacgacgacgacgacgcgaaaaaaccgaacgataactaaaaacgaaaacaaacgaacaacgacgaaaaaaacaactaaaaacgacgccaccccgaccccaacccgctcgacccgcaaaaccccaaccccgacgcctactacaacctaatcatcctaactataaccaacaaaataaacccgaaa

SEQ ID NO: 21017 - DNA, 937 bp, Artificial Sequence
  chemically treated genomic DNA (Homo sapiens) CpG-island No: 21017
ggtcgttcgttcggagttggggcgaggggttggcggcggcgagcggcgcggttttaagtttatgttaattcgtaaagagttcgtttttcgtttttttttcgcggttttagtcgttagtagcgtcggttatttcgcgggacgtagtcgtcgcgaagcgttaggcggtcgggttagcgagttcgggggtcgaaggggatttcgggattttcggggcgggattcgggtcgattagcggcgggggcggcgcggcgttgtaggcggatattcggcggggggtatcgcgcggggtcgggtagaggcgcgggggtcgttatgggtcgtcgtcgtttgttcgtttggttgtgcgtcgtcgcggcgttgttttcgggggcgtaggttaggggtatttcgtttttggcgcggtttgcgtcgttcggtgtttttcgttatagtttttatacgacgggatggcgttcgcggttgcgttcggggtcgtataagtaagcgcgggcgggcggcgggcgggaagagggagggatgggttcgcgcgcgtcgtcgtttttatttgttcgtattcgcggggggcgtcgaggtttcgggtatttcgaggtcgttgtatagagggggcggcgttcggggtcgagtttttgtttaggcgagcgttttacgtttcgggaggttgcggggttggcgaggaaaaaggaatcgagggggtttggcgcggcggtttgggattttggtagtgttagcggaaatttttttagcgaagtaatattttttagttgcgttgtgtgtagatttcgggcgagcggattaggtggagggagaggaggaaaggcggttcgcgcgttgagtacgcggggttttttcgtttcgggtttttttttttttttttggttcggttaggtaggagatagagttgcgtattcgggcggtcgttgttttttcgtagttagtt

SEQ ID NO: 21018 - DNA, 937 bp, Artificial Sequence
  chemically treated genomic DNA (Homo sapiens) CpG-island No: 21018
aactaactacgaaaaaacaacgaccgcccgaatacgcaactctatctcctacctaaccgaaccaaaaaaaaaaaaaaaaacccgaaacgaaaaaaccccgcgtactcaacgcgcgaaccgcctttcctcctctccctccacctaatccgctcgcccgaaatctacacacaacgcaactaaaaaatattacttcgctaaaaaaatttccgctaacactaccaaaatcccaaaccgccgcgccaaaccccctcgattcctttttcctcgccaaccccgcaacctcccgaaacgtaaaacgctcgcctaaacaaaaactcgaccccgaacgccgccccctctatacaacgacctcgaaatacccgaaacctcgacgccccccgcgaatacgaacaaataaaaacgacgacgcgcgcgaacccatccctccctcttcccgcccgccgcccgcccgcgcttacttatacgaccccgaacgcaaccgcgaacgccatcccgtcgtataaaaactataacgaaaaacaccgaacgacgcaaaccgcgccaaaaacgaaatacccctaacctacgcccccgaaaacaacgccgcgacgacgcacaaccaaacgaacaaacgacgacgacccataacgacccccgcgcctctacccgaccccgcgcgataccccccgccgaatatccgcctacaacgccgcgccgcccccgccgctaatcgacccgaatcccgccccgaaaatcccgaaatccccttcgacccccgaactcgctaacccgaccgcctaacgcttcgcgacgactacgtcccgcgaaataaccgacgctactaacgactaaaaccgcgaaaaaaaaacgaaaaacgaactctttacgaattaacataaacttaaaaccgcgccgctcgccgccgccaacccctcgccccaactccgaacgaacgacc

SEQ ID NO: 21019 - DNA, 937 bp, Artificial Sequence
  chemically treated genomic DNA (Homo sapiens) CpG-island No: 21019
ggttgattgcgagagggtagcggtcgttcggatgcgtagttttattttttatttggtcgggttaggggagagaagggaggttcggggcgggggagtttcgcgtgtttagcgcgcggatcgtttttttttttttttttttatttggttcgttcgttcggagtttgtatatagcgtagttggaaaatgttatttcgttggaaaggttttcgttggtattgttaggattttaagtcgtcgcgttaggttttttcggttttttttttttcgttagtttcgtaatttttcggagcgtagggcgttcgtttgggtaggggttcggtttcgggcgtcgttttttttgtgtagcggtttcggggtgttcggggtttcgacgtttttcgcgggtgcgggtaggtgggagcggcgacgcgcgcgggtttattttttttttttttcgttcgtcgttcgttcgcgtttatttgtgcggtttcgggcgtagtcgcgggcgttatttcgtcgtgtagagattgtagcgggaggtatcgggcggcgtaggtcgcgttaggagcggggtgtttttggtttgcgttttcgagagtagcgtcgcgacggcgtatagttagacgagtaggcggcggcggtttatagcggttttcgcgtttttgttcggtttcgcgcggtgtttttcgtcgggtgttcgtttgtagcgtcgcgtcgttttcgtcgttggtcggttcgggtttcgtttcgagggtttcggggtttttttcggttttcgagttcgttggttcggtcgtttggcgtttcgcggcggttgcgtttcgcggagtggtcggcgttgttagcggttggggtcgcggaggggaggcgggaggcgggttttttgcggattagtataaatttggggtcgcgtcgttcgtcgtcgttagtttttcgttttagtttcgagcggacggtt

SEQ ID NO: 21020 - DNA, 937 bp, Artificial Sequence
  chemically treated genomic DNA (Homo sapiens) CpG-island No: 21020
aaccgtccgctcgaaactaaaacgaaaaactaacgacgacgaacgacgcgaccccaaatttatactaatccgcaaaaaacccgcctcccgcctcccctccgcgaccccaaccgctaacaacgccgaccactccgcgaaacgcaaccgccgcgaaacgccaaacgaccgaaccaacgaactcgaaaaccgaaaaaaaccccgaaaccctcgaaacgaaacccgaaccgaccaacgacgaaaacgacgcgacgctacaaacgaacacccgacgaaaaacaccgcgcgaaaccgaacaaaaacgcgaaaaccgctataaaccgccgccgcctactcgtctaactatacgccgtcgcgacgctactctcgaaaacgcaaaccaaaaacaccccgctcctaacgcgacctacgccgcccgatacctcccgctacaatctctacacgacgaaataacgcccgcgactacgcccgaaaccgcacaaataaacgcgaacgaacgacgaacgaaaaaaaaaaaaaataaacccgcgcgcgtcgccgctcccacctacccgcacccgcgaaaaacgtcgaaaccccgaacaccccgaaaccgctacacaaaaaaaacgacgcccgaaaccgaacccctacccaaacgaacgccctacgctccgaaaaattacgaaactaacgaaaaaaaaaaaaccgaaaaaacctaacgcgacgacttaaaatcctaacaataccaacgaaaacctttccaacgaaataacattttccaactacgctatatacaaactccgaacgaacgaaccaaataaaaaaaaaaaaaaaaaaacgatccgcgcgctaaacacgcgaaactcccccgccccgaacctcccttctctcccctaacccgaccaaataaaaaataaaactacgcatccgaacgaccgctaccctctcgcaatcaacc

SEQ ID NO: 21021 - DNA, 739 bp, Artificial Sequence
  chemically treated genomic DNA (Homo sapiens) CpG-island No: 21021
cgtttagacgtcgcgtataggtcgttgggcggttatagcgtaagcgtaatttttttataaatggattataagtttcggtatgtttggcgacgcggcgtcgtttggtaattcgcgttatacgaagcgcgttaggttggtttttttgcgcgtttgcgttttggcgagttttgcgtaggcgtatttttaacgtttggaggagagggcggggtgtcgttttttttcgttgatgtaagagtttagtgcggtggtgggagaggtatcggtaggggtagcgttgtcgtcggggtttggggttgattcgtttgatttttcgttcgtgtcgagtttattcgagtcgtagttatgtttggggacgaggtgaggatttgagttcggcgtaagggttaaggattgaggcgagaagtttaatttattttagtgtgggagaacgggtttgcggtttagtagtcggtcgtcgttatgtgaggtagtcgcgtttaggcggttcggagcggtagagtcggcgaggatttcggagtcgtaggtttggtcgtagttcgttttttttagggcggtagcgttgaggcggattttttgtcgtggttggcgttttcggaatggagagtatacgttgagtcgttttttcggaaggggttcgaatgttcggttaataatttcgaacgagattggggttggcgatttttgtatttttttttgttgggtattgtcgttttagttcgttttattgggtgtcgggggt

SEQ ID NO: 21022 - DNA, 739 bp, Artificial Sequence
  chemically treated genomic DNA (Homo sapiens) CpG-island No: 21022
acccccgacacccaataaaacgaactaaaacgacaatacccaacaaaaaaaaatacaaaaatcgccaaccccaatctcgttcgaaattattaaccgaacattcgaaccccttccgaaaaaacgactcaacgtatactctccattccgaaaacgccaaccacgacaaaaaatccgcctcaacgctaccgccctaaaaaaaacgaactacgaccaaacctacgactccgaaatcctcgccgactctaccgctccgaaccgcctaaacgcgactacctcacataacgacgaccgactactaaaccgcaaacccgttctcccacactaaaataaattaaacttctcgcctcaatccttaacccttacgccgaactcaaatcctcacctcgtccccaaacataactacgactcgaataaactcgacacgaacgaaaaatcaaacgaatcaaccccaaaccccgacgacaacgctacccctaccgatacctctcccaccaccgcactaaactcttacatcaacgaaaaaaaacgacaccccgccctctcctccaaacgttaaaaatacgcctacgcaaaactcgccaaaacgcaaacgcgcaaaaaaaccaacctaacgcgcttcgtataacgcgaattaccaaacgacgccgcgtcgccaaacataccgaaacttataatccatttataaaaaaattacgcttacgctataaccgcccaacgacctatacgcgacgtctaaacg

SEQ ID NO: 21023 - DNA, 739 bp, Artificial Sequence
  chemically treated genomic DNA (Homo sapiens) CpG-island No: 21023
attttcggtatttagtgaggcgagttggggcggtagtgtttagtagaaaggaatgtagggatcgttagttttagtttcgttcggggttattaatcgggtattcgagtttttttcgggaggacgatttaacgtgtgttttttatttcggaaacgttaattacggtaggaggttcgttttagcgttgtcgttttgaggaaagcgggttgcggttaagtttgcggtttcggagttttcgtcggttttgtcgtttcgggtcgtttaggcgcggttgttttatatggcggcggtcggttgttaggtcgtaggttcgtttttttatattggagtgggttaggtttttcgttttaatttttagtttttacgtcgggtttagatttttatttcgtttttagatatggttgcggttcgagtgggttcggtacggacgggaagttagacgggttagttttaggtttcggcggtagcgttgtttttgtcgatattttttttattatcgtattaggtttttgtattagcgaaaggaaacgatatttcgtttttttttttaagcgttggaaatgcgtttgcgtagagttcgttaaggcgtaggcgcgtagaagagttaatttagcgcgtttcgtgtggcgcgagttattaggcgacgtcgcgtcgttaggtatgtcgggatttgtagtttatttataagagggttgcgtttgcgttgtagtcgtttagcgatttgtgcgcggcgtttgagcg

SEQ ID NO: 21024 - DNA, 739 bp, Artificial Sequence
  chemically treated genomic DNA (Homo sapiens) CpG-island No: 21024
cgctcaaacgccgcgcacaaatcgctaaacgactacaacgcaaacgcaaccctcttataaataaactacaaatcccgacatacctaacgacgcgacgtcgcctaataactcgcgccacacgaaacgcgctaaattaactcttctacgcgcctacgccttaacgaactctacgcaaacgcatttccaacgcttaaaaaaaaaaacgaaatatcgtttcctttcgctaatacaaaaacctaatacgataataaaaaaaatatcgacaaaaacaacgctaccgccgaaacctaaaactaacccgtctaacttcccgtccgtaccgaacccactcgaaccgcaaccatatctaaaaacgaaataaaaatctaaacccgacgtaaaaactaaaaattaaaacgaaaaacctaacccactccaatataaaaaaacgaacctacgacctaacaaccgaccgccgccatataaaacaaccgcgcctaaacgacccgaaacgacaaaaccgacgaaaactccgaaaccgcaaacttaaccgcaacccgctttcctcaaaacgacaacgctaaaacgaacctcctaccgtaattaacgtttccgaaataaaaaacacacgttaaatcgtcctcccgaaaaaaactcgaatacccgattaataaccccgaacgaaactaaaactaacgatccctacattcctttctactaaacactaccgccccaactcgcctcactaaataccgaaaat

SEQ ID NO: 21025 - DNA, 743 bp, Artificial Sequence
  chemically treated genomic DNA (Homo sapiens) CpG-island No: 21025
gagttttttcgagaagtttttttaaggatttcgggtcgcgtagtttcgggtggatcgttatgattaatattttggggcgtgtatttggacgattttcgaggattttggggagtgtagtttatcgaggggatgcgacgcgtagggtcgtatagttttcgggtcgcgtcgaggatgttgggtagcgtagtttcggtcgcgttgaggattttgggtagtgtagtttcgggcggcgtagagcgttttagatttttgggcgttagcgagtcgtgagatgcgtggtttattatcggtgattttatcgtttcggttcgtttttagtcgtttcggtgagttgcgtttttgcgggtttttttttgtagcgcgttttttcggcgtaggaagaagggtcgggaaggtttgggacgtgagggcgttgttggggtcgtagcgcgcgtttttttaggttcggcgttttcgcgttttggggaggggcggagatttaggtcgcgttttgaagtgggcggtggggttgcggtttgtcgagcgtttcgggtttgggtcgttatttagttttcgttttcggttgcgtgtagtggcggttcgggcggtgaatagttcggattttataggggcgtcgagtaatttaggtttttttgtgttagggtcgtcgtttttcgggtggggacgggttagcggtttagcgagttgttacgggggttttttggtcggaggtggagggggattcggttatagttagggtttat

SEQ ID NO: 21026 - DNA, 743 bp, Artificial Sequence
  chemically treated genomic DNA (Homo sapiens) CpG-island No: 21026
ataaaccctaactataaccgaatccccctccacctccgaccaaaaaacccccgtaacaactcgctaaaccgctaacccgtccccacccgaaaaacgacgaccctaacacaaaaaaacctaaattactcgacgcccctataaaatccgaactattcaccgcccgaaccgccactacacgcaaccgaaaacgaaaactaaataacgacccaaacccgaaacgctcgacaaaccgcaaccccaccgcccacttcaaaacgcgacctaaatctccgcccctccccaaaacgcgaaaacgccgaacctaaaaaaacgcgcgctacgaccccaacaacgccctcacgtcccaaaccttcccgacccttcttcctacgccgaaaaaacgcgctacaaaaaaaaacccgcaaaaacgcaactcaccgaaacgactaaaaacgaaccgaaacgataaaatcaccgataataaaccacgcatctcacgactcgctaacgcccaaaaatctaaaacgctctacgccgcccgaaactacactacccaaaatcctcaacgcgaccgaaactacgctacccaacatcctcgacgcgacccgaaaactatacgaccctacgcgtcgcatcccctcgataaactacactccccaaaatcctcgaaaatcgtccaaatacacgccccaaaatattaatcataacgatccacccgaaactacgcgacccgaaatccttaaaaaaacttctcgaaaaaactc

SEQ ID NO: 21027 - DNA, 743 bp, Artificial Sequence
  chemically treated genomic DNA (Homo sapiens) CpG-island No: 21027
gtggattttggttgtggtcgagtttttttttattttcggttaaaagattttcgtggtagttcgttaggtcgttggttcgtttttattcgaggagcggcgattttggtataagaggatttgggttgttcggcgtttttgtgaaattcgggttgtttatcgttcgagtcgttattatacgtaatcgggaacggagattgagtggcggtttagattcggggcgttcggtaagtcgtagttttatcgtttattttaaggcgcggtttgggttttcgtttttttttagaacgcggagacgtcgggtttggaggagcgcgcgttacggttttagtagcgtttttacgttttaggttttttcggtttttttttttgcgtcggaagggcgcgttgtagagagggattcgtaggagcgtagtttatcggggcggttgagggcgaatcgaggcggtgaggttatcgatggtggattacgtattttacggttcgttgacgtttagggatttggaacgttttgcgtcgttcgggattatattatttagaatttttagcgcggtcgggattacgttatttagtattttcggcgcggttcggaggttatgcgattttgcgcgtcgtattttttcggtggattatattttttagagttttcgggagtcgtttaggtatacgttttagaatattggttatagcggtttattcgggattgcgcgattcggaatttttggaaggatttttcggaaggattt

SEQ ID NO: 21028 - DNA, 743 bp, Artificial Sequence
  chemically treated genomic DNA (Homo sapiens) CpG-island No: 21028
aaatccttccgaaaaatccttccaaaaattccgaatcgcgcaatcccgaataaaccgctataaccaatattctaaaacgtatacctaaacgactcccgaaaactctaaaaaatataatccaccgaaaaaatacgacgcgcaaaatcgcataacctccgaaccgcgccgaaaatactaaataacgtaatcccgaccgcgctaaaaattctaaataatataatcccgaacgacgcaaaacgttccaaatccctaaacgtcaacgaaccgtaaaatacgtaatccaccatcgataacctcaccgcctcgattcgccctcaaccgccccgataaactacgctcctacgaatccctctctacaacgcgcccttccgacgcaaaaaaaaaaaccgaaaaaacctaaaacgtaaaaacgctactaaaaccgtaacgcgcgctcctccaaacccgacgtctccgcgttctaaaaaaaaacgaaaacccaaaccgcgccttaaaataaacgataaaactacgacttaccgaacgccccgaatctaaaccgccactcaatctccgttcccgattacgtataataacgactcgaacgataaacaacccgaatttcacaaaaacgccgaacaacccaaatcctcttataccaaaatcgccgctcctcgaataaaaacgaaccaacgacctaacgaactaccacgaaaatcttttaaccgaaaataaaaaaaaactcgaccacaaccaaaatccac

SEQ ID NO: 21029 - DNA, 741 bp, Artificial Sequence
  chemically treated genomic DNA (Homo sapiens) CpG-island No: 21029
ttttatttcggcgaaggtcgtaaatggcgcgaggcgggaaggcgtaggttttattttttttcgtttttagattatttatagtgatttgcgcgtataggtaggttaggatcgcgggcgtttaaggtagatattaggttcgtcgacgttttcgcgtcgttcgttcggttattcggagagtttgttgtttagcgtttggtagcgcggataatttttttcggggaggtgatgacggtttttcgcgtcggagggtttagggaggaaagagataagtagaaagatattagggaagaatattacgtttcggattaacgttagttatagttattgagaagtcgtcgtattcggcggcgtcgatatacgtttttagggtttttgagagattatattttgggagtttcgcgggattttatttttttcggcggcgtagggaatgagatagatcgcgggaattttattcgcgtcgggagatggtttggtgatttcgcggttttttttacgtttttttgggtagttcgttttgcgtatgcgtaggcggcggtggtaaggttacggttcgcgttagcggtcggcgttatggggttgagtcgcgtgcgggcggttttttttgatttggataatatttttatcgatacggtcggggcgagtaggagaggtatgttggaggtaacgtttttatttatggcgtttttttgggcggggttagtgcgtttcgtttcgttttgtacgtttatttttttttga

SEQ ID NO: 21030 - DNA, 741 bp, Artificial Sequence
  chemically treated genomic DNA (Homo sapiens) CpG-island No: 21030
tcaaaaaaaaataaacgtacaaaacgaaacgaaacgcactaaccccgcccaaaaaaacgccataaataaaaacgttacctccaacatacctctcctactcgccccgaccgtatcgataaaaatattatccaaatcaaaaaaaaccgcccgcacgcgactcaaccccataacgccgaccgctaacgcgaaccgtaaccttaccaccgccgcctacgcatacgcaaaacgaactacccaaaaaaacgtaaaaaaaaccgcgaaatcaccaaaccatctcccgacgcgaataaaattcccgcgatctatctcattccctacgccgccgaaaaaaataaaatcccgcgaaactcccaaaatataatctctcaaaaaccctaaaaacgtatatcgacgccgccgaatacgacgacttctcaataactataactaacgttaatccgaaacgtaatattcttccctaatatctttctacttatctctttcctccctaaaccctccgacgcgaaaaaccgtcatcacctccccgaaaaaaattatccgcgctaccaaacgctaaacaacaaactctccgaataaccgaacgaacgacgcgaaaacgtcgacgaacctaatatctaccttaaacgcccgcgatcctaacctacctatacgcgcaaatcactataaataatctaaaaacgaaaaaaaataaaacctacgccttcccgcctcgcgccatttacgaccttcgccgaaataaaa

SEQ ID NO: 21031 - DNA, 741 bp, Artificial Sequence
  chemically treated genomic DNA (Homo sapiens) CpG-island No: 21031
ttaaggggaggtgagcgtgtaggacggggcggggcgtattgatttcgtttagaggagcgttatgggtggggacgttatttttaatatgttttttttgttcgtttcggtcgtgtcgatgagagtgttgtttaagttaaagaaaatcgttcgtacgcggtttagttttatagcgtcggtcgttggcgcgaatcgtagttttgttatcgtcgtttgcgtatgcgtaaggcggattgtttagagagacgtgggaggagtcgcgaagttattagattatttttcggcgcgggtggaattttcgcgatttgttttattttttgcgtcgtcgagaaaagtgagatttcgcgagatttttagggtatggttttttaagagttttggaaacgtgtgtcggcgtcgtcggatgcggcgattttttagtggttgtggttggcgttggttcgaagcgtggtgtttttttttggtgtttttttgtttattttttttttttttgggtttttcggcgcgagggatcgttattattttttcgagagaggttgttcgcgttgttaggcgttgggtagtaggtttttcgggtggtcgggcgggcggcgcggagacgtcggcgggtttgatgtttgttttgagcgttcgcggttttagtttgtttgtacgcgtaggttattgtaggtgatttggggacgggggaaggtggagtttgcgttttttcgtttcgcgttatttgcggttttcgtcggggtggaa

SEQ ID NO: 21032 - DNA, 741 bp, Artificial Sequence
  chemically treated genomic DNA (Homo sapiens) CpG-island No: 21032
ttccaccccgacgaaaaccgcaaataacgcgaaacgaaaaaacgcaaactccaccttcccccgtccccaaatcacctacaataacctacgcgtacaaacaaactaaaaccgcgaacgctcaaaacaaacatcaaacccgccgacgtctccgcgccgcccgcccgaccacccgaaaaacctactacccaacgcctaacaacgcgaacaacctctctcgaaaaaataataacgatccctcgcgccgaaaaacccaaaaaaaaaaaaaataaacaaaaaaacaccaaaaaaaaacaccacgcttcgaaccaacgccaaccacaaccactaaaaaatcgccgcatccgacgacgccgacacacgtttccaaaactcttaaaaaaccataccctaaaaatctcgcgaaatctcacttttctcgacgacgcaaaaaataaaacaaatcgcgaaaattccacccgcgccgaaaaataatctaataacttcgcgactcctcccacgtctctctaaacaatccgccttacgcatacgcaaacgacgataacaaaactacgattcgcgccaacgaccgacgctataaaactaaaccgcgtacgaacgattttctttaacttaaacaacactctcatcgacacgaccgaaacgaacaaaaaaaacatattaaaaataacgtccccacccataacgctcctctaaacgaaatcaatacgccccgccccgtcctacacgctcacctccccttaa

SEQ ID NO: 21033 - DNA, 596 bp, Artificial Sequence
  chemically treated genomic DNA (Homo sapiens) CpG-island No: 21033
agattcgttagagtacgtgtgttttgtgagattcgttagagtacgtgtgttttgtgagattcgttagagtacgtgtgttttgtgattcgttagagtacgtgtgttttgtgagattcgttagagtacgtgtgttttgtgattcgttagagtacgtgtgttttgtgattcgttagagtacgtgtgttttgtgagattcgttagagtacgtgtgttttgtgagattcgttagagtacgtgtgttttgtgtgattcgttagagtacgtgtgttttgtgagattcgttagagtacgtgtgttttgtgagattcgttagagtacgtgtgttttgtgattcgttagagtacgtgtgttttgtgattcgttagagtacgtgtgttttgtgagattcgttagagtacgtgtgttttgtgattcgttagagtacgtgtgttttgtgagattcgttagagtacgtgtgttttgtgagattcgttagagtacgtgtgttttgtgattcgttagagtacgtgtggtttgtgattcgttagagtacgtgtggtttgtgattcgtttgagtacgtgtgtttgaatggtaattttttgttatttttgaatta

SEQ ID NO: 21034 - DNA, 596 bp, Artificial Sequence
  chemically treated genomic DNA (Homo sapiens) CpG-island No: 21034
taattcaaaaataacaaaaaattaccattcaaacacacgtactcaaacgaatcacaaaccacacgtactctaacgaatcacaaaccacacgtactctaacgaatcacaaaacacacgtactctaacgaatctcacaaaacacacgtactctaacgaatctcacaaaacacacgtactctaacgaatcacaaaacacacgtactctaacgaatctcacaaaacacacgtactctaacgaatcacaaaacacacgtactctaacgaatcacaaaacacacgtactctaacgaatctcacaaaacacacgtactctaacgaatctcacaaaacacacgtactctaacgaatcacacaaaacacacgtactctaacgaatctcacaaaacacacgtactctaacgaatctcacaaaacacacgtactctaacgaatcacaaaacacacgtactctaacgaatcacaaaacacacgtactctaacgaatctcacaaaacacacgtactctaacgaatcacaaaacacacgtactctaacgaatctcacaaaacacacgtactctaacgaatctcacaaaacacacgtactctaacgaatct

SEQ ID NO: 21035 - DNA, 596 bp, Artificial Sequence
  chemically treated genomic DNA (Homo sapiens) CpG-island No: 21035
tgatttaggaatggtaaggaattgttatttaggtatacgtgtttaggcggattataggttatacgtgttttggcggattataggttatacgtgttttggcggattataggatatacgtgttttggcggattttataggatatacgtgttttggcggattttataggatatacgtgttttggcggattataggatatacgtgttttggcggattttataggatatacgtgttttggcggattataggatatacgtgttttggcggattataggatatacgtgttttggcggattttataggatatacgtgttttggcggattttataggatatacgtgttttggcggattatataggatatacgtgttttggcggattttataggatatacgtgttttggcggattttataggatatacgtgttttggcggattataggatatacgtgttttggcggattataggatatacgtgttttggcggattttataggatatacgtgttttggcggattataggatatacgtgttttggcggattttataggatatacgtgttttggcggattttataggatatacgtgttttggcggattt

SEQ ID NO: 21036 - DNA, 596 bp, Artificial Sequence
  chemically treated genomic DNA (Homo sapiens) CpG-island No: 21036
aaatccgccaaaacacgtatatcctataaaatccgccaaaacacgtatatcctataaaatccgccaaaacacgtatatcctataatccgccaaaacacgtatatcctataaaatccgccaaaacacgtatatcctataatccgccaaaacacgtatatcctataatccgccaaaacacgtatatcctataaaatccgccaaaacacgtatatcctataaaatccgccaaaacacgtatatcctatataatccgccaaaacacgtatatcctataaaatccgccaaaacacgtatatcctataaaatccgccaaaacacgtatatcctataatccgccaaaacacgtatatcctataatccgccaaaacacgtatatcctataaaatccgccaaaacacgtatatcctataatccgccaaaacacgtatatcctataaaatccgccaaaacacgtatatcctataaaatccgccaaaacacgtatatcctataatccgccaaaacacgtataacctataatccgccaaaacacgtataacctataatccgcctaaacacgtatacctaaataacaattccttaccattcctaaatca

SEQ ID NO: 21037 - DNA, 549 bp, Artificial Sequence
  chemically treated genomic DNA (Homo sapiens) CpG-island No: 21037
tcgtacgcgacgcggcgacgggggcgcgggcgggtatttcgggggttgtttatgtttcggatgcggtcgcgttttttttttttttagtcgggtattttcgcggttgggcggcgtttagggtcgcgggttcgttcgggtgtttcgtcgggggcgatatttcggcggtcgcgttgaggttattatgtgatacggcgtcgtatcgttgtgcgattaagtagcggcgttttggtgtttttcgtttatgtttttgggttttagtttcgcgtaggttaaggatgaggtcgaggttcgaaggtagggggtttcgggcgggagtcgcgttgtttttcgcgttattgttgttgttgttgttgtcgtcgtcgtcgacgttgttggggcgtttgtgggtagcgggtatattttcgtcgtcggcgttcggagttcggtaggacggcgcgttgggagtcggtcgcgttaaacgcggttgggtgtggaattagtttttcgtggtagaggagtatacgggtacggagtttttgtatgtgggtaaggtaaagtggggttttattt

SEQ ID NO: 21038 - DNA, 549 bp, Artificial Sequence
  chemically treated genomic DNA (Homo sapiens) CpG-island No: 21038
aaataaaaccccactttaccttacccacatacaaaaactccgtacccgtatactcctctaccacgaaaaactaattccacacccaaccgcgtttaacgcgaccgactcccaacgcgccgtcctaccgaactccgaacgccgacgacgaaaatatacccgctacccacaaacgccccaacaacgtcgacgacgacgacaacaacaacaacaacaataacgcgaaaaacaacgcgactcccgcccgaaaccccctaccttcgaacctcgacctcatccttaacctacgcgaaactaaaacccaaaaacataaacgaaaaacaccaaaacgccgctacttaatcgcacaacgatacgacgccgtatcacataataacctcaacgcgaccgccgaaatatcgcccccgacgaaacacccgaacgaacccgcgaccctaaacgccgcccaaccgcgaaaatacccgactaaaaaaaaaaaaaacgcgaccgcatccgaaacataaacaacccccgaaatacccgcccgcgcccccgtcgccgcgtcgcgtacga

SEQ ID NO: 21039 - DNA, 549 bp, Artificial Sequence
  chemically treated genomic DNA (Homo sapiens) CpG-island No: 21039
gagtggggttttattttattttgtttatatataggggtttcgtgttcgtgtatttttttattacgaagaattggttttatatttagtcgcgtttgacgcggtcggtttttagcgcgtcgttttgtcgagtttcgggcgtcgacggcgagggtgtgttcgttgtttataggcgttttagtagcgtcggcggcggcggtagtagtagtagtagtagtagcgcgggggatagcgcgattttcgttcggagttttttattttcgggtttcggttttatttttggtttgcgcggggttggggtttaggagtatggacgagaggtattagggcgtcgttgtttggtcgtataacgatgcggcgtcgtgttatatggtggttttagcgcggtcgtcgggatgtcgttttcgacggggtattcggacgggttcgcggttttgaacgtcgtttagtcgcgggggtattcggttggagggggagggggcgcggtcgtattcggggtatggatagttttcggggtgttcgttcgcgttttcgtcgtcgcgtcgcgtgcgg

SEQ ID NO: 21040 - DNA, 549 bp, Artificial Sequence
  chemically treated genomic DNA (Homo sapiens) CpG-island No: 21040
ccgcacgcgacgcgacgacgaaaacgcgaacgaacaccccgaaaactatccataccccgaatacgaccgcgccccctccccctccaaccgaatacccccgcgactaaacgacgttcaaaaccgcgaacccgtccgaataccccgtcgaaaacgacatcccgacgaccgcgctaaaaccaccatataacacgacgccgcatcgttatacgaccaaacaacgacgccctaatacctctcgtccatactcctaaaccccaaccccgcgcaaaccaaaaataaaaccgaaacccgaaaataaaaaactccgaacgaaaatcgcgctatcccccgcgctactactactactactactaccgccgccgccgacgctactaaaacgcctataaacaacgaacacaccctcgccgtcgacgcccgaaactcgacaaaacgacgcgctaaaaaccgaccgcgtcaaacgcgactaaatataaaaccaattcttcgtaataaaaaaatacacgaacacgaaacccctatatataaacaaaataaaataaaaccccactc

SEQ ID NO: 21041 - DNA, 690 bp, Artificial Sequence
  chemically treated genomic DNA (Homo sapiens) CpG-island No: 21041
ggaggcgcggtttttttcggatgtcgggacgagggaggggaagggaggggaagaggcggggtaggtaggggcggggggcgcggtagcggtagcgcgtatgttcgggttcggggcgtttggatttcgggagggagcggagggcgtttatttgtaggtcgttggggtatgcgtcgttttcggagagcgagtttattaggtttttttcgtttagcgtggttcgtttgtacgtcgatatttgtaaggttaaatgtagtacggatttttttagcgtttttatggttttcgcgttcgaatggggaagcggtttcgattttggcgtcgtcgtcgtcgcgtttcgtttcggtttggatattcgagatcgagatcggtttacggagcggttcgcgcggggaggggtttcgttcgtttttcgttttcgttttttaggtcgcgttcgttttatttttagcgtcgatagtagggcggatatcgggggcggttatacgtttcgtatgttgtgttttagacgtttggtttcgttgttcgggtggtcgggatgggatgggtcgggttaggcgttgtattattttcgcgggcggggtttgatcggttcgtcggcgttcggtttttaattttcggtttttcggggagattttaagattcgagaggttcgggggagatggggatttttttttttttcggaggtcggga

SEQ ID NO: 21042 - DNA, 690 bp, Artificial Sequence
  chemically treated genomic DNA (Homo sapiens) CpG-island No: 21042
tcccgacctccgaaaaaaaaaaaaatccccatctcccccgaacctctcgaatcttaaaatctccccgaaaaaccgaaaattaaaaaccgaacgccgacgaaccgatcaaaccccgcccgcgaaaataatacaacgcctaacccgacccatcccatcccgaccacccgaacaacgaaaccaaacgtctaaaacacaacatacgaaacgtataaccgcccccgatatccgccctactatcgacgctaaaaataaaacgaacgcgacctaaaaaacgaaaacgaaaaacgaacgaaacccctccccgcgcgaaccgctccgtaaaccgatctcgatctcgaatatccaaaccgaaacgaaacgcgacgacgacgacgccaaaatcgaaaccgcttccccattcgaacgcgaaaaccataaaaacgctaaaaaaatccgtactacatttaaccttacaaatatcgacgtacaaacgaaccacgctaaacgaaaaaaacctaataaactcgctctccgaaaacgacgcataccccaacgacctacaaataaacgccctccgctccctcccgaaatccaaacgccccgaacccgaacatacgcgctaccgctaccgcgccccccgcccctacctaccccgcctcttcccctcccttcccctccctcgtcccgacatccgaaaaaaaccgcgcctcc

SEQ ID NO: 21043 - DNA, 690 bp, Artificial Sequence
  chemically treated genomic DNA (Homo sapiens) CpG-island No: 21043
tttcgattttcggggaagggaggggtttttatttttttcgggtttttcgggttttggggttttttcgggaggtcggaggttgggaatcgggcgtcggcgaatcgattaggtttcgttcgcgaaggtggtgtaacgtttggttcggtttattttatttcggttattcgggtagcgggattaggcgtttggggtatagtatgcggggcgtgtggtcgttttcggtgttcgttttgttgtcggcgttgggggtgaggcgggcgcggtttggagggcgggggcgggaggcgggcgggattttttttcgcgcgggtcgtttcgtgggtcggtttcggtttcgggtgtttaggtcggggcggggcgcggcggcggcggcgttagggtcggggtcgtttttttattcgggcgcgagagttatggaggcgttgagggagttcgtgttgtatttggttttgtagatgtcgacgtataagcgggttacgttggacgaggaggatttggtggattcgtttttcgagggcgacgtatattttaacggtttgtaggtaggcgtttttcgttttttttcgaggtttaggcgtttcgggttcgggtatgcgcgttgtcgttgtcgcgtttttcgtttttatttatttcgtttttttttttttttttttttttttcgtttcggtattcgggaggggtcgcgttttt

SEQ ID NO: 21044 - DNA, 690 bp, Artificial Sequence
  chemically treated genomic DNA (Homo sapiens) CpG-island No: 21044
aaaaacgcgacccctcccgaataccgaaacgaaaaaaaaaaaaaaaaaaaaaaaaacgaaataaataaaaacgaaaaacgcgacaacgacaacgcgcatacccgaacccgaaacgcctaaacctcgaaaaaaaacgaaaaacgcctacctacaaaccgttaaaatatacgtcgccctcgaaaaacgaatccaccaaatcctcctcgtccaacgtaacccgcttatacgtcgacatctacaaaaccaaatacaacacgaactccctcaacgcctccataactctcgcgcccgaataaaaaaacgaccccgaccctaacgccgccgccgccgcgccccgccccgacctaaacacccgaaaccgaaaccgacccacgaaacgacccgcgcgaaaaaaaatcccgcccgcctcccgcccccgccctccaaaccgcgcccgcctcacccccaacgccgacaacaaaacgaacaccgaaaacgaccacacgccccgcatactataccccaaacgcctaatcccgctacccgaataaccgaaataaaataaaccgaaccaaacgttacaccaccttcgcgaacgaaacctaatcgattcgccgacgcccgattcccaacctccgacctcccgaaaaaaccccaaaacccgaaaaacccgaaaaaaataaaaacccctcccttccccgaaaatcgaaa

SEQ ID NO: 21045 - DNA, 772 bp, Artificial Sequence
  chemically treated genomic DNA (Homo sapiens) CpG-island No: 21045
atattcggttgggattagaattaagttcggcgcggtcgttttcgacgggattaagcgtagcgtcgtcgggagagtcgcgttttgttcgggcgtttttcgattttacgtttttcgagagtcgggcgggggttgttgttgtagtcggcgtttagtttttcgcgagttagggcggtttcgggtgttattcgcggtatcgttgttcgcgatcgtcgaggttgggttggatcggattagattttcgcgcgtagtatttattatagttcgcgtgtttcgtttcggtttcgcgtagtttttcgcgttcggttttcgatttttagtttcgggttttttgtttttagtttagttgttcggacggttcggttgtttggtttaggcggcgcgtttagttttagcgggcgagttcgcggtttcggcgtcgagtgtcggaggggcggggtcgtcgcggggttaatggtagggcgcgggggtttgggtggcgtagttaattacggtttgaggttgtatttttcgcgttcgcgcgggtttttaatttttggcgcgttgggagtcggttgttcgggttgcgcggggaatttggagggtaggagtaggcgggagttgttgtttcggggcgtagggtttagattttgtcgagatcggcgttgggagttagtagaatcgggaagaggttcgattgtgttcggtggggtcgtcgggagtttcggcgatttttgttttttgtttggtttttgtattggagtgtgattcggggcgttgtagttgtttgtgtgtg

SEQ ID NO: 21046 - DNA, 772 bp, Artificial Sequence
  chemically treated genomic DNA (Homo sapiens) CpG-island No: 21046
cacacacaaacaactacaacgccccgaatcacactccaatacaaaaaccaaacaaaaaacaaaaatcgccgaaactcccgacgaccccaccgaacacaatcgaacctcttcccgattctactaactcccaacgccgatctcgacaaaatctaaaccctacgccccgaaacaacaactcccgcctactcctaccctccaaattccccgcgcaacccgaacaaccgactcccaacgcgccaaaaattaaaaacccgcgcgaacgcgaaaaatacaacctcaaaccgtaattaactacgccacccaaacccccgcgccctaccattaaccccgcgacgaccccgcccctccgacactcgacgccgaaaccgcgaactcgcccgctaaaactaaacgcgccgcctaaaccaaacaaccgaaccgtccgaacaactaaactaaaaacaaaaaacccgaaactaaaaatcgaaaaccgaacgcgaaaaactacgcgaaaccgaaacgaaacacgcgaactataataaatactacgcgcgaaaatctaatccgatccaacccaacctcgacgatcgcgaacaacgataccgcgaataacacccgaaaccgccctaactcgcgaaaaactaaacgccgactacaacaacaacccccgcccgactctcgaaaaacgtaaaatcgaaaaacgcccgaacaaaacgcgactctcccgacgacgctacgcttaatcccgtcgaaaacgaccgcgccgaacttaattctaatcccaaccgaatat

SEQ ID NO: 21047 - DNA, 772 bp, Artificial Sequence
  chemically treated genomic DNA (Homo sapiens) CpG-island No: 21047
tatatataagtagttgtagcgtttcgggttatattttagtgtaggagttaggtaggagataaaggtcgtcgaggttttcggcggttttatcggatataatcgagttttttttcggttttgttagtttttaacgtcggtttcggtaaggtttggattttgcgtttcgaagtaataattttcgtttgtttttgttttttaggtttttcgcgtagttcgggtagtcgatttttagcgcgttaagggttaagggttcgcgcgggcgcggggagtgtagttttaggtcgtgattggttgcgttatttaggttttcgcgttttgttattggtttcgcggcggtttcgttttttcggtattcggcgtcgaagtcgcgagttcgttcgttggagttgagcgcgtcgtttgggttaggtagtcgagtcgttcgagtagttgggttgggagtagggaattcggagttgggaatcgggagtcgggcgcggggagttgcgcgaagtcggggcggagtacgcgagttatggtgagtgttgcgcgcggaggtttggttcggtttagtttagtttcgacggtcgcgggtagcggtgtcgcgggtggtattcggggtcgttttggttcgcggggggttgggcgtcggttgtagtagtagttttcgttcggttttcggaaggcgtggagtcggggagcgttcgggtagagcgcggttttttcggcggcgttgcgtttggtttcgtcgggggcggtcgcgtcgagtttggttttggttttagtcggatgt

SEQ ID NO: 21048 - DNA, 772 bp, Artificial Sequence
  chemically treated genomic DNA (Homo sapiens) CpG-island No: 21048
acatccgactaaaaccaaaaccaaactcgacgcgaccgcccccgacgaaaccaaacgcaacgccgccgaaaaaaccgcgctctacccgaacgctccccgactccacgccttccgaaaaccgaacgaaaactactactacaaccgacgcccaaccccccgcgaaccaaaacgaccccgaataccacccgcgacaccgctacccgcgaccgtcgaaactaaactaaaccgaaccaaacctccgcgcgcaacactcaccataactcgcgtactccgccccgacttcgcgcaactccccgcgcccgactcccgattcccaactccgaattccctactcccaacccaactactcgaacgactcgactacctaacccaaacgacgcgctcaactccaacgaacgaactcgcgacttcgacgccgaataccgaaaaaacgaaaccgccgcgaaaccaataacaaaacgcgaaaacctaaataacgcaaccaatcacgacctaaaactacactccccgcgcccgcgcgaacccttaacccttaacgcgctaaaaatcgactacccgaactacgcgaaaaacctaaaaaacaaaaacaaacgaaaattattacttcgaaacgcaaaatccaaaccttaccgaaaccgacgttaaaaactaacaaaaccgaaaaaaaactcgattatatccgataaaaccgccgaaaacctcgacgacctttatctcctacctaactcctacactaaaatataacccgaaacgctacaactacttatatata

SEQ ID NO: 21049 - DNA, 854 bp, Artificial Sequence
  chemically treated genomic DNA (Homo sapiens) CpG-island No: 21049
ttcgtcgcgttttttcgcggttcgggattgtttattattttttttaggaagcgatcgtggaaataataaatacgtaggttttttagcgttttttcgtttcgcgttgttaggtcgtttcgtttttcgttttcgttcgtttcgcgggatatagttcgttcgtatttcggggttcgagcgtcgattatattttaggcgtagtcggggagagtttcgcgcgcgtattttttcgttcgcggtcgaggcgatttttcgcggtttcgttcgttcgagtttttcgcggaggtattcggtcgtttcgtttttttcgtttcgcgttcgttaatttttagttcgcggttttgattggtcgtcgtattttcgttttttttttcgaatcgttattttgaaaattttgttgattttggggagtcgagcgcgcggcgcgagcgttacgttagatagcggttcgcgcgtttttttttcggcgtcggtcgtcgtcgttttttagaattttttcgtgttttcgcgtgttaggttcgcggcggtcgaaattcgcggtaagggttgtttcgggacgtcggaggttcggtcgtttttgtcgcggtcgacgggggagggacgcggttatttggacggcggtttggggcgggggaggggacgtggagggtcggtagttcgggtcgggtcgggaatagcgtaggtcgggcgggcgcgcgcgtacgcggggtagcgggcgcggtttttcgtttcgggaatttttggacggcggcggcggagcgggagggaagtcgtttttggggattgagcgttgcggtttcggttatgggaggaggtaatttttagggtaggtgtttcgcgggaagggtagtattatt

SEQ ID NO: 21050 - DNA, 854 bp, Artificial Sequence
  chemically treated genomic DNA (Homo sapiens) CpG-island No: 21050
aataatactacccttcccgcgaaacacctaccctaaaaattacctcctcccataaccgaaaccgcaacgctcaatccccaaaaacgacttccctcccgctccgccgccgccgtccaaaaattcccgaaacgaaaaaccgcgcccgctaccccgcgtacgcgcgcgcccgcccgacctacgctattcccgacccgacccgaactaccgaccctccacgtcccctcccccgccccaaaccgccgtccaaataaccgcgtccctcccccgtcgaccgcgacaaaaacgaccgaacctccgacgtcccgaaacaacccttaccgcgaatttcgaccgccgcgaacctaacacgcgaaaacacgaaaaaattctaaaaaacgacgacgaccgacgccgaaaaaaaaacgcgcgaaccgctatctaacgtaacgctcgcgccgcgcgctcgactccccaaaatcaacaaaattttcaaaataacgattcgaaaaaaaaaacgaaaatacgacgaccaatcaaaaccgcgaactaaaaattaacgaacgcgaaacgaaaaaaacgaaacgaccgaatacctccgcgaaaaactcgaacgaacgaaaccgcgaaaaatcgcctcgaccgcgaacgaaaaaatacgcgcgcgaaactctccccgactacgcctaaaatataatcgacgctcgaaccccgaaatacgaacgaactatatcccgcgaaacgaacgaaaacgaaaaacgaaacgacctaacaacgcgaaacgaaaaaacgctaaaaaacctacgtatttattatttccacgatcgcttcctaaaaaaaataataaacaatcccgaaccgcgaaaaaacgcgacgaa

SEQ ID NO: 21051 - DNA, 854 bp, Artificial Sequence
  chemically treated genomic DNA (Homo sapiens) CpG-island No: 21051
aatgatgttatttttttcgcgggatatttgttttgaaagttgtttttttttatagtcgggatcgtagcgtttagtttttaggggcggtttttttttcgtttcgtcgtcgtcgtttagggattttcgaggcgggaaatcgcgttcgttgtttcgcgtgcgcgcgcgttcgttcggtttgcgttgttttcggttcggttcgagttgtcggttttttacgttttttttttcgttttaggtcgtcgtttaaatggtcgcgtttttttttcgtcggtcgcggtaggggcgatcgggttttcggcgtttcgaagtagtttttatcgcggatttcggtcgtcgcgggtttggtacgcgagggtacgaggaggttttgggaggcggcggcggtcgacgtcgaggagaaggcgcgcgggtcgttgtttggcgtgacgttcgcgtcgcgcgttcggttttttagaattaataagatttttaaaatggcggttcgggaaggagagcgggaatgcggcgattaattagggtcgcgagttgggagttggcgggcgcggggcgggggaggcggggcggtcgggtgttttcgcgggaagttcgggcgggcgggatcgcgaggggtcgtttcggtcgcgggcggagggatgcgcgcgcggggtttttttcggttgcgtttggagtgtggtcggcgttcgggtttcggagtgcgggcgggttgtgtttcgcggggcgggcgggagcgggaggcgaggcggtttggtagcgcggaacggaaggacgttagggggtttgcgtgtttattgtttttacggtcgttttttggaaaagatgatgagtagtttcgggtcgcggaggggcgcggcggg

SEQ ID NO: 21052 - DNA, 854 bp, Artificial Sequence
  chemically treated genomic DNA (Homo sapiens) CpG-island No: 21052
cccgccgcgcccctccgcgacccgaaactactcatcatcttttccaaaaaacgaccgtaaaaacaataaacacgcaaaccccctaacgtccttccgttccgcgctaccaaaccgcctcgcctcccgctcccgcccgccccgcgaaacacaacccgcccgcactccgaaacccgaacgccgaccacactccaaacgcaaccgaaaaaaaccccgcgcgcgcatccctccgcccgcgaccgaaacgacccctcgcgatcccgcccgcccgaacttcccgcgaaaacacccgaccgccccgcctcccccgccccgcgcccgccaactcccaactcgcgaccctaattaatcgccgcattcccgctctccttcccgaaccgccattttaaaaatcttattaattctaaaaaaccgaacgcgcgacgcgaacgtcacgccaaacaacgacccgcgcgccttctcctcgacgtcgaccgccgccgcctcccaaaacctcctcgtaccctcgcgtaccaaacccgcgacgaccgaaatccgcgataaaaactacttcgaaacgccgaaaacccgatcgcccctaccgcgaccgacgaaaaaaaaacgcgaccatttaaacgacgacctaaaacgaaaaaaaaaacgtaaaaaaccgacaactcgaaccgaaccgaaaacaacgcaaaccgaacgaacgcgcgcgcacgcgaaacaacgaacgcgatttcccgcctcgaaaatccctaaacgacgacgacgaaacgaaaaaaaaaccgcccctaaaaactaaacgctacgatcccgactataaaaaaaaacaactttcaaaacaaatatcccgcgaaaaaaataacatcatt

SEQ ID NO: 21053 - DNA, 725 bp, Artificial Sequence
  chemically treated genomic DNA (Homo sapiens) CpG-island No: 21053
aaggaggatataaagggcgaagagttcgtattttttttcgtttttaggagcgtaagaggtcgggagttaggcgagttggtagtttcggtggttcgcgatttgtttattgatttttttcgtatttttgtgacgaagcgcgtatgcgcgtttcgtatttatcgtttcggcggtttttttgcggcgtagttgtattagtttttcgagagtagcgtattttttcgtcgggcggttgatgcgggagcgttatgatataggcgtttgcgtagagtcgcgcgttggttttttgtttcgtttaaaggggcggtgtagaggcggtaggaagatggagttggggagttgtttggagggcgggagggaggcggcggaggaagagggcgagtttgaggtgaaaaagcggcgatttttgtgtgtggagtttgtttcggtcgtaagttgcgatgtcgtagtggtttagtgttttttggtcgagaacgattgggagatggaagtacgttttcgttgttttcgttttcggttttattatttaggtcggtggagcgtataaattttattttttgtgtttttgttttttagagggttttgaatttttatttcgagttttcggtggaggagagcgttttggaacgtcgatttgaaattatttttgagtttaagatttagtaagtgatgaggggagcgggagttagttcgtacggaggtagtttgatattaggtagttttgcgcg

SEQ ID NO: 21054 - DNA, 725 bp, Artificial Sequence
  chemically treated genomic DNA (Homo sapiens) CpG-island No: 21054
cgcgcaaaactacctaatatcaaactacctccgtacgaactaactcccgctcccctcatcacttactaaatcttaaactcaaaaataatttcaaatcgacgttccaaaacgctctcctccaccgaaaactcgaaataaaaattcaaaaccctctaaaaaacaaaaacacaaaaaataaaatttatacgctccaccgacctaaataataaaaccgaaaacgaaaacaacgaaaacgtacttccatctcccaatcgttctcgaccaaaaaacactaaaccactacgacatcgcaacttacgaccgaaacaaactccacacacaaaaatcgccgctttttcacctcaaactcgccctcttcctccgccgcctccctcccgccctccaaacaactccccaactccatcttcctaccgcctctacaccgcccctttaaacgaaacaaaaaaccaacgcgcgactctacgcaaacgcctatatcataacgctcccgcatcaaccgcccgacgaaaaaatacgctactctcgaaaaactaatacaactacgccgcaaaaaaaccgccgaaacgataaatacgaaacgcgcatacgcgcttcgtcacaaaaatacgaaaaaaatcaataaacaaatcgcgaaccaccgaaactaccaactcgcctaactcccgacctcttacgctcctaaaaacgaaaaaaaatacgaactcttcgccctttatatcctcctt

SEQ ID NO: 21055 - DNA, 725 bp, Artificial Sequence
  chemically treated genomic DNA (Homo sapiens) CpG-island No: 21055
cgcgtagggttatttggtattaaattgttttcgtgcggattggttttcgttttttttattatttattaggttttgggtttagagatggttttaggtcggcgttttaaggcgtttttttttatcggaggttcgaagtaggagtttagagttttttgaaaaataaaggtataagggatgaggtttgtgcgttttatcgatttaggtaatggagtcggaagcgaggatagcgaaagcgtatttttattttttagtcgttttcggttaggaagtattgagttattgcggtatcgtagtttgcgatcgaggtaaattttatatatagaagtcgtcgtttttttattttaggttcgtttttttttttcgtcgtttttttttcgttttttaggtaattttttaattttatttttttgtcgtttttgtatcgtttttttaagcggaataggaggttaacgcgcggttttgcgtaggcgtttgtgttatggcgttttcgtattaatcgttcggcggggaaatgcgttgttttcggaaaattggtgtagttgcgtcgtaagggagtcgtcggggcggtgggtgcgaagcgcgtatgcgcgtttcgttataagggtgcgaggaaagttagtgagtaaatcgcggattatcggggttgttagttcgtttgattttcggttttttgcgtttttaggggcggagaagggtgcgggtttttcgttttttgtgtttttttt

SEQ ID NO: 21056 - DNA, 725 bp, Artificial Sequence
  chemically treated genomic DNA (Homo sapiens) CpG-island No: 21056
aaaaaaaacacaaaaaacgaaaaacccgcacccttctccgcccctaaaaacgcaaaaaaccgaaaatcaaacgaactaacaaccccgataatccgcgatttactcactaactttcctcgcacccttataacgaaacgcgcatacgcgcttcgcacccaccgccccgacgactcccttacgacgcaactacaccaattttccgaaaacaacgcatttccccgccgaacgattaatacgaaaacgccataacacaaacgcctacgcaaaaccgcgcgttaacctcctattccgcttaaaaaaacgatacaaaaacgacaaaaaaataaaattaaaaaattacctaaaaaacgaaaaaaaaacgacgaaaaaaaaaaacgaacctaaaataaaaaaacgacgacttctatatataaaatttacctcgatcgcaaactacgataccgcaataactcaatacttcctaaccgaaaacgactaaaaaataaaaatacgctttcgctatcctcgcttccgactccattacctaaatcgataaaacgcacaaacctcatcccttatacctttatttttcaaaaaactctaaactcctacttcgaacctccgataaaaaaaaacgccttaaaacgccgacctaaaaccatctctaaacccaaaacctaataaataataaaaaaaacgaaaaccaatccgcacgaaaacaatttaataccaaataaccctacgcg

SEQ ID NO: 21057 - DNA, 635 bp, Artificial Sequence
  chemically treated genomic DNA (Homo sapiens) CpG-island No: 21057
ttttcggatgttttttacggcgaatatttgttcgtcgatggttgatagttttatgcggggcggcgggcgagcgggttcggggtcgggtcgggtcgggggcggagttgcggggtcgcggttgcggcgcgcgatgttggggttggcggggttttcgttattttcgttcgggcgcgtacgcgtacgcgtacgcgcgtatattttttcgcgtttttttacgtcgtcgacgttttatttttgaatttgcgtaacgtttttttcggcgttagcgagcgagcgcgcgtaaggagggggcggggcgggagcgcgcggaacggtcgcgggttcggttcgcgttttgagggttagtttcgttttcgagtttcgtttttatcggaatttcgttttcggggttcgttttcgcgggttgcgattgggtcgcgggtcgcgagtcgcgagcgttgtcgtgggatttatttggttcggttatcggttggggcggggcggaggttcgcgcgtttcgttttgttgtgacgtcggggcgggacgtgatttttaatatttaggcgggcgttttatagtttttcggtgattgttaggggtcgaagtggtagggtttagtggagtcgacgataaagttaaggtttagagcggggagg

SEQ ID NO: 21058 - DNA, 635 bp, Artificial Sequence
  chemically treated genomic DNA (Homo sapiens) CpG-island No: 21058
cctccccgctctaaaccttaactttatcgtcgactccactaaaccctaccacttcgacccctaacaatcaccgaaaaactataaaacgcccgcctaaatattaaaaatcacgtcccgccccgacgtcacaacaaaacgaaacgcgcgaacctccgccccgccccaaccgataaccgaaccaaataaatcccacgacaacgctcgcgactcgcgacccgcgacccaatcgcaacccgcgaaaacgaaccccgaaaacgaaattccgataaaaacgaaactcgaaaacgaaactaaccctcaaaacgcgaaccgaacccgcgaccgttccgcgcgctcccgccccgccccctccttacgcgcgctcgctcgctaacgccgaaaaaaacgttacgcaaattcaaaaataaaacgtcgacgacgtaaaaaaacgcgaaaaaatatacgcgcgtacgcgtacgcgtacgcgcccgaacgaaaataacgaaaaccccgccaaccccaacatcgcgcgccgcaaccgcgaccccgcaactccgcccccgacccgacccgaccccgaacccgctcgcccgccgccccgcataaaactatcaaccatcgacgaacaaatattcgccgtaaaaaacatccgaaaa

SEQ ID NO: 21059 - DNA, 635 bp, Artificial Sequence
  chemically treated genomic DNA (Homo sapiens) CpG-island No: 21059
ttttttcgttttgagttttgattttgtcgtcggttttattgggttttgttatttcggtttttggtagttatcgggaggttatgaggcgttcgtttgggtattaaggattacgtttcgtttcggcgttatagtaagacggggcgcgcgagttttcgtttcgttttagtcggtgatcgagttaaataagttttacggtagcgttcgcggttcgcggttcgcggtttaatcgtaattcgcgggggcgggtttcgggggcggggtttcgatgggggcggggttcgggggcggagttgatttttagggcgcgagtcgagttcgcggtcgtttcgcgcgttttcgtttcgttttttttttgcgcgcgttcgttcgttggcgtcgaggaaaacgttgcgtaggtttaaaaatggaacgtcggcggcgtgagggagcgcgagggggtgtgcgcgcgtgcgcgtgcgcgtgcgcgttcggacgagggtgacggggatttcgttagttttagtatcgcgcgtcgtagtcgcggtttcgtagtttcgttttcggttcggttcggtttcgggttcgttcgttcgtcgtttcgtatggagttgttagttatcggcgagtaggtgttcgtcgtggagagtattcggaag

SEQ ID NO: 21060 - DNA, 635 bp, Artificial Sequence
  chemically treated genomic DNA (Homo sapiens) CpG-island No: 21060
cttccgaatactctccacgacgaacacctactcgccgataactaacaactccatacgaaacgacgaacgaacgaacccgaaaccgaaccgaaccgaaaacgaaactacgaaaccgcgactacgacgcgcgatactaaaactaacgaaatccccgtcaccctcgtccgaacgcgcacgcgcacgcgcacgcgcgcacaccccctcgcgctccctcacgccgccgacgttccatttttaaacctacgcaacgttttcctcgacgccaacgaacgaacgcgcgcaaaaaaaaaacgaaacgaaaacgcgcgaaacgaccgcgaactcgactcgcgccctaaaaatcaactccgcccccgaaccccgcccccatcgaaaccccgcccccgaaacccgcccccgcgaattacgattaaaccgcgaaccgcgaaccgcgaacgctaccgtaaaacttatttaactcgatcaccgactaaaacgaaacgaaaactcgcgcgccccgtcttactataacgccgaaacgaaacgtaatccttaatacccaaacgaacgcctcataacctcccgataactaccaaaaaccgaaataacaaaacccaataaaaccgacgacaaaatcaaaactcaaaacgaaaaaa

SEQ ID NO: 21061 - DNA, 587 bp, Artificial Sequence
  chemically treated genomic DNA (Homo sapiens) CpG-island No: 21061
tgtcgcgtttcgtttttgtgcggcgtacgatcggagttagtgattaagtcggttttaagataaagcggaggtcgagtttaggaagtaagcgcgtttttcgtttcgtttggagggagggtttaattatagtatagtcgcgtttattttttattcggacgtgatttagtttttatagaggttcggtttttttcgttataatttcggttcgcggtttcgtttcgtttcgtgaatggtcggtcggttttaggttaaaaaagcgtttaggtgtttgcgacggagttttcggagaaaggtaagtacgtcgtagttaatgaggtgatagaaacgtaaagtagcgattaatgattagttgagttgggttgggtcggtcgacgaattacgaggtttcgtattcggatatggttatgggttcggaaatttagttcgggaaaagtgtgaggggttttttacgtggggaaggaatagtaggcgcggaggagggggtaagcgtgtgtgagatttagtggtttatgcgtgcgtttgtcgtgtaagggttatttttggggtttggagtgggggaataaattaatgtggttgttttttcgtgg

SEQ ID NO: 21062 - DNA, 587 bp, Artificial Sequence
  chemically treated genomic DNA (Homo sapiens) CpG-island No: 21062
ccacgaaaaaacaaccacattaatttattcccccactccaaaccccaaaaataacccttacacgacaaacgcacgcataaaccactaaatctcacacacgcttaccccctcctccgcgcctactattccttccccacgtaaaaaacccctcacacttttcccgaactaaatttccgaacccataaccatatccgaatacgaaacctcgtaattcgtcgaccgacccaacccaactcaactaatcattaatcgctactttacgtttctatcacctcattaactacgacgtacttacctttctccgaaaactccgtcgcaaacacctaaacgcttttttaacctaaaaccgaccgaccattcacgaaacgaaacgaaaccgcgaaccgaaattataacgaaaaaaaccgaacctctataaaaactaaatcacgtccgaataaaaaataaacgcgactatactataattaaaccctccctccaaacgaaacgaaaaacgcgcttacttcctaaactcgacctccgctttatcttaaaaccgacttaatcactaactccgatcgtacgccgcacaaaaacgaaacgcgaca

SEQ ID NO: 21063 - DNA, 587 bp, Artificial Sequence
  chemically treated genomic DNA (Homo sapiens) CpG-island No: 21063
ttacggaaaaatagttatattgatttgtttttttattttaaattttaggaatgatttttatacgataaacgtacgtatggattattgaattttatatacgtttgttttttttttcgcgtttgttgttttttttttacgtgaagagttttttatatttttttcgaattagattttcgagtttataattatattcgggtgcgaagtttcgtgattcgtcggtcggtttagtttaatttagttagttattggtcgttgttttgcgtttttattattttattggttgcgacgtgtttgttttttttcggaggtttcgtcgtagatatttaaacgtttttttgatttgaggtcggtcgattatttacggaacggggcgggatcgcgggtcggagttgtggcggaagaggtcgggtttttgtgagaattaggttacgttcgggtgaggagtgagcgcggttgtgttgtggttgggttttttttttaggcggggcggagagcgcgtttgttttttgggttcggttttcgttttgttttggagtcggtttaattattgatttcgatcgtgcgtcgtataagggcggagcgcggta

SEQ ID NO: 21064 - DNA, 587 bp, Artificial Sequence
  chemically treated genomic DNA (Homo sapiens) CpG-island No: 21064
taccgcgctccgcccttatacgacgcacgatcgaaatcaataattaaaccgactccaaaacaaaacgaaaaccgaacccaaaaaacaaacgcgctctccgccccgcctaaaaaaaaaacccaaccacaacacaaccgcgctcactcctcacccgaacgtaacctaattctcacaaaaacccgacctcttccgccacaactccgacccgcgatcccgccccgttccgtaaataatcgaccgacctcaaatcaaaaaaacgtttaaatatctacgacgaaacctccgaaaaaaaacaaacacgtcgcaaccaataaaataataaaaacgcaaaacaacgaccaataactaactaaattaaactaaaccgaccgacgaatcacgaaacttcgcacccgaatataattataaactcgaaaatctaattcgaaaaaaatataaaaaactcttcacgtaaaaaaaaaacaacaaacgcgaaaaaaaaaacaaacgtatataaaattcaataatccatacgtacgtttatcgtataaaaatcattcctaaaatttaaaataaaaaaacaaatcaatataactatttttccgtaa

SEQ ID NO: 21065 - DNA, 655 bp, Artificial Sequence
  chemically treated genomic DNA (Homo sapiens) CpG-island No: 21065
cggcgacgtaggtgtcggagagcgaggaggagggcggcgtggaggagggtattttcgggatcggcgggcgcgcgttggtagttcgtcgacggcgggggcgggggcggggggcggtaggggagcgagcgcgttggcggcgggcggtggcgttgcgcgcggggtggcgaaaggatgtgcgcgggatcgcgggggagggggagggagcgcgcgggttagttggaggcgggagggggcggagttttgtggcgtttgaattcgtttcgggggtgttaaggtgcgtttttagtttgacgcgatcgtttggggcggagttagcgggacgtgttatttgtagtgttggttagggttttttatttattagggagtagttttttcgcgcgatagttcgggagcgcgtaggtagtcgcgcgtatatacgtacgtaggtatatatatatatatatatatatatatatatatattttcgtatatataaatacgttaggacgttcgttttcgttattgtattttcgaattagtagagcgaagttattgcgggttttgttaattttagtatcgtggggcgaagtagagttattgtgtattaaggagaggtcggtgtttgcgttgtcgtttttggtatttaatttagtagatcgtttattttatcgggtaa

SEQ ID NO: 21066 - DNA, 655 bp, Artificial Sequence
  chemically treated genomic DNA (Homo sapiens) CpG-island No: 21066
ttacccgataaaataaacgatctactaaattaaataccaaaaacgacaacgcaaacaccgacctctccttaatacacaataactctacttcgccccacgatactaaaattaacaaaacccgcaataacttcgctctactaattcgaaaatacaataacgaaaacgaacgtcctaacgtatttatatatacgaaaatatatatatatatatatatatatatatatatatacctacgtacgtatatacgcgcgactacctacgcgctcccgaactatcgcgcgaaaaaactactccctaataaataaaaaaccctaaccaacactacaaataacacgtcccgctaactccgccccaaacgatcgcgtcaaactaaaaacgcaccttaacacccccgaaacgaattcaaacgccacaaaactccgccccctcccgcctccaactaacccgcgcgctccctccccctcccccgcgatcccgcgcacatcctttcgccaccccgcgcgcaacgccaccgcccgccgccaacgcgctcgctcccctaccgccccccgcccccgcccccgccgtcgacgaactaccaacgcgcgcccgccgatcccgaaaataccctcctccacgccgccctcctcctcgctctccgacacctacgtcgccg

SEQ ID NO: 21067 - DNA, 655 bp, Artificial Sequence
  chemically treated genomic DNA (Homo sapiens) CpG-island No: 21067
ttattcgatggggtgagcggtttgttgggttaggtgttagagacggtagcgtaggtatcggtttttttttgatgtataatggttttgtttcgttttacgatgttgaggttaatagaattcgtagtagtttcgttttgttggttcggggatgtagtagcgaagacgagcgttttagcgtgtttgtgtgtgcgaaagtgtgtgtgtgtgtgtgtgtgtgtgtgtgtgtgtgtttgcgtgcgtgtgtgcgcgcgattgtttgcgcgttttcgaattgtcgcgcggggaaattgttttttagtaaataaaaagttttagttagtattgtaggtggtacgtttcgttgatttcgttttaggcggtcgcgttagattggagacgtattttggtattttcggggcgggtttagacgttatagggtttcgttttttttcgtttttagttagttcgcgcgttttttttttttttttcgcgatttcgcgtatattttttcgttatttcgcgcgtaacgttatcgttcgtcgttagcgcgttcgtttttttgtcgtttttcgttttcgttttcgtcgtcggcgagttgttagcgcgcgttcgtcggtttcggaagtatttttttttacgtcgttttttttttcgtttttcggtatttgcgtcgtcg

SEQ ID NO: 21068 - DNA, 655 bp, Artificial Sequence
  chemically treated genomic DNA (Homo sapiens) CpG-island No: 21068
cgacgacgcaaataccgaaaaacgaaaaaaaaaacgacgtaaaaaaaaatacttccgaaaccgacgaacgcgcgctaacaactcgccgacgacgaaaacgaaaacgaaaaacgacaaaaaaacgaacgcgctaacgacgaacgataacgttacgcgcgaaataacgaaaaaatatacgcgaaatcgcgaaaaaaaaaaaaaaaacgcgcgaactaactaaaaacgaaaaaaaacgaaaccctataacgtctaaacccgccccgaaaataccaaaatacgtctccaatctaacgcgaccgcctaaaacgaaatcaacgaaacgtaccacctacaatactaactaaaactttttatttactaaaaaacaatttccccgcgcgacaattcgaaaacgcgcaaacaatcgcgcgcacacacgcacgcaaacacacacacacacacacacacacacacacacacactttcgcacacacaaacacgctaaaacgctcgtcttcgctactacatccccgaaccaacaaaacgaaactactacgaattctattaacctcaacatcgtaaaacgaaacaaaaccattatacatcaaaaaaaaaccgatacctacgctaccgtctctaacacctaacccaacaaaccgctcaccccatcgaataa

SEQ ID NO: 21069 - DNA, 802 bp, Artificial Sequence
  chemically treated genomic DNA (Homo sapiens) CpG-island No: 21069
cgcggagaggtgtttacgcgcgattcggttgttttttttttttgcgggttcgggtagggtagggcgggaacgcgggacgtgttttaagcgggttagtcgagcgcgagataggcgatgttgtagaagtttgttcgtttgcgggttatatatcggtcggtttcggttgtaggggttgcggggttacgggtcgcggggcgtcgggagtcgcgagtaggtgacggtcgcgtcgggtagtttcgcgggtcgcgattttcgagagtttggcgttatttcgcggaagtcggaggaattgcggttttttttcgttttcgcgcggaggggagagggaggcgtagcgcggaggggagagggaggcgtagcgcggaggggagagggaggcgtagcgcggaggggagagggaggcgtagttcgtatcgcgtaatttcggggttttggcgggagggaaggtgatttgcgtgggacgattttaagaggttaggttcggttttcgtagtttatttacgaggatatcgcgattaagttattaaagtattttttggttaggtcgagattttttttttttcgggttttaagagaaaaaagtatttttttttaaaatacgaatttttcgcggaggggttcggggttgtttggtacggggtagggtgtgcggttgtcgtgcgggcgcgggttagagttacgtggaggtaggcggagagggcgagggggttttcgtaaattattttgagggatttttggtttaagtttttgttttcgaaaggttgcgggacggttttgacgttgattatgtagttgttttttt

SEQ ID NO: 21070 - DNA, 802 bp, Artificial Sequence
  chemically treated genomic DNA (Homo sapiens) CpG-island No: 21070
aaaaaaacaactacataatcaacgtcaaaaccgtcccgcaacctttcgaaaacaaaaacttaaaccaaaaatccctcaaaataatttacgaaaaccccctcgccctctccgcctacctccacgtaactctaacccgcgcccgcacgacaaccgcacaccctaccccgtaccaaacaaccccgaacccctccgcgaaaaattcgtattttaaaaaaaaatacttttttctcttaaaacccgaaaaaaaaaaaatctcgacctaaccaaaaaatactttaataacttaatcgcgatatcctcgtaaataaactacgaaaaccgaacctaacctcttaaaatcgtcccacgcaaatcaccttccctcccgccaaaaccccgaaattacgcgatacgaactacgcctccctctcccctccgcgctacgcctccctctcccctccgcgctacgcctccctctcccctccgcgctacgcctccctctcccctccgcgcgaaaacgaaaaaaaaccgcaattcctccgacttccgcgaaataacgccaaactctcgaaaatcgcgacccgcgaaactacccgacgcgaccgtcacctactcgcgactcccgacgccccgcgacccgtaaccccgcaacccctacaaccgaaaccgaccgatatataacccgcaaacgaacaaacttctacaacatcgcctatctcgcgctcgactaacccgcttaaaacacgtcccgcgttcccgccctaccctacccgaacccgcaaaaaaaaaaaacaaccgaatcgcgcgtaaacacctctccgcg

SEQ ID NO: 21071 - DNA, 802 bp, Artificial Sequence
  chemically treated genomic DNA (Homo sapiens) CpG-island No: 21071
aagagaatagttatataattaacgttaaagtcgtttcgtaatttttcggaaatagggatttgggttaaaaattttttaggatgatttacgggggttttttcgtttttttcgtttgtttttacgtgattttggttcgcgttcgtacggtagtcgtatattttgtttcgtgttaggtagtttcgggttttttcgcggggagttcgtgttttaggagaaagtgttttttttttttggggttcgggggaaaaggggtttcggtttggttagagagtgttttggtggtttggtcgcggtattttcgtgggtgaattgcgaaggtcgggtttggttttttggagtcgttttacgtaagttattttttttttcgttagagtttcgggattgcgcggtgcgggttgcgtttttttttttttttcgcgttgcgtttttttttttttttcgcgttgcgtttttttttttttttcgcgttgcgtttttttttttttttcgcgcgggagcgggaagaagtcgtagttttttcggttttcgcggggtggcgttaggttttcgggaatcgcggttcgcggggttgttcggcgcggtcgttatttgttcgcggttttcggcgtttcgcgattcgtggtttcgtaatttttgtagtcgaggtcggtcggtgtgtgattcgtaggcgggtaggtttttgtagtatcgtttgtttcgcgttcggttggttcgtttagggtacgtttcgcgttttcgttttattttattcggattcgtaagaagagggggtagtcgagtcgcgcgtgggtattttttcgcg

SEQ ID NO: 21072 - DNA, 802 bp, Artificial Sequence
  chemically treated genomic DNA (Homo sapiens) CpG-island No: 21072
cgcgaaaaaatacccacgcgcgactcgactaccccctcttcttacgaatccgaataaaataaaacgaaaacgcgaaacgtaccctaaacgaaccaaccgaacgcgaaacaaacgatactacaaaaacctacccgcctacgaatcacacaccgaccgacctcgactacaaaaattacgaaaccacgaatcgcgaaacgccgaaaaccgcgaacaaataacgaccgcgccgaacaaccccgcgaaccgcgattcccgaaaacctaacgccaccccgcgaaaaccgaaaaaactacgacttcttcccgctcccgcgcgaaaaaaaaaaaaaaacgcaacgcgaaaaaaaaaaaaaaacgcaacgcgaaaaaaaaaaaaaaacgcaacgcgaaaaaaaaaaaaaaacgcaacccgcaccgcgcaatcccgaaactctaacgaaaaaaaaaataacttacgtaaaacgactccaaaaaaccaaacccgaccttcgcaattcacccacgaaaataccgcgaccaaaccaccaaaacactctctaaccaaaccgaaaccccttttcccccgaaccccaaaaaaaaaaaacactttctcctaaaacacgaactccccgcgaaaaaacccgaaactacctaacacgaaacaaaatatacgactaccgtacgaacgcgaaccaaaatcacgtaaaaacaaacgaaaaaaacgaaaaaacccccgtaaatcatcctaaaaaatttttaacccaaatccctatttccgaaaaattacgaaacgactttaacgttaattatataactattctctt

SEQ ID NO: 21073 - DNA, 890 bp, Artificial Sequence
  chemically treated genomic DNA (Homo sapiens) CpG-island No: 21073
tttggagagcgggggcgttaagaaggcgagttcggggttgcggcggttcgagaagtcgttttattcgtatatcgcgtttatcgttatggttatttagagttcgtttagtaagcgtttgacgtttagcgagatttattagtttttgtaggcgcgtttttttttttttcgcggcgtttattagggttggaagaattcggtgcgttataatttttcgtttaacgagtgttttattaagttgtttaagggtttcgggcggttcggtaagggttattattggattatcgattcggttagcgagtttatgttcgaggagggttcgtttcgtcgtcggtcgcgcggttttaggcggaagtgttaggcgtttaagtttatgtattatcgcgtggtgagcggtttgggtttcggggcgtcgttgttgttttagggtttcgatttttaggcgttttcgtcggcgtcgttcggttgttatagttagggcggttacggcggtttcgatatgatgttcgcgggttacgacgtcggcgcgggcgtttttagttacgcgtatttttattattattattattattacgtttcgtatatgtcgtttaattcgggttttatttatatggttagttgttcggtgttcgcgggattcgggggcgtcggtgcggtcgggggcggcggcggcggcgattacgggtcggatagtagtagtagttcggtattttcgttttcggttatggcgagcgttatcgaatgttattcgttttatacgagttttgcggcgtattggagttcgtttggcgtttcgttttattttaagtagtcgtttgttttgacgtttagtagtaatttcgtcgtttcggtaggtttgtattttagtatgtttttttattcgttggagtaga

SEQ ID NO: 21074 - DNA, 890 bp, Artificial Sequence
  chemically treated genomic DNA (Homo sapiens) CpG-island No: 21074
tctactccaacgaataaaaaaacatactaaaatacaaacctaccgaaacgacgaaattactactaaacgtcaaaacaaacgactacttaaaataaaacgaaacgccaaacgaactccaatacgccgcaaaactcgtataaaacgaataacattcgataacgctcgccataaccgaaaacgaaaataccgaactactactactatccgacccgtaatcgccgccgccgccgcccccgaccgcaccgacgcccccgaatcccgcgaacaccgaacaactaaccatataaataaaacccgaattaaacgacatatacgaaacgtaataataataataataataaaaatacgcgtaactaaaaacgcccgcgccgacgtcgtaacccgcgaacatcatatcgaaaccgccgtaaccgccctaactataacaaccgaacgacgccgacgaaaacgcctaaaaatcgaaaccctaaaacaacaacgacgccccgaaacccaaaccgctcaccacgcgataatacataaacttaaacgcctaacacttccgcctaaaaccgcgcgaccgacgacgaaacgaaccctcctcgaacataaactcgctaaccgaatcgataatccaataataacccttaccgaaccgcccgaaacccttaaacaacttaataaaacactcgttaaacgaaaaattataacgcaccgaattcttccaaccctaataaacgccgcgaaaaaaaaaaaaacgcgcctacaaaaactaataaatctcgctaaacgtcaaacgcttactaaacgaactctaaataaccataacgataaacgcgatatacgaataaaacgacttctcgaaccgccgcaaccccgaactcgccttcttaacgcccccgctctccaaa

SEQ ID NO: 21075 - DNA, 890 bp, Artificial Sequence
  chemically treated genomic DNA (Homo sapiens) CpG-island No: 21075
tttgttttagcgagtaggaggatatgttggagtgtaggtttgtcgaggcggcggggttgttgttgggcgttagggtaggcggttgtttgaggtaaggcgaggcgttaggcgagttttagtgcgtcgtagggttcgtgtagggcgagtggtattcgatggcgttcgttatggtcggggacgagggtatcgggttgttgttgttgttcggttcgtagtcgtcgtcgtcgtcgttttcggtcgtatcgacgttttcgggtttcgcgggtatcgggtagttggttatgtaggtggaattcgggttgggcgatatgtgcgggacgtggtggtggtggtggtggtgagggtgcgcgtggttgggggcgttcgcgtcggcgtcgtagttcgcgggtattatgtcgaggtcgtcgtagtcgttttggttgtggtagtcgagcggcgtcgacgggggcgtttggaagtcgaagttttggggtagtagcgacgtttcgaagtttaagtcgtttattacgcggtggtatatgggtttgagcgtttggtattttcgtttgaagtcgcgcggtcggcggcggaacgagtttttttcgaatatgaattcgttggtcgggtcgatggtttagtagtggtttttgtcgggtcgttcgaggtttttaggtagtttgatgaagtattcgttgagcgagagattgtggcgtatcgagtttttttagttttggtaggcgtcgcggaagaaggggaagcgcgtttgtaggaattggtagatttcgttgagcgttaggcgtttgttgggcgagttttggatggttatgacgatgagcgcgatgtacgagtagggcggtttttcgggtcgtcgtagtttcgagttcgtttttttggcgttttcgttttttagg

SEQ ID NO: 21076 - DNA, 890 bp, Artificial Sequence
  chemically treated genomic DNA (Homo sapiens) CpG-island No: 21076
cctaaaaaacgaaaacgccaaaaaaacgaactcgaaactacgacgacccgaaaaaccgccctactcgtacatcgcgctcatcgtcataaccatccaaaactcgcccaacaaacgcctaacgctcaacgaaatctaccaattcctacaaacgcgcttccccttcttccgcgacgcctaccaaaactaaaaaaactcgatacgccacaatctctcgctcaacgaatacttcatcaaactacctaaaaacctcgaacgacccgacaaaaaccactactaaaccatcgacccgaccaacgaattcatattcgaaaaaaactcgttccgccgccgaccgcgcgacttcaaacgaaaataccaaacgctcaaacccatataccaccgcgtaataaacgacttaaacttcgaaacgtcgctactaccccaaaacttcgacttccaaacgcccccgtcgacgccgctcgactaccacaaccaaaacgactacgacgacctcgacataatacccgcgaactacgacgccgacgcgaacgcccccaaccacgcgcaccctcaccaccaccaccaccaccacgtcccgcacatatcgcccaacccgaattccacctacataaccaactacccgatacccgcgaaacccgaaaacgtcgatacgaccgaaaacgacgacgacgacgactacgaaccgaacaacaacaacaacccgataccctcgtccccgaccataacgaacgccatcgaataccactcgccctacacgaaccctacgacgcactaaaactcgcctaacgcctcgccttacctcaaacaaccgcctaccctaacgcccaacaacaaccccgccgcctcgacaaacctacactccaacatatcctcctactcgctaaaacaaa

SEQ ID NO: 21077 - DNA, 633 bp, Artificial Sequence
  chemically treated genomic DNA (Homo sapiens) CpG-island No: 21077
agcgtcgacggtcgttttcgtgggtaggtgtgagcgttcgtttttttttttttcgagtttgttattttgtggtttaggatttgttattagaatttgttttaacgcgacgagggaatttatttgtgtgtagagcgtcgcgtatatatcggggttcgcgggatagggtagttgcgttagcgtagcgtcgggtgtgttcgggtaggtgttgcgggtaaggaagtaggtagcggtttttgagtagtcgtttcgtttcggtattgcggggatacggcggggttgaggttacgagagtagggttcgagttcggcgggtcgtggttacggtttttttgtattgaaaaattgaattcggttcgaagcgacgtgtattttatggtttttatattattcggttaattaagaaaagattcgggcgaatggatttaacgtagttcggtgtcgagagggttcggtttagtagtttttggggtttagtgcgtagggtattgcgggtcgattgcgtttcggggttaggaggcgtcgagaaagtaaaagtaaaagtcggcggcgggtggaggttaagcggttcggtgtaggtcggggatcggggagtcgtttcgggagagtagggtttaggttttttttgttttttttt

SEQ ID NO: 21078 - DNA, 633 bp, Artificial Sequence
  chemically treated genomic DNA (Homo sapiens) CpG-island No: 21078
aaaaaaaaacaaaaaaaacctaaaccctactctcccgaaacgactccccgatccccgacctacaccgaaccgcttaacctccacccgccgccgacttttacttttactttctcgacgcctcctaaccccgaaacgcaatcgacccgcaataccctacgcactaaaccccaaaaactactaaaccgaaccctctcgacaccgaactacgttaaatccattcgcccgaatcttttcttaattaaccgaataatataaaaaccataaaatacacgtcgcttcgaaccgaattcaatttttcaatacaaaaaaaccgtaaccacgacccgccgaactcgaaccctactctcgtaacctcaaccccgccgtatccccgcaataccgaaacgaaacgactactcaaaaaccgctacctacttccttacccgcaacacctacccgaacacacccgacgctacgctaacgcaactaccctatcccgcgaaccccgatatatacgcgacgctctacacacaaataaattccctcgtcgcgttaaaacaaattctaataacaaatcctaaaccacaaaataacaaactcgaaaaaaaaaaaaacgaacgctcacacctacccacgaaaacgaccgtcgacgct

SEQ ID NO: 21079 - DNA, 633 bp, Artificial Sequence
  chemically treated genomic DNA (Homo sapiens) CpG-island No: 21079
ggagggggatagagaaggtttggattttgttttttcggggcggtttttcggttttcggtttgtatcgggtcgtttgatttttattcgtcgtcggtttttgtttttgttttttcggcgttttttggtttcggggcgtaatcggttcgtagtgttttgcgtattgggttttagaggttgttggatcgggttttttcggtatcgggttgcgttaggtttattcgttcgggtttttttttagttaatcgagtggtgtggggattataaagtgtacgtcgtttcgggtcggatttagttttttagtgtaagaaaatcgtaattacggttcgtcgggttcgggttttgttttcgtggttttagtttcgtcgtgttttcgtaatgtcggagcgaggcggttgtttaggggtcgttgtttatttttttgttcgtaatatttattcgaatatattcggcgttgcgttaacgtagttgttttgtttcgcgagtttcgatgtgtgcgcggcgttttgtatataggtgagttttttcgtcgcgttaaagtaagttttgatggtaagttttggattataaaatagtaggttcgggaggagagagggcgagcgtttatatttgtttacgaaggcggtcgtcggcgtt

SEQ ID NO: 21080 - DNA, 633 bp, Artificial Sequence
  chemically treated genomic DNA (Homo sapiens) CpG-island No: 21080
aacgccgacgaccgccttcgtaaacaaatataaacgctcgccctctctcctcccgaacctactattttataatccaaaacttaccatcaaaacttactttaacgcgacgaaaaaactcacctatatacaaaacgccgcgcacacatcgaaactcgcgaaacaaaacaactacgttaacgcaacgccgaatatattcgaataaatattacgaacaaaaaaataaacaacgacccctaaacaaccgcctcgctccgacattacgaaaacacgacgaaactaaaaccacgaaaacaaaacccgaacccgacgaaccgtaattacgattttcttacactaaaaaactaaatccgacccgaaacgacgtacactttataatccccacaccactcgattaactaaaaaaaaacccgaacgaataaacctaacgcaacccgataccgaaaaaacccgatccaacaacctctaaaacccaatacgcaaaacactacgaaccgattacgccccgaaaccaaaaaacgccgaaaaaacaaaaacaaaaaccgacgacgaataaaaatcaaacgacccgatacaaaccgaaaaccgaaaaaccgccccgaaaaaacaaaatccaaaccttctctatccccctcc

SEQ ID NO: 21081 - DNA, 653 bp, Artificial Sequence
  chemically treated genomic DNA (Homo sapiens) CpG-island No: 21081
attttcgcggtttattgacgttcgttttttttagcgtttttttttcgggtttcggtatcgttttttttttacgtttttttttgcggttgtcgttttttttttttttttcgcgttttcggttttttttcggtttcggattcgtatagtcgggaagttgaatcgtcggcgggtcgtagaatgcgtattcggttttaggtcgtcgagtattcggttcgtcgcgtcgcgttttcggagtaataaacggtttagcgcggtcgggtttggggtttggaggcggggcgggcgcggagttttatgtcgtgtaatttttgttttagttttttatcgttagtttttgttttcgttttacgagtttcgttagttttcgtcgggtgttcgggatttgcggcggcgtcgttttgttgtgtatcgttatgttgggttgaggcgggcggcggcggcgcgaggttgggggcggtttttgcgtcgttagggggcgttttttcgttttgcgtttgcgcgcgcggttttcggagacgcgtgtagcgtcgtgtcgagtttcgttaaggtcggggttttcgaaggtttttttcggagagttttagagatgcggtttttgttttttgtcgttttttgtttttcggttggtcgtcggttttatagacgttataaat

SEQ ID NO: 21082 - DNA, 653 bp, Artificial Sequence
  chemically treated genomic DNA (Homo sapiens) CpG-island No: 21082
atttataacgtctataaaaccgacgaccaaccgaaaaacaaaaaacgacaaaaaacaaaaaccgcatctctaaaactctccgaaaaaaaccttcgaaaaccccgaccttaacgaaactcgacacgacgctacacgcgtctccgaaaaccgcgcgcgcaaacgcaaaacgaaaaaacgccccctaacgacgcaaaaaccgcccccaacctcgcgccgccgccgcccgcctcaacccaacataacgatacacaacaaaacgacgccgccgcaaatcccgaacacccgacgaaaactaacgaaactcgtaaaacgaaaacaaaaactaacgataaaaaactaaaacaaaaattacacgacataaaactccgcgcccgccccgcctccaaaccccaaacccgaccgcgctaaaccgtttattactccgaaaacgcgacgcgacgaaccgaatactcgacgacctaaaaccgaatacgcattctacgacccgccgacgattcaacttcccgactatacgaatccgaaaccgaaaaaaaaccgaaaacgcgaaaaaaaaaaaaaaaacgacaaccgcaaaaaaaaacgtaaaaaaaaaacgataccgaaacccgaaaaaaaaacgctaaaaaaaacgaacgtcaataaaccgcgaaaat

SEQ ID NO: 21083 - DNA, 653 bp, Artificial Sequence
  chemically treated genomic DNA (Homo sapiens) CpG-island No: 21083
atttgtggcgtttgtaaagtcggcggttagtcgaggggtaggaaacggtagaaagtagaagtcgtatttttagagtttttcgagaaggattttcgagagtttcggttttagcgaagttcggtacggcgttgtacgcgttttcggaagtcgcgcgcgtaggcgtagagcgggggggcgttttttggcggcgtagggatcgtttttaatttcgcgtcgtcgtcgttcgttttagtttaatatggcgatgtataataaggcggcgtcgtcgtagatttcggatattcggcgggagttggcggagttcgtgaagcggaagtaggagttggcggtgaggggttaggataggggttgtacggtatggggtttcgcgttcgtttcgtttttaggttttaagttcggtcgcgttaggtcgtttgttatttcgggggcgcggcgcggcgggtcgggtgttcggcggtttgaggtcgggtgcgtattttgcggttcgtcggcggtttagtttttcggttgtgcgaattcggagtcgggagagagtcgggagcgcgggagggggaggggaagcggtagtcgtaggagggggcgtggagggaggacggtgtcggggttcggggagagggcgttaggaagggcgagcgttagtgagtcgcgggggt

SEQ ID NO: 21084 - DNA, 653 bp, Artificial Sequence
  chemically treated genomic DNA (Homo sapiens) CpG-island No: 21084
acccccgcgactcactaacgctcgcccttcctaacgccctctccccgaaccccgacaccgtcctccctccacgccccctcctacgactaccgcttcccctccccctcccgcgctcccgactctctcccgactccgaattcgcacaaccgaaaaactaaaccgccgacgaaccgcaaaatacgcacccgacctcaaaccgccgaacacccgacccgccgcgccgcgcccccgaaataacaaacgacctaacgcgaccgaacttaaaacctaaaaacgaaacgaacgcgaaaccccataccgtacaacccctatcctaacccctcaccgccaactcctacttccgcttcacgaactccgccaactcccgccgaatatccgaaatctacgacgacgccgccttattatacatcgccatattaaactaaaacgaacgacgacgacgcgaaattaaaaacgatccctacgccgccaaaaaacgcccccccgctctacgcctacgcgcgcgacttccgaaaacgcgtacaacgccgtaccgaacttcgctaaaaccgaaactctcgaaaatccttctcgaaaaactctaaaaatacgacttctactttctaccgtttcctacccctcgactaaccgccgactttacaaacgccacaaat

SEQ ID NO: 21085 - DNA, 550 bp, Artificial Sequence
  chemically treated genomic DNA (Homo sapiens) CpG-island No: 21085
tcgtgcgttcgttcggcgtttgggtatcgcggtttggttcggagggggggtgggaattgggggggtggataggagttttcgtcggttcgcgattcgacgttagggtggttcggggcgggggttttttcgcgttggtcggggcggggggttcgcggaggggcggggggcgtttatttgggtcggcgggcgggcgggtttatcggtagacggacgtacgggagggcggatcgcgggacgtttagcgggacgggtagacggcggtttggtcgtttcggtttttaggtcggaatggatttcgggtcgggagagatagatcgagagagaaagggaggaggaggaggaggaggcggcggcggttcggggaggggaagaggagggagggagcgttcgagttgtgaggaggggttcggtatgtagtcgggaggaggaggaatgaggaagcgcgcggtgacggatttttcgtcggtgattcgggagagatttaggggcggttttagttgggggttcgggcggggtggggatatcgggtatagaagtttcgttttttatt

SEQ ID NO: 21086 - DNA, 550 bp, Artificial Sequence
  chemically treated genomic DNA (Homo sapiens) CpG-island No: 21086
aataaaaaacgaaacttctatacccgatatccccaccccgcccgaacccccaactaaaaccgcccctaaatctctcccgaatcaccgacgaaaaatccgtcaccgcgcgcttcctcattcctcctcctcccgactacataccgaacccctcctcacaactcgaacgctccctccctcctcttcccctccccgaaccgccgccgcctcctcctcctcctcctccctttctctctcgatctatctctcccgacccgaaatccattccgacctaaaaaccgaaacgaccaaaccgccgtctacccgtcccgctaaacgtcccgcgatccgccctcccgtacgtccgtctaccgataaacccgcccgcccgccgacccaaataaacgccccccgcccctccgcgaaccccccgccccgaccaacgcgaaaaaacccccgccccgaaccaccctaacgtcgaatcgcgaaccgacgaaaactcctatccacccccccaattcccaccccccctccgaaccaaaccgcgatacccaaacgccgaacgaacgcacga

SEQ ID NO: 21087 - DNA, 550 bp, Artificial Sequence
  chemically treated genomic DNA (Homo sapiens) CpG-island No: 21087
agtgggaggcggggtttttgtgttcggtgtttttatttcgttcggatttttagttagggtcgtttttgggtttttttcgggttatcggcggggaattcgttatcgcgcgtttttttatttttttttttttcggttgtatgtcgggtttttttttatagttcgagcgttttttttttttttttttttttttcgggtcgtcgtcgttttttttttttttttttttttttttttttcgatttgtttttttcggttcggaatttatttcggtttgggagtcggagcggttaggtcgtcgtttgttcgtttcgttggacgtttcgcggttcgttttttcgtgcgttcgtttgtcggtgagttcgttcgttcgtcggtttaggtgagcgtttttcgttttttcgcggatttttcgtttcggttagcgcgggggagttttcgtttcggattattttggcgtcggatcgcgggtcggcggggatttttgtttatttttttaatttttatttttttttcgggttaagtcgcgatatttaagcgtcgggcgggcgtacgg

SEQ ID NO: 21088 - DNA, 550 bp, Artificial Sequence
  chemically treated genomic DNA (Homo sapiens) CpG-island No: 21088
ccgtacgcccgcccgacgcttaaatatcgcgacttaacccgaaaaaaaaataaaaattaaaaaaataaacaaaaatccccgccgacccgcgatccgacgccaaaataatccgaaacgaaaactcccccgcgctaaccgaaacgaaaaatccgcgaaaaaacgaaaaacgctcacctaaaccgacgaacgaacgaactcaccgacaaacgaacgcacgaaaaaacgaaccgcgaaacgtccaacgaaacgaacaaacgacgacctaaccgctccgactcccaaaccgaaataaattccgaaccgaaaaaaacaaatcgaaaaaaaaaaaaaaaaaaaaaaaaaaaaaacgacgacgacccgaaaaaaaaaaaaaaaaaaaaaaaacgctcgaactataaaaaaaaacccgacatacaaccgaaaaaaaaaaaaataaaaaaacgcgcgataacgaattccccgccgataacccgaaaaaaacccaaaaacgaccctaactaaaaatccgaacgaaataaaaacaccgaacacaaaaaccccgcctcccact

SEQ ID NO: 21089 - DNA, 1376 bp, Artificial Sequence
  chemically treated genomic DNA (Homo sapiens) CpG-island No: 21089
cgtcgcggggcggggattagcgtcgttttaaatatttagggtaagggagtgttttatttttggggaggggtgtcgttcgggtttttttttttatcgtgggtggcgaaaggcgggacggaaaagcgtcgtttggataggcgcgttttttttagggatgtagggtcgggcgggggattcggcggcggtttagttcggaggaaggatttttacgtttcggttcgggttttcgggttttcggttttaggtagcgttcgaggtcggaataatagcgcgcgcgggcggggcgggggcgggggcggggcgtttttttgggtatcgttttcggttcgtttttcgcgttcgtagtttcgttcgtatattggtttttattcgtcgttcgtttaggtattgttcgcgggagtcgtcgtcgtcgtcgtcgcgttcgttatggacgttcgtttgtatttttcggcgttcgcggtgggcgcgcggttcggggtcgagtcggtcggtttggcgtatttggattattattacggcggtaaggtaggcgggggcgggcgggggttttcggcgggcggggtcggagttatttggtagttcgggatttaggcgttttcggggttatacggggtcgcgtatattagtttcgtcgacgggtacgggcggtttatatcgattttttcgcggttacgtttacgttttgagttgttgggatcgcgggtagaagttatttcgatagttattcgtgcgacgatatagtggttttttattcgcgtttttttgatagtttcgtagttatttataagtcgttatagtgatttatagttatacgtaggcggttaggtattgtttatacggtttcgtcgttttacgtaagttattttgatagttatttatatataacgatacgtaattatttattcgtaaatagttttatcgttatagacgagttatttatagacgtttcgatgttttatatatcgtgatatgtttttattcgttgttatatttaggtataacgggggatagttatataaagaagtcgttcgatagttatattttcgtagttataacgttttatttaggcgtacgttgttatatatagttatttttttggacggtgagttttagatatagatcgttttgacggttatatagttatacgcggttatatttagggacggttatatttcggttatttatattcgcgcgtcgaggtttaattttttagcgtcgtagtatattaattgggtagtttattaattggtcgttattgtttggcggggtttcggatttcgagtaggttgcggttaatcgaggtttgtgttttttcgggagcggtgagtcggcgtttttttaggttggggttgtagtgtcggatatttttttttttt

SEQ ID NO: 21090 - DNA, 1376 bp, Artificial Sequence
  chemically treated genomic DNA (Homo sapiens) CpG-island No: 21090
aaaaaaaaaaaatatccgacactacaaccccaacctaaaaaaacgccgactcaccgctcccgaaaaaacacaaacctcgattaaccgcaacctactcgaaatccgaaaccccgccaaacaataacgaccaattaataaactacccaattaatatactacgacgctaaaaaattaaacctcgacgcgcgaatataaataaccgaaatataaccgtccctaaatataaccgcgtataactatataaccgtcaaaacgatctatatctaaaactcaccgtccaaaaaaataactatatataacaacgtacgcctaaataaaacgttataactacgaaaatataactatcgaacgacttctttatataactatcccccgttatacctaaatataacaacgaataaaaacatatcacgatatataaaacatcgaaacgtctataaataactcgtctataacgataaaactatttacgaataaataattacgtatcgttatatataaataactatcaaaataacttacgtaaaacgacgaaaccgtataaacaatacctaaccgcctacgtataactataaatcactataacgacttataaataactacgaaactatcaaaaaaacgcgaataaaaaaccactatatcgtcgcacgaataactatcgaaataacttctacccgcgatcccaacaactcaaaacgtaaacgtaaccgcgaaaaaatcgatataaaccgcccgtacccgtcgacgaaactaatatacgcgaccccgtataaccccgaaaacgcctaaatcccgaactaccaaataactccgaccccgcccgccgaaaacccccgcccgcccccgcctaccttaccgccgtaataataatccaaatacgccaaaccgaccgactcgaccccgaaccgcgcgcccaccgcgaacgccgaaaaatacaaacgaacgtccataacgaacgcgacgacgacgacgacgactcccgcgaacaatacctaaacgaacgacgaataaaaaccaatatacgaacgaaactacgaacgcgaaaaacgaaccgaaaacgatacccaaaaaaacgccccgcccccgcccccgccccgcccgcgcgcgctattattccgacctcgaacgctacctaaaaccgaaaacccgaaaacccgaaccgaaacgtaaaaatccttcctccgaactaaaccgccgccgaatcccccgcccgaccctacatccctaaaaaaaacgcgcctatccaaacgacgcttttccgtcccgcctttcgccacccacgataaaaaaaaaaacccgaacgacacccctccccaaaaataaaacactcccttaccctaaatatttaaaacgacgctaatccccgccccgcgacg

SEQ ID NO: 21091 - DNA, 1376 bp, Artificial Sequence
  chemically treated genomic DNA (Homo sapiens) CpG-island No: 21091
gaggagggagggtgttcggtattatagttttagtttggagggacgtcggtttatcgttttcgggaggatataggtttcgattggtcgtagtttattcggaattcgaggtttcgttaggtagtgacggttaattagtaaattgtttaattagtgtgttgcggcgttgagaagttaaatttcgacgcgcgagtgtggatgatcgaggtgtggtcgtttttgggtgtgatcgcgtgtgattgtgtggtcgttaggacgatttgtgtttgaggtttatcgtttaggggggtggttgtgtgtgatagcgtgcgtttgggtgaggcgttgtggttgcgagagtgtgattgtcgggcgatttttttgtgtgattgtttttcgttgtgtttgggtgtgatagcgggtgggggtatgttacggtgtgtggggtatcggagcgtttgtgggtgattcgtttgtggcggtgaggttgtttgcgggtgagtggttgcgtgtcgttgtgtataagtgattgttagggtgatttgcgtgggacggcgggatcgtgtaagtagtgtttggtcgtttgcgtgtggttgtgggttattgtgacggtttgtgaatgattgcgaggttgttagggggacgcgagtgaggggttattgtgtcgtcgtacgggtggttgtcgggatgatttttgttcgcgattttaataatttagggcgtgagcgtggtcgcgaggggatcgatgtgagtcgttcgtgttcgtcggcggggttgatgtgcgcggtttcgtgtgatttcgggagcgtttgagtttcgagttgttaggtgatttcggtttcgttcgtcggggattttcgttcgttttcgtttattttgtcgtcgtggtaatagtttaggtgcgttaggtcggtcggttcggtttcgggtcgcgcgtttatcgcgggcgtcgaggggtataggcggacgtttatggcgggcgcggcggcggcggcggcggttttcgcgggtagtgtttgggcgggcggcgggtgggagttagtgtgcgagcgggattgcgagcgcggggggcgggtcgggggcggtgtttagaggagcgtttcgttttcgttttcgtttcgttcgcgcgcgttattgtttcggtttcgggcgttgtttagggtcgggggttcgggggttcgggtcggggcgtggaggtttttttttcgggttgggtcgtcgtcgggtttttcgttcggttttgtatttttgaggggggcgcgtttgtttagacggcgttttttcgtttcgtttttcgttatttacggtgaggagagaagttcgaacggtatttttttttagaagtgggatatttttttgttttaaatatttgaggcggcgttagttttcgtttcgcggcg

SEQ ID NO: 21092 - DNA, 1376 bp, Artificial Sequence
  chemically treated genomic DNA (Homo sapiens) CpG-island No: 21092
cgccgcgaaacgaaaactaacgccgcctcaaatatttaaaacaaaaaaatatcccacttctaaaaaaaaataccgttcgaacttctctcctcaccgtaaataacgaaaaacgaaacgaaaaaacgccgtctaaacaaacgcgcccccctcaaaaatacaaaaccgaacgaaaaacccgacgacgacccaacccgaaaaaaaaacctccacgccccgacccgaacccccgaacccccgaccctaaacaacgcccgaaaccgaaacaataacgcgcgcgaacgaaacgaaaacgaaaacgaaacgctcctctaaacaccgcccccgacccgccccccgcgctcgcaatcccgctcgcacactaactcccacccgccgcccgcccaaacactacccgcgaaaaccgccgccgccgccgccgcgcccgccataaacgtccgcctatacccctcgacgcccgcgataaacgcgcgacccgaaaccgaaccgaccgacctaacgcacctaaactattaccacgacgacaaaataaacgaaaacgaacgaaaatccccgacgaacgaaaccgaaatcacctaacaactcgaaactcaaacgctcccgaaatcacacgaaaccgcgcacatcaaccccgccgacgaacacgaacgactcacatcgatcccctcgcgaccacgctcacgccctaaattattaaaatcgcgaacaaaaatcatcccgacaaccacccgtacgacgacacaataacccctcactcgcgtccccctaacaacctcgcaatcattcacaaaccgtcacaataacccacaaccacacgcaaacgaccaaacactacttacacgatcccgccgtcccacgcaaatcaccctaacaatcacttatacacaacgacacgcaaccactcacccgcaaacaacctcaccgccacaaacgaatcacccacaaacgctccgataccccacacaccgtaacatacccccacccgctatcacacccaaacacaacgaaaaacaatcacacaaaaaaatcgcccgacaatcacactctcgcaaccacaacgcctcacccaaacgcacgctatcacacacaaccacccccctaaacgataaacctcaaacacaaatcgtcctaacgaccacacaatcacacgcgatcacacccaaaaacgaccacacctcgatcatccacactcgcgcgtcgaaatttaacttctcaacgccgcaacacactaattaaacaatttactaattaaccgtcactacctaacgaaacctcgaattccgaataaactacgaccaatcgaaacctatatcctcccgaaaacgataaaccgacgtccctccaaactaaaactataataccgaacaccctccctcctc

SEQ ID NO: 21093 - DNA, 530 bp, Artificial Sequence
  chemically treated genomic DNA (Homo sapiens) CpG-island No: 21093
taattttcggagttcgtgcgggtagtcgttgcgcgtcgtttttgttttttagtttttttttaggcgtttttacgagtgtagagtttaggtaagagtttgtttttcgcgacgtatatttttttcgcgtttcgggtttttcgttttgggtttttttgtgtgcgttcgcgttaggagaggcgcgtcgtttcgtgcgtttatttgcggcggaggttattgtgagttcgaaaaggagttatagtttcggttttatgaatttagattaggcgtcggagtatcggattaggaggacggtcgtttgtggtcgcgaaagggtattggggtcgggtatagttggtttcgttttttagttgtgggggttcgaggtcggtcgatcgttcgttgcgtttttagtttcggttaggagttggttgcggcggttataaatttttagagcgcgttgtttatttttgcgcggagttggtcggttgtggttcgggtttttttggtttttgtattattttcgtcgttttttcgttttttagaggggttgg

SEQ ID NO: 21094 - DNA, 530 bp, Artificial Sequence
  chemically treated genomic DNA (Homo sapiens) CpG-island No: 21094
ccaacccctctaaaaaacgaaaaaacgacgaaaataatacaaaaaccaaaaaaacccgaaccacaaccgaccaactccgcgcaaaaataaacaacgcgctctaaaaatttataaccgccgcaaccaactcctaaccgaaactaaaaacgcaacgaacgatcgaccgacctcgaacccccacaactaaaaaacgaaaccaactatacccgaccccaataccctttcgcgaccacaaacgaccgtcctcctaatccgatactccgacgcctaatctaaattcataaaaccgaaactataactccttttcgaactcacaataacctccgccgcaaataaacgcacgaaacgacgcgcctctcctaacgcgaacgcacacaaaaaaacccaaaacgaaaaacccgaaacgcgaaaaaaatatacgtcgcgaaaaacaaactcttacctaaactctacactcgtaaaaacgcctaaaaaaaaactaaaaaacaaaaacgacgcgcaacgactacccgcacgaactccgaaaatta

SEQ ID NO: 21095 - DNA, 530 bp, Artificial Sequence
  chemically treated genomic DNA (Homo sapiens) CpG-island No: 21095
ttagtttttttggggggcggggaggcgacgggggtggtgtagaagttagaaaagttcgagttatagtcggttagtttcgcgtagggatgggtagcgcgttttgaaagtttatgatcgtcgtagttaatttttggtcggagttggagacgtagcgagcgatcggtcggtttcgaatttttatagttggagggcgaggttagttgtattcggttttagtgttttttcgcggttataagcggtcgtttttttggttcggtgtttcggcgtttgatttaggtttatggagtcggggttgtggttttttttcgggtttatagtgattttcgtcgtaggtaagcgtacggggcggcgcgttttttttggcgcgagcgtatataaaaggatttagggcgggggattcgaggcgcggagaagatgtgcgtcgcggggagtaaatttttgtttgggttttgtattcgtgaagacgtttgggggagggttggggagtagaagcggcgcgtaacgattattcgtacgggtttcgggagttg

SEQ ID NO: 21096 - DNA, 530 bp, Artificial Sequence
  chemically treated genomic DNA (Homo sapiens) CpG-island No: 21096
caactcccgaaacccgtacgaataatcgttacgcgccgcttctactccccaaccctcccccaaacgtcttcacgaatacaaaacccaaacaaaaatttactccccgcgacgcacatcttctccgcgcctcgaatcccccgccctaaatccttttatatacgctcgcgccaaaaaaaacgcgccgccccgtacgcttacctacgacgaaaatcactataaacccgaaaaaaaaccacaaccccgactccataaacctaaatcaaacgccgaaacaccgaaccaaaaaaacgaccgcttataaccgcgaaaaaacactaaaaccgaatacaactaacctcgccctccaactataaaaattcgaaaccgaccgatcgctcgctacgtctccaactccgaccaaaaattaactacgacgatcataaactttcaaaacgcgctacccatccctacgcgaaactaaccgactataactcgaacttttctaacttctacaccacccccgtcgcctccccgccccccaaaaaaactaa

SEQ ID NO: 21097 - DNA, 586 bp, Artificial Sequence
  chemically treated genomic DNA (Homo sapiens) CpG-island No: 21097
agcgcgcgacggagaataaaagggcggtaatgattcgtagttgggcgagtagcgtgttcggtttgcggagatattcgattatcgggggtcgtcgtgtttattgcgcgtgcgcggttagcgggcggggcgtttcggggttttgggggcggggtggggacggtttggtgtgtgggtgagggtgtgggggcgggatttggtatggatgggcggggtttgacgcgcgggggcggggtttggtgtgggtgggcggtagcggacgtttgggatcgggtaggcgtttggcgttttttttcggattagttgtttcgcgtcgttttgttgttattaggcgggcgaggaaaagtttcgcgttcgtcggtcggcgcggagtcgagtagaaaattgttgatttagagaaaatgagagtattacgattaaataatggcggaaagcggcgacgacgtcgatagggcgttttagtattttttttttttcgttcgcggggatacggggagcgaagagggagttgagttgagggttcgcgcggagaagggggcgagcgttgttagttttgggttggaggttgggggtatcgattttagggttg

SEQ ID NO: 21098 - DNA, 586 bp, Artificial Sequence
  chemically treated genomic DNA (Homo sapiens) CpG-island No: 21098
caaccctaaaatcgatacccccaacctccaacccaaaactaacaacgctcgcccccttctccgcgcgaaccctcaactcaactccctcttcgctccccgtatccccgcgaacgaaaaaaaaaaaatactaaaacgccctatcgacgtcgtcgccgctttccgccattatttaatcgtaatactctcattttctctaaatcaacaattttctactcgactccgcgccgaccgacgaacgcgaaacttttcctcgcccgcctaataacaacaaaacgacgcgaaacaactaatccgaaaaaaaacgccaaacgcctacccgatcccaaacgtccgctaccgcccacccacaccaaaccccgcccccgcgcgtcaaaccccgcccatccataccaaatcccgcccccacaccctcacccacacaccaaaccgtccccaccccgcccccaaaaccccgaaacgccccgcccgctaaccgcgcacgcgcaataaacacgacgacccccgataatcgaatatctccgcaaaccgaacacgctactcgcccaactacgaatcattaccgcccttttattctccgtcgcgcgct

SEQ ID NO: 21099 - DNA, 586 bp, Artificial Sequence
  chemically treated genomic DNA (Homo sapiens) CpG-island No: 21099
tagttttggggtcggtatttttagtttttaatttagagttggtagcgttcgttttttttttcgcgcgggtttttagtttagtttttttttcgtttttcgtgttttcgcgagcgggagggaggggatgttaggacgttttgtcggcgtcgtcgtcgtttttcgttattgtttagtcgtgatgtttttattttttttgaattaataattttttgttcggtttcgcgtcgatcggcgaacgcggggttttttttcgttcgtttgatgatagtagagcggcgcggagtagttggttcggaaggaagcgttaggcgtttgttcggttttaggcgttcgttgtcgtttatttatattagatttcgttttcgcgcgttaagtttcgtttatttatattaagtttcgtttttatatttttatttatatattaggtcgtttttatttcgtttttagagtttcggggcgtttcgttcgttagtcgcgtacgcgtagtgagtacggcgattttcggtggtcgggtgttttcgtaggtcgaatacgttgttcgtttagttgcggattattatcgtttttttgtttttcgtcgcgcgtt

SEQ ID NO: 21100 - DNA, 586 bp, Artificial Sequence
  chemically treated genomic DNA (Homo sapiens) CpG-island No: 21100
aacgcgcgacgaaaaacaaaaaaacgataataatccgcaactaaacgaacaacgtattcgacctacgaaaacacccgaccaccgaaaatcgccgtactcactacgcgtacgcgactaacgaacgaaacgccccgaaactctaaaaacgaaataaaaacgacctaatatataaataaaaatataaaaacgaaacttaatataaataaacgaaacttaacgcgcgaaaacgaaatctaatataaataaacgacaacgaacgcctaaaaccgaacaaacgcctaacgcttccttccgaaccaactactccgcgccgctctactatcatcaaacgaacgaaaaaaaaccccgcgttcgccgatcgacgcgaaaccgaacaaaaaattattaattcaaaaaaaataaaaacatcacgactaaacaataacgaaaaacgacgacgacgccgacaaaacgtcctaacatcccctccctcccgctcgcgaaaacacgaaaaacgaaaaaaaaactaaactaaaaacccgcgcgaaaaaaaaaacgaacgctaccaactctaaattaaaaactaaaaataccgaccccaaaacta

SEQ ID NO: 21101 - DNA, 820 bp, Artificial Sequence
  chemically treated genomic DNA (Homo sapiens) CpG-island No: 21101
aggtaaatcgaagaataataggaaattacgtaaggcgtacgtgtttttgaggggggcgggtgcggggcgttggagaggcgcggtcgtcgttttgcgtttgcgtagtcgtcggttgtcgcgttgtcgagttattggggtgggaggagtataagtagggggaggggtgtatgtcggagtgcgtaggcgtaacgcgattttcgaggcgcgggtcgtttttttggttggtttggattcgggttagtcgggtgtcgagatttgggagagacgttttgaattgattgtttcgtattatcggagcgttttagttgcgaggaggtaagtgttttgacgtgacggggaggggtcgtagtattgcgttttagtttttattgtcggtttggtcgcgggcggtttttttcgggttcgttcgttttgggtcgcgtcgtttttcgacgttttttgtttgggtcgggtttgggttttttcgcgtttttttatttgtcgcggtttgtgtttgttggagtttcgagttttacgttttttttttttttcgttttttcgttttttcgcggtttttcgtttcgtttcgttttttcgtcgtttttcgtttagcggtagtttttttttttcgttttttttggtcgttttttgttttttttagttttttttttttcgtttcggagttttattttttttggttattttttcggttttattttttttttttttcgtattttttgtgtttcgtttcgattttagtttttcgttttgattttaggaatttttcgaggagcgtaattttatagttggagatttcgggcgggtagtgtttttggatagt

SEQ ID NO: 21102 - DNA, 820 bp, Artificial Sequence
  chemically treated genomic DNA (Homo sapiens) CpG-island No: 21102
actatccaaaaacactacccgcccgaaatctccaactataaaattacgctcctcgaaaaattcctaaaatcaaaacgaaaaactaaaatcgaaacgaaacacaaaaaatacgaaaaaaaaaaaaaataaaaccgaaaaaataaccaaaaaaaataaaactccgaaacgaaaaaaaaaaaactaaaaaaaacaaaaaacgaccaaaaaaaacgaaaaaaaaaaactaccgctaaacgaaaaacgacgaaaaaacgaaacgaaacgaaaaaccgcgaaaaaacgaaaaaacgaaaaaaaaaaaaaacgtaaaactcgaaactccaacaaacacaaaccgcgacaaataaaaaaacgcgaaaaaacccaaacccgacccaaacaaaaaacgtcgaaaaacgacgcgacccaaaacgaacgaacccgaaaaaaaccgcccgcgaccaaaccgacaataaaaactaaaacgcaatactacgacccctccccgtcacgtcaaaacacttacctcctcgcaactaaaacgctccgataatacgaaacaatcaattcaaaacgtctctcccaaatctcgacacccgactaacccgaatccaaaccaaccaaaaaaacgacccgcgcctcgaaaatcgcgttacgcctacgcactccgacatacacccctccccctacttatactcctcccaccccaataactcgacaacgcgacaaccgacgactacgcaaacgcaaaacgacgaccgcgcctctccaacgccccgcacccgcccccctcaaaaacacgtacgccttacgtaatttcctattattcttcgatttacct

SEQ ID NO: 21103 - DNA, 820 bp, Artificial Sequence
  chemically treated genomic DNA (Homo sapiens) CpG-island No: 21103
gttgtttaggggtattgttcgttcggggtttttagttgtgaagttgcgtttttcgggagatttttggggttagaacgagaggttggagtcggagcgaggtataagggatgcgggagaagaaaggagtggggtcgaagaggtagttaaagagaatggggtttcgaggcgagagagaaaggattggaaggggtaaagggcggttaaggagggcgaaaaggggaagttgtcgttgggcgggagacggcggaggagcgagacggggcgggggatcgcgggaggacgggaaggcgggaaggggagagagcgtggagttcggagttttagtaggtataggtcgcggtagataagggggcgcggagaggtttaggttcggtttaggtaggaggcgtcgggagacgacgcgatttaaggcgggcgggttcggggaaaatcgttcgcggttagatcggtagtggaagttgagacgtagtgttgcggttttttttcgttacgttagggtatttattttttcgtagttgggacgtttcggtgatgcggggtagttagtttagagcgttttttttaaatttcggtattcgattgattcggatttaaattagttaagggggcggttcgcgtttcgggagtcgcgttgcgtttgcgtatttcggtatgtatttttttttttgtttatgttttttttattttagtgattcggtagcgcggtagtcgacgattgcgtagacgtagggcggcggtcgcgtttttttaacgtttcgtattcgttttttttagaagtacgtgcgttttacgtaattttttgttatttttcggtttgttt

SEQ ID NO: 21104 - DNA, 820 bp, Artificial Sequence
  chemically treated genomic DNA (Homo sapiens) CpG-island No: 21104
aaacaaaccgaaaaataacaaaaaattacgtaaaacgcacgtacttctaaaaaaaacgaatacgaaacgttaaaaaaacgcgaccgccgccctacgtctacgcaatcgtcgactaccgcgctaccgaatcactaaaataaaaaaaacataaacaaaaaaaaaaatacataccgaaatacgcaaacgcaacgcgactcccgaaacgcgaaccgcccccttaactaatttaaatccgaatcaatcgaataccgaaatttaaaaaaaacgctctaaactaactaccccgcatcaccgaaacgtcccaactacgaaaaaataaataccctaacgtaacgaaaaaaaaccgcaacactacgtctcaacttccactaccgatctaaccgcgaacgattttccccgaacccgcccgccttaaatcgcgtcgtctcccgacgcctcctacctaaaccgaacctaaacctctccgcgcccccttatctaccgcgacctatacctactaaaactccgaactccacgctctctccccttcccgccttcccgtcctcccgcgatcccccgccccgtctcgctcctccgccgtctcccgcccaacgacaacttccccttttcgccctccttaaccgccctttaccccttccaatcctttctctctcgcctcgaaaccccattctctttaactacctcttcgaccccactcctttcttctcccgcatcccttatacctcgctccgactccaacctctcgttctaaccccaaaaatctcccgaaaaacgcaacttcacaactaaaaaccccgaacgaacaatacccctaaacaac

SEQ ID NO: 21105 - DNA, 760 bp, Artificial Sequence
  chemically treated genomic DNA (Homo sapiens) CpG-island No: 21105
cgcggcgagcgttaaggttcggttcggtttcgtcgtttttcgcgatagcgtcgtcggggtggggacgagggtcgacgttattcgtcgcgtcgggtttcgtttttttagtattggggcggaggtcgcgggtaggaaggtggcggtttttggggtttatttcggaatttgagttcgtgttgcggttcgaggtttaggatttgttttattttcgttatgttttttagcggcggagtatttttggcggggagatttttgagaggttatcggggcgggaagcgttaatgttgcgttcgttttaagttttataaaaaggcggggatcggtcggggtacgggcgggggttttttatcgggtgggcgcgttgggggggggtcggtttacgcggtgtaggcgtaggggcggagggcgagggcgaggtcgcggtgttcggcgagttgacggtacgtacgtacgtacgtacgtacgtagagtcgtatatacgtacgtacgtagtaggttggttcgttttggcggcgggaagttgcgttttgcgtcgtcggttttaggggcggggattaaagttgcgcgcgtagagtttttttcgggatagtgcgtaggcgcggtataagttacgggggcgggattgcggggtagtaaggggcggggtttcgggtcgtttaggaggcggggtttgtagtttagttacgatagttatcgcggaaattattaagggttcgttgggggttagtttcgtgttaagtgttttatttaataataataa

SEQ ID NO: 21106 - DNA, 760 bp, Artificial Sequence
  chemically treated genomic DNA (Homo sapiens) CpG-island No: 21106
ttattattattaaataaaacacttaacacgaaactaacccccaacgaacccttaataatttccgcgataactatcgtaactaaactacaaaccccgcctcctaaacgacccgaaaccccgccccttactaccccgcaatcccgcccccgtaacttataccgcgcctacgcactatcccgaaaaaaactctacgcgcgcaactttaatccccgcccctaaaaccgacgacgcaaaacgcaacttcccgccgccaaaacgaaccaacctactacgtacgtacgtatatacgactctacgtacgtacgtacgtacgtacgtaccgtcaactcgccgaacaccgcgacctcgccctcgccctccgcccctacgcctacaccgcgtaaaccgacccccccccaacgcgcccacccgataaaaaacccccgcccgtaccccgaccgatccccgcctttttataaaacttaaaacgaacgcaacattaacgcttcccgccccgataacctctcaaaaatctccccgccaaaaatactccgccgctaaaaaacataacgaaaataaaacaaatcctaaacctcgaaccgcaacacgaactcaaattccgaaataaaccccaaaaaccgccaccttcctacccgcgacctccgccccaatactaaaaaaacgaaacccgacgcgacgaataacgtcgaccctcgtccccaccccgacgacgctatcgcgaaaaacgacgaaaccgaaccgaaccttaacgctcgccgcg

SEQ ID NO: 21107 - DNA, 760 bp, Artificial Sequence
  chemically treated genomic DNA (Homo sapiens) CpG-island No: 21107
ttgttattattgaataaagtatttaatacgaagttggtttttagcgggtttttaatagttttcgcggtggttgtcgtagttggattatagatttcgttttttgagcggttcgaagtttcgttttttattgtttcgtagtttcgttttcgtggtttgtgtcgcgtttgcgtattgtttcggaaggggttttacgcgcgtagttttagttttcgtttttggagtcggcggcgtagggcgtagtttttcgtcgttagagcgggttagtttgttgcgtgcgtgcgtgtgtacgattttgcgtgcgtgcgtgcgtgcgtgcgtgtcgttagttcgtcgggtatcgcggtttcgttttcgtttttcgtttttgcgtttgtatcgcgtagatcgatttttttttagcgcgtttattcggtagaggattttcgttcgtgtttcgatcggttttcgtttttttgtaaaatttaaagcgggcgtagtattaacgtttttcgtttcggtgattttttaggggttttttcgttaaaggtgtttcgtcgttaaggaatatggcgaaggtggagtaggttttgagtttcgagtcgtagtacgagtttaaatttcgaggtaagttttagaggtcgttatttttttgttcgcggttttcgttttagtgttggaaggacggagttcggcgcggcgggtgacgtcggttttcgtttttatttcgacggcgttgtcgcggggggcggcgaggtcgggtcgggttttggcgttcgtcgcg

SEQ ID NO: 21108 - DNA, 760 bp, Artificial Sequence
  chemically treated genomic DNA (Homo sapiens) CpG-island No: 21108
cgcgacgaacgccaaaacccgacccgacctcgccgccccccgcgacaacgccgtcgaaataaaaacgaaaaccgacgtcacccgccgcgccgaactccgtccttccaacactaaaacgaaaaccgcgaacaaaaaaataacgacctctaaaacttacctcgaaatttaaactcgtactacgactcgaaactcaaaacctactccaccttcgccatattccttaacgacgaaacacctttaacgaaaaaacccctaaaaaatcaccgaaacgaaaaacgttaatactacgcccgctttaaattttacaaaaaaacgaaaaccgatcgaaacacgaacgaaaatcctctaccgaataaacgcgctaaaaaaaaatcgatctacgcgatacaaacgcaaaaacgaaaaacgaaaacgaaaccgcgatacccgacgaactaacgacacgcacgcacgcacgcacgcacgcaaaatcgtacacacgcacgcacgcaacaaactaacccgctctaacgacgaaaaactacgccctacgccgccgactccaaaaacgaaaactaaaactacgcgcgtaaaaccccttccgaaacaatacgcaaacgcgacacaaaccacgaaaacgaaactacgaaacaataaaaaacgaaacttcgaaccgctcaaaaaacgaaatctataatccaactacgacaaccaccgcgaaaactattaaaaacccgctaaaaaccaacttcgtattaaatactttattcaataataacaa

SEQ ID NO: 21109 - DNA, 773 bp, Artificial Sequence
  chemically treated genomic DNA (Homo sapiens) CpG-island No: 21109
tagagtcggcggttttgagatttggggcggttttttggaggttagtttcgttcgtttttttcggtttttttttttttttcgaggttcgaggcgggtagcgggttgtgggcgggtaggaggttgcggaggggcggggggtaggaaggggcggggggttcggcgtattcggtaggaagagatcgattcgttattcgtcgtagttcgcgcgtttttggtatttaattttcgttatgtgggggtttttgttcgttttggtcgttttcgcgtcggtcgtcggttcggttttgggggcgtttaggaattcggtgttgggtttcgcgtagttcgggattattaaggttttaggttcgatttcggttttgtatagtagttcggtatagtcgtcggcggagatagttaacggtgagtttttcgatcgacggttcgttttttcgtaagtcgattgttcggtttttttgtttcgtggggcgatttttttttaatacgcgggtatacgtatatttacgtatatttatagttatgtatatttatttcgtacgtatattcgtatttacgcgtatatacgcgcgcgtatttatatatatttatatacgcgtatatttgtatttatacgcgcgcgtatttatacgtatgtatatatacgtatatttatacgcgcgtgcgcgtatatatagtgtacgcgcgcgtatatttatatttatagtgtatatatatatatatatatttatatttttttaattttttgttgggagtaatggttgttgattcggtag

SEQ ID NO: 21110 - DNA, 773 bp, Artificial Sequence
  chemically treated genomic DNA (Homo sapiens) CpG-island No: 21110
ctaccgaatcaacaaccattactcccaacaaaaaattaaaaaaatataaatatatatatatatatatacactataaatataaatatacgcgcgcgtacactatatatacgcgcacgcgcgtataaatatacgtatatatacatacgtataaatacgcgcgcgtataaatacaaatatacgcgtatataaatatatataaatacgcgcgcgtatatacgcgtaaatacgaatatacgtacgaaataaatatacataactataaatatacgtaaatatacgtatacccgcgtattaaaaaaaaatcgccccacgaaacaaaaaaaccgaacaatcgacttacgaaaaaacgaaccgtcgatcgaaaaactcaccgttaactatctccgccgacgactataccgaactactatacaaaaccgaaatcgaacctaaaaccttaataatcccgaactacgcgaaacccaacaccgaattcctaaacgcccccaaaaccgaaccgacgaccgacgcgaaaacgaccaaaacgaacaaaaacccccacataacgaaaattaaataccaaaaacgcgcgaactacgacgaataacgaatcgatctcttcctaccgaatacgccgaaccccccgccccttcctaccccccgcccctccgcaacctcctacccgcccacaacccgctacccgcctcgaacctcgaaaaaaaaaaaaaaaccgaaaaaaacgaacgaaactaacctccaaaaaaccgccccaaatctcaaaaccgccgactcta

SEQ ID NO: 21111 - DNA, 773 bp, Artificial Sequence
  chemically treated genomic DNA (Homo sapiens) CpG-island No: 21111
ttgtcgagttagtagttattgtttttagtagggagttgagggagtgtgagtgtgtatatgtgtgtgtgtattgtgagtgtgagtgtgcgcgcgcgtgtattgtgtgtgcgcgtacgcgcgtgtgagtgtgcgtgtgtgtgtatgcgtgtgaatgcgcgcgcgtgtgagtgtaagtgtgcgcgtgtgtgaatgtgtgtgagtgcgcgcgcgtgtgtgcgcgtgagtgcgagtgtgcgtgcggggtgagtgtgtatgattgtgagtgtgcgtgggtgtgcgtgtgttcgcgtgttagggagggatcgttttacggggtaggagagtcgggtagtcggtttgcgggggagcggatcgtcggtcggggaatttatcgttagttgttttcgtcggcggttgtgtcgggttgttatgtagggtcggggtcgagtttgggattttggtggtttcgggttgcgcgaggtttagtatcgagtttttgggcgtttttagagtcgggtcgacggtcggcgcgaaggcggttagggcgagtaggagtttttatatggcggggattgagtgttaggggcgcgcgggttacggcgggtggcgggtcggtttttttttgtcgagtgcgtcgagtttttcgtttttttttgtttttcgttttttcgtagttttttgttcgtttatagttcgttgttcgtttcggatttcggagaggaggagagggtcgggaggagcgagcggggttgatttttaaggggtcgttttaagttttaggatcgtcgattttg

SEQ ID NO: 21112 - DNA, 773 bp, Artificial Sequence
  chemically treated genomic DNA (Homo sapiens) CpG-island No: 21112
caaaatcgacgatcctaaaacttaaaacgaccccttaaaaatcaaccccgctcgctcctcccgaccctctcctcctctccgaaatccgaaacgaacaacgaactataaacgaacaaaaaactacgaaaaaacgaaaaacaaaaaaaaacgaaaaactcgacgcactcgacaaaaaaaaaccgacccgccacccgccgtaacccgcgcgcccctaacactcaatccccgccatataaaaactcctactcgccctaaccgccttcgcgccgaccgtcgacccgactctaaaaacgcccaaaaactcgatactaaacctcgcgcaacccgaaaccaccaaaatcccaaactcgaccccgaccctacataacaacccgacacaaccgccgacgaaaacaactaacgataaattccccgaccgacgatccgctcccccgcaaaccgactacccgactctcctaccccgtaaaacgatccctccctaacacgcgaacacacgcacacccacgcacactcacaatcatacacactcaccccgcacgcacactcgcactcacgcgcacacacgcgcgcgcactcacacacattcacacacgcgcacacttacactcacacgcgcgcgcattcacacgcatacacacacacgcacactcacacgcgcgtacgcgcacacacaatacacgcgcgcgcacactcacactcacaatacacacacacatatacacactcacactccctcaactccctactaaaaacaataactactaactcgacaa

SEQ ID NO: 21113 - DNA, 736 bp, Artificial Sequence
  chemically treated genomic DNA (Homo sapiens) CpG-island No: 21113
gcgtcggcgttttaattttttcgggatgggcgggggcggggttgagtttcgtttcgtttttcggttttagattttttttcgcgggcgggggatatttattggcgaagggcgaggtggcggtggagttattgaggaagttgggggatttaggtacgtcgaggtcggttacgttcggcgcgtcgtagtcgtttaggttagtttcgaggtcgtcgtcgtagtcgttttgttgcgagtcggggttgggcgcgaattcgcggggggacgcgttgttgtagttgcgcgcgtagtttgcgagagagagcgcggtcgttagggggcggtgtcggtcggggaggggcggtggcggcgttcgaggacggcggggaggcgcggtttacgtattcggttcgggtttcggggtggcgttttcgacggcgatggttagcgggttgttgaaggcgttgatgtttacgacggcggggtgtgggtggttcggggttaggggtgcgagcggttcgggtgcgcggggggtgttgtatagagtttcggttacgttcgtcgcgcgttttaggagtagtttttgcgaagataagagcggggtacggtcggggtagtcgcgggcgtcgcgtgttggggggtttcggtttcggcggcgttgggagggcggaggcgttatatttggttattgtcgggtatttcgtatagggtttttgttaagtcggtcgttcgttttagtagtattttttggggatagggg

SEQ ID NO: 21114 - DNA, 736 bp, Artificial Sequence
  chemically treated genomic DNA (Homo sapiens) CpG-island No: 21114
cccctatccccaaaaaatactactaaaacgaacgaccgacttaacaaaaaccctatacgaaatacccgacaataaccaaatataacgcctccgccctcccaacgccgccgaaaccgaaaccccccaacacgcgacgcccgcgactaccccgaccgtaccccgctcttatcttcgcaaaaactactcctaaaacgcgcgacgaacgtaaccgaaactctatacaacaccccccgcgcacccgaaccgctcgcacccctaaccccgaaccacccacaccccgccgtcgtaaacatcaacgccttcaacaacccgctaaccatcgccgtcgaaaacgccaccccgaaacccgaaccgaatacgtaaaccgcgcctccccgccgtcctcgaacgccgccaccgcccctccccgaccgacaccgccccctaacgaccgcgctctctctcgcaaactacgcgcgcaactacaacaacgcgtccccccgcgaattcgcgcccaaccccgactcgcaacaaaacgactacgacgacgacctcgaaactaacctaaacgactacgacgcgccgaacgtaaccgacctcgacgtacctaaatcccccaacttcctcaataactccaccgccacctcgcccttcgccaataaatatcccccgcccgcgaaaaaaaatctaaaaccgaaaaacgaaacgaaactcaaccccgcccccgcccatcccgaaaaaattaaaacgccgacgc

SEQ ID NO: 21115 - DNA, 736 bp, Artificial Sequence
  chemically treated genomic DNA (Homo sapiens) CpG-island No: 21115
tttttgtttttaggaagtgttgttgaagcgggcggtcgatttggtagaagttttgtacggagtgttcggtagtaattaggtatggcgttttcgtttttttagcgtcgtcgggatcggggttttttagtacgcggcgttcgcggttgtttcggtcgtgtttcgtttttgttttcgtaggagttgtttttgaagcgcgcggcggacgtggtcgaggttttgtatagtatttttcgcgtattcgggtcgttcgtatttttggtttcgagttatttatatttcgtcgtcgtgggtattaacgtttttagtagttcgttggttatcgtcgtcggggacgttatttcggggttcgagtcgggtgcgtgggtcgcgttttttcgtcgttttcgggcgtcgttatcgttttttttcggtcggtatcgttttttgacggtcgcgttttttttcgtaggttacgcgcgtagttgtagtagcgcgttttttcgcgggttcgcgtttagtttcggttcgtagtagagcggttacggcggcggtttcggagttggtttgggcggttacggcgcgtcgggcgtggtcggtttcggcgtgtttgggttttttagtttttttaatggttttatcgttatttcgtttttcgttagtgagtgtttttcgttcgcgagggaaggtttggggtcggggagcggaacgggatttagtttcgttttcgtttatttcggagaggttggggcgtcggcgt

SEQ ID NO: 21116 - DNA, 736 bp, Artificial Sequence
  chemically treated genomic DNA (Homo sapiens) CpG-island No: 21116
acgccgacgccccaacctctccgaaataaacgaaaacgaaactaaatcccgttccgctccccgaccccaaaccttccctcgcgaacgaaaaacactcactaacgaaaaacgaaataacgataaaaccattaaaaaaactaaaaaacccaaacacgccgaaaccgaccacgcccgacgcgccgtaaccgcccaaaccaactccgaaaccgccgccgtaaccgctctactacgaaccgaaactaaacgcgaacccgcgaaaaaacgcgctactacaactacgcgcgtaacctacgaaaaaaaacgcgaccgtcaaaaaacgataccgaccgaaaaaaaacgataacgacgcccgaaaacgacgaaaaaacgcgacccacgcacccgactcgaaccccgaaataacgtccccgacgacgataaccaacgaactactaaaaacgttaatacccacgacgacgaaatataaataactcgaaaccaaaaatacgaacgacccgaatacgcgaaaaatactatacaaaacctcgaccacgtccgccgcgcgcttcaaaaacaactcctacgaaaacaaaaacgaaacacgaccgaaacaaccgcgaacgccgcgtactaaaaaaccccgatcccgacgacgctaaaaaaacgaaaacgccatacctaattactaccgaacactccgtacaaaacttctaccaaatcgaccgcccgcttcaacaacacttcctaaaaacaaaaa

SEQ ID NO: 21117 - DNA, 1666 bp, Artificial Sequence
  chemically treated genomic DNA (Homo sapiens) CpG-island No: 21117
aggcggcgcgtagtcgtttaattcgagcgtatcgggttcggttcgagcgtttatttttgcgtcgcggtgttggcgtttaggatgttcgcgttttgtatttaggagcgtattgagtttaggtcggcgggtagtagcggttttttttttaggtttagttcgttgcggggtagagcgttttgcgtagggaatatgagggcgcgcggtgagtgagcgttttcgtcgtttcggattcggtttcgttgaggttgcgggcgtttagtttagttcgattcgacggtattaggcgtttttagtagcgtagcgtcgagttcgggtggtttagtgcgcgttcgttttttgggcgttttttcggagaaagcgggttcgcgggcgtcggcgttgttttttttttttttggggcgttgggcggggagatggagggattttttcgcggtttgagcgttggcgggcggattgcgagcggggcggggagggcggggagcggagttcgtattcggttcgcgcggaggcgttttagaggcgcgttttggcggttgttcggggtcgcggtcgtcggagggggggttcgagcgtttcgggagttgtttcgggtaaggcgggggcgcggggtcgttcgttttttttttttcgtcgtttttatttttcgttcgttcgttcgttcgcggcgttagcgcggggcgttgattattattcgggaggcggaggttgcgggcgcggagttcggcggcggcggcgatagtggcggtagcggcggtaggagtagtagtagtcgcgcgtttcggggaaaggttggggtcgcgtcgggttagtagacgtcgtcgtcgttagcgttagcgtttcgcgtgtttcggcgtttcggttttgtcgtagtttcgggcggtagtatttggagtagtagtagtagtagttcggtcgatttttttcggggttcggttttcgcgtcgtttcgtcgcggtcgtcgtcgttcgtcgtttttcggggtttggtttcgggttcgggttatttcgtcgtcgtcgtcgtcgtcgtcgtcgttttcgggggagcggtagtcgaagggagggagcgtaggcgggaggagggatgtcgggagcgggcgggtttaggggacgggggttcgggggaggcgggggcggggcggcgcggtcggtcgaggggcggtcggggacgtgatattatcgggggaggagcggtcgggttcgggtcgcggcggcggggcggattttggcgagtcggtcgtttgggttgggggttgcggtttggtcgaggtcgcgggagggaacggaagagttcggcgggggttacggaaattcgcgtagggaggattcggggtcgcgcggcgagggagttcggttcgagcgggaggtgcgcgtttcgttgcgttcgggaattttcgcggttttttcgtcgtcgtcggacgaagtttcggcgttttcgcggttttatttttttttttcggtattcgtcgtatttttcgcgttcgacgttttgtgtttggatttgttgtttattttgacgttttcgagttttcgtttttgacgtttttttttcgcgtgattgtattttcgtattttttcggcgattttgattttatttttattttagttaaggattgaaacgtttttgtcgtaggttgcggttttagataagttgggcgaggtttttgtat

SEQ ID NO: 21118 - DNA, 1666 bp, Artificial Sequence
  chemically treated genomic DNA (Homo sapiens) CpG-island No: 21118
atacaaaaacctcgcccaacttatctaaaaccgcaacctacgacaaaaacgtttcaatccttaactaaaataaaaataaaatcaaaatcgccgaaaaaatacgaaaatacaatcacgcgaaaaaaaaacgtcaaaaacgaaaactcgaaaacgtcaaaataaacaacaaatccaaacacaaaacgtcgaacgcgaaaaatacgacgaataccgaaaaaaaaaaataaaaccgcgaaaacgccgaaacttcgtccgacgacgacgaaaaaaccgcgaaaattcccgaacgcaacgaaacgcgcacctcccgctcgaaccgaactccctcgccgcgcgaccccgaatcctccctacgcgaatttccgtaacccccgccgaactcttccgttccctcccgcgacctcgaccaaaccgcaacccccaacccaaacgaccgactcgccaaaatccgccccgccgccgcgacccgaacccgaccgctcctcccccgataatatcacgtccccgaccgcccctcgaccgaccgcgccgccccgcccccgcctcccccgaacccccgtcccctaaacccgcccgctcccgacatccctcctcccgcctacgctccctcccttcgactaccgctcccccgaaaacgacgacgacgacgacgacgacgacgaaataacccgaacccgaaaccaaaccccgaaaaacgacgaacgacgacgaccgcgacgaaacgacgcgaaaaccgaaccccgaaaaaaatcgaccgaactactactactactactccaaatactaccgcccgaaactacgacaaaaccgaaacgccgaaacacgcgaaacgctaacgctaacgacgacgacgtctactaacccgacgcgaccccaacctttccccgaaacgcgcgactactactactcctaccgccgctaccgccactatcgccgccgccgccgaactccgcgcccgcaacctccgcctcccgaataataatcaacgccccgcgctaacgccgcgaacgaacgaacgaacgaaaaataaaaacgacgaaaaaaaaaaaacgaacgaccccgcgcccccgccttacccgaaacaactcccgaaacgctcgaaccccccctccgacgaccgcgaccccgaacaaccgccaaaacgcgcctctaaaacgcctccgcgcgaaccgaatacgaactccgctccccgccctccccgccccgctcgcaatccgcccgccaacgctcaaaccgcgaaaaaatccctccatctccccgcccaacgccccaaaaaaaaaaaaaacaacgccgacgcccgcgaacccgctttctccgaaaaaacgcccaaaaaacgaacgcgcactaaaccacccgaactcgacgctacgctactaaaaacgcctaataccgtcgaatcgaactaaactaaacgcccgcaacctcaacgaaaccgaatccgaaacgacgaaaacgctcactcaccgcgcgccctcatattccctacgcaaaacgctctaccccgcaacgaactaaacctaaaaaaaaaaccgctactacccgccgacctaaactcaatacgctcctaaatacaaaacgcgaacatcctaaacgccaacaccgcgacgcaaaaataaacgctcgaaccgaacccgatacgctcgaattaaacgactacgcgccgcct

SEQ ID NO: 21119 - DNA, 1666 bp, Artificial Sequence
  chemically treated genomic DNA (Homo sapiens) CpG-island No: 21119
atgtagggatttcgtttagtttgtttggggtcgtagtttacggtagggacgttttagtttttagttggggtgaaagtgaggttagggtcgtcggggaaatgcgggagtatagttacgcgggagaaagacgttaagagcgaaagttcggaggcgttaaaatgagtagtaagtttaggtataaggcgtcgggcgcggagagtacggcgggtgtcgggggagggagatgaggtcgcgaagacgtcggggtttcgttcggcggcgacggggaggtcgcggaggttttcgagcgtagcggggcgcgtatttttcgttcgggtcgggttttttcgtcgcgcggtttcggattttttttgcgcgggttttcgtggttttcgtcgggttttttcgttttttttcgcggtttcgattaggtcgtagtttttagtttaggcgatcgattcgttagggttcgtttcgtcgtcgcggttcgggttcggtcgtttttttttcgatgatgttacgttttcggtcgtttttcggtcggtcgcgtcgtttcgttttcgtttttttcgggttttcgttttttgggttcgttcgttttcgatattttttttttcgtttgcgtttttttttttcggttatcgttttttcgggagcggcggcggcggcggcggcggcggcgggatggttcgggttcgaggttaggtttcggggagcggcgggcggcggcggtcgcggcggggcggcgcgggaatcgggtttcggggggagtcggtcgggttgttgttgttgttgttttaggtgttgtcgttcggggttacggtagggtcgggacgtcggggtacgcggggcgttggcgttggcggcggcggcgtttgttggttcggcgcggttttagttttttttcgggacgcgcggttgttgttgtttttgtcgtcgttgtcgttattgtcgtcgtcgtcgtcgagtttcgcgttcgtagttttcgtttttcggatggtaattagcgtttcgcgttggcgtcgcgggcgggcgggcgggcgggaggtgggggcggcgagggggaaagggcgggcggtttcgcgttttcgttttgttcgaggtagttttcggggcgttcgggtttttttttcgacgatcgcggtttcgggtagtcgttagagcgcgtttttggggcgttttcgcgcggatcgggtgcgggtttcgtttttcgtttttttcgtttcgttcgtagttcgttcgttagcgtttaggtcgcgggggaatttttttattttttcgtttagcgttttaggaggggaggggatagcgtcggcgttcgcggattcgtttttttcgagggagcgtttaagaggcgagcgcgtattgagttattcggattcggcgttgcgttgttggaggcgtttggtgtcgtcgggtcgggttgagttagacgttcgtagttttagcgggatcggattcggggcggcgggggcgtttatttatcgcgcgtttttatgttttttgcgtaggacgttttgtttcgtagcgggttgaatttgaaggaggagtcgttgttgttcgtcggtttgggtttagtgcgtttttggatgtagggcgcgggtattttggacgttagtatcgcggcgtagaggtaagcgttcggatcggattcggtgcgttcgggttggacggttgcgcgtcgttt

SEQ ID NO: 21120 - DNA, 1666 bp, Artificial Sequence
  chemically treated genomic DNA (Homo sapiens) CpG-island No: 21120
aaacgacgcgcaaccgtccaacccgaacgcaccgaatccgatccgaacgcttacctctacgccgcgatactaacgtccaaaatacccgcgccctacatccaaaaacgcactaaacccaaaccgacgaacaacaacgactcctccttcaaattcaacccgctacgaaacaaaacgtcctacgcaaaaaacataaaaacgcgcgataaataaacgcccccgccgccccgaatccgatcccgctaaaactacgaacgtctaactcaacccgacccgacgacaccaaacgcctccaacaacgcaacgccgaatccgaataactcaatacgcgctcgcctcttaaacgctccctcgaaaaaaacgaatccgcgaacgccgacgctatcccctcccctcctaaaacgctaaacgaaaaaataaaaaaattcccccgcgacctaaacgctaacgaacgaactacgaacgaaacgaaaaaaacgaaaaacgaaacccgcacccgatccgcgcgaaaacgccccaaaaacgcgctctaacgactacccgaaaccgcgatcgtcgaaaaaaaaacccgaacgccccgaaaactacctcgaacaaaacgaaaacgcgaaaccgcccgccctttccccctcgccgcccccacctcccgcccgcccgcccgcccgcgacgccaacgcgaaacgctaattaccatccgaaaaacgaaaactacgaacgcgaaactcgacgacgacgacgacaataacgacaacgacgacaaaaacaacaacaaccgcgcgtcccgaaaaaaaactaaaaccgcgccgaaccaacaaacgccgccgccgccaacgccaacgccccgcgtaccccgacgtcccgaccctaccgtaaccccgaacgacaacacctaaaacaacaacaacaacaacccgaccgactccccccgaaacccgattcccgcgccgccccgccgcgaccgccgccgcccgccgctccccgaaacctaacctcgaacccgaaccatcccgccgccgccgccgccgccgccgccgctcccgaaaaaacgataaccgaaaaaaaaaaacgcaaacgaaaaaaaaaatatcgaaaacgaacgaacccaaaaaacgaaaacccgaaaaaaacgaaaacgaaacgacgcgaccgaccgaaaaacgaccgaaaacgtaacatcatcgaaaaaaaaacgaccgaacccgaaccgcgacgacgaaacgaaccctaacgaatcgatcgcctaaactaaaaactacgacctaatcgaaaccgcgaaaaaaaacgaaaaaacccgacgaaaaccacgaaaacccgcgcaaaaaaaatccgaaaccgcgcgacgaaaaaacccgacccgaacgaaaaatacgcgccccgctacgctcgaaaacctccgcgacctccccgtcgccgccgaacgaaaccccgacgtcttcgcgacctcatctccctcccccgacacccgccgtactctccgcgcccgacgccttatacctaaacttactactcattttaacgcctccgaactttcgctcttaacgtctttctcccgcgtaactatactcccgcatttccccgacgaccctaacctcactttcaccccaactaaaaactaaaacgtccctaccgtaaactacgaccccaaacaaactaaacgaaatccctacat

SEQ ID NO: 21121 - DNA, 1102 bp, Artificial Sequence
  chemically treated genomic DNA (Homo sapiens) CpG-island No: 21121
tttattattcgggttcggagcggtttgtttttagtggattagggcgggtgtgttgtcggagtcgttttttattggttatattttcggggattggttgggtttttcgatatttgattgggcggaatagttttttgtacgtcgatattattggagggcgttggagttagggggcggagcgggttttttaggatttttgatcgggcgcgttagttcgttcgttgagtcgggcgcggggcgtaagagcggagttgcgcgagtcgttgcggagggaagggtttttagttaattggggtttttgaggcgaatgcgaggttggggtcggttgtttatcggtcgtttttcgtcgaggtagtttagatttttttttcggcggtgttcgttttaagatagtatttgttaacgttttttttttttttttttttttttgtcgggtcgggtttcgtcggttgcggtcgagaggacgcgggattcggcgcggtgagtttattagttgttaggcgagcggcgaagcggttggagggcggcgagagatatataaagaacgcggtgggcggcggcggcgaaaggggacggtaattttttttcgcgttcgtcggtgttatcgtcggtcgtgtttgtttcgaggtcgcgtagataatgcggtcgggttcgttttcgcgtgttttagagtgcggagcgttcgcgttttttcgattttaatttgatcgtttttcggttcgtttagttttttttcggggtaggggcgtttttttttttcggtggtcggcgaaggaagtcggttcgcggtcgtagatttcggtaatttgcgaatcgggaaaagtttgcggcgttttcgcggggcggcgcgacgcggttcgtttttcgcgttcgcggttatcgcgggtgattttttcgattcgtcgttagtcggggtcgtagcgcggtcggtggggattgcggggcgggtcggagttcgttcgagggttttcgtatttcgggttgcgggtgagtcggttttaggcgtcgtgggtttaagtggtttagggtatttgggtttgggaagaagtcgtggagagagtttttaatattttatggagttggcggggagaataaataaaattgt

SEQ ID NO: 21122 - DNA, 1102 bp, Artificial Sequence
  chemically treated genomic DNA (Homo sapiens) CpG-island No: 21122
acaattttatttattctccccgccaactccataaaatattaaaaactctctccacgacttcttcccaaacccaaataccctaaaccacttaaacccacgacgcctaaaaccgactcacccgcaacccgaaatacgaaaaccctcgaacgaactccgacccgccccgcaatccccaccgaccgcgctacgaccccgactaacgacgaatcgaaaaaatcacccgcgataaccgcgaacgcgaaaaacgaaccgcgtcgcgccgccccgcgaaaacgccgcaaacttttcccgattcgcaaattaccgaaatctacgaccgcgaaccgacttccttcgccgaccaccgaaaaaaaaaaacgcccctaccccgaaaaaaaactaaacgaaccgaaaaacgatcaaattaaaatcgaaaaaacgcgaacgctccgcactctaaaacacgcgaaaacgaacccgaccgcattatctacgcgacctcgaaacaaacacgaccgacgataacaccgacgaacgcgaaaaaaaattaccgtcccctttcgccgccgccgcccaccgcgttctttatatatctctcgccgccctccaaccgcttcgccgctcgcctaacaactaataaactcaccgcgccgaatcccgcgtcctctcgaccgcaaccgacgaaacccgacccgacaaaaaaaaaaaaaaaaaaaaaaaacgttaacaaatactatcttaaaacgaacaccgccgaaaaaaaaatctaaactacctcgacgaaaaacgaccgataaacaaccgaccccaacctcgcattcgcctcaaaaaccccaattaactaaaaacccttccctccgcaacgactcgcgcaactccgctcttacgccccgcgcccgactcaacgaacgaactaacgcgcccgatcaaaaatcctaaaaaacccgctccgccccctaactccaacgccctccaataatatcgacgtacaaaaaactattccgcccaatcaaatatcgaaaaacccaaccaatccccgaaaatataaccaataaaaaacgactccgacaacacacccgccctaatccactaaaaacaaaccgctccgaacccgaataataaa

SEQ ID NO: 21123 - DNA, 1102 bp, Artificial Sequence
  chemically treated genomic DNA (Homo sapiens) CpG-island No: 21123
gtaattttatttgtttttttcgttagttttataaagtattaaaggttttttttacgatttttttttaagtttaggtgttttaaattatttgagtttacggcgtttaaagtcgatttattcgtagttcgaggtgcgggagttttcggacggatttcggttcgtttcgtagtttttatcggtcgcgttgcggtttcggttgacgacgagtcgagaaagttattcgcgatgatcgcggacgcgaggggcgggtcgcgtcgcgtcgtttcgcggaggcgtcgtaaatttttttcggttcgtaagttgtcgggatttgcggtcgcggatcgatttttttcgtcggttatcggagggagggggcgtttttatttcgggagggggttgggcgagtcgggagacggttaagttggggtcgggggagcgcgggcgtttcgtattttggggtacgcggggacgagttcggtcgtattgtttgcgcggtttcggaataagtacggtcggcggtggtatcggcgggcgcggggaggagttgtcgttttttttcgtcgtcgtcgtttatcgcgttttttgtgtgtttttcgtcgttttttagtcgtttcgtcgttcgtttgatagttgatgggtttatcgcgtcgggtttcgcgttttttcggtcgtagtcggcggagttcggttcggtaggaggaggaggggagaagaggagcgttgatagatgttgttttggagcgggtatcgtcgggggaaaagtttggattgtttcggcgagaagcggtcggtaggtaatcggttttagtttcgtattcgttttaaagattttaattggttaggagttttttttttcgtagcggttcgcgtagtttcgtttttgcgtttcgcgttcggtttagcggacggattagcgcgttcggttaagaattttggggaattcgtttcgttttttggttttagcgttttttaatgatgtcggcgtatagagggttgtttcgtttaattaggtgtcggaaagtttagttagttttcgggagtgtagttaatagaaggcgatttcggtaatatattcgttttgatttattaggaataaatcgtttcgagttcgggtggtggg

SEQ ID NO: 21124 - DNA, 1102 bp, Artificial Sequence
  chemically treated genomic DNA (Homo sapiens) CpG-island No: 21124
cccaccacccgaactcgaaacgatttattcctaataaatcaaaacgaatatattaccgaaatcgccttctattaactacactcccgaaaactaactaaactttccgacacctaattaaacgaaacaaccctctatacgccgacatcattaaaaaacgctaaaaccaaaaaacgaaacgaattccccaaaattcttaaccgaacgcgctaatccgtccgctaaaccgaacgcgaaacgcaaaaacgaaactacgcgaaccgctacgaaaaaaaaaactcctaaccaattaaaatctttaaaacgaatacgaaactaaaaccgattacctaccgaccgcttctcgccgaaacaatccaaacttttcccccgacgatacccgctccaaaacaacatctatcaacgctcctcttctcccctcctcctcctaccgaaccgaactccgccgactacgaccgaaaaaacgcgaaacccgacgcgataaacccatcaactatcaaacgaacgacgaaacgactaaaaaacgacgaaaaacacacaaaaaacgcgataaacgacgacgacgaaaaaaaacgacaactcctccccgcgcccgccgataccaccgccgaccgtacttattccgaaaccgcgcaaacaatacgaccgaactcgtccccgcgtaccccaaaatacgaaacgcccgcgctcccccgaccccaacttaaccgtctcccgactcgcccaaccccctcccgaaataaaaacgccccctccctccgataaccgacgaaaaaaatcgatccgcgaccgcaaatcccgacaacttacgaaccgaaaaaaatttacgacgcctccgcgaaacgacgcgacgcgacccgcccctcgcgtccgcgatcatcgcgaataactttctcgactcgtcgtcaaccgaaaccgcaacgcgaccgataaaaactacgaaacgaaccgaaatccgtccgaaaactcccgcacctcgaactacgaataaatcgactttaaacgccgtaaactcaaataatttaaaacacctaaacttaaaaaaaaatcgtaaaaaaaacctttaatactttataaaactaacgaaaaaaacaaataaaattac

SEQ ID NO: 21125 - DNA, 684 bp, Artificial Sequence
  chemically treated genomic DNA (Homo sapiens) CpG-island No: 21125
ttatagggcgcgtcgtagttagaggggcgttggtcgtttatttggtatatcggtttcggatttgcggaaaatagggtttagcgggcggcgtcggaggcgggtaaggggcgattttttcgtagatgcgcgttttttacgtttatttattcgtgcgagtcgtgttacgtttttttttagtcggattttcgcgcggggttcgttatgcgcgtttgtttcgggcgtttttgtttaggtttcgttggttttcgggtgttcgtttggcgttttttttttttttattcgttgtttttttttatttcggcgttagtttacgtcgttcgtttttttttttttttttttttttttttagtttttttcgttttttttttattcgttttttttttttttttttttttggtttatttttttttcgtttttttttcgtttttttagtcgtttttttgcgggttttttttttcgcgtcgggtttggtttagttaggagtcggatacgtttgttcgcggggcgttcgaggttcgagtttttataggaagtcggttgggcgcgtttttttcgcgttttcggagcggggttttagttttttcgattttttgttttttgaggttcggagattcgcgggttgtacgtttttttttgtttgtttaaattttgtaaaagtttttggaaaattaggagaaagagaga

SEQ ID NO: 21126 - DNA, 684 bp, Artificial Sequence
  chemically treated genomic DNA (Homo sapiens) CpG-island No: 21126
tctctctttctcctaattttccaaaaacttttacaaaatttaaacaaacaaaaaaaaacgtacaacccgcgaatctccgaacctcaaaaaacaaaaaatcgaaaaaactaaaaccccgctccgaaaacgcgaaaaaaacgcgcccaaccgacttcctataaaaactcgaacctcgaacgccccgcgaacaaacgtatccgactcctaactaaaccaaacccgacgcgaaaaaaaaaacccgcaaaaaaacgactaaaaaaacgaaaaaaaaacgaaaaaaaaataaaccaaaaaaaaaaaaaaaaaaaaaacgaataaaaaaaaaacgaaaaaaactaaaaaaaaaaaaaaaaaaaaaaaaaaacgaacgacgtaaactaacgccgaaataaaaaaaaacaacgaataaaaaaaaaaaaaacgccaaacgaacacccgaaaaccaacgaaacctaaacaaaaacgcccgaaacaaacgcgcataacgaaccccgcgcgaaaatccgactaaaaaaaaacgtaacacgactcgcacgaataaataaacgtaaaaaacgcgcatctacgaaaaaatcgccccttacccgcctccgacgccgcccgctaaaccctattttccgcaaatccgaaaccgatataccaaataaacgaccaacgcccctctaactacgacgcgccctataa

SEQ ID NO: 21127 - DNA, 684 bp, Artificial Sequence
  chemically treated genomic DNA (Homo sapiens) CpG-island No: 21127
ttttttttttttttgattttttagaaatttttgtagagtttggataggtaaaggaaaacgtgtagttcgcggattttcgggttttagagagtagggagtcggggagattgaggtttcgtttcgagagcgcggaggaagcgcgtttagtcggttttttgtgggggttcgggtttcgggcgtttcgcggatagacgtgttcggtttttggttgggttaagttcggcgcgggggaggggattcgtagaggggcgattgagaaggcgaggagggggcggggagagggtgggttagggaagaggggaggggagaggcgagtaggggaggagcgaggggggttggagggagagaaggaagaaggaaggggcgaacggcgtgagttggcgtcgaaatgggagaaagtagcgagtgagaggggaaggggcgttaggcgagtattcgggagttagcgggatttgggtaggggcgttcggagtaggcgcgtatggcgggtttcgcgcggggattcggttggaagagagcgtagtacggttcgtacgagtgagtggacgtgggaggcgcgtatttgcgggggaatcgttttttgttcgttttcggcgtcgttcgttgagttttgtttttcgtaggttcggggtcgatgtattaggtgagcggttagcgtttttttggttgcgacgcgttttatgg

SEQ ID NO: 21128 - DNA, 684 bp, Artificial Sequence
  chemically treated genomic DNA (Homo sapiens) CpG-island No: 21128
ccataaaacgcgtcgcaaccaaaaaaacgctaaccgctcacctaatacatcgaccccgaacctacgaaaaacaaaactcaacgaacgacgccgaaaacgaacaaaaaacgattcccccgcaaatacgcgcctcccacgtccactcactcgtacgaaccgtactacgctctcttccaaccgaatccccgcgcgaaacccgccatacgcgcctactccgaacgcccctacccaaatcccgctaactcccgaatactcgcctaacgccccttcccctctcactcgctactttctcccatttcgacgccaactcacgccgttcgccccttccttcttccttctctccctccaacccccctcgctcctcccctactcgcctctcccctcccctcttccctaacccaccctctccccgccccctcctcgccttctcaatcgcccctctacgaatcccctcccccgcgccgaacttaacccaaccaaaaaccgaacacgtctatccgcgaaacgcccgaaacccgaacccccacaaaaaaccgactaaacgcgcttcctccgcgctctcgaaacgaaacctcaatctccccgactccctactctctaaaacccgaaaatccgcgaactacacgttttcctttacctatccaaactctacaaaaatttctaaaaaatcaaaaaaaaaaaaaa

SEQ ID NO: 21129 - DNA, 617 bp, Artificial Sequence
  chemically treated genomic DNA (Homo sapiens) CpG-island No: 21129
cgcgtgtcgtatttattcgtggagggtgggagatagcggtcgttttagcgtttagcggtggttcgggatagtgtggttaggttcgcggatagttttttttttttcggtatcggttagtttaggtcgcgcgtttttttttttcggttttttggtggcggtttcgttttcgtcggtttggtcgttttgttttcgtttttacgtttttttttttttcgttttttcgggttgtaataggtgttttcggagtaggaagttcgcgtcgtcgtcgtcgtcgtcgtttagttttttcgggcgcgtttaggattcgttgcgttaggcgcgtcgttttcggattcggcgtgcgtttttacgaggaaagggatttcgtcgttcgagtcgttttcgttagttttattgcgaggggttttagagttagtcgcgttcgttttcgttttcggtttcgtagttttttcgttttgcgcgttatgaacgttttcgagcggtagttttaattcgacggcggggacgttttaggttacgagtttgggggtagtttttaagacgagtttgatttttttatttttttcgattatgagtatttgaattcgaacgaaggtcggtggaggttatttttggtt

SEQ ID NO: 21130 - DNA, 617 bp, Artificial Sequence
  chemically treated genomic DNA (Homo sapiens) CpG-island No: 21130
aaccaaaaataacctccaccgaccttcgttcgaattcaaatactcataatcgaaaaaaataaaaaaatcaaactcgtcttaaaaactacccccaaactcgtaacctaaaacgtccccgccgtcgaattaaaactaccgctcgaaaacgttcataacgcgcaaaacgaaaaaactacgaaaccgaaaacgaaaacgaacgcgactaactctaaaacccctcgcaataaaactaacgaaaacgactcgaacgacgaaatccctttcctcgtaaaaacgcacgccgaatccgaaaacgacgcgcctaacgcaacgaatcctaaacgcgcccgaaaaaactaaacgacgacgacgacgacgacgcgaacttcctactccgaaaacacctattacaacccgaaaaaacgaaaaaaaaaaaaacgtaaaaacgaaaacaaaacgaccaaaccgacgaaaacgaaaccgccaccaaaaaaccgaaaaaaaaaaacgcgcgacctaaactaaccgataccgaaaaaaaaaaaactatccgcgaacctaaccacactatcccgaaccaccgctaaacgctaaaacgaccgctatctcccaccctccacgaataaatacgacacgcg

SEQ ID NO: 21131 - DNA, 617 bp, Artificial Sequence
  chemically treated genomic DNA (Homo sapiens) CpG-island No: 21131
ggttaggggtagtttttatcgattttcgttcggatttaaatatttatagtcgaagaggatggagaagttaagttcgttttgggggttgtttttaggttcgtggtttggggcgttttcgtcgtcgggttggggttgtcgttcgggggcgtttatggcgcgtagggcgggaaggttgcggggtcgggggcgagggcgggcgcggttggttttgggatttttcgtagtggggttggcggaggcggttcgagcggcggggttttttttttcgtagggacgtacgtcgggttcggggacggcgcgtttggcgtagcgggttttggacgcgttcggggaagttgagcggcggcggcgacggcggcgcgagttttttgtttcggaggtatttgttgtagttcggggaggcggggggggggggggcgtggaggcggggatagggcggttaggtcggcgggggcggggtcgttattaggggatcggaggggaggggcgcgcggtttgggttggtcggtgtcgggaggaaggaggttgttcgcggatttgattatattgtttcgggttatcgttgggcgttggggcggtcgttgttttttattttttacgggtgagtgcgatacgcg

SEQ ID NO: 21132 - DNA, 617 bp, Artificial Sequence
  chemically treated genomic DNA (Homo sapiens) CpG-island No: 21132
cgcgtatcgcactcacccgtaaaaaataaaaaacaacgaccgccccaacgcccaacgataacccgaaacaatataatcaaatccgcgaacaacctccttcctcccgacaccgaccaacccaaaccgcgcgcccctcccctccgatcccctaataacgaccccgcccccgccgacctaaccgccctatccccgcctccacgccccccccccccccgcctccccgaactacaacaaatacctccgaaacaaaaaactcgcgccgccgtcgccgccgccgctcaacttccccgaacgcgtccaaaacccgctacgccaaacgcgccgtccccgaacccgacgtacgtccctacgaaaaaaaaaaccccgccgctcgaaccgcctccgccaaccccactacgaaaaatcccaaaaccaaccgcgcccgccctcgcccccgaccccgcaaccttcccgccctacgcgccataaacgcccccgaacgacaaccccaacccgacgacgaaaacgccccaaaccacgaacctaaaaacaacccccaaaacgaacttaacttctccatcctcttcgactataaatatttaaatccgaacgaaaatcgataaaaactacccctaacc

SEQ ID NO: 21133 - DNA, 746 bp, Artificial Sequence
  chemically treated genomic DNA (Homo sapiens) CpG-island No: 21133
ggtgtcggtggcgggggattttggttggtgattggggaatatttagggaacgcgggagggtattcggagtaaagtttttaattggatagagcggggtcgggtttcgaggggcgggagcgttttcggtaggggtgtttaagcgagtcgtgatttttgattcgtcggagaggttttaggtttaggcgttattgcggattcgggttttgtttgttttgttttttttcgcgtaggcgcggtcggcggtagtttttatggtgacgggggcgcgttttcgttcgaggtttcgtttttagtaggttaggttgcgcggggttgcgggtttttagggtaggtgtcgcgggttgcgggtaggtggcggcgcggcgcgggttggcggtggttttacggtaggttgcgtagcggttgcgggtagtgggggtcggttggtcgttttttgttttcggtcgacgaggtagttgggggtgacggcggttggcgagggtcgttaagtttttgttcggtcgaggtttcgggagaaaagttggtaaagttggtcggggaagaggcggggagtcggaggatttttttagatttcgggtttgtagggagggaggatttcggtttgggagtcggggaattcgtttttcgagatttgagagtggatttcgcgggaagatttcgtatagggtaattaatggattacgtgttatttggttggcgatttgggagtcgatttttggaggggatcgggcgttggaggtttgggg

SEQ ID NO: 21134 - DNA, 746 bp, Artificial Sequence
  chemically treated genomic DNA (Homo sapiens) CpG-island No: 21134
ccccaaacctccaacgcccgatcccctccaaaaatcgactcccaaatcgccaaccaaataacacgtaatccattaattaccctatacgaaatcttcccgcgaaatccactctcaaatctcgaaaaacgaattccccgactcccaaaccgaaatcctccctccctacaaacccgaaatctaaaaaaatcctccgactccccgcctcttccccgaccaactttaccaacttttctcccgaaacctcgaccgaacaaaaacttaacgaccctcgccaaccgccgtcacccccaactacctcgtcgaccgaaaacaaaaaacgaccaaccgacccccactacccgcaaccgctacgcaacctaccgtaaaaccaccgccaacccgcgccgcgccgccacctacccgcaacccgcgacacctaccctaaaaacccgcaaccccgcgcaacctaacctactaaaaacgaaacctcgaacgaaaacgcgcccccgtcaccataaaaactaccgccgaccgcgcctacgcgaaaaaaaacaaaacaaacaaaacccgaatccgcaataacgcctaaacctaaaacctctccgacgaatcaaaaatcacgactcgcttaaacacccctaccgaaaacgctcccgcccctcgaaacccgaccccgctctatccaattaaaaactttactccgaataccctcccgcgttccctaaatattccccaatcaccaaccaaaatcccccgccaccgacacc

SEQ ID NO: 21135 - DNA, 746 bp, Artificial Sequence
  chemically treated genomic DNA (Homo sapiens) CpG-island No: 21135
ttttaggtttttagcgttcgattttttttagggatcgatttttaagtcgttaattaggtggtacgtgatttattggttgttttgtgcgggattttttcgcgggatttatttttaagtttcgggagacggatttttcggtttttaaatcgggattttttttttttgtagattcggagtttggggaaatttttcggtttttcgtttttttttcggttaattttgttaatttttttttcggggtttcggtcgggtagaaatttggcggttttcgttagtcgtcgttatttttagttatttcgtcggtcggggataggaggcggttagtcggtttttattgttcgtagtcgttgcgtaatttatcgtggagttatcgttagttcgcgtcgcgtcgttatttgttcgtagttcgcggtatttgttttgggagttcgtagtttcgcgtagtttagtttgttgggggcggggtttcgagcggggacgcgttttcgttattatgggaattgtcgtcggtcgcgtttgcgcggaggggagtagagtaggtaggattcgagttcgtagtggcgtttgggtttgggattttttcggcgggttagaggttacgattcgtttggatatttttgtcggaagcgttttcgtttttcgaggttcgatttcgttttgtttaattgggaattttgtttcgggtattttttcgcgttttttggatgttttttagttattagttaggatttttcgttatcggtatt

SEQ ID NO: 21136 - DNA, 746 bp, Artificial Sequence
  chemically treated genomic DNA (Homo sapiens) CpG-island No: 21136
aataccgataacgaaaaatcctaactaataactaaaaaacatccaaaaaacgcgaaaaaatacccgaaacaaaattcccaattaaacaaaacgaaatcgaacctcgaaaaacgaaaacgcttccgacaaaaatatccaaacgaatcgtaacctctaacccgccgaaaaaatcccaaacccaaacgccactacgaactcgaatcctacctactctactcccctccgcgcaaacgcgaccgacgacaattcccataataacgaaaacgcgtccccgctcgaaaccccgcccccaacaaactaaactacgcgaaactacgaactcccaaaacaaataccgcgaactacgaacaaataacgacgcgacgcgaactaacgataactccacgataaattacgcaacgactacgaacaataaaaaccgactaaccgcctcctatccccgaccgacgaaataactaaaaataacgacgactaacgaaaaccgccaaatttctacccgaccgaaaccccgaaaaaaaaattaacaaaattaaccgaaaaaaaaacgaaaaaccgaaaaatttccccaaactccgaatctacaaaaaaaaaaaatcccgatttaaaaaccgaaaaatccgtctcccgaaacttaaaaataaatcccgcgaaaaaatcccgcacaaaacaaccaataaatcacgtaccacctaattaacgacttaaaaatcgatccctaaaaaaaatcgaacgctaaaaacctaaaa

SEQ ID NO: 21137 - DNA, 749 bp, Artificial Sequence
  chemically treated genomic DNA (Homo sapiens) CpG-island No: 21137
tacggtttttttcggcggcgtatttatttgtagttgggtttggttggcgttgttcgcggtcgcgtcgggttcgtcggcggttttcgagtcgcgtagtacggtgatgtgtagcgtgagtagtagtagttttagtagtagtagtagttcggtcgttaggcgtattatttttttgagacgcgcggttttaggattcggcgcggcggtcggcggcggcggcggtgacgtcgggggaggaggagtaggagttcgggagttcggtagcgcggttttcgtttcggttttcgttagggtttcgtttttcgggttcgcggggttggcgttgggcgcggcggggtgtgcggggtcgggggagtaggagttgtcggcgtcgtcgtcgtcgtcgtcgtcgtattacggcggagttatcgcgaggtcgggggtgtttaagtcggttgcggagtaagtttcggcgttgtttggcggcggcggcggcggagacggagattgggtttcgggatagttcgggattcgggtcgggtcggaggttattttgttggtagggggttgcggggtcggcggcggggcgggcgtagtcgagttttcgagcgtatatgggcgttttagatgtggtcgcggcgtcgtagttggagcgggagcggtcgttagagaagcgcggggaggaggaggaggagaaggagaaggaggaggaggaggaggaggaggaggaggaggaggaggaggagtaggagggttttagttgcggtcgggag

SEQ ID NO: 21138 - DNA, 749 bp, Artificial Sequence
  chemically treated genomic DNA (Homo sapiens) CpG-island No: 21138
ctcccgaccgcaactaaaaccctcctactcctcctcctcctcctcctcctcctcctcctcctcctcctccttctccttctcctcctcctcctccccgcgcttctctaacgaccgctcccgctccaactacgacgccgcgaccacatctaaaacgcccatatacgctcgaaaactcgactacgcccgccccgccgccgaccccgcaaccccctaccaacaaaataacctccgacccgacccgaatcccgaactatcccgaaacccaatctccgtctccgccgccgccgccgccaaacaacgccgaaacttactccgcaaccgacttaaacacccccgacctcgcgataactccgccgtaatacgacgacgacgacgacgacgacgccgacaactcctactcccccgaccccgcacaccccgccgcgcccaacgccaaccccgcgaacccgaaaaacgaaaccctaacgaaaaccgaaacgaaaaccgcgctaccgaactcccgaactcctactcctcctcccccgacgtcaccgccgccgccgccgaccgccgcgccgaatcctaaaaccgcgcgtctcaaaaaaataatacgcctaacgaccgaactactactactactaaaactactactactcacgctacacatcaccgtactacgcgactcgaaaaccgccgacgaacccgacgcgaccgcgaacaacgccaaccaaacccaactacaaataaatacgccgccgaaaaaaaccgta

SEQ ID NO: 21139 - DNA, 749 bp, Artificial Sequence
  chemically treated genomic DNA (Homo sapiens) CpG-island No: 21139
ttttcggtcgtagttgaagtttttttattttttttttttttttttttttttttttttttttttttttttttttttttttttttttttttttttttcgcgtttttttggcggtcgttttcgttttagttgcggcgtcgcggttatatttggggcgtttatgtgcgttcgggggttcggttgcgttcgtttcgtcgtcgatttcgtagttttttgttagtagggtggttttcggttcggttcgggtttcgggttgtttcgggatttagttttcgttttcgtcgtcgtcgtcgttaggtagcgtcggggtttgtttcgtagtcggtttggatattttcggtttcgcggtggtttcgtcgtggtgcggcggcggcggcggcggcggcgtcggtagtttttgttttttcggtttcgtatatttcgtcgcgtttagcgttagtttcgcgggttcgggaagcggagttttggcgggagtcgaggcgggagtcgcgttgtcgggttttcgggtttttattttttttttttcggcgttatcgtcgtcgtcgtcggtcgtcgcgtcgggttttaaagtcgcgcgttttaaaaggatggtgcgtttggcggtcgagttgttgttgttgttggggttgttgttgtttacgttgtatattatcgtgttgcgcggttcgggagtcgtcgacgggttcgacgcggtcgcgggtaacgttagttaagtttagttgtaggtgagtgcgtcgtcggagagggtcgtg

SEQ ID NO: 21140 - DNA, 749 bp, Artificial Sequence
  chemically treated genomic DNA (Homo sapiens) CpG-island No: 21140
cacgaccctctccgacgacgcactcacctacaactaaacttaactaacgttacccgcgaccgcgtcgaacccgtcgacgactcccgaaccgcgcaacacgataatatacaacgtaaacaacaacaaccccaacaacaacaacaactcgaccgccaaacgcaccatccttttaaaacgcgcgactttaaaacccgacgcgacgaccgacgacgacgacgataacgccgaaaaaaaaaaaataaaaacccgaaaacccgacaacgcgactcccgcctcgactcccgccaaaactccgcttcccgaacccgcgaaactaacgctaaacgcgacgaaatatacgaaaccgaaaaaacaaaaactaccgacgccgccgccgccgccgccgccgcaccacgacgaaaccaccgcgaaaccgaaaatatccaaaccgactacgaaacaaaccccgacgctacctaacgacgacgacgacgaaaacgaaaactaaatcccgaaacaacccgaaacccgaaccgaaccgaaaaccaccctactaacaaaaaactacgaaatcgacgacgaaacgaacgcaaccgaacccccgaacgcacataaacgccccaaatataaccgcgacgccgcaactaaaacgaaaacgaccgccaaaaaaacgcgaaaaaaaaaaaaaaaaaaaaaaaaaaaaaaaaaaaaaaaaaaaaaaaaaaaaaaaaaaaaaaaaaaaataaaaaaacttcaactacgaccgaaaa

SEQ ID NO: 21141 - DNA, 653 bp, Artificial Sequence
  chemically treated genomic DNA (Homo sapiens) CpG-island No: 21141
ggttttcggtttgtttcgtagcgtttgttcggtcgttttgtttagttattttttgtattttgttttttttttcggtttagggcgagtatgtttacggcgtgggcgacgagtaggagtaggtagagtggcgttcgtatttgggtagtcggattcgggttggcgttttttaggcggttcgacggtttaagggttttacgtttcggcggcggtacggcgggcgcgggggttgttgtgggcgcgtcgggcgtattcgttaggcgcgggtcggttcggtcgttaggtttagtgagggcgttggcggagtcggggtattgttttggcggggaggagtcggcgcggcgggggcggcgcgttaattagttcggggttcgggagcgcgcgcggggagggggcgggggttattcgggtcggggttttcgagttcgatttgtttcgtagtcggcggttttgcgtttttttcgtttttagtattgttttcgagtacgtgtacgtgtttatcgttagttataggtacgtacgcgcgcgtaggtatagatgcgcggatattcggagattcgtacggtttttcgcgtttttttagcgtttgtgattttttttttttttttttagttttttttttttgtttgtttttttttttggtttttaaggataat

SEQ ID NO: 21142 - DNA, 653 bp, Artificial Sequence
  chemically treated genomic DNA (Homo sapiens) CpG-island No: 21142
attatccttaaaaaccaaaaaaaaaaacaaacaaaaaaaaaaaactaaaaaaaaaaaaaaaaaatcacaaacgctaaaaaaacgcgaaaaaccgtacgaatctccgaatatccgcgcatctatacctacgcgcgcgtacgtacctataactaacgataaacacgtacacgtactcgaaaacaatactaaaaacgaaaaaaacgcaaaaccgccgactacgaaacaaatcgaactcgaaaaccccgacccgaataacccccgccccctccccgcgcgcgctcccgaaccccgaactaattaacgcgccgcccccgccgcgccgactcctccccgccaaaacaataccccgactccgccaacgccctcactaaacctaacgaccgaaccgacccgcgcctaacgaatacgcccgacgcgcccacaacaacccccgcgcccgccgtaccgccgccgaaacgtaaaacccttaaaccgtcgaaccgcctaaaaaacgccaacccgaatccgactacccaaatacgaacgccactctacctactcctactcgtcgcccacgccgtaaacatactcgccctaaaccgaaaaaaaaaacaaaatacaaaaaataactaaacaaaacgaccgaacaaacgctacgaaacaaaccgaaaacc

SEQ ID NO: 21143 - DNA, 653 bp, Artificial Sequence
  chemically treated genomic DNA (Homo sapiens) CpG-island No: 21143
gttgtttttaagggttagaaggaggaatagatagagaaaggggattggggggagggaaagaaaattataggcgttgagagggcgcgggggatcgtacgggttttcgggtgttcgcgtatttgtatttgcgcgcgcgtgcgtatttgtggttggcggtgggtacgtgtacgtgttcgggggtagtgttgggggcgggaaagacgtaagatcgtcggttgcgggatagatcgaattcgagggtttcgattcgggtgattttcgtttttttttcgcgcgcgttttcgggtttcgagttggttaacgcgtcgttttcgtcgcgtcggttttttttcgttagggtagtgtttcggtttcgttaacgtttttattagatttggcggtcggatcgattcgcgtttggcggatgcgttcggcgcgtttatagtagttttcgcgttcgtcgtgtcgtcgtcgggacgtggggtttttgggtcgtcgggtcgtttggggagcgttagttcggattcggttgtttagatgcgggcgttattttgtttgtttttgttcgtcgtttacgtcgtggatatgttcgttttgaatcgaaggaagaagtaaggtataaggggtggttgggtagggcggtcgggtaggcgttgcggggtagatcgggggtt

SEQ ID NO: 21144 - DNA, 653 bp, Artificial Sequence
  chemically treated genomic DNA (Homo sapiens) CpG-island No: 21144
aacccccgatctaccccgcaacgcctacccgaccgccctacccaaccaccccttataccttacttcttccttcgattcaaaacgaacatatccacgacgtaaacgacgaacaaaaacaaacaaaataacgcccgcatctaaacaaccgaatccgaactaacgctccccaaacgacccgacgacccaaaaaccccacgtcccgacgacgacacgacgaacgcgaaaactactataaacgcgccgaacgcatccgccaaacgcgaatcgatccgaccgccaaatctaataaaaacgttaacgaaaccgaaacactaccctaacgaaaaaaaaccgacgcgacgaaaacgacgcgttaaccaactcgaaacccgaaaacgcgcgcgaaaaaaaaacgaaaatcacccgaatcgaaaccctcgaattcgatctatcccgcaaccgacgatcttacgtctttcccgcccccaacactacccccgaacacgtacacgtacccaccgccaaccacaaatacgcacgcgcgcgcaaatacaaatacgcgaacacccgaaaacccgtacgatcccccgcgccctctcaacgcctataattttctttccctccccccaatcccctttctctatctattcctccttctaacccttaaaaacaac

SEQ ID NO: 21145 - DNA, 809 bp, Artificial Sequence
  chemically treated genomic DNA (Homo sapiens) CpG-island No: 21145
tttttttaggttgggtaaggtgttgacggagaggttgacggcggtgacggttacgaagagtatcgataggtaggcgaatattttgttaggtagtttcgagtgcggtttttttattatgtcgcgtagtcgtcgtatgtagcgttttaggcggttttcgttttcggtcgggttttcgttgtcgcggttttcgttgtttagcgcgtcgttttttttttttcgttttattattttcgcgaattttttaattttttgtaggtagcggcgtttgtagtagtcgtttaggtggtttttcgcgatgttttagtatagtagttttttttggaaggatagcgcgtatatttcgcgtagtagtcgtagtttgttcgcgcgtaggaaggttaggatagtgtcgaaggttttcgggttgcggtcgaagaagaattcgttgtaggtgacgtcgtagttatcgtatacgttgaggatgtcgtcgaagttggtgtaggttttgagttggtttaggcgcgttagcgggaattcgtttagcgtggtttagggtagcgagtatttgatgtcgtttacgttgatgatgattcgacggcggcggttttcgggttgatagttttggcggggtttattttgcggtcgtagtcgttgcgttcggcggtagaacgcgtttttgatggtttggcgttgcgggaggaaggtcgggtggaaggaggcgttcgaggtgtagtttagcgcgttgtagtcgtagttagaattgtttttcggtaagagggttattttgggtttttatatttttttcgggtttgtggggagaagggagggaa

SEQ ID NO: 21146 - DNA, 809 bp, Artificial Sequence
  chemically treated genomic DNA (Homo sapiens) CpG-island No: 21146
ttccctcccttctccccacaaacccgaaaaaaatataaaaacccaaaataaccctcttaccgaaaaacaattctaactacgactacaacgcgctaaactacacctcgaacgcctccttccacccgaccttcctcccgcaacgccaaaccatcaaaaacgcgttctaccgccgaacgcaacgactacgaccgcaaaataaaccccgccaaaactatcaacccgaaaaccgccgccgtcgaatcatcatcaacgtaaacgacatcaaatactcgctaccctaaaccacgctaaacgaattcccgctaacgcgcctaaaccaactcaaaacctacaccaacttcgacgacatcctcaacgtatacgataactacgacgtcacctacaacgaattcttcttcgaccgcaacccgaaaaccttcgacactatcctaaccttcctacgcgcgaacaaactacgactactacgcgaaatatacgcgctatccttccaaaaaaaactactatactaaaacatcgcgaaaaaccacctaaacgactactacaaacgccgctacctacaaaaaattaaaaaattcgcgaaaataataaaacgaaaaaaaaaaaacgacgcgctaaacaacgaaaaccgcgacaacgaaaacccgaccgaaaacgaaaaccgcctaaaacgctacatacgacgactacgcgacataataaaaaaaccgcactcgaaactacctaacaaaatattcgcctacctatcgatactcttcgtaaccgtcaccgccgtcaacctctccgtcaacaccttacccaacctaaaaaaa

SEQ ID NO: 21147 - DNA, 809 bp, Artificial Sequence
  chemically treated genomic DNA (Homo sapiens) CpG-island No: 21147
tttttttttttttttttataggttcgagagggatgtgaaggtttaaaatgatttttttatcgggagataattttgattacgattatagcgcgttgagttgtatttcggacgtttttttttattcggtttttttttcgtagcgttaggttattaagggcgcgttttatcgtcgggcgtagcggttgcggtcgtaggatgagtttcgttagggttgttagttcgaggatcgtcgtcgtcggattattattaacgtaggcggtattaagtattcgttgttttggattacgttggacgagttttcgttgacgcgtttgggttagtttaaggtttgtattaatttcgacgatatttttaacgtgtgcgatgattacgacgttatttgtaacgagttttttttcgatcgtaattcgggggttttcggtattattttgatttttttgcgcgcgggtaagttgcggttgttgcgcgagatgtgcgcgttgtttttttaggaggagttgttgtattggggtatcgcggaggattatttggacggttgttgtaagcgtcgttatttgtagaagattgaggagttcgcggagatggtggagcgggaggaagaggacgacgcgttggatagcgagggtcgcgatagcgagggttcggtcgagggcgagggtcgtttggggcgttgtatgcggcgattgcgcgatatggtggagaggtcgtattcggggttgtttggtaaggtgttcgtttgtttgtcggtgtttttcgtgatcgttatcgtcgttaattttttcgttagtattttgtttagtttgagggag

SEQ ID NO: 21148 - DNA, 809 bp, Artificial Sequence
  chemically treated genomic DNA (Homo sapiens) CpG-island No: 21148
ctccctcaaactaaacaaaatactaacgaaaaaattaacgacgataacgatcacgaaaaacaccgacaaacaaacgaacaccttaccaaacaaccccgaatacgacctctccaccatatcgcgcaatcgccgcatacaacgccccaaacgaccctcgccctcgaccgaaccctcgctatcgcgaccctcgctatccaacgcgtcgtcctcttcctcccgctccaccatctccgcgaactcctcaatcttctacaaataacgacgcttacaacaaccgtccaaataatcctccgcgataccccaatacaacaactcctcctaaaaaaacaacgcgcacatctcgcgcaacaaccgcaacttacccgcgcgcaaaaaaatcaaaataataccgaaaacccccgaattacgatcgaaaaaaaactcgttacaaataacgtcgtaatcatcgcacacgttaaaaatatcgtcgaaattaatacaaaccttaaactaacccaaacgcgtcaacgaaaactcgtccaacgtaatccaaaacaacgaatacttaataccgcctacgttaataataatccgacgacgacgatcctcgaactaacaaccctaacgaaactcatcctacgaccgcaaccgctacgcccgacgataaaacgcgcccttaataacctaacgctacgaaaaaaaaaccgaataaaaaaaaacgtccgaaatacaactcaacgcgctataatcgtaatcaaaattatctcccgataaaaaaatcattttaaaccttcacatccctctcgaacctataaaaaaaaaaaaaaaaa

SEQ ID NO: 21149 - DNA, 831 bp, Artificial Sequence
  chemically treated genomic DNA (Homo sapiens) CpG-island No: 21149
gcgtatgaacgtagtgattattgttattgatatattatttttttcgttacgtacgtatacgtagttattatttttattgatacgttatttttttcgttacgtacgtatacgtagttattattgttatttatacgttattttttttattacgtatgtatacgtagttattattgttattaatacgtcgttttttttattacgtacgtatacgtagtgattattgttattgatacgttatttttttcgttacgtacgtatacgtagttattattgttatttatacgttatttttttcgttacgtacgtatacgtagttattattgttattgatacgttatttttttcgttacgtacgtatacgtagttattattgttattgatacgttatttttttcgttacgtacgtatacgtagttattattgttattgatacgtcgttttttttattacgtacgtatacgtagttattattgttattgatacgtcgtttttttcgttacgtacgtatacgtagtgattattgttattgatacgtcgtttttttcgttacgtacgtatacgtagttattattgttattgatacgtcgttttttttattacgtatgtatacgtagttattattgttattgatacgttatttttttcgttacgtacgtatacgtagtgattattgttattgatacgttatttttttcgttacgtatgtatacgtagttattattgttattgatacgtcgtttttttcgttatttgcgttggtatggttgagatagcggttttttttaatttatttttttttttaagattgtttttattggatatgttggtatg

SEQ ID NO: 21150 - DNA, 831 bp, Artificial Sequence
  chemically treated genomic DNA (Homo sapiens) CpG-island No: 21150
cataccaacatatccaataaaaacaatcttaaaaaaaaaaataaattaaaaaaaaccgctatctcaaccataccaacgcaaataacgaaaaaaacgacgtatcaataacaataataactacgtatacatacgtaacgaaaaaaataacgtatcaataacaataatcactacgtatacgtacgtaacgaaaaaaataacgtatcaataacaataataactacgtatacatacgtaataaaaaaaacgacgtatcaataacaataataactacgtatacgtacgtaacgaaaaaaacgacgtatcaataacaataatcactacgtatacgtacgtaacgaaaaaaacgacgtatcaataacaataataactacgtatacgtacgtaataaaaaaaacgacgtatcaataacaataataactacgtatacgtacgtaacgaaaaaaataacgtatcaataacaataataactacgtatacgtacgtaacgaaaaaaataacgtatcaataacaataataactacgtatacgtacgtaacgaaaaaaataacgtataaataacaataataactacgtatacgtacgtaacgaaaaaaataacgtatcaataacaataatcactacgtatacgtacgtaataaaaaaaacgacgtattaataacaataataactacgtatacatacgtaataaaaaaaataacgtataaataacaataataactacgtatacgtacgtaacgaaaaaaataacgtatcaataaaaataataactacgtatacgtacgtaacgaaaaaaataatatatcaataacaataatcactacgttcatacgc

SEQ ID NO: 21151 - DNA, 831 bp, Artificial Sequence
  chemically treated genomic DNA (Homo sapiens) CpG-island No: 21151
tatgttaatatgtttagtagaaatagttttgaaaagggaaataagttagaaaaggtcgttgttttagttatgttagcgtaggtggcggaggaggcggcgtattagtgatagtggtgattgcgtgtgtatgcgtggcggaggaggtggcgtattagtgatagtggttattgcgtgtgcgtgcgtggcggaggaggtggcgtattagtgatagtggtgattgcgtgtgtatgcgtggtggaggaggcggcgtattagtgatagtggtgattgcgtgtgcgtgcgtggcggaggaggcggcgtattagtgatagtggttattgcgtgtgcgtgcgtggcggaggaggcggcgtattagtgatagtggtgattgcgtgtgcgtgcgtggtggaggaggcggcgtattagtgatagtggtgattgcgtgtgcgtgcgtggcggaggaggtggcgtattagtgatagtggtgattgcgtgtgcgtgcgtggcggaggaggtggcgtattagtgatagtggtgattgcgtgtgcgtgcgtggcggaggaggtggcgtatgagtgatagtggtgattgcgtgtgcgtgcgtggcggaggaggtggcgtattagtgatagtggttattgcgtgtgcgtgcgtggtggaggaggcggcgtattagtgatagtggtgattgcgtgtgtatgcgtggtggaggaggtggcgtatgagtgatagtggtgattgcgtgtgcgtgcgtggcggaggaggtggcgtgttagtgagagtggtgattgcgtgtgcgtgcgtggcggaggaggtggtgtattagtgatagtagttattgcgtttatacgt

SEQ ID NO: 21152 - DNA, 831 bp, Artificial Sequence
  chemically treated genomic DNA (Homo sapiens) CpG-island No: 21152
acgtataaacgcaataactactatcactaatacaccacctcctccgccacgcacgcacacgcaatcaccactctcactaacacgccacctcctccgccacgcacgcacacgcaatcaccactatcactcatacgccacctcctccaccacgcatacacacgcaatcaccactatcactaatacgccgcctcctccaccacgcacgcacacgcaataaccactatcactaatacgccacctcctccgccacgcacgcacacgcaatcaccactatcactcatacgccacctcctccgccacgcacgcacacgcaatcaccactatcactaatacgccacctcctccgccacgcacgcacacgcaatcaccactatcactaatacgccacctcctccgccacgcacgcacacgcaatcaccactatcactaatacgccgcctcctccaccacgcacgcacacgcaatcaccactatcactaatacgccgcctcctccgccacgcacgcacacgcaataaccactatcactaatacgccgcctcctccgccacgcacgcacacgcaatcaccactatcactaatacgccgcctcctccaccacgcatacacacgcaatcaccactatcactaatacgccacctcctccgccacgcacgcacacgcaataaccactatcactaatacgccacctcctccgccacgcatacacacgcaatcaccactatcactaatacgccgcctcctccgccacctacgctaacataactaaaacaacgaccttttctaacttatttcccttttcaaaactatttctactaaacatattaacata

SEQ ID NO: 21153 - DNA, 943 bp, Artificial Sequence
  chemically treated genomic DNA (Homo sapiens) CpG-island No: 21153
cgttaatgacgtcgatgatagtgatagcgtcggtcgagtgttttttttgtttcgggtcggttaggtatcgggtttttttttagtattcgtagtacgtattgaagaagacgttacggaatttttcgttttttagattcgggggaattaggaaattcgttcggcgattttcgcgtagtagtatcgggttaggtttgttttcggaatcgttgattgtattcgtcgtttttttcgtttgggtttttcgcgggtcgtaggggtggaagttcgatttgggttagggttcggatttttttttttcggtttttgcgttatcgttttcggtgtaggacgcgttttgttttcgtcgagatttagacgcgttgaaagtttcgcgcgggtagtttttcgttttacgtttcgggttgcgcgttttttcgtaaagtttttgtcgagtgcgcgtaacggcgtcgtcggatttttcgggatcgcgttttcgcgtacgtttgatcggagtatttcgttttacgggggcgttttgcgcgtttttttttttcggtgcgatttttatttttttttttttcgcggtttttaggagtttaggtatttttcgatttttcgggattttttgcgggttcgaagtcgttttttcgaggcggcggagttgggtagtttcgggtttcgcgtcgtttcgtagagtcggagttttttttcggagtttggatatagtttttcgtttcgtcgtcgcgtattggatttcggtagcgtggagtttgttcgggaagttgggttgcgtcggtttggggcgaaggtttaaggggcgcgggggtcgggacgcggggttgtggtaacgatcggttttttgcgaacgttcgggtcggcgggttcggggttataggttgggagtggagttggcggttattggggagtagagaggacgtttaggaataggtgtattagggtttcg

SEQ ID NO: 21154 - DNA, 943 bp, Artificial Sequence
  chemically treated genomic DNA (Homo sapiens) CpG-island No: 21154
cgaaaccctaatacacctattcctaaacgtcctctctactccccaataaccgccaactccactcccaacctataaccccgaacccgccgacccgaacgttcgcaaaaaaccgatcgttaccacaaccccgcgtcccgacccccgcgccccttaaaccttcgccccaaaccgacgcaacccaacttcccgaacaaactccacgctaccgaaatccaatacgcgacgacgaaacgaaaaactatatccaaactccgaaaaaaaactccgactctacgaaacgacgcgaaacccgaaactacccaactccgccgcctcgaaaaaacgacttcgaacccgcaaaaaatcccgaaaaatcgaaaaatacctaaactcctaaaaaccgcgaaaaaaaaaaaaataaaaatcgcaccgaaaaaaaaaaacgcgcaaaacgcccccgtaaaacgaaatactccgatcaaacgtacgcgaaaacgcgatcccgaaaaatccgacgacgccgttacgcgcactcgacaaaaactttacgaaaaaacgcgcaacccgaaacgtaaaacgaaaaactacccgcgcgaaactttcaacgcgtctaaatctcgacgaaaacaaaacgcgtcctacaccgaaaacgataacgcaaaaaccgaaaaaaaaaaatccgaaccctaacccaaatcgaacttccacccctacgacccgcgaaaaacccaaacgaaaaaaacgacgaatacaatcaacgattccgaaaacaaacctaacccgatactactacgcgaaaatcgccgaacgaatttcctaattcccccgaatctaaaaaacgaaaaattccgtaacgtcttcttcaatacgtactacgaatactaaaaaaaaacccgatacctaaccgacccgaaacaaaaaaaacactcgaccgacgctatcactatcatcgacgtcattaacg

SEQ ID NO: 21155 - DNA, 943 bp, Artificial Sequence
  chemically treated genomic DNA (Homo sapiens) CpG-island No: 21155
cgggattttggtgtatttgtttttgggcgttttttttattttttagtggtcgttagttttatttttagtttgtggtttcggattcgtcggttcgagcgttcgtagagggtcggtcgttgttatagtttcgcgtttcggttttcgcgttttttggattttcgttttaggtcggcgtagtttagtttttcgggtaggttttacgttatcggggtttagtgcgcggcgacgaagcggagagttgtatttagatttcggagagaaatttcggttttgcggggcggcgcggggttcggagttgtttaatttcgtcgtttcgggaaggcggtttcgggttcgtagggagtttcggggagtcgaggggtgtttgggtttttggggatcgcgagaggaaaaagaatggaaatcgtatcggggaggaaggacgcgtagaacgttttcgtgaagcggggtgtttcggttaggcgtgcgcgggagcgcggtttcggggagttcggcggcgtcgttgcgcgtattcggtagaggttttgcgggagaacgcgtagttcggggcgtggggcggggaattgttcgcgcgaggtttttagcgcgtttgggtttcggcgagagtaaagcgcgttttgtatcgggggcggtggcgtagaggtcgggaggaagaaattcgggttttggtttaggtcgggtttttatttttgcgattcgcgagaggtttaggcgggaaaggcggcgagtgtagttagcggtttcgaaagtaaatttggttcggtgttattgcgcgagggtcgtcgggcgagttttttaattttttcgagtttggaaaacggagagtttcgtagcgttttttttagtgcgtgttgcgagtgttgaaggaggattcggtgtttggtcgattcggagtaggggaagtattcggtcgacgttgttattgttatcggcgttattggcg

SEQ ID NO: 21156 - DNA, 943 bp, Artificial Sequence
  chemically treated genomic DNA (Homo sapiens) CpG-island No: 21156
cgccaataacgccgataacaataacaacgtcgaccgaatacttcccctactccgaatcgaccaaacaccgaatcctccttcaacactcgcaacacgcactaaaaaaaacgctacgaaactctccgttttccaaactcgaaaaaattaaaaaactcgcccgacgaccctcgcgcaataacaccgaaccaaatttactttcgaaaccgctaactacactcgccgcctttcccgcctaaacctctcgcgaatcgcaaaaataaaaacccgacctaaaccaaaacccgaatttcttcctcccgacctctacgccaccgcccccgatacaaaacgcgctttactctcgccgaaacccaaacgcgctaaaaacctcgcgcgaacaattccccgccccacgccccgaactacgcgttctcccgcaaaacctctaccgaatacgcgcaacgacgccgccgaactccccgaaaccgcgctcccgcgcacgcctaaccgaaacaccccgcttcacgaaaacgttctacgcgtccttcctccccgatacgatttccattctttttcctctcgcgatccccaaaaacccaaacacccctcgactccccgaaactccctacgaacccgaaaccgccttcccgaaacgacgaaattaaacaactccgaaccccgcgccgccccgcaaaaccgaaatttctctccgaaatctaaatacaactctccgcttcgtcgccgcgcactaaaccccgataacgtaaaacctacccgaaaaactaaactacgccgacctaaaacgaaaatccaaaaaacgcgaaaaccgaaacgcgaaactataacaacgaccgaccctctacgaacgctcgaaccgacgaatccgaaaccacaaactaaaaataaaactaacgaccactaaaaaataaaaaaaacgcccaaaaacaaatacaccaaaatcccg

SEQ ID NO: 21157 - DNA, 617 bp, Artificial Sequence
  chemically treated genomic DNA (Homo sapiens) CpG-island No: 21157
gggcgggagaaaatttggtagcgaggtagaagcgatttttgtcgagggagttagcgagcggtcgcgcggagaggaggggcgggcggtttttaggcgggcgggtgtagggcgcggggcgtcgatttgttggagaggggttcgggcgcgaggcggagtttcggcgcgtagttaggttggcggaggttttcggtcggttgtagatttttttcggtttcgggagtcgtagtaggatcggtcgggaggcgtcgcggaggggagtcgtatttcggtgcggatagtgtttatcgcgttttgcgaggatcggcgatttatcggttttttttagggttagcgtagttattcgtttaattttattcggagcgcgttgtcgttcgtcgatttgcgcgatcgttagggtcgtattacgggggtgggtagcgacggtaggtatttcggtaggacggtcgtcgaggtcggggggtcgatggtcgcggttaacggggcgagtgttcggatgtttttcgtttttcgtcgcgtcgtcgtcgcgtttttttttggtttttgttcgtttgttgttttcgggtttagttgggaggtttttgttcggttttgtttttttattttcgcgtttttatttt

SEQ ID NO: 21158 - DNA, 617 bp, Artificial Sequence
  chemically treated genomic DNA (Homo sapiens) CpG-island No: 21158
aaaataaaaacgcgaaaataaaaaaacaaaaccgaacaaaaacctcccaactaaacccgaaaacaacaaacgaacaaaaaccaaaaaaaaacgcgacgacgacgcgacgaaaaacgaaaaacatccgaacactcgccccgttaaccgcgaccatcgaccccccgacctcgacgaccgtcctaccgaaatacctaccgtcgctacccacccccgtaatacgaccctaacgatcgcgcaaatcgacgaacgacaacgcgctccgaataaaattaaacgaataactacgctaaccctaaaaaaaaccgataaatcgccgatcctcgcaaaacgcgataaacactatccgcaccgaaatacgactcccctccgcgacgcctcccgaccgatcctactacgactcccgaaaccgaaaaaaatctacaaccgaccgaaaacctccgccaacctaactacgcgccgaaactccgcctcgcgcccgaacccctctccaacaaatcgacgccccgcgccctacacccgcccgcctaaaaaccgcccgcccctcctctccgcgcgaccgctcgctaactccctcgacaaaaatcgcttctacctcgctaccaaattttctcccgccc

SEQ ID NO: 21159 - DNA, 617 bp, Artificial Sequence
  chemically treated genomic DNA (Homo sapiens) CpG-island No: 21159
agggtgaggacgcgggagtgagggagtaaagtcgggtaggggttttttagttgggttcggaggtagtaggcggataagggttaggagagggcgcggcggcggcgcggcgggaagcgaggggtattcggatattcgtttcgttggtcgcggttatcggtttttcgatttcgacggtcgttttgtcgaagtatttgtcgtcgttgtttattttcgtggtgcggttttgacggtcgcgtaggtcgacggacgatagcgcgtttcggatgaagttgggcgggtagttgcgttggttttggaagaggtcggtgggtcgtcggttttcgtagggcgcggtgggtattgttcgtatcgggatgcgattttttttcgcggcgtttttcggtcggttttgttgcggttttcggggtcggagggaatttgtagtcggtcgggggttttcgttagtttggttgcgcgtcgggatttcgtttcgcgttcgggtttttttttagtaggtcggcgtttcgcgttttgtattcgttcgtttggggatcgttcgtttttttttttcgcgcggtcgttcgttgattttttcggtagggatcgtttttgtttcgttgttaagttttttttcgttt

SEQ ID NO: 21160 - DNA, 617 bp, Artificial Sequence
  chemically treated genomic DNA (Homo sapiens) CpG-island No: 21160
aaacgaaaaaaaacttaacaacgaaacaaaaacgatccctaccgaaaaaatcaacgaacgaccgcgcgaaaaaaaaaaacgaacgatccccaaacgaacgaatacaaaacgcgaaacgccgacctactaaaaaaaaacccgaacgcgaaacgaaatcccgacgcgcaaccaaactaacgaaaacccccgaccgactacaaattccctccgaccccgaaaaccgcaacaaaaccgaccgaaaaacgccgcgaaaaaaaatcgcatcccgatacgaacaatacccaccgcgccctacgaaaaccgacgacccaccgacctcttccaaaaccaacgcaactacccgcccaacttcatccgaaacgcgctatcgtccgtcgacctacgcgaccgtcaaaaccgcaccacgaaaataaacaacgacgacaaatacttcgacaaaacgaccgtcgaaatcgaaaaaccgataaccgcgaccaacgaaacgaatatccgaatacccctcgcttcccgccgcgccgccgccgcgccctctcctaacccttatccgcctactacctccgaacccaactaaaaaacccctacccgactttactccctcactcccgcgtcctcaccct

SEQ ID NO: 21161 - DNA, 559 bp, Artificial Sequence
  chemically treated genomic DNA (Homo sapiens) CpG-island No: 21161
acgttcggaagataacggatgggagtcgtgtgtacgtcgggagttcggagtgagcgtgagtttcgtgtttaggttcgcgattcggtttattaggatagcgtttcgggtcgacggggttttggagtcgcgttcggggagggcgtagcggagggtgagcggcggcgttaggattcggaggcgcgggcggaggtggcggggttaggatttagcggtttcggtagagcggaagcggcggcgggagttttcgggagggcggttcgcgggtgaggaggcgttcggggtcgcgggaagtagggtcgtgggggtttggcggggcgaagtaggggattcggaggggttggagggaggcgggcgggaggttcgggatcgtttttgatcgagaagtttgcgttaagttggtgtttcgcggtcgttgttcggtgttcggttttattgcgaacgtcgtcgttgggtttcgatcgttcgggaggcgttttgggttcgtttcggagttttttttttggagtcgcgttttgtattcggttttgttcggttttagtagggaagttaaggtttgtgg

SEQ ID NO: 21162 - DNA, 559 bp, Artificial Sequence
  chemically treated genomic DNA (Homo sapiens) CpG-island No: 21162
ccacaaaccttaacttccctactaaaaccgaacaaaaccgaatacaaaacgcgactccaaaaaaaaaactccgaaacgaacccaaaacgcctcccgaacgatcgaaacccaacgacgacgttcgcaataaaaccgaacaccgaacaacgaccgcgaaacaccaacttaacgcaaacttctcgatcaaaaacgatcccgaacctcccgcccgcctccctccaacccctccgaatcccctacttcgccccgccaaacccccacgaccctacttcccgcgaccccgaacgcctcctcacccgcgaaccgccctcccgaaaactcccgccgccgcttccgctctaccgaaaccgctaaatcctaaccccgccacctccgcccgcgcctccgaatcctaacgccgccgctcaccctccgctacgccctccccgaacgcgactccaaaaccccgtcgacccgaaacgctatcctaataaaccgaatcgcgaacctaaacacgaaactcacgctcactccgaactcccgacgtacacacgactcccatccgttatcttccgaacgt

SEQ ID NO: 21163 - DNA, 559 bp, Artificial Sequence
  chemically treated genomic DNA (Homo sapiens) CpG-island No: 21163
ttataagttttggtttttttgttagggtcgggtaaggtcgggtgtagggcgcggttttagggaggaagtttcggggcgagtttaagacgtttttcgggcggtcggggtttagcggcggcgttcgtagtggagtcgggtatcgggtagcggtcgcggaatattagtttggcgtaggtttttcggttaggaacggtttcgggtttttcgttcgtttttttttagttttttcgggttttttatttcgtttcgttaggtttttacgattttatttttcgcggtttcggacgtttttttattcgcgagtcgttttttcggaagttttcgtcgtcgttttcgttttgtcggagtcgttgggttttagtttcgttattttcgttcgcgttttcgggttttaacgtcgtcgtttatttttcgttgcgtttttttcgagcgcggttttaggatttcgtcgattcggagcgttgttttggtggatcgagtcgcgggtttgggtacggaatttacgtttatttcgagttttcgacgtgtatacggtttttattcgttgtttttcgagcgt

SEQ ID NO: 21164 - DNA, 559 bp, Artificial Sequence
  chemically treated genomic DNA (Homo sapiens) CpG-island No: 21164
acgctcgaaaaacaacgaataaaaaccgtatacacgtcgaaaactcgaaataaacgtaaattccgtacccaaacccgcgactcgatccaccaaaacaacgctccgaatcgacgaaatcctaaaaccgcgctcgaaaaaaacgcaacgaaaaataaacgacgacgttaaaacccgaaaacgcgaacgaaaataacgaaactaaaacccaacgactccgacaaaacgaaaacgacgacgaaaacttccgaaaaaacgactcgcgaataaaaaaacgtccgaaaccgcgaaaaataaaatcgtaaaaacctaacgaaacgaaataaaaaacccgaaaaaactaaaaaaaaacgaacgaaaaacccgaaaccgttcctaaccgaaaaacctacgccaaactaatattccgcgaccgctacccgatacccgactccactacgaacgccgccgctaaaccccgaccgcccgaaaaacgtcttaaactcgccccgaaacttcctccctaaaaccgcgccctacacccgaccttacccgaccctaacaaaaaaaccaaaacttataa

SEQ ID NO: 21165 - DNA, 536 bp, Artificial Sequence
  chemically treated genomic DNA (Homo sapiens) CpG-island No: 21165
tcgtattcggtcgtatgcgtattttttgcggttttttcgttaggcgtcgcgttgggtagttagcgtttcggcggggttttttaggttttcggtcgggtagtttttttcggggtttttgcgcggttgcgtagtagttgcgaggacgcggggcgagtcggaagtggagtgcgttgcggtgcgagttgggtcggcggggtggttcgagagcgcgtagagtttagattggcggtagggttcgaggggtcgattcgtagcgtttttggtttttttagtttttattcggaatcgtacgtgagggtaaattcgtttcggtggttggtttagtacgcggggatagttttttcgaggtttttttagcggtgtgggcgagagggcgttcgggtcgggggaagtacggaaaggtggtttcgcgaggttgttgtggggggcgggacgggtagtttggcgatgtttggatatggttggtggttaaaaatatttatcgaaagatagtatatttatttagatggcgaggatatcgataagtaagttttcgt

SEQ ID NO: 21166 - DNA, 536 bp, Artificial Sequence
  chemically treated genomic DNA (Homo sapiens) CpG-island No: 21166
acgaaaacttacttatcgatatcctcgccatctaaataaatatactatctttcgataaatatttttaaccaccaaccatatccaaacatcgccaaactacccgtcccgccccccacaacaacctcgcgaaaccacctttccgtacttcccccgacccgaacgccctctcgcccacaccgctaaaaaaacctcgaaaaaactatccccgcgtactaaaccaaccaccgaaacgaatttaccctcacgtacgattccgaataaaaactaaaaaaaccaaaaacgctacgaatcgacccctcgaaccctaccgccaatctaaactctacgcgctctcgaaccaccccgccgacccaactcgcaccgcaacgcactccacttccgactcgccccgcgtcctcgcaactactacgcaaccgcgcaaaaaccccgaaaaaaactacccgaccgaaaacctaaaaaaccccgccgaaacgctaactacccaacgcgacgcctaacgaaaaaaccgcaaaaaatacgcatacgaccgaatacga

SEQ ID NO: 21167 - DNA, 536 bp, Artificial Sequence
  chemically treated genomic DNA (Homo sapiens) CpG-island No: 21167
gcgaagatttgtttgtcgatgttttcgttatttaagtgggtatgttatttttcgataaatgtttttggttattaattatgtttaggtatcgttaggttgttcgtttcgttttttataatagtttcgcgaagttattttttcgtgtttttttcgattcggacgttttttcgtttatatcgttagggaggtttcggaggggttgttttcgcgtgttaagttagttatcggggcggatttgtttttacgtgcggtttcgagtgagggttggagagattagggacgttgcgggtcggtttttcgggttttgtcgttagtttggattttgcgcgttttcgaattatttcgtcggtttagttcgtatcgtagcgtattttattttcggttcgtttcgcgttttcgtagttgttacgtaatcgcgtaaggatttcgagggaggttgttcggtcgaaggtttgaaggatttcgtcggggcgttggttgtttagcgcggcgtttggcgggagggtcgtagggagtgcgtatgcggtcgagtgcgg

SEQ ID NO: 21168 - DNA, 536 bp, Artificial Sequence
  chemically treated genomic DNA (Homo sapiens) CpG-island No: 21168
ccgcactcgaccgcatacgcactccctacgaccctcccgccaaacgccgcgctaaacaaccaacgccccgacgaaatccttcaaaccttcgaccgaacaacctccctcgaaatccttacgcgattacgtaacaactacgaaaacgcgaaacgaaccgaaaataaaatacgctacgatacgaactaaaccgacgaaataattcgaaaacgcgcaaaatccaaactaacgacaaaacccgaaaaaccgacccgcaacgtccctaatctctccaaccctcactcgaaaccgcacgtaaaaacaaatccgccccgataactaacttaacacgcgaaaacaacccctccgaaacctccctaacgatataaacgaaaaaacgtccgaatcgaaaaaaacacgaaaaaataacttcgcgaaactattataaaaaacgaaacgaacaacctaacgatacctaaacataattaataaccaaaaacatttatcgaaaaataacatacccacttaaataacgaaaacatcgacaaacaaatcttcgc

SEQ ID NO: 21169 - DNA, 503 bp, Artificial Sequence
  chemically treated genomic DNA (Homo sapiens) CpG-island No: 21169
gggcgttgacgggtacggagcgtacgggatcgcggaggaattcgcgcgcgttttcgtttcgcgtcgcgcgtacgtgattgcgttttcggtttcgttttcggtttgtttttcgtttttattggtcgttcggtcgcgcgcgggtcggtcggttttatggggaaagcggcggtttcgagtcgaggcggcggttgtggcggtcgttttcgcgggttttcgtcgttgtttacggttgttttttgtttgtcgtgttatacggcggcgtcgggtatgagcgtttttacgttcggtttcgggtcggagtttaagttttagttttagttcgtgttcgaatcggagcggggatcgttgttagaataggtgtcggaggtagtttcggaggtagtgttaagatcggaatttgtgttcgagacgacgtttgagtcggagttaggggttgggtagttatcggaattgttgtaggggtcgcggtcggggttagagttaagtttaggtgtaggggttgg

SEQ ID NO: 21170 - DNA, 503 bp, Artificial Sequence
  chemically treated genomic DNA (Homo sapiens) CpG-island No: 21170
ccaacccctacacctaaacttaactctaaccccgaccgcgacccctacaacaattccgataactacccaacccctaactccgactcaaacgtcgtctcgaacacaaattccgatcttaacactacctccgaaactacctccgacacctattctaacaacgatccccgctccgattcgaacacgaactaaaactaaaacttaaactccgacccgaaaccgaacgtaaaaacgctcatacccgacgccgccgtataacacgacaaacaaaaaacaaccgtaaacaacgacgaaaacccgcgaaaacgaccgccacaaccgccgcctcgactcgaaaccgccgctttccccataaaaccgaccgacccgcgcgcgaccgaacgaccaataaaaacgaaaaacaaaccgaaaacgaaaccgaaaacgcaatcacgtacgcgcgacgcgaaacgaaaacgcgcgcgaattcctccgcgatcccgtacgctccgtacccgtcaacgccc

SEQ ID NO: 21171 - DNA, 503 bp, Artificial Sequence
  chemically treated genomic DNA (Homo sapiens) CpG-island No: 21171
ttagtttttatatttgagtttgattttgatttcggtcgcgatttttgtagtagtttcgatggttgtttagtttttggtttcggtttagacgtcgtttcggatataggtttcgattttggtattgttttcgaaattgttttcgatatttgttttgatagcggttttcgtttcggttcgggtacgggttggggttggggtttgggtttcggttcggagtcggacgtggaagcgtttatgttcggcgtcgtcgtgtggtacgataggtaggggataatcgtgaatagcgacgagagttcgcgggagcggtcgttatagtcgtcgtttcggttcggagtcgtcgttttttttatagagtcggtcgattcgcgcgcggtcgagcggttagtgggggcggggggtaggtcgggggcggggtcgggggcgtagttacgtgcgcgcggcgcgaggcgggggcgcgcgcgggttttttcgcggtttcgtgcgtttcgtgttcgttagcgttt

SEQ ID NO: 21172 - DNA, 503 bp, Artificial Sequence
  chemically treated genomic DNA (Homo sapiens) CpG-island No: 21172
aaacgctaacgaacacgaaacgcacgaaaccgcgaaaaaacccgcgcgcgcccccgcctcgcgccgcgcgcacgtaactacgcccccgaccccgcccccgacctaccccccgcccccactaaccgctcgaccgcgcgcgaatcgaccgactctataaaaaaaacgacgactccgaaccgaaacgacgactataacgaccgctcccgcgaactctcgtcgctattcacgattatcccctacctatcgtaccacacgacgacgccgaacataaacgcttccacgtccgactccgaaccgaaacccaaaccccaaccccaacccgtacccgaaccgaaacgaaaaccgctatcaaaacaaatatcgaaaacaatttcgaaaacaataccaaaatcgaaacctatatccgaaacgacgtctaaaccgaaaccaaaaactaaacaaccatcgaaactactacaaaaatcgcgaccgaaatcaaaatcaaactcaaatataaaaactaa

SEQ ID NO: 21173 - DNA, 992 bp, Artificial Sequence
  chemically treated genomic DNA (Homo sapiens) CpG-island No: 21173
gtcgcgggcgtttatttacgttagtatcgggagtcgcgcggcgattcggcgagttcggtaggtaggataggattgcggcgtaggtttggtttaggcggaggaagtagtcgtcgttttagttgacggagtgcggtcgggggttttttagaggaggcggcgacgtcgagttttttcgaacgtttttattcggttagtttacgtagtttcggtttcgttcggtttcgttcggtttcgttttatttatttcggttatcgtttttttttcggtttatagttcgcgggtggggcgatttgcgatagtttttttaagaggcgtggttacgtgtttcgtttttattttcgtttcgcgcgttagtaaggggtggggtgcgggaggaggtgtcggggaggtggggggagcgaagtgtgcgttgttgcgtaggcgcggtggtcggacgatagatcgtgtgtttttaaaatggcggtagcgatggatgtggatatttcgagcggtattaatagcggcgcgggtaagaagcgttttgaagtgaaaaaggttgggtttcgttagcgttttttttagggaagttagagaggcgcggatttggttggtaggttcgaggatggtcgaggcgcggagtaaagggttttattttagggcgtttttgggatcgggtattacgaaaggaagtcggggggcgggttttagagttgatcggcgtgacggcggtttattgttgggggaagtgttggtttcgttgtgaggttaaggggttaattatagagttgtttattgagatacgcggggttgcgatttggcggcgggagttaagcgtttgagttgttattggagtggttgagaggtgggggaaggatagggtagggtggggtggggtgggtggaatggggagtcgaagcgaatgcggcggtggaggatggggtagtgcggcgagagtttggaatttgaggttttatcgtattagaggtttttgaggattttttttggtgatttt

SEQ ID NO: 21174 - DNA, 992 bp, Artificial Sequence
  chemically treated genomic DNA (Homo sapiens) CpG-island No: 21174
aaaatcaccaaaaaaaatcctcaaaaacctctaatacgataaaacctcaaattccaaactctcgccgcactaccccatcctccaccgccgcattcgcttcgactccccattccacccaccccaccccaccctaccctatccttcccccacctctcaaccactccaataacaactcaaacgcttaactcccgccgccaaatcgcaaccccgcgtatctcaataaacaactctataattaaccccttaacctcacaacgaaaccaacacttcccccaacaataaaccgccgtcacgccgatcaactctaaaacccgccccccgacttcctttcgtaatacccgatcccaaaaacgccctaaaataaaaccctttactccgcgcctcgaccatcctcgaacctaccaaccaaatccgcgcctctctaacttccctaaaaaaaacgctaacgaaacccaacctttttcacttcaaaacgcttcttacccgcgccgctattaataccgctcgaaatatccacatccatcgctaccgccattttaaaaacacacgatctatcgtccgaccaccgcgcctacgcaacaacgcacacttcgctccccccacctccccgacacctcctcccgcaccccaccccttactaacgcgcgaaacgaaaataaaaacgaaacacgtaaccacgcctcttaaaaaaactatcgcaaatcgccccacccgcgaactataaaccgaaaaaaaaacgataaccgaaataaataaaacgaaaccgaacgaaaccgaacgaaaccgaaactacgtaaactaaccgaataaaaacgttcgaaaaaactcgacgtcgccgcctcctctaaaaaacccccgaccgcactccgtcaactaaaacgacgactacttcctccgcctaaaccaaacctacgccgcaatcctatcctacctaccgaactcgccgaatcgccgcgcgactcccgatactaacgtaaataaacgcccgcgac

SEQ ID NO: 21175 - DNA, 992 bp, Artificial Sequence
  chemically treated genomic DNA (Homo sapiens) CpG-island No: 21175
aagattattaaggggggtttttagaggtttttaatgcggtaggattttaggttttaggttttcgtcgtattgttttattttttatcgtcgtattcgtttcgattttttattttatttattttattttattttattttgttttttttttattttttaattattttagtgatagtttaagcgtttggttttcgtcgttaagtcgtaatttcgcgtattttaataagtagttttgtgattggttttttagttttatagcgaaattaatattttttttaatagtgggtcgtcgttacgtcgattaattttaagattcgtttttcggttttttttcgtggtattcggttttaggaacgttttgaaatgaaattttttatttcgcgtttcgattattttcgggtttgttagttagattcgcgtttttttagtttttttgaggaaggcgttggcgagatttaattttttttattttaaagcgttttttgttcgcgtcgttgttggtgtcgttcggggtatttatatttatcgttgtcgttattttggaaatatacggtttgtcgttcgattatcgcgtttgcgtagtagcgtatatttcgttttttttattttttcggtattttttttcgtattttattttttattggcgcgcgaggcggaggtgggggcggagtacgtgattacgttttttaaaggggttgtcgtaggtcgttttattcgcgaattgtaggtcggggagggggcggtggtcggagtgggtggggcggggtcgggcggggtcgggcggggtcgaggttacgtgagttagtcgggtggaaacgttcgaaagggttcgacgtcgtcgttttttttgggaagttttcggtcgtatttcgttagttggggcggcggttgtttttttcgtttgagttagatttgcgtcgtagttttgttttgtttgtcgggttcgtcgagtcgtcgcgcggttttcggtgttggcgtgggtgggcgttcgcggt

SEQ ID NO: 21176 - DNA, 992 bp, Artificial Sequence
  chemically treated genomic DNA (Homo sapiens) CpG-island No: 21176
accgcgaacgcccacccacgccaacaccgaaaaccgcgcgacgactcgacgaacccgacaaacaaaacaaaactacgacgcaaatctaactcaaacgaaaaaaacaaccgccgccccaactaacgaaatacgaccgaaaacttcccaaaaaaaacgacgacgtcgaaccctttcgaacgtttccacccgactaactcacgtaacctcgaccccgcccgaccccgcccgaccccgccccacccactccgaccaccgccccctccccgacctacaattcgcgaataaaacgacctacgacaacccctttaaaaaacgtaatcacgtactccgcccccacctccgcctcgcgcgccaataaaaaataaaatacgaaaaaaaataccgaaaaaataaaaaaaacgaaatatacgctactacgcaaacgcgataatcgaacgacaaaccgtatatttccaaaataacgacaacgataaatataaataccccgaacgacaccaacaacgacgcgaacaaaaaacgctttaaaataaaaaaaattaaatctcgccaacgccttcctcaaaaaaactaaaaaaacgcgaatctaactaacaaacccgaaaataatcgaaacgcgaaataaaaaatttcatttcaaaacgttcctaaaaccgaataccacgaaaaaaaaccgaaaaacgaatcttaaaattaatcgacgtaacgacgacccactattaaaaaaaatattaatttcgctataaaactaaaaaaccaatcacaaaactacttattaaaatacgcgaaattacgacttaacgacgaaaaccaaacgcttaaactatcactaaaataattaaaaaataaaaaaaaaacaaaataaaataaaataaaataaataaaataaaaaatcgaaacgaatacgacgataaaaaataaaacaatacgacgaaaacctaaaacctaaaatcctaccgcattaaaaacctctaaaaaccccccttaataatctt

SEQ ID NO: 21177 - DNA, 842 bp, Artificial Sequence
  chemically treated genomic DNA (Homo sapiens) CpG-island No: 21177
cggtcgtcgtcgttatcgttagtttgtaaggaggattcggtagagggaagaaataatagtcgttattttgtttgtgtgttaggttgggggggagagagggcgagagagagcgggcgagagtgggtaagtaggacgtcgggttgagtgttaattgcgggagttagagagtgcggaggggagtcgggtcggagagaggcggtaggggtcgagatagtggtagggggttcggggcgtacgggttgaggcgatttttagttttttttcgttcgtatatatttttatcgcggtttagtagtcgggtcggcgtcgacgtttaggggggattattatataatttcgcgtttcgcggcgttttttttcgtcgtcgcgggcggtttcgaacggagtttcggggggcgggcgtttttagtatttggtcgtcggcggtgggggtcgtagtagcggtcgtatttatttatttttcgcgggaaaggaaggcgaaggaggggagcgcggcgcgaggaggggtcgtttgcgtcgtcgtcggagcggggttttttcggtgggtttcgcgtcggcgcgggcgtgcgggcggcgttgttcggttcggttttttcggttttttggttcggttagtttcgttttcggcgtttttgtcgcgttttcgtcggtcgtcgcgcgatgtgaggcggcggcgttagtttggttttcggttcgggcgagttttttgcggttattaggggtcggtgcggcggcggcggcgcggagcgcggcggtaggaggagggttcggagggtgggggcgtaggttcgggagggggtatcgggaggaggtgagtgttttttgtcgtttttttttttttt

SEQ ID NO: 21178 - DNA, 842 bp, Artificial Sequence
  chemically treated genomic DNA (Homo sapiens) CpG-island No: 21178
aaaaaaaaaaaaaacgacaaaaaacactcacctcctcccgataccccctcccgaacctacgcccccaccctccgaaccctcctcctaccgccgcgctccgcgccgccgccgccgcaccgacccctaataaccgcaaaaaactcgcccgaaccgaaaaccaaactaacgccgccgcctcacatcgcgcgacgaccgacgaaaacgcgacaaaaacgccgaaaacgaaactaaccgaaccaaaaaaccgaaaaaaccgaaccgaacaacgccgcccgcacgcccgcgccgacgcgaaacccaccgaaaaaaccccgctccgacgacgacgcaaacgacccctcctcgcgccgcgctcccctccttcgccttcctttcccgcgaaaaataaataaatacgaccgctactacgacccccaccgccgacgaccaaatactaaaaacgcccgccccccgaaactccgttcgaaaccgcccgcgacgacgaaaaaaaacgccgcgaaacgcgaaattatataataatcccccctaaacgtcgacgccgacccgactactaaaccgcgataaaaatatatacgaacgaaaaaaaactaaaaatcgcctcaacccgtacgccccgaaccccctaccactatctcgacccctaccgcctctctccgacccgactcccctccgcactctctaactcccgcaattaacactcaacccgacgtcctacttacccactctcgcccgctctctctcgccctctctcccccccaacctaacacacaaacaaaataacgactattatttcttccctctaccgaatcctccttacaaactaacgataacgacgacgaccg

SEQ ID NO: 21179 - DNA, 842 bp, Artificial Sequence
  chemically treated genomic DNA (Homo sapiens) CpG-island No: 21179
gggagaggaggaggcgataagagatatttattttttttcggtgttttttttcgggtttgcgtttttatttttcgaattttttttttgtcgtcgcgtttcgcgtcgtcgtcgtcgtatcggtttttaatggtcgtagagaattcgttcgagtcgagagttaggttggcgtcgtcgttttatatcgcgcggcggtcggcggaggcgcggtaaggacgtcgggagcggagttggtcggattagagggtcgagggggtcgggtcgagtagcgtcgttcgtacgttcgcgtcgacgcggagtttatcgaggaggtttcgtttcggcggcggcgtaggcggttttttttcgcgtcgcgtttttttttttcgtttttttttttcgcggaaaataaataaatacggtcgttgttacggtttttatcgtcggcggttaggtgttgggagcgttcgtttttcggggtttcgttcggggtcgttcgcggcggcgggagaagacgtcgcggggcgcggggttatgtaatggttttttttaggcgtcgacgtcggttcggttgttggatcgcggtgggggtgtgtgcggacgggagggggttgggggtcgttttagttcgtgcgtttcgggttttttgttattgtttcggtttttgtcgttttttttcgattcgattttttttcgtattttttggttttcgtagttagtatttagttcggcgttttgtttgtttattttcgttcgttttttttcgtttttttttttttttagtttagtatataaataagatggcggttgttgttttttttttttgtcgaattttttttataggttagcggtagcggcggcggtcg

SEQ ID NO: 21180 - DNA, 842 bp, Artificial Sequence
  chemically treated genomic DNA (Homo sapiens) CpG-island No: 21180
cgaccgccgccgctaccgctaacctataaaaaaaattcgacaaaaaaaaaaaacaacaaccgccatcttatttatatactaaactaaaaaaaaaaaaaaacgaaaaaaaacgaacgaaaataaacaaacaaaacgccgaactaaatactaactacgaaaaccaaaaaatacgaaaaaaaatcgaatcgaaaaaaaacgacaaaaaccgaaacaataacaaaaaacccgaaacgcacgaactaaaacgacccccaaccccctcccgtccgcacacacccccaccgcgatccaacaaccgaaccgacgtcgacgcctaaaaaaaaccattacataaccccgcgccccgcgacgtcttctcccgccgccgcgaacgaccccgaacgaaaccccgaaaaacgaacgctcccaacacctaaccgccgacgataaaaaccgtaacaacgaccgtatttatttattttccgcgaaaaaaaaaaacgaaaaaaaaaaacgcgacgcgaaaaaaaaccgcctacgccgccgccgaaacgaaacctcctcgataaactccgcgtcgacgcgaacgtacgaacgacgctactcgacccgaccccctcgaccctctaatccgaccaactccgctcccgacgtccttaccgcgcctccgccgaccgccgcgcgatataaaacgacgacgccaacctaactctcgactcgaacgaattctctacgaccattaaaaaccgatacgacgacgacgacgcgaaacgcgacgacaaaaaaaaaattcgaaaaataaaaacgcaaacccgaaaaaaaacaccgaaaaaaaataaatatctcttatcgcctcctcctctccc

SEQ ID NO: 21181 - DNA, 556 bp, Artificial Sequence
  chemically treated genomic DNA (Homo sapiens) CpG-island No: 21181
ttcgggttcgatttttatcgtgtagtaagtgtttagtttttcgtagttttcgttttttttcgtttagtagtttgattatcgttagtaattcgggttttttgatttttaaatgggttttagatttcgtttggcgttcgaggaaggttcgtaagggttcgtttcgggtgaatagtttttttagcggcgggttatcggagtttaggggtcggcgggttgggttaacggttcggcggggttagagttatcgggtagcgttttatagaattcgggatcgtatttttagttcgagatcgcggattttgatcggaatcggaagtttcggatatagtagttttcgcgataatatttagaatttggagataagggtgagagcgtattaagtttcgtttagcgtaagcgttgttttttaaaggatttttcggaagttttggcgggaattttttgttaagcgtgagaacgttgcgaatttttcggaggttaaaagttgagggggttgagcggagcgtgattggggaggggcgggtttgggagattttgggcgttttttttgaaagtt

SEQ ID NO: 21182 - DNA, 556 bp, Artificial Sequence
  chemically treated genomic DNA (Homo sapiens) CpG-island No: 21182
aactttcaaaaaaaacgcccaaaatctcccaaacccgcccctccccaatcacgctccgctcaaccccctcaacttttaacctccgaaaaattcgcaacgttctcacgcttaacaaaaaattcccgccaaaacttccgaaaaatcctttaaaaaacaacgcttacgctaaacgaaacttaatacgctctcacccttatctccaaattctaaatattatcgcgaaaactactatatccgaaacttccgattccgatcaaaatccgcgatctcgaactaaaaatacgatcccgaattctataaaacgctacccgataactctaaccccgccgaaccgttaacccaacccgccgacccctaaactccgataacccgccgctaaaaaaactattcacccgaaacgaacccttacgaaccttcctcgaacgccaaacgaaatctaaaacccatttaaaaatcaaaaaacccgaattactaacgataatcaaactactaaacgaaaaaaaacgaaaactacgaaaaactaaacacttactacacgataaaaatcgaacccgaa

SEQ ID NO: 21183 - DNA, 556 bp, Artificial Sequence
  chemically treated genomic DNA (Homo sapiens) CpG-island No: 21183
ggtttttagaggaggcgtttaaggttttttaggttcgtttttttttaattacgtttcgtttagtttttttaatttttggttttcgggaagttcgtagcgtttttacgtttggtaggaagttttcgttaaggttttcggaaaattttttaaaaagtaacgtttgcgttgggcggggtttggtgcgtttttatttttatttttaaattttgggtgttgtcgcgagggttgttgtgttcggaattttcggtttcggttagggttcgcgatttcggattaaggatgcggtttcgggttttgtggggcgttgttcggtggttttggtttcgtcgggtcgttggtttagttcgtcggtttttgagtttcggtagttcgtcgttggaggagttgtttattcggggcgggtttttgcggatttttttcgagcgttaggcggggtttgaagtttatttgaaggttaggaggttcgagttgttggcggtgattaaattgttgaacgagaaggagcgggagttgcgggagattgagtatttgttgtacggtaagggtcgggttcggg

SEQ ID NO: 21184 - DNA, 556 bp, Artificial Sequence
  chemically treated genomic DNA (Homo sapiens) CpG-island No: 21184
cccgaacccgacccttaccgtacaacaaatactcaatctcccgcaactcccgctccttctcgttcaacaatttaatcaccgccaacaactcgaacctcctaaccttcaaataaacttcaaaccccgcctaacgctcgaaaaaaatccgcaaaaacccgccccgaataaacaactcctccaacgacgaactaccgaaactcaaaaaccgacgaactaaaccaacgacccgacgaaaccaaaaccaccgaacaacgccccacaaaacccgaaaccgcatccttaatccgaaatcgcgaaccctaaccgaaaccgaaaattccgaacacaacaaccctcgcgacaacacccaaaatttaaaaataaaaataaaaacgcaccaaaccccgcccaacgcaaacgttactttttaaaaaattttccgaaaaccttaacgaaaacttcctaccaaacgtaaaaacgctacgaacttcccgaaaaccaaaaattaaaaaaactaaacgaaacgtaattaaaaaaaaacgaacctaaaaaaccttaaacgcctcctctaaaaacc

SEQ ID NO: 21185 - DNA, 1118 bp, Artificial Sequence
  chemically treated genomic DNA (Homo sapiens) CpG-island No: 21185
tcgtcgttgttttcgtcgtttttacggtattttttatttttttcgcgttatttggtcgttttagcgttcggacgtcgttcggttattttaaagacgatttagagaataaattattgtagttatagagaagttttttttcggttcgacgcgtcgtttttcgacgcgggtattcggggtcgcgtggattaggttttcgggtcgttttttgttttcgttttcgtattttcgagacgcgtaggtttatagagtagtcggggcgcgcggataaagaggcggcggcgggcggcgaggggtcggagttaggtttacgggtcgcgtatttattttttagtcggcgttttcgttgtagtcgttgttcgttggattaggtcggtaggaacggtcggttcggttgggcgtggcgtagtattttgcgcgggtatcgtcgattggtcgttgtaggttttttttttttcgcggtcggtttcgtttttggcggggttgaggaaggggttgagttatacgtcgggcggcggagcggttcgggtagttatttgatttggtcgcgcgattgattggcgacgtcggattgcgttattcgtcgtattgcgttattcgtcgcgagttaaggtttgcgtttgcgtaggagatagcgacgtttgcgttgcggtacgttataggggggcggggttagtcgcgaaaagttacgtgagcgttagattcgcgtggttattttcgcgtttatttcgggtttttggtcgtaaggcgttagcgttttcgggttttagtagtttgcggttagggtttgtagttggttttttattaagagttgtttacgttttcgaggtcgagcgtatttttagggtacggtggttacgcgagggatttcgcggaaagtcgggtttggagttggtatttattttggttattaggggcgtagatgtttttacgggcgttggagaattggcgttaggcggggttcggcgcggcgtttttttttggggcgtttttttcgcggtgttttcgttttgttggggggttcggcgcgttaggagtcgggatcgtattttgtcgtttttattgtagggttttatttttaggagtttttattcgggcgaaagttttgtttattatagaat

SEQ ID NO: 21186 - DNA, 1118 bp, Artificial Sequence
  chemically treated genomic DNA (Homo sapiens) CpG-island No: 21186
attctataataaacaaaactttcgcccgaataaaaactcctaaaaataaaaccctacaataaaaacgacaaaatacgatcccgactcctaacgcgccgaaccccccaacaaaacgaaaacaccgcgaaaaaaacgccccaaaaaaaaacgccgcgccgaaccccgcctaacgccaattctccaacgcccgtaaaaacatctacgcccctaataaccaaaataaataccaactccaaacccgactttccgcgaaatccctcgcgtaaccaccgtaccctaaaaatacgctcgacctcgaaaacgtaaacaactcttaataaaaaaccaactacaaaccctaaccgcaaactactaaaacccgaaaacgctaacgccttacgaccaaaaacccgaaataaacgcgaaaataaccacgcgaatctaacgctcacgtaacttttcgcgactaaccccgcccccctataacgtaccgcaacgcaaacgtcgctatctcctacgcaaacgcaaaccttaactcgcgacgaataacgcaatacgacgaataacgcaatccgacgtcgccaatcaatcgcgcgaccaaatcaaataactacccgaaccgctccgccgcccgacgtataactcaaccccttcctcaaccccgccaaaaacgaaaccgaccgcgaaaaaaaaaaaacctacaacgaccaatcgacgatacccgcgcaaaatactacgccacgcccaaccgaaccgaccgttcctaccgacctaatccaacgaacaacgactacaacgaaaacgccgactaaaaaataaatacgcgacccgtaaacctaactccgacccctcgccgcccgccgccgcctctttatccgcgcgccccgactactctataaacctacgcgtctcgaaaatacgaaaacgaaaacaaaaaacgacccgaaaacctaatccacgcgaccccgaatacccgcgtcgaaaaacgacgcgtcgaaccgaaaaaaaacttctctataactacaataatttattctctaaatcgtctttaaaataaccgaacgacgtccgaacgctaaaacgaccaaataacgcgaaaaaaataaaaaataccgtaaaaacgacgaaaacaacgacga

SEQ ID NO: 21187 - DNA, 1118 bp, Artificial Sequence
  chemically treated genomic DNA (Homo sapiens) CpG-island No: 21187
gttttgtagtgaataaagttttcgttcgaatgggaatttttggaaataaagttttgtagtaaagacggtagggtgcggtttcggtttttggcgcgtcgagttttttagtagggcgggggtatcgcggaagaagcgttttagaggagagcgtcgcgtcgagtttcgtttggcgttagttttttagcgttcgtggaggtatttgcgtttttagtagttaaggtgagtattagttttaagttcggtttttcgcgaggtttttcgcgtggttatcgtgttttaagggtgcgttcggtttcggggacgtgagtagtttttagtgggaagttagttgtaggttttgatcgtaggttgttggggttcggaagcgttggcgttttgcggttagaagttcggaatggacgcgaaagtgattacgcgaatttgacgtttacgtgatttttcgcgattggtttcgtttttttgtggcgtgtcgtagcgtagacgtcgttgttttttgcgtaggcgtaggttttggttcgcggcgggtgacgtaatgcggcgggtgacgtaattcggcgtcgttagttagtcgcgcggttagattaggtaattgttcgaatcgtttcgtcgttcgacgtgtggtttagttttttttttagtttcgttaggggcggggtcggtcgcgggaggggaggggtttgtagcgattaatcggcggtgttcgcgtagggtgttacgttacgtttagtcgggtcggtcgtttttatcggtttggtttagcggatagcggttgtagcgggggcgtcggttgggaggtgagtgcgcggttcgtaggtttggtttcggtttttcgtcgttcgtcgtcgtttttttgttcgcgcgtttcggttgttttgtggatttgcgcgtttcggggatgcgggagcgggggtagggggcggttcgagggtttgatttacgcggtttcggatgttcgcgtcgggaggcggcgcgtcgggtcgaggaggggtttttttgtggttgtagtagtttgttttttgggtcgtttttggagtggtcgagcggcgttcgggcgttggggcggttaagtggcgcgggaagggtgggaggtgtcgtgagggcggcgaggatagcggcgg

SEQ ID NO: 21188 - DNA, 1118 bp, Artificial Sequence
  chemically treated genomic DNA (Homo sapiens) CpG-island No: 21188
ccgccgctatcctcgccgccctcacgacacctcccacccttcccgcgccacttaaccgccccaacgcccgaacgccgctcgaccactccaaaaacgacccaaaaaacaaactactacaaccacaaaaaaacccctcctcgacccgacgcgccgcctcccgacgcgaacatccgaaaccgcgtaaatcaaaccctcgaaccgccccctacccccgctcccgcatccccgaaacgcgcaaatccacaaaacaaccgaaacgcgcgaacaaaaaaacgacgacgaacgacgaaaaaccgaaaccaaacctacgaaccgcgcactcacctcccaaccgacgcccccgctacaaccgctatccgctaaaccaaaccgataaaaacgaccgacccgactaaacgtaacgtaacaccctacgcgaacaccgccgattaatcgctacaaacccctcccctcccgcgaccgaccccgcccctaacgaaactaaaaaaaaaactaaaccacacgtcgaacgacgaaacgattcgaacaattacctaatctaaccgcgcgactaactaacgacgccgaattacgtcacccgccgcattacgtcacccgccgcgaaccaaaacctacgcctacgcaaaaaacaacgacgtctacgctacgacacgccacaaaaaaacgaaaccaatcgcgaaaaatcacgtaaacgtcaaattcgcgtaatcactttcgcgtccattccgaacttctaaccgcaaaacgccaacgcttccgaaccccaacaacctacgatcaaaacctacaactaacttcccactaaaaactactcacgtccccgaaaccgaacgcacccttaaaacacgataaccacgcgaaaaacctcgcgaaaaaccgaacttaaaactaatactcaccttaactactaaaaacgcaaatacctccacgaacgctaaaaaactaacgccaaacgaaactcgacgcgacgctctcctctaaaacgcttcttccgcgatacccccgccctactaaaaaactcgacgcgccaaaaaccgaaaccgcaccctaccgtctttactacaaaactttatttccaaaaattcccattcgaacgaaaactttattcactacaaaac

SEQ ID NO: 21189 - DNA, 510 bp, Artificial Sequence
  chemically treated genomic DNA (Homo sapiens) CpG-island No: 21189
gtcgttttttcgtacgatttatatcgtcgagtgttcggagatggacgggaaaagttattatagtggtatggttttattttttgtgagtcgtttttaatttaaatttagatagacgtacgttttgttcggttttttttagattcgagagttgcgttgtgaggggacgcgttttttttcgttgatgagaattcgttgttacgttttttgtataggcgagagttttatcgcggcggtaattttattacgtggataaaggtatagtcgtgttttattttcgataatggaggagggcgtggggtatgtattaggggttgtttcgggggttagatcgtcgggggacggtaacgtatttgcgcggcgacgtttagggttagcgcgggtcgcggtttttacggtcgggacgtttttcgcgtgggacgtagttttattgaggggtcggtcgcggaggttataaggtgggtttatcgaagtttttggtaggggtacgggaagagtcgttttttttttttt

SEQ ID NO: 21190 - DNA, 510 bp, Artificial Sequence
  chemically treated genomic DNA (Homo sapiens) CpG-island No: 21190
aaaaaaaaaaaaacgactcttcccgtacccctaccaaaaacttcgataaacccaccttataacctccgcgaccgacccctcaataaaactacgtcccacgcgaaaaacgtcccgaccgtaaaaaccgcgacccgcgctaaccctaaacgtcgccgcgcaaatacgttaccgtcccccgacgatctaacccccgaaacaacccctaatacataccccacgccctcctccattatcgaaaataaaacacgactatacctttatccacgtaataaaattaccgccgcgataaaactctcgcctatacaaaaaacgtaacaacgaattctcatcaacgaaaaaaaacgcgtcccctcacaacgcaactctcgaatctaaaaaaaaccgaacaaaacgtacgtctatctaaatttaaattaaaaacgactcacaaaaaataaaaccataccactataataacttttcccgtccatctccgaacactcgacgatataaatcgtacgaaaaaacgac

SEQ ID NO: 21191 - DNA, 510 bp, Artificial Sequence
  chemically treated genomic DNA (Homo sapiens) CpG-island No: 21191
gaggagagaaaggcggtttttttcgtgtttttattagaggtttcggtgggtttattttgtgattttcgcggtcggttttttagtggaattgcgttttacgcggggggcgtttcgatcgtgggggtcgcggttcgcgttgattttggacgtcgtcgcgtaggtacgttgtcgtttttcggcggtttgattttcgagatagtttttagtgtatattttacgtttttttttattgtcgagaatgagatacggttgtgtttttgtttacgtggtagagttgtcgtcgcggtgaggttttcgtttgtgtaaaaagcgtggtagcgaatttttattaacgaggggaggcgcgtttttttatagcgtagttttcgggtttgaggagggtcgggtagggcgtgcgtttgtttaggtttgaattaaaggcgatttataggaaataaggttatgttattgtggtagtttttttcgtttattttcggatattcgacggtgtgggtcgtgcgaggaggcggt

SEQ ID NO: 21192 - DNA, 510 bp, Artificial Sequence
  chemically treated genomic DNA (Homo sapiens) CpG-island No: 21192
accgcctcctcgcacgacccacaccgtcgaatatccgaaaataaacgaaaaaaactaccacaataacataaccttatttcctataaatcgcctttaattcaaacctaaacaaacgcacgccctacccgaccctcctcaaacccgaaaactacgctataaaaaaacgcgcctcccctcgttaataaaaattcgctaccacgctttttacacaaacgaaaacctcaccgcgacgacaactctaccacgtaaacaaaaacacaaccgtatctcattctcgacaataaaaaaaaacgtaaaatatacactaaaaactatctcgaaaatcaaaccgccgaaaaacgacaacgtacctacgcgacgacgtccaaaatcaacgcgaaccgcgacccccacgatcgaaacgccccccgcgtaaaacgcaattccactaaaaaaccgaccgcgaaaatcacaaaataaacccaccgaaacctctaataaaaacacgaaaaaaaccgcctttctctcctc

SEQ ID NO: 21193 - DNA, 699 bp, Artificial Sequence
  chemically treated genomic DNA (Homo sapiens) CpG-island No: 21193
gtttcgcggtttttcgcgcgcggttagtcggtttttacgtagacgcgagcgtttcggcgtcgttttttttcgtattttcgtgacgggtagcgaagttagttagtgggattgcgggtcggaaggttaatttcgtttatgtgtggtttataagaggcggtagttttcgggagtgttatttttttagaaatttcggtaaattcgttttagagttttcgttggtttaatcgggttatagatttcggttcgtttggttaggtgggatgtttgattgggttaaattttttaggtttcgtatttagagcggggagtagcgtttgttttttttttcgttgagcggaggtcgttaggttggagagggaggggaaggtgtgtggggtcgggtgagatgtttttttttcgtttcgtatgcgtttgtattggagtgattttagttaaaagtttcgtgaaacgttattagtgatgtagttacggttagtagtagttgtttgatttcgtcgaggtttttcgtttggtaatatgtggggcgtcgtaatgtttgaggttacggcgagggtaacgtcggtcgcgtttcgtggaaatcgcgtggcggagtgtttgagtcgatcgcgttttttaggagttaggttatttagaggcgatattttggtggatacggaggaagttagttttagttagatgggaaaagtagttaaaagtggg

SEQ ID NO: 21194 - DNA, 699 bp, Artificial Sequence
  chemically treated genomic DNA (Homo sapiens) CpG-island No: 21194
cccacttttaactacttttcccatctaactaaaactaacttcctccgtatccaccaaaatatcgcctctaaataacctaactcctaaaaaacgcgatcgactcaaacactccgccacgcgatttccacgaaacgcgaccgacgttaccctcgccgtaacctcaaacattacgacgccccacatattaccaaacgaaaaacctcgacgaaatcaaacaactactactaaccgtaactacatcactaataacgtttcacgaaacttttaactaaaatcactccaatacaaacgcatacgaaacgaaaaaaaaacatctcacccgaccccacacaccttcccctccctctccaacctaacgacctccgctcaacgaaaaaaaaaacaaacgctactccccgctctaaatacgaaacctaaaaaatttaacccaatcaaacatcccacctaaccaaacgaaccgaaatctataacccgattaaaccaacgaaaactctaaaacgaatttaccgaaatttctaaaaaaataacactcccgaaaactaccgcctcttataaaccacacataaacgaaattaaccttccgacccgcaatcccactaactaacttcgctacccgtcacgaaaatacgaaaaaaaacgacgccgaaacgctcgcgtctacgtaaaaaccgactaaccgcgcgcgaaaaaccgcgaaac

SEQ ID NO: 21195 - DNA, 699 bp, Artificial Sequence
  chemically treated genomic DNA (Homo sapiens) CpG-island No: 21195
tttatttttagttattttttttatttgattaaaattggtttttttcgtgtttattaagatgtcgtttttaagtggtttaatttttaaagagcgcgatcggtttaagtatttcgttacgcggtttttacggggcgcggtcggcgttgttttcgtcgtggttttaagtattgcggcgttttatatgttgttagacggaaggtttcggcggggttaggtagttgttgttggtcgtgattatattattggtgacgttttacgagatttttaattgaaattattttaatataggcgtatgcgggacgaggggaaagtattttattcgattttatatatttttttttttttttttagtttagcggttttcgtttagcggaaaaaaaagtagacgttatttttcgttttaggtgcgggatttaagaggtttggtttaattaggtattttatttaattagacgggtcggagtttgtggttcggttggattaacgaaaattttagggcggatttgtcgggatttttgggaaagtgatattttcggaagttatcgttttttataagttatatatgggcggagttagtttttcggttcgtagttttattggttgatttcgttgttcgttacgggaatgcgggagagggcggcgtcggggcgttcgcgtttgcgtggagatcggttggtcgcgcgcgggaagtcgcggaat

SEQ ID NO: 21196 - DNA, 699 bp, Artificial Sequence
  chemically treated genomic DNA (Homo sapiens) CpG-island No: 21196
attccgcgacttcccgcgcgcgaccaaccgatctccacgcaaacgcgaacgccccgacgccgccctctcccgcattcccgtaacgaacaacgaaatcaaccaataaaactacgaaccgaaaaactaactccgcccatatataacttataaaaaacgataacttccgaaaatatcactttcccaaaaatcccgacaaatccgccctaaaattttcgttaatccaaccgaaccacaaactccgacccgtctaattaaataaaatacctaattaaaccaaacctcttaaatcccgcacctaaaacgaaaaataacgtctacttttttttccgctaaacgaaaaccgctaaactaaaaaaaaaaaaaaaaatatataaaatcgaataaaatactttcccctcgtcccgcatacgcctatattaaaataatttcaattaaaaatctcgtaaaacgtcaccaataatataatcacgaccaacaacaactacctaaccccgccgaaaccttccgtctaacaacatataaaacgccgcaatacttaaaaccacgacgaaaacaacgccgaccgcgccccgtaaaaaccgcgtaacgaaatacttaaaccgatcgcgctctttaaaaattaaaccacttaaaaacgacatcttaataaacacgaaaaaaaccaattttaatcaaataaaaaaaataactaaaaataaa

SEQ ID NO: 21197 - DNA, 1352 bp, Artificial Sequence
  chemically treated genomic DNA (Homo sapiens) CpG-island No: 21197
gaattttagttcgtcgcggcgattttgtatatatatacgtattagtttggtagttagagttcgtttggagacgtttttagttcggggtttgcgtttttcgggattttcgacgtagtttttcgttttcgttttttacgtttaatcgggtagggcgtcggggcgtgattttcgattttttgtttgtttgttgggtttttcggaggcgggttagatcgtattcgtcgcgggcgttcggtgcgtttttagtttttggttcgcggcggcgatagcggcgttgttcgttggagtttgatttttcggcggcggcggtagcggcgcgtagtagcgaacggttggagtaaggcgagtcgggtcgttagtttttcgcgttgcgttgggattggtttttttagaagagtgttggtcgagggttggttgcgggtcggttgaagaataggtgtattttatcgttcgggttcgcggagtagtcgtcgaagatcgcggcggttaggtaggttttttgtgtcggaatgcgggtggcgggtattcggtatttcgcgatcggtcgtcggggttattgaaggcggcgcgaggtttaggcgcggcgcgagcgggcgttttagggagcgggttgggcgcggtgtttcgaggatgtcggcgtttttggagcgtacgtaggcggcgggtagtagtagtagtagcgggcgcggggattcggcgcgtaggaggcggtttggagggttgtagacgcgtttcgtcgttttttgatcgatcggaggcgtcgggggttcgtttcgtttttttttcgagttttttatcgtttttttttcggtttcgttttttttttcgtttttttttttttcgttcgtcgttcgtttttcggggggaggggcgtgggggtagggagcggatttgtatgcggtcgtcgcggtcgttgtttgcgttcgagttcgtcgtcgtcgtcggagttcgcgttcgcgttcgcgttcggttcgcgcggttttatgtttttgtcgcggttttcgggggggcgaaggtgaagatcggtttttaggatgagtgaaggggcggtcgttgtttcgttatttggtgtcgtttcggtagtcgtcgtttcggtcgaggagggtatcgcggcggttgcggcggcggtagcggcgggcgggggttcggacggcggcggcgaaggggcggtcgagttttttcgggagttacgttgtagcgattgtatcgtgtggaatcggtagtagacgtggttgtgcgtggtatttttgtttatcggttttatcggtttggggtttagttttatgttttttaaatggatcgtggtgggtttcgttaaggagtacgtgtttatcgatttagtggattttaag

SEQ ID NO: 21198 - DNA, 1352 bp, Artificial Sequence
  chemically treated genomic DNA (Homo sapiens) CpG-island No: 21198
cttaaaatccactaaatcgataaacacgtactccttaacgaaacccaccacgatccatttaaaaaacataaaactaaaccccaaaccgataaaaccgataaacaaaaataccacgcacaaccacgtctactaccgattccacacgatacaatcgctacaacgtaactcccgaaaaaactcgaccgccccttcgccgccgccgtccgaacccccgcccgccgctaccgccgccgcaaccgccgcgataccctcctcgaccgaaacgacgactaccgaaacgacaccaaataacgaaacaacgaccgccccttcactcatcctaaaaaccgatcttcaccttcgcccccccgaaaaccgcgacaaaaacataaaaccgcgcgaaccgaacgcgaacgcgaacgcgaactccgacgacgacgacgaactcgaacgcaaacaacgaccgcgacgaccgcatacaaatccgctccctacccccacgcccctccccccgaaaaacgaacgacgaacgaaaaaaaaaaaaacgaaaaaaaaaacgaaaccgaaaaaaaaacgataaaaaactcgaaaaaaaaacgaaacgaacccccgacgcctccgatcgatcaaaaaacgacgaaacgcgtctacaaccctccaaaccgcctcctacgcgccgaatccccgcgcccgctactactactactacccgccgcctacgtacgctccaaaaacgccgacatcctcgaaacaccgcgcccaacccgctccctaaaacgcccgctcgcgccgcgcctaaacctcgcgccgccttcaataaccccgacgaccgatcgcgaaataccgaatacccgccacccgcattccgacacaaaaaacctacctaaccgccgcgatcttcgacgactactccgcgaacccgaacgataaaatacacctattcttcaaccgacccgcaaccaaccctcgaccaacactcttctaaaaaaaccaatcccaacgcaacgcgaaaaactaacgacccgactcgccttactccaaccgttcgctactacgcgccgctaccgccgccgccgaaaaatcaaactccaacgaacaacgccgctatcgccgccgcgaaccaaaaactaaaaacgcaccgaacgcccgcgacgaatacgatctaacccgcctccgaaaaacccaacaaacaaacaaaaaatcgaaaatcacgccccgacgccctacccgattaaacgtaaaaaacgaaaacgaaaaactacgtcgaaaatcccgaaaaacgcaaaccccgaactaaaaacgtctccaaacgaactctaactaccaaactaatacgtatatatatacaaaatcgccgcgacgaactaaaattc

SEQ ID NO: 21199 - DNA, 1352 bp, Artificial Sequence
  chemically treated genomic DNA (Homo sapiens) CpG-island No: 21199
tttggagtttattaggtcggtgggtacgtattttttgacggagtttattacgatttatttgagaagtatgaggttgagttttaggtcgatgaagtcgatgaatagaggtattacgtatagttacgtttgttgtcggttttatacgatgtagtcgttatagcgtaattttcgggggggttcggtcgttttttcgtcgtcgtcgttcgggttttcgttcgtcgttgtcgtcgtcgtagtcgtcgcggtgtttttttcggtcgaggcggcggttgtcgaagcggtattaggtggcgaggtagcggtcgtttttttatttattttaggagtcggtttttattttcgttttttcgagggtcgcggtagaggtatggggtcgcgcgggtcgggcgcgggcgcgggcgcgggtttcggcggcggcggcgggttcgggcgtaggtagcggtcgcggcggtcgtatgtaaattcgttttttgtttttacgttttttttttcgagaggcgggcggcgggcggggaggagaggagcgggggaggggacggggtcggggagggggcggtaaggagttcggaagaggggcgagacgggttttcggcgttttcggtcggttagagagcggcggggcgcgtttgtagttttttaagtcgttttttgcgcgtcgggttttcgcgttcgttgttgttgttgttgttcgtcgtttgcgtgcgttttaggagcgtcgatattttcggggtatcgcgtttagttcgttttttggggcgttcgttcgcgtcgcgtttgggtttcgcgtcgtttttagtggtttcggcggtcggtcgcggggtgtcgggtgttcgttattcgtatttcgatatagagggtttgtttggtcgtcgcgattttcggcggttgtttcgcgagttcgggcggtgaggtgtatttgttttttagtcggttcgtagttaattttcggttagtatttttttggagagattaattttagcgtagcgcggagggttagcggttcggttcgttttgttttagtcgttcgttgttgcgcgtcgttgtcgtcgtcgtcggagagttaaattttagcgaatagcgtcgttgtcgtcgtcgcgagttaggggttgggggcgtatcgggcgttcgcggcgggtgcggtttgattcgttttcgagggatttaataagtaggtagaggatcggaaattacgtttcggcgttttgttcggttgagcgtgggggacggaagcgggagattgcgtcgggggtttcggggaacgtagatttcgggttgagggcgtttttagacgggttttggttgttaggttggtgcgtgtgtgtgtgtagaatcgtcgcggcgggttgggattt

SEQ ID NO: 21200 - DNA, 1352 bp, Artificial Sequence
  chemically treated genomic DNA (Homo sapiens) CpG-island No: 21200
aaatcccaacccgccgcgacgattctacacacacacacgcaccaacctaacaaccaaaacccgtctaaaaacgccctcaacccgaaatctacgttccccgaaacccccgacgcaatctcccgcttccgtcccccacgctcaaccgaacaaaacgccgaaacgtaatttccgatcctctacctacttattaaatccctcgaaaacgaatcaaaccgcacccgccgcgaacgcccgatacgcccccaacccctaactcgcgacgacgacaacgacgctattcgctaaaatttaactctccgacgacgacgacaacgacgcgcaacaacgaacgactaaaacaaaacgaaccgaaccgctaaccctccgcgctacgctaaaattaatctctccaaaaaaatactaaccgaaaattaactacgaaccgactaaaaaacaaatacacctcaccgcccgaactcgcgaaacaaccgccgaaaatcgcgacgaccaaacaaaccctctatatcgaaatacgaataacgaacacccgacaccccgcgaccgaccgccgaaaccactaaaaacgacgcgaaacccaaacgcgacgcgaacgaacgccccaaaaaacgaactaaacgcgataccccgaaaatatcgacgctcctaaaacgcacgcaaacgacgaacaacaacaacaacaacgaacgcgaaaacccgacgcgcaaaaaacgacttaaaaaactacaaacgcgccccgccgctctctaaccgaccgaaaacgccgaaaacccgtctcgcccctcttccgaactccttaccgccccctccccgaccccgtcccctcccccgctcctctcctccccgcccgccgcccgcctctcgaaaaaaaaaacgtaaaaacaaaaaacgaatttacatacgaccgccgcgaccgctacctacgcccgaacccgccgccgccgccgaaacccgcgcccgcgcccgcgcccgacccgcgcgaccccatacctctaccgcgaccctcgaaaaaacgaaaataaaaaccgactcctaaaataaataaaaaaacgaccgctacctcgccacctaataccgcttcgacaaccgccgcctcgaccgaaaaaaacaccgcgacgactacgacgacgacaacgacgaacgaaaacccgaacgacgacgacgaaaaaacgaccgaacccccccgaaaattacgctataacgactacatcgtataaaaccgacaacaaacgtaactatacgtaatacctctattcatcgacttcatcgacctaaaactcaacctcatacttctcaaataaatcgtaataaactccgtcaaaaaatacgtacccaccgacctaataaactccaaa

SEQ ID NO: 21201 - DNA, 553 bp, Artificial Sequence
  chemically treated genomic DNA (Homo sapiens) CpG-island No: 21201
tttcggtatttatcgcgcgggtgcggttcgaacgttattagtacgaagtagttcgcgagtcgcgttatggcgagggacgcggggcggttcgaggggcgcgggcgggtttcgcggttcggggattcgaggacggcgcgtttatggttcggtttcggttttggatcgcgtatttcggatatttttggttcgtttcgcggcggcggcggcggcggcggcggcggtttaggttttcgtcgttatttttttagttagtcggttcgttcgggcgcgtcgtgcgtttgcgcgttgtcgttaagttttgagcgggcggggtttgtaatcgcgtatttttattggtttagagggtgggagggcggttttcgagagtagcgtttcgtttatcgttgattattttggggttcgagtatcgtttttcgggtcgggtatttggattacggtttcggcgggtttgacgttttgattcgggtcggttgtggtgtcggcgggaggtatgggttaggattatagttgttttcgtcgttgggatttttcgtataggagttcgaattttatt

SEQ ID NO: 21202 - DNA, 553 bp, Artificial Sequence
  chemically treated genomic DNA (Homo sapiens) CpG-island No: 21202
aataaaattcgaactcctatacgaaaaatcccaacgacgaaaacaactataatcctaacccatacctcccgccgacaccacaaccgacccgaatcaaaacgtcaaacccgccgaaaccgtaatccaaatacccgacccgaaaaacgatactcgaaccccaaaataatcaacgataaacgaaacgctactctcgaaaaccgccctcccaccctctaaaccaataaaaatacgcgattacaaaccccgcccgctcaaaacttaacgacaacgcgcaaacgcacgacgcgcccgaacgaaccgactaactaaaaaaataacgacgaaaacctaaaccgccgccgccgccgccgccgccgccgcgaaacgaaccaaaaatatccgaaatacgcgatccaaaaccgaaaccgaaccataaacgcgccgtcctcgaatccccgaaccgcgaaacccgcccgcgcccctcgaaccgccccgcgtccctcgccataacgcgactcgcgaactacttcgtactaataacgttcgaaccgcacccgcgcgataaataccgaaa

SEQ ID NO: 21203 - DNA, 553 bp, Artificial Sequence
  chemically treated genomic DNA (Homo sapiens) CpG-island No: 21203
ggtggggttcgggtttttgtgcggggagttttaacggcgagggtagttgtggttttggtttatgtttttcgtcgatattatagtcgattcgggttagggcgttagattcgtcggagtcgtagtttaggtgttcggttcgaggggcggtgttcgggttttagagtggttagcgatgggcggggcgttgttttcgggagtcgtttttttattttttggattaatggagatgcgcggttgtaggtttcgttcgtttagggtttgacgatagcgcgtaggcgtacggcgcgttcgggcgggtcggttggttgggaagatggcggcgggaatttgggtcgtcgtcgtcgtcgtcgtcgtcgtcgcggagcgaattaggggtgttcggggtgcgcggtttagggtcggggtcgggttatgagcgcgtcgttttcgagttttcgagtcgcggagttcgttcgcgtttttcgggtcgtttcgcgtttttcgttatggcgcggttcgcggattatttcgtgttggtggcgttcgggtcgtattcgcgcggtgagtgtcgagg

SEQ ID NO: 21204 - DNA, 553 bp, Artificial Sequence
  chemically treated genomic DNA (Homo sapiens) CpG-island No: 21204
cctcgacactcaccgcgcgaatacgacccgaacgccaccaacacgaaataatccgcgaaccgcgccataacgaaaaacgcgaaacgacccgaaaaacgcgaacgaactccgcgactcgaaaactcgaaaacgacgcgctcataacccgaccccgaccctaaaccgcgcaccccgaacacccctaattcgctccgcgacgacgacgacgacgacgacgacgacccaaattcccgccgccatcttcccaaccaaccgacccgcccgaacgcgccgtacgcctacgcgctatcgtcaaaccctaaacgaacgaaacctacaaccgcgcatctccattaatccaaaaaataaaaaaacgactcccgaaaacaacgccccgcccatcgctaaccactctaaaacccgaacaccgcccctcgaaccgaacacctaaactacgactccgacgaatctaacgccctaacccgaatcgactataatatcgacgaaaaacataaaccaaaaccacaactaccctcgccgttaaaactccccgcacaaaaacccgaaccccacc

SEQ ID NO: 21205 - DNA, 872 bp, Artificial Sequence
  chemically treated genomic DNA (Homo sapiens) CpG-island No: 21205
ttcggggtcggcggtatcgcgttagaggagagcggaatggttagttcgttgcggaatttcgcggatttgttggttaggttggggggtcggggtttatcgggttagattttggagggtgggatcgttcggattcgggaggtggttgacggggtgggtttcgtcgggttcgagttcgttttagtcgtgggattagttcggacgacggttcgttttttagaatttcgttgtagcgtggggaagttcggttttcgtaggttcggggttgcgtttttattagaaggcgtttggagtgaggttggcggtttcgcggtttcgggtcggtcgtcgagcgtttttagcggggataggtttttttatcgtttttttcgtcgtagtttttttttcgtttcgagggtggttgggttcggaggaggggcgtttcgtttcgttcgtgtattcggtttcgttttttgttggaaaggttacgtatttagttttggaggtgttatttcgggtcgcgatttcgttttaggtaggatttttaattcgtttagttcgtttcgttttgcgtttcggattcgcggtcgattttagattcgttgttcgtttcgcgttcgaggtttgcgtttcgacggacgttcgtgtttagtttgttacgtttacgttcggcgtttcgatcgcggaggatttttcgaggtgtcggcggagggggtggttcgcggtttaggttgttttcgacgtgttcggtttatcgtttttttttttgtagtttcgttcgttatggttcggatttcgacggtcgttttgggttgtattagttttttttgtttgtagttttttggttcgttgtttcgtagtttgggcggggattcgcgattcgttaaatttaggtg

SEQ ID NO: 21206 - DNA, 872 bp, Artificial Sequence
  chemically treated genomic DNA (Homo sapiens) CpG-island No: 21206
cacctaaatttaacgaatcgcgaatccccgcccaaactacgaaacaacgaaccaaaaaactacaaacaaaaaaaactaatacaacccaaaacgaccgtcgaaatccgaaccataacgaacgaaactacaaaaaaaaaaacgataaaccgaacacgtcgaaaacaacctaaaccgcgaaccaccccctccgccgacacctcgaaaaatcctccgcgatcgaaacgccgaacgtaaacgtaacaaactaaacacgaacgtccgtcgaaacgcaaacctcgaacgcgaaacgaacaacgaatctaaaatcgaccgcgaatccgaaacgcaaaacgaaacgaactaaacgaattaaaaatcctacctaaaacgaaatcgcgacccgaaataacacctccaaaactaaatacgtaacctttccaacaaaaaacgaaaccgaatacacgaacgaaacgaaacgcccctcctccgaacccaaccaccctcgaaacgaaaaaaaaactacgacgaaaaaaacgataaaaaaacctatccccgctaaaaacgctcgacgaccgacccgaaaccgcgaaaccgccaacctcactccaaacgccttctaataaaaacgcaaccccgaacctacgaaaaccgaacttccccacgctacaacgaaattctaaaaaacgaaccgtcgtccgaactaatcccacgactaaaacgaactcgaacccgacgaaacccaccccgtcaaccacctcccgaatccgaacgatcccaccctccaaaatctaacccgataaaccccgaccccccaacctaaccaacaaatccgcgaaattccgcaacgaactaaccattccgctctcctctaacgcgataccgccgaccccgaa

SEQ ID NO: 21207 - DNA, 872 bp, Artificial Sequence
  chemically treated genomic DNA (Homo sapiens) CpG-island No: 21207
tatttgggtttgacgggtcgcgggttttcgtttaggttgcgggatagcgagttagggagttgtaggtagaggaggttgatgtaatttagggcggtcgtcgggattcgggttatggcgggcggggttgtaggggagggggcggtgagtcgggtacgtcgggggtagtttgagtcgcgagttatttttttcgtcggtatttcggggagtttttcgcggtcggggcgtcgggcgtgggcgtggtaagttgggtacgggcgttcgtcggggcgtaggtttcgggcgcgaagcgggtagcgggtttggggtcggtcgcgggttcggggcgtaaggcggagcgggttgggcgggttgggggttttgtttggagcggagtcgcggttcgggatggtatttttagggttgaatacgtagtttttttagtaaggggcggagtcggatgtacggacggggcggggcgtttttttttcgggtttagttattttcggggcggggagggggttgcggcgaagggagcggtggaggggtttgttttcgttgggagcgttcggcgatcggttcgggatcgcgggatcgttagttttattttaagcgttttttggtggggacgtagtttcgagtttgcgggggtcggatttttttacgttgtagcggggttttggggggcgaatcgtcgttcgagttgattttacggttggggcggattcggattcgacggggtttatttcgttaattatttttcgagttcgggcggttttattttttagggtttgattcggtggatttcggttttttagtttgattagtaagttcgcgggatttcgtagcgggttggttatttcgtttttttttgacgcggtgtcgtcgatttcggg

SEQ ID NO: 21208 - DNA, 872 bp, Artificial Sequence
  chemically treated genomic DNA (Homo sapiens) CpG-island No: 21208
cccgaaatcgacgacaccgcgtcaaaaaaaaacgaaataaccaacccgctacgaaatcccgcgaacttactaatcaaactaaaaaaccgaaatccaccgaatcaaaccctaaaaaataaaaccgcccgaactcgaaaaataattaacgaaataaaccccgtcgaatccgaatccgccccaaccgtaaaatcaactcgaacgacgattcgccccccaaaaccccgctacaacgtaaaaaaatccgacccccgcaaactcgaaactacgtccccaccaaaaaacgcttaaaataaaactaacgatcccgcgatcccgaaccgatcgccgaacgctcccaacgaaaacaaacccctccaccgctcccttcgccgcaaccccctccccgccccgaaaataactaaacccgaaaaaaaaacgccccgccccgtccgtacatccgactccgccccttactaaaaaaactacgtattcaaccctaaaaataccatcccgaaccgcgactccgctccaaacaaaacccccaacccgcccaacccgctccgccttacgccccgaacccgcgaccgaccccaaacccgctacccgcttcgcgcccgaaacctacgccccgacgaacgcccgtacccaacttaccacgcccacgcccgacgccccgaccgcgaaaaactccccgaaataccgacgaaaaaaataactcgcgactcaaactacccccgacgtacccgactcaccgccccctcccctacaaccccgcccgccataacccgaatcccgacgaccgccctaaattacatcaacctcctctacctacaactccctaactcgctatcccgcaacctaaacgaaaacccgcgacccgtcaaacccaaata

SEQ ID NO: 21209 - DNA, 543 bp, Artificial Sequence
  chemically treated genomic DNA (Homo sapiens) CpG-island No: 21209
tttgaaattttcggttcgtagagggcgtcgcgttaaggatagcgcgggtagattcgggagggggcggggtcgtagttacggtcgttttttatgaatgggggagcgggcggtgcgaggttttattattatgtcgcgtaacgcgcgttgcgttttagcgcgtcgcgtttattggttgatcggatcgttgacgttatcgaatcggtggtcgggggcggggcggggtgatttacgtcgtttttttcgcggtcgcgggggtttttcggggtttacgtacgttttgcgtcgttaggattcgagcggagttttttcgcggttcggtcgcgtttggttttgagcggtgagtagcgggtttcgtcgcgggtattaggggttttgaagggtacgtaggatgttggggtattgggtcggcggaaggtttttagtggtcggtcggggttcgagttcgaggtgggaattttgggtttaggcgattttgggttagtaggtttgggtttaagtgttcgagtgttggggttgagttggatgattcggcgaagggtaagt

SEQ ID NO: 21210 - DNA, 543 bp, Artificial Sequence
  chemically treated genomic DNA (Homo sapiens) CpG-island No: 21210
acttacccttcgccgaatcatccaactcaaccccaacactcgaacacttaaacccaaacctactaacccaaaatcgcctaaacccaaaattcccacctcgaactcgaaccccgaccgaccactaaaaaccttccgccgacccaataccccaacatcctacgtacccttcaaaacccctaatacccgcgacgaaacccgctactcaccgctcaaaaccaaacgcgaccgaaccgcgaaaaaactccgctcgaatcctaacgacgcaaaacgtacgtaaaccccgaaaaacccccgcgaccgcgaaaaaaacgacgtaaatcaccccgccccgcccccgaccaccgattcgataacgtcaacgatccgatcaaccaataaacgcgacgcgctaaaacgcaacgcgcgttacgcgacataataataaaacctcgcaccgcccgctcccccattcataaaaaacgaccgtaactacgaccccgccccctcccgaatctacccgcgctatccttaacgcgacgccctctacgaaccgaaaatttcaaa

SEQ ID NO: 21211 - DNA, 543 bp, Artificial Sequence
  chemically treated genomic DNA (Homo sapiens) CpG-island No: 21211
gtttatttttcgtcgggttatttaatttaattttagtattcgagtatttgggtttaagtttgttaatttagaatcgtttaaatttagaatttttatttcgaattcgaatttcggtcggttattaggagtttttcgtcggtttagtgttttagtattttgcgtgttttttaggatttttggtgttcgcggcggggttcgttatttatcgtttaggattaggcgcggtcgggtcgcggggaggtttcgttcgggttttggcggcgtagggcgtgcgtggatttcgagaagttttcgcggtcgcgggagaagcggcgtgagttatttcgtttcgttttcggttatcggttcggtgacgttagcggttcgattagttaatgggcgcggcgcgttggggcgtagcgcgcgttgcgcggtatagtaataaggtttcgtatcgttcgtttttttatttataaaaagcgatcgtggttgcggtttcgttttttttcgagtttgttcgcgttgtttttgacgcggcgttttttgcgggtcgggggttttaga

SEQ ID NO: 21212 - DNA, 543 bp, Artificial Sequence
  chemically treated genomic DNA (Homo sapiens) CpG-island No: 21212
tctaaaacccccgacccgcaaaaaacgccgcgtcaaaaacaacgcgaacaaactcgaaaaaaaacgaaaccgcaaccacgatcgctttttataaataaaaaaacgaacgatacgaaaccttattactataccgcgcaacgcgcgctacgccccaacgcgccgcgcccattaactaatcgaaccgctaacgtcaccgaaccgataaccgaaaacgaaacgaaataactcacgccgcttctcccgcgaccgcgaaaacttctcgaaatccacgcacgccctacgccgccaaaacccgaacgaaacctccccgcgacccgaccgcgcctaatcctaaacgataaataacgaaccccgccgcgaacaccaaaaatcctaaaaaacacgcaaaatactaaaacactaaaccgacgaaaaactcctaataaccgaccgaaattcgaattcgaaataaaaattctaaatttaaacgattctaaattaacaaacttaaacccaaatactcgaatactaaaattaaattaaataacccgacgaaaaataaac

SEQ ID NO: 21213 - DNA, 1424 bp, Artificial Sequence
  chemically treated genomic DNA (Homo sapiens) CpG-island No: 21213
ggcgatttttatttttattcggtttttttttatttatataataaagcggggcgttttataaggagtttaattcggaaaaggagaagtagtcggtgatacgtattttgagggttatagtttttaggggtttttcgggacggcgaataatgtaggggggagaggaggagcggaggcggggagcggagcgcgatagtcgtattgggtaattcggcggcgttttttcgttcgtagtgttgggaaggggggagcgttgcgttcgcggggaacgttttgcgttcgggttgtttggttttttcgttcgttcgtttttgttttttcgattgtttatttttttttttagtgtatttgcgttcggcgtagggggcggcggggcgggggaagggagttgtagttttttttttcgaagtgtcggtttttgcgtttatttttcgggtgtgtttatttatcgttgatttcgtggaggggggtatcgtttttgttgaagtttttggatacgtaaagacgtcgtattttcgagtaatttttcgatttgagttcggtagttagtagcgcggcgttgagtattgttagggtgtagagaagcgcgggtaagtcgaatcgtgttatggtgcgggtcggggcggacgcgtttttatttttgggatcggacgggaagcggcgttacggtagcgggtcgagggttggcggagtcggggattagcgagtggagttggagggagaaggagttggagttggtggaagaggcgagtaggcggaggagacgcggggcgaaaagtagagttgggtttcgcgttaggtaacggttttcggtgttaggcgtcgggttaggggagaaggagggcgtggaggcggcgcgcggtttagggaagtagaggcgcgggttggtgatttcggggtttcgcggggtagcgaattcggtaagttgattggtcggcgaggcggggacgcggggaaggagggaagggtggtaggcgtcgcggggatcgtagagggtgtgggcggcggcgggcgttcgttgcgcgttgtttgggttgttttgcgttggttcgttcgttcggttggattcggttcggttgattttgtttttcgtcgcgcggttgtgttttttttagttttgtcgttgattgattggtcggcgtgcgcggcgacgtttcgtaaatttggttaagcgggcggtattcggggggagggggcgggcgtcgtgggggggtcggagataggcgggagtacgttgggtcgggtcgggagaaaatttggaagtcgggttggattcggagcggttaaatttattttttagggggtcgtatcgggcgttcggcgttttttcgcgtgatacgttttattcggtttttttttttttttttttttttcggaggcggggagttagtttatcgttttttaattataaagggaaggttaattat

SEQ ID NO: 21214 - DNA, 1424 bp, Artificial Sequence
  chemically treated genomic DNA (Homo sapiens) CpG-island No: 21214
ataattaaccttccctttataattaaaaaacgataaactaactccccgcctccgaaaaaaaaaaaaaaaaaaaaaaaccgaataaaacgtatcacgcgaaaaaacgccgaacgcccgatacgaccccctaaaaaataaatttaaccgctccgaatccaacccgacttccaaattttctcccgacccgacccaacgtactcccgcctatctccgacccccccacgacgcccgccccctccccccgaataccgcccgcttaaccaaatttacgaaacgtcgccgcgcacgccgaccaatcaatcaacgacaaaactaaaaaaaacacaaccgcgcgacgaaaaacaaaatcaaccgaaccgaatccaaccgaacgaacgaaccaacgcaaaacaacccaaacaacgcgcaacgaacgcccgccgccgcccacaccctctacgatccccgcgacgcctaccacccttccctccttccccgcgtccccgcctcgccgaccaatcaacttaccgaattcgctaccccgcgaaaccccgaaatcaccaacccgcgcctctacttccctaaaccgcgcgccgcctccacgccctccttctcccctaacccgacgcctaacaccgaaaaccgttacctaacgcgaaacccaactctacttttcgccccgcgtctcctccgcctactcgcctcttccaccaactccaactccttctccctccaactccactcgctaatccccgactccgccaaccctcgacccgctaccgtaacgccgcttcccgtccgatcccaaaaataaaaacgcgtccgccccgacccgcaccataacacgattcgacttacccgcgcttctctacaccctaacaatactcaacgccgcgctactaactaccgaactcaaatcgaaaaattactcgaaaatacgacgtctttacgtatccaaaaacttcaacaaaaacgatacccccctccacgaaatcaacgataaataaacacacccgaaaaataaacgcaaaaaccgacacttcgaaaaaaaaaactacaactcccttcccccgccccgccgccccctacgccgaacgcaaatacactaaaaaaaaaaataaacaatcgaaaaaacaaaaacgaacgaacgaaaaaaccaaacaacccgaacgcaaaacgttccccgcgaacgcaacgctccccccttcccaacactacgaacgaaaaaacgccgccgaattacccaatacgactatcgcgctccgctccccgcctccgctcctcctctcccccctacattattcgccgtcccgaaaaacccctaaaaactataaccctcaaaatacgtatcaccgactacttctccttttccgaattaaactccttataaaacgccccgctttattatataaataaaaaaaaaccgaataaaaataaaaatcgcc

SEQ ID NO: 21215 - DNA, 1424 bp, Artificial Sequence
  chemically treated genomic DNA (Homo sapiens) CpG-island No: 21215
gtagttggttttttttttgtggttggggggcggtgggttggtttttcgttttcgaggaggaggggaggaaggaggagtcgggtggggcgtgttacgcgaaggagcgtcgggcgttcggtgcggttttttaggaagtggatttggtcgtttcggatttaattcggtttttaggttttttttcggttcggtttagcgtgttttcgtttgttttcggtttttttacgacgttcgtttttttttttcgagtgtcgttcgtttggttaagtttgcggagcgtcgtcgcgtacgtcggttagttaattagcggtagagttgagaagggtatagtcgcgcggcggagggtagagttagtcgagtcgagtttagtcggacgagcggattagcgtagggtagtttaagtagcgcgtagcgaacgttcgtcgtcgtttatattttttgcggttttcgcggcgtttgttattttttttttttttttcgcgttttcgtttcgtcggttagttagtttgtcgggttcgttgtttcgcgaaatttcgaggttattagttcgcgtttttgtttttttgggtcgcgcgtcgtttttacgtttttttttttttttggttcggcgtttggtatcggggatcgttgtttgacgcgaggtttagttttatttttcgtttcgcgtttttttcgtttgttcgttttttttattaattttaattttttttttttttagttttattcgttagttttcgatttcgttagttttcggttcgttgtcgtagcgtcgtttttcgttcggttttaaaggtgggaacgcgttcgtttcggttcgtattatggtacggttcggtttgttcgcgtttttttgtattttggtagtgtttagcgtcgcgttgttggttgtcgagtttaagtcgaaaagttgttcggaagtgcgacgtttttacgtgtttaaaggttttaataagaacgatgtttttttttacgagattaacggtaggtgggtatattcgggaggtgggcgtagagatcgatatttcgggaagggaggttgtaatttttttttttcgtttcgtcgttttttgcgtcggacgtaggtatattagagggagaaatgggtagtcgagagggtaggagcgagcgagcgagagagttaggtagttcgggcgtaggacgtttttcgcgggcgtagcgtttttttttttttagtattgcgagcggaggggcgtcgtcgggttgtttagtgcgattgtcgcgtttcgtttttcgttttcgtttttttttttttttttgtattattcgtcgtttcgggaagtttttgaggattgtggtttttaaagtgcgtgttatcggttattttttttttttcgggttgaattttttataggacgtttcgttttgttgtatgggtgaggagaggtcgggtgggggtgggggtcgtt

SEQ ID NO: 21216 - DNA, 1424 bp, Artificial Sequence
  chemically treated genomic DNA (Homo sapiens) CpG-island No: 21216
aacgacccccacccccacccgacctctcctcacccatacaacaaaacgaaacgtcctataaaaaattcaacccgaaaaaaaaaaaataaccgataacacgcactttaaaaaccacaatcctcaaaaacttcccgaaacgacgaataatacaaaaaaaaaaaaaaaaacgaaaacgaaaaacgaaacgcgacaatcgcactaaacaacccgacgacgcccctccgctcgcaatactaaaaaaaaaaaaacgctacgcccgcgaaaaacgtcctacgcccgaactacctaactctctcgctcgctcgctcctaccctctcgactacccatttctccctctaatatacctacgtccgacgcaaaaaacgacgaaacgaaaaaaaaaaattacaacctcccttcccgaaatatcgatctctacgcccacctcccgaatatacccacctaccgttaatctcgtaaaaaaaaacatcgttcttattaaaacctttaaacacgtaaaaacgtcgcacttccgaacaacttttcgacttaaactcgacaaccaacaacgcgacgctaaacactaccaaaatacaaaaaaacgcgaacaaaccgaaccgtaccataatacgaaccgaaacgaacgcgttcccacctttaaaaccgaacgaaaaacgacgctacgacaacgaaccgaaaactaacgaaatcgaaaactaacgaataaaactaaaaaaaaaaaaaattaaaattaataaaaaaaacgaacaaacgaaaaaaacgcgaaacgaaaaataaaactaaacctcgcgtcaaacaacgatccccgataccaaacgccgaaccaaaaaaaaaaaaaaacgtaaaaacgacgcgcgacccaaaaaaacaaaaacgcgaactaataacctcgaaatttcgcgaaacaacgaacccgacaaactaactaaccgacgaaacgaaaacgcgaaaaaaaaaaaaaaaataacaaacgccgcgaaaaccgcaaaaaatataaacgacgacgaacgttcgctacgcgctacttaaactaccctacgctaatccgctcgtccgactaaactcgactcgactaactctaccctccgccgcgcgactatacccttctcaactctaccgctaattaactaaccgacgtacgcgacgacgctccgcaaacttaaccaaacgaacgacactcgaaaaaaaaaaacgaacgtcgtaaaaaaaccgaaaacaaacgaaaacacgctaaaccgaaccgaaaaaaaacctaaaaaccgaattaaatccgaaacgaccaaatccacttcctaaaaaaccgcaccgaacgcccgacgctccttcgcgtaacacgccccacccgactcctccttcctcccctcctcctcgaaaacgaaaaaccaacccaccgccccccaaccacaaaaaaaaaaccaactac

SEQ ID NO: 21217 - DNA, 911 bp, Artificial Sequence
  chemically treated genomic DNA (Homo sapiens) CpG-island No: 21217
cgcgaacgtttttggtagcggcgtttagggggttcggcggtattcgcggtggggttgtttgggttgcgggtgacgatttgcggggtttcgtattcggtttcgcggagttcggattcgtacgtaggcggcgcggtaaaggtatatttttttcgcggtcgcgaatttagcgtcgttttcgtagcgcggtaatgtacggttatcgttgtttttagttcgttcgtcgtagtcgcgagtatttaaatatttattttgcggggcgacgattttcggagtttaggcgaggtcgttcgggcgtgttattttcgcggttatgacggcgattcggggaagcgtttcgcgcgttaaggtttcgcgttgttgagttgtgagtacggttgtttcgttcgttcgttcgtttagtattcgttcggagagtgaggttagagtacgttttagtcgtgtttaaattaaggttcggggcggtatcgacgggttgaatgataaatggtagatgtcgtgggttttgtcgttcgcggtagttaagaggatggttgcgtcgaggaggtcgcgcgtaggcggggttcgggagtcggaacggcgcggtcgcgaggagggcgttggggtttttggcgggggcgttacgtggtaggaggaggtttcgtcggggagttgggggtcggcggtcgaggcggggggagttgagcggtatttatacgttttgcgggtcgggttatcggtgggggtaaagttaaggtcgtttaggtatagcgttggcgtaggtagattcgagtcggtttggggtttgtagcggggtttgttagtcgaagttttcgttaggatgggtcgttagagtttaattatatatgagaaacgcgatagatgttgggacgttgtaataggttaaattaatttattttttgtgttagtagcgt

SEQ ID NO: 21218 - DNA, 911 bp, Artificial Sequence
  chemically treated genomic DNA (Homo sapiens) CpG-island No: 21218
acgctactaacacaaaaaataaattaatttaacctattacaacgtcccaacatctatcgcgtttctcatatataattaaactctaacgacccatcctaacgaaaacttcgactaacaaaccccgctacaaaccccaaaccgactcgaatctacctacgccaacgctatacctaaacgaccttaactttacccccaccgataacccgacccgcaaaacgtataaataccgctcaactccccccgcctcgaccgccgacccccaactccccgacgaaacctcctcctaccacgtaacgcccccgccaaaaaccccaacgccctcctcgcgaccgcgccgttccgactcccgaaccccgcctacgcgcgacctcctcgacgcaaccatcctcttaactaccgcgaacgacaaaacccacgacatctaccatttatcattcaacccgtcgataccgccccgaaccttaatttaaacacgactaaaacgtactctaacctcactctccgaacgaatactaaacgaacgaacgaacgaaacaaccgtactcacaactcaacaacgcgaaaccttaacgcgcgaaacgcttccccgaatcgccgtcataaccgcgaaaataacacgcccgaacgacctcgcctaaactccgaaaatcgtcgccccgcaaaataaatatttaaatactcgcgactacgacgaacgaactaaaaacaacgataaccgtacattaccgcgctacgaaaacgacgctaaattcgcgaccgcgaaaaaaatatacctttaccgcgccgcctacgtacgaatccgaactccgcgaaaccgaatacgaaaccccgcaaatcgtcacccgcaacccaaacaaccccaccgcgaataccgccgaaccccctaaacgccgctaccaaaaacgttcgcg

SEQ ID NO: 21219 - DNA, 911 bp, Artificial Sequence
  chemically treated genomic DNA (Homo sapiens) CpG-island No: 21219
gcgttgttggtataggaggtaagttagtttggtttattgtagcgttttagtatttgtcgcgttttttatgtgtgattgggttttggcggtttattttggcggagatttcggttagtaggtttcgttgtagattttaggtcggttcgggtttatttgcgttagcgttgtatttgggcgattttggttttgtttttatcggtgattcggttcgtaggacgtgtgggtgtcgtttagtttttttcgtttcggtcgtcgatttttagtttttcggcggggtttttttttgttacgtgacgttttcgttaggggttttagcgtttttttcgcggtcgcgtcgtttcggttttcgagtttcgtttgcgcgcggttttttcggcgtagttatttttttggttgtcgcgggcggtaaagtttacggtatttgttatttgttatttagttcgtcggtatcgtttcgagttttgatttagatacggttggggcgtgttttggttttatttttcgggcgggtgttggacggacggacggacggggtagtcgtgtttatagtttagtagcgcggggttttggcgcgcggggcgttttttcgggtcgtcgttatggtcgcggaggtggtacgttcgagcggtttcgtttgagtttcgggggtcgtcgtttcgtagggtaggtgtttgggtgttcgcggttgcggcgggcgggttgggggtagcggtggtcgtgtattgtcgcgttgcgaggacggcgttgggttcgcggtcgcgaggagggtgtgtttttgtcgcgtcgtttacgtgcgggttcgggtttcgcggggtcgggtgcgggatttcgtagatcgttattcgtaatttaggtagttttatcgcgagtgtcgtcggattttttggacgtcgttgttagaggcgttcgcg

SEQ ID NO: 21220 - DNA, 911 bp, Artificial Sequence
  chemically treated genomic DNA (Homo sapiens) CpG-island No: 21220
cgcgaacgcctctaacaacgacgtccaaaaaatccgacgacactcgcgataaaactacctaaattacgaataacgatctacgaaatcccgcacccgaccccgcgaaacccgaacccgcacgtaaacgacgcgacaaaaacacaccctcctcgcgaccgcgaacccaacgccgtcctcgcaacgcgacaatacacgaccaccgctacccccaacccgcccgccgcaaccgcgaacacccaaacacctaccctacgaaacgacgacccccgaaactcaaacgaaaccgctcgaacgtaccacctccgcgaccataacgacgacccgaaaaaacgccccgcgcgccaaaaccccgcgctactaaactataaacacgactaccccgtccgtccgtccgtccaacacccgcccgaaaaataaaaccaaaacacgccccaaccgtatctaaatcaaaactcgaaacgataccgacgaactaaataacaaataacaaataccgtaaactttaccgcccgcgacaaccaaaaaaataactacgccgaaaaaaccgcgcgcaaacgaaactcgaaaaccgaaacgacgcgaccgcgaaaaaaacgctaaaacccctaacgaaaacgtcacgtaacaaaaaaaaaccccgccgaaaaactaaaaatcgacgaccgaaacgaaaaaaactaaacgacacccacacgtcctacgaaccgaatcaccgataaaaacaaaaccaaaatcgcccaaatacaacgctaacgcaaataaacccgaaccgacctaaaatctacaacgaaacctactaaccgaaatctccgccaaaataaaccgccaaaacccaatcacacataaaaaacgcgacaaatactaaaacgctacaataaaccaaactaacttacctcctataccaacaacgc

SEQ ID NO: 21221 - DNA, 883 bp, Artificial Sequence
  chemically treated genomic DNA (Homo sapiens) CpG-island No: 21221
ttagcgcgatttttttttagcgtttaggttttcgggagtcgcggaataaatttgtgttcggcgttgatcgtgtaaagtggttttcgcgcgtcgcggtttcggtcggcgtcgtcgttgtcgttcgggtttcgcgattcgggtcgggttgtgggcgcgcggtaggcgggttgcggcggcggcgggacggggcggtcgcgggttgcgtggggtttgtgcgcgcgtgtgcgcgggcgtcggttgtgcgcgtcgcgggcggatagggttcggtcggcggcggtaaagttgggattcgcgggtcgggcgcgttcgcgtaacggggattagaggcgcgggggcgcgggtttttaagcgttttttttttttggcgtttttcgttgttcggtttagagtttcggtttggggatttcgcggcgagtttcgcgagtggggtttacgtttggcggggcgcggcggggcggcgcggggaataaggtaggaaaggtatttatttaacgtcgtcgggagtcgcgcggatgggggcgagttgggcggcgggtgtgtttgcggagttgttatttgggtttagagatcgggaagtattatagatagatttttttttcggggtagacgaggtttttgcgtcgggatgggtcggtgtgcgtgcgtttcgcgtttttttttttcggtttttggggaagttgttatttgggtcggacgtacggagcgttgaagtcggataatggggtttggatggcgttttgggtttcgggtggaaggagggtgggggagggggcggacggatcgacggacgcgcggggttgttatttgtatcgtagttgtagtgtttattgatttgtgttgttgtgttaagggaaatatatatttttttgtttggcgtgagagt

SEQ ID NO: 21222 - DNA, 883 bp, Artificial Sequence
  chemically treated genomic DNA (Homo sapiens) CpG-island No: 21222
actctcacgccaaacaaaaaaatatatatttcccttaacacaacaacacaaatcaataaacactacaactacgatacaaataacaaccccgcgcgtccgtcgatccgtccgccccctcccccaccctccttccacccgaaacccaaaacgccatccaaaccccattatccgacttcaacgctccgtacgtccgacccaaataacaacttccccaaaaaccgaaaaaaaaaaacgcgaaacgcacgcacaccgacccatcccgacgcaaaaacctcgtctaccccgaaaaaaaaatctatctataatacttcccgatctctaaacccaaataacaactccgcaaacacacccgccgcccaactcgcccccatccgcgcgactcccgacgacgttaaataaatacctttcctaccttattccccgcgccgccccgccgcgccccgccaaacgtaaaccccactcgcgaaactcgccgcgaaatccccaaaccgaaactctaaaccgaacaacgaaaaacgccaaaaaaaaaaaacgcttaaaaacccgcgcccccgcgcctctaatccccgttacgcgaacgcgcccgacccgcgaatcccaactttaccgccgccgaccgaaccctatccgcccgcgacgcgcacaaccgacgcccgcgcacacgcgcgcacaaaccccacgcaacccgcgaccgccccgtcccgccgccgccgcaacccgcctaccgcgcgcccacaacccgacccgaatcgcgaaacccgaacgacaacgacgacgccgaccgaaaccgcgacgcgcgaaaaccactttacacgatcaacgccgaacacaaatttattccgcgactcccgaaaacctaaacgctaaaaaaaaatcgcgctaa

SEQ ID NO: 21223 - DNA, 883 bp, Artificial Sequence
  chemically treated genomic DNA (Homo sapiens) CpG-island No: 21223
atttttacgttaggtagaggggtgtgtgttttttttggtatagtagtataaattaataaatattgtagttgcggtgtaagtagtagtttcgcgcgttcgtcggttcgttcgtttttttttttattttttttttattcgagatttagagcgttatttaagttttattattcggttttagcgtttcgtgcgttcggtttaggtaataatttttttaaaaatcgaaagagaaaagcgcgaggcgtacgtatatcggtttatttcggcgtagagatttcgtttgtttcgggagggggatttgtttgtggtgtttttcggtttttaagtttaggtaataatttcgtaaatatattcgtcgtttagttcgtttttattcgcgcggttttcggcggcgttaagtgggtattttttttgttttgtttttcgcgtcgtttcgtcgcgtttcgttaaacgtggattttattcgcggggttcgtcgcggagtttttaggtcggggttttgggtcgggtagcgggaggcgttagggaggaggggcgtttagggattcgcgttttcgcgtttttaattttcgttacgcgagcgcgttcggttcgcgggttttaattttatcgtcgtcggtcgaattttgttcgttcgcggcgcgtatagtcggcgttcgcgtatacgcgcgtataaattttacgtaattcgcggtcgtttcgtttcgtcgtcgtcgtagttcgtttgtcgcgcgtttatagttcggttcgagtcgcggggttcgagcgatagcgacggcgtcggtcggggtcgcggcgcgcggaagttattttgtacggttagcgtcgggtataagtttgtttcgcggttttcgggggtttgggcgttgagggagaatcgcgttga

SEQ ID NO: 21224 - DNA, 883 bp, Artificial Sequence
  chemically treated genomic DNA (Homo sapiens) CpG-island No: 21224
tcaacgcgattctccctcaacgcccaaacccccgaaaaccgcgaaacaaacttatacccgacgctaaccgtacaaaataacttccgcgcgccgcgaccccgaccgacgccgtcgctatcgctcgaaccccgcgactcgaaccgaactataaacgcgcgacaaacgaactacgacgacgacgaaacgaaacgaccgcgaattacgtaaaatttatacgcgcgtatacgcgaacgccgactatacgcgccgcgaacgaacaaaattcgaccgacgacgataaaattaaaacccgcgaaccgaacgcgctcgcgtaacgaaaattaaaaacgcgaaaacgcgaatccctaaacgcccctcctccctaacgcctcccgctacccgacccaaaaccccgacctaaaaactccgcgacgaaccccgcgaataaaatccacgtttaacgaaacgcgacgaaacgacgcgaaaaacaaaacaaaaaaaatacccacttaacgccgccgaaaaccgcgcgaataaaaacgaactaaacgacgaatatatttacgaaattattacctaaacttaaaaaccgaaaaacaccacaaacaaatccccctcccgaaacaaacgaaatctctacgccgaaataaaccgatatacgtacgcctcgcgcttttctctttcgatttttaaaaaaattattacctaaaccgaacgcacgaaacgctaaaaccgaataataaaacttaaataacgctctaaatctcgaataaaaaaaaaataaaaaaaaaaacgaacgaaccgacgaacgcgcgaaactactacttacaccgcaactacaatatttattaatttatactactataccaaaaaaaacacacacccctctacctaacgtaaaaat

SEQ ID NO: 21225 - DNA, 839 bp, Artificial Sequence
  chemically treated genomic DNA (Homo sapiens) CpG-island No: 21225
cgcgcggtggggagcgtttggtattttttttcgggatttatttatagttcgttttgtttagaggtgttttgcggatagatcgtatcgggggttacgatttcgcgtttcgggttttattttttcgcggggatggggcgtcggttttttttttattgcgcggcgttttgttttcgggttttcggagtagacggcggcgtatagttcggtttttggtttcggtttttttttcgtttgtttcgatttttttttggcgtttgcgtttttagggttttcggttttattatagtcgttcgttttttgtattcggtttttttagtcgggttttttaagtcgttttcgttttttggttaggttcggtcgaattcgggcggcggcgatatttattcgcgtcgggggcgtcggtttcgggtttcgggtttcgttattagcgtagtagagttcgcgcgggttttaggtttacggcgtagcgttgttgttttatttatagtacggattgtagcggtttcgtcgttttcgtcgtttttattttcgtcgtcgggttcgttcgttaggttgggggcgcgcggacgtcgaggggcgtcggatcgttagcggtttttgtagtggttcgggcggcgggcggcgggcggcgggaggcggcgttgcgttatttcgtacgcgggcggcggggatcgcggaggggacgggcggggcgggggcgaggaggaggcgtgggtagaggaggggtcgggagttagggagagacggggggattcgagaaggggagaagagggaggaggaaggggtcgggatggggttggtcgaggttagggcgttggggtcgggaggcggttgttttt

SEQ ID NO: 21226 - DNA, 839 bp, Artificial Sequence
  chemically treated genomic DNA (Homo sapiens) CpG-island No: 21226
aaaaacaaccgcctcccgaccccaacgccctaacctcgaccaaccccatcccgaccccttcctcctccctcttctccccttctcgaatccccccgtctctccctaactcccgacccctcctctacccacgcctcctcctcgcccccgccccgcccgtcccctccgcgatccccgccgcccgcgtacgaaataacgcaacgccgcctcccgccgcccgccgcccgccgcccgaaccactacaaaaaccgctaacgatccgacgcccctcgacgtccgcgcgcccccaacctaacgaacgaacccgacgacgaaaataaaaacgacgaaaacgacgaaaccgctacaatccgtactataaataaaacaacaacgctacgccgtaaacctaaaacccgcgcgaactctactacgctaataacgaaacccgaaacccgaaaccgacgcccccgacgcgaataaatatcgccgccgcccgaattcgaccgaacctaaccaaaaaacgaaaacgacttaaaaaacccgactaaaaaaaccgaatacaaaaaacgaacgactataataaaaccgaaaaccctaaaaacgcaaacgccaaaaaaaaatcgaaacaaacgaaaaaaaaaccgaaaccaaaaaccgaactatacgccgccgtctactccgaaaacccgaaaacaaaacgccgcgcaataaaaaaaaaaccgacgccccatccccgcgaaaaaataaaacccgaaacgcgaaatcgtaacccccgatacgatctatccgcaaaacacctctaaacaaaacgaactataaataaatcccgaaaaaaaataccaaacgctccccaccgcgcg

SEQ ID NO: 21227 - DNA, 839 bp, Artificial Sequence
  chemically treated genomic DNA (Homo sapiens) CpG-island No: 21227
aaaggtagtcgtttttcggttttagcgttttggtttcggttagttttatttcggtttttttttttttttttttttttttttttcgggttttttcgtttttttttggttttcggttttttttttatttacgtttttttttcgttttcgtttcgttcgtttttttcgcggttttcgtcgttcgcgtacggggtgacgtagcgtcgtttttcgtcgttcgtcgttcgtcgttcgggttattgtaggggtcgttaacggttcggcgtttttcggcgttcgcgcgtttttagtttggcggacgagttcggcggcggagatgggggcgacgggggcggcggagtcgttgtaattcgtgttgtgggtgaagtagtagcgttgcgtcgtgagtttggagttcgcgcgggttttgttgcgttggtggcggagttcggggttcggagtcggcgttttcggcgcgggtgagtgtcgtcgtcgttcgggttcggtcggatttggttagggagcgggggcggtttgggggattcggttggggggatcgggtgtagggagcgagcggttgtggtaaggtcgggggttttgggagcgtaggcgttagggaggggtcggggtaggcgggagggaggtcggggttaggggtcgggttgtgcgtcgtcgtttgtttcgggaattcgaggataaagcgtcgcgtagtggaggggaggtcggcgttttattttcgcggggaggtgggattcggggcgcggggtcgtggttttcggtgcggtttgttcgtagggtatttttggataagacggattgtggatggatttcgagggggggtgttaggcgttttttatcgcgcg

SEQ ID NO: 21228 - DNA, 839 bp, Artificial Sequence
  chemically treated genomic DNA (Homo sapiens) CpG-island No: 21228
cgcgcgataaaaaacgcctaacaccccccctcgaaatccatccacaatccgtcttatccaaaaataccctacgaacaaaccgcaccgaaaaccacgaccccgcgccccgaatcccacctccccgcgaaaataaaacgccgacctcccctccactacgcgacgctttatcctcgaattcccgaaacaaacgacgacgcacaacccgacccctaaccccgacctccctcccgcctaccccgacccctccctaacgcctacgctcccaaaacccccgaccttaccacaaccgctcgctccctacacccgatccccccaaccgaatcccccaaaccgcccccgctccctaaccaaatccgaccgaacccgaacgacgacgacactcacccgcgccgaaaacgccgactccgaaccccgaactccgccaccaacgcaacaaaacccgcgcgaactccaaactcacgacgcaacgctactacttcacccacaacacgaattacaacgactccgccgcccccgtcgcccccatctccgccgccgaactcgtccgccaaactaaaaacgcgcgaacgccgaaaaacgccgaaccgttaacgacccctacaataacccgaacgacgaacgacgaacgacgaaaaacgacgctacgtcaccccgtacgcgaacgacgaaaaccgcgaaaaaaacgaacgaaacgaaaacgaaaaaaaaacgtaaataaaaaaaaaaccgaaaaccaaaaaaaaacgaaaaaacccgaaaaaaaaaaaaaaaaaaaaaaaaaaaaaccgaaataaaactaaccgaaaccaaaacgctaaaaccgaaaaacgactaccttt

SEQ ID NO: 21229 - DNA, 774 bp, Artificial Sequence
  chemically treated genomic DNA (Homo sapiens) CpG-island No: 21229
tcgcggattttagcggagtcgcgtttttcgtgtcgtttttgagggttttcgcggcgtcggcgtttttgttttcggcgcgtttaagtcgttgaggtcgaattaagcgaaggcggaaaagcggcgcgtagttcgcgttagttgtagtttcgtttttttggttttcggtgcgttaataaaggtatttgtatgaaaataggaatttcgtttgtagaaaggattcgttggcggggtgtatcgtgcgttttagtgtttttatcgcggcgtttcgttttttaggtggggaagaagcggggtgcggggattggttttaaatacggttcggtcggcggggatcggtacgttgcggttcgggcgattttttttttcgttttttttttaggtcggcggaaacggtcgtttcgggcgtgggcgcgtttttgcggatttttcgggattttttatttaggcgtgcggtcggggcgttcggggtttcggggagtcggcgttagcgtgcggagcgtagcggagcggagggagcggcgggagcggcgttcgtggttggtttaggtttggggcgtagtttttaggttcgttttgcgtcgttttgggtttcggttttttcgtttgttcgatcggggcgtaagcgtgttatagcgtttgtttgtagggggaagcgggttttttagaggggcgcgtggttcgtagaggggtttcgggaatattcgtttcgttggttttttttagagtttttttttagttgttttttttttgaaattcgttttttttttagtagtt

SEQ ID NO: 21230 - DNA, 774 bp, Artificial Sequence
  chemically treated genomic DNA (Homo sapiens) CpG-island No: 21230
aactactaaaaaaaaaacgaatttcaaaaaaaaaacaactaaaaaaaaactctaaaaaaaaccaacgaaacgaatattcccgaaacccctctacgaaccacgcgcccctctaaaaaacccgcttccccctacaaacaaacgctataacacgcttacgccccgatcgaacaaacgaaaaaaccgaaacccaaaacgacgcaaaacgaacctaaaaactacgccccaaacctaaaccaaccacgaacgccgctcccgccgctccctccgctccgctacgctccgcacgctaacgccgactccccgaaaccccgaacgccccgaccgcacgcctaaataaaaaatcccgaaaaatccgcaaaaacgcgcccacgcccgaaacgaccgtttccgccgacctaaaaaaaaaacgaaaaaaaaaatcgcccgaaccgcaacgtaccgatccccgccgaccgaaccgtatttaaaaccaatccccgcaccccgcttcttccccacctaaaaaacgaaacgccgcgataaaaacactaaaacgcacgatacaccccgccaacgaatcctttctacaaacgaaattcctattttcatacaaatacctttattaacgcaccgaaaaccaaaaaaacgaaactacaactaacgcgaactacgcgccgcttttccgccttcgcttaattcgacctcaacgacttaaacgcgccgaaaacaaaaacgccgacgccgcgaaaaccctcaaaaacgacacgaaaaacgcgactccgctaaaatccgcga

SEQ ID NO: 21231 - DNA, 774 bp, Artificial Sequence
  chemically treated genomic DNA (Homo sapiens) CpG-island No: 21231
ggttgttgggaaaaaggcggattttaaaggagaagtagttaaggaaaagttttggaaagggttaacggagcggatattttcggagtttttttgcgagttacgcgtttttttgggaagttcgtttttttttgtagataggcgttgtgatacgtttgcgtttcggtcgaataggcgaagaggtcgaggtttagagcggcgtagggcgagtttggaggttgcgttttagatttggattagttacggacgtcgttttcgtcgtttttttcgtttcgttgcgtttcgtacgttggcgtcggtttttcgaggtttcgggcgtttcggtcgtacgtttgggtaaaaggtttcgaggagttcgtagaagcgcgtttacgttcgagacggtcgttttcgtcggtttgggaaaggggcggagaagggggtcgttcgggtcgtagcgtgtcggttttcgtcggtcgagtcgtgtttggggttagttttcgtatttcgttttttttttatttggggagcggggcgtcgcggtaggggtattggagcgtacgatgtatttcgttaacgagttttttttgtagacggggtttttgtttttatgtaaatgtttttgttagcgtatcgggaattagggggacggaattgtagttgacgcgggttgcgcgtcgttttttcgttttcgtttgattcggttttaacgatttaaacgcgtcgggaataaaaacgtcggcgtcgcggaaatttttaggagcggtacgagaagcgcggtttcgttggggttcgcga

SEQ ID NO: 21232 - DNA, 774 bp, Artificial Sequence
  chemically treated genomic DNA (Homo sapiens) CpG-island No: 21232
tcgcgaaccccaacgaaaccgcgcttctcgtaccgctcctaaaaatttccgcgacgccgacgtttttattcccgacgcgtttaaatcgttaaaaccgaatcaaacgaaaacgaaaaaacgacgcgcaacccgcgtcaactacaattccgtccccctaattcccgatacgctaacaaaaacatttacataaaaacaaaaaccccgtctacaaaaaaaactcgttaacgaaatacatcgtacgctccaatacccctaccgcgacgccccgctccccaaataaaaaaaaaacgaaatacgaaaactaaccccaaacacgactcgaccgacgaaaaccgacacgctacgacccgaacgacccccttctccgcccctttcccaaaccgacgaaaacgaccgtctcgaacgtaaacgcgcttctacgaactcctcgaaaccttttacccaaacgtacgaccgaaacgcccgaaacctcgaaaaaccgacgccaacgtacgaaacgcaacgaaacgaaaaaaacgacgaaaacgacgtccgtaactaatccaaatctaaaacgcaacctccaaactcgccctacgccgctctaaacctcgacctcttcgcctattcgaccgaaacgcaaacgtatcacaacgcctatctacaaaaaaaaacgaacttcccaaaaaaacgcgtaactcgcaaaaaaactccgaaaatatccgctccgttaaccctttccaaaacttttccttaactacttctcctttaaaatccgcctttttcccaacaacc

SEQ ID NO: 21233 - DNA, 616 bp, Artificial Sequence
  chemically treated genomic DNA (Homo sapiens) CpG-island No: 21233
tacggtagtgttgtaatgtcgtgtgattgtgtagtggatattgcgtgcggtcgtcgtgtgttatagttttgttattattatagtagtgttgtaatgttacgtgattgtgtagtggatatcgcgtggggtcgtcgtgtgttatagttttgtcgttgttacggtggagttgtaatgttacgtgattgtgtagtggagatcgtatgcggtcgtcgtgtgttatagttttgtcgttattatggtatagttgtaatgtcgcgtgattgtgtagtggatatcgcgtggggtcgtcgttatagttttgtcgttattatggtatagttgtaatgtcgcgtgattgtgtagtggagatcgcgtggggtcgtcgtgtgttatagttttgttattgttacggtagtgttgtaatgttatgtgattgtgtagtggatatcgcgtgcggtcgtcgtgtgttatagttttgtcgtcgttatagtagtgttgtaatgttacgtgattgtgtagtggatatcgcgtggggtcgtcgtgtgttatagttttgtcgttattatggtatagttgtaatgtcgcgtgattgtgtagtggatatcgtgtggggttgtcgtgtgttatagttttgtag

SEQ ID NO: 21234 - DNA, 616 bp, Artificial Sequence
  chemically treated genomic DNA (Homo sapiens) CpG-island No: 21234
ctacaaaactataacacacgacaaccccacacgatatccactacacaatcacgcgacattacaactataccataataacgacaaaactataacacacgacgaccccacgcgatatccactacacaatcacgtaacattacaacactactataacgacgacaaaactataacacacgacgaccgcacgcgatatccactacacaatcacataacattacaacactaccgtaacaataacaaaactataacacacgacgaccccacgcgatctccactacacaatcacgcgacattacaactataccataataacgacaaaactataacgacgaccccacgcgatatccactacacaatcacgcgacattacaactataccataataacgacaaaactataacacacgacgaccgcatacgatctccactacacaatcacgtaacattacaactccaccgtaacaacgacaaaactataacacacgacgaccccacgcgatatccactacacaatcacgtaacattacaacactactataataataacaaaactataacacacgacgaccgcacgcaatatccactacacaatcacacgacattacaacactaccgta

SEQ ID NO: 21235 - DNA, 616 bp, Artificial Sequence
  chemically treated genomic DNA (Homo sapiens) CpG-island No: 21235
ttgtaagattgtgatatacggtagttttatacggtgtttattgtatagttacgcgatattgtagttgtgttatggtgacggtaagattgtgatatacggcggttttacgcggtgtttattgtatagttacgtgatattgtagtattgttgtggcgacggtaagattgtgatatacggcggtcgtacgcggtgtttattgtatagttatatgatattgtagtattgtcgtggtaatggtaagattgtgatatacggcggttttacgcggtttttattgtatagttacgcgatattgtagttgtgttatggtgacggtaagattgtgacggcggttttacgcggtgtttattgtatagttacgcgatattgtagttgtgttatggtgacggtaagattgtgatatacggcggtcgtatgcggtttttattgtatagttacgtgatattgtagttttatcgtggtaacggtaagattgtgatatacggcggttttacgcggtgtttattgtatagttacgtgatattgtagtattgttgtggtgatggtaagattgtgatatacggcggtcgtacgtagtgtttattgtatagttatacgatattgtagtattgtcgtg

SEQ ID NO: 21236 - DNA, 616 bp, Artificial Sequence
  chemically treated genomic DNA (Homo sapiens) CpG-island No: 21236
cacgacaatactacaatatcgtataactatacaataaacactacgtacgaccgccgtatatcacaatcttaccatcaccacaacaatactacaatatcacgtaactatacaataaacaccgcgtaaaaccgccgtatatcacaatcttaccgttaccacgataaaactacaatatcacgtaactatacaataaaaaccgcatacgaccgccgtatatcacaatcttaccgtcaccataacacaactacaatatcgcgtaactatacaataaacaccgcgtaaaaccgccgtcacaatcttaccgtcaccataacacaactacaatatcgcgtaactatacaataaaaaccgcgtaaaaccgccgtatatcacaatcttaccattaccacgacaatactacaatatcatataactatacaataaacaccgcgtacgaccgccgtatatcacaatcttaccgtcgccacaacaatactacaatatcacgtaactatacaataaacaccgcgtaaaaccgccgtatatcacaatcttaccgtcaccataacacaactacaatatcgcgtaactatacaataaacaccgtataaaactaccgtatatcacaatcttacaa

SEQ ID NO: 21237 - DNA, 519 bp, Artificial Sequence
  chemically treated genomic DNA (Homo sapiens) CpG-island No: 21237
gtttgcgtttgcgtagggttttttaggcgttggagttcgtcggcggtttcgtcgttgtcggtcgtttacggaggaattataatttttaggagatcgcgcggtgggtgggggcggggtagtgggcggggtatcggtaggttaggtttttttcgtagcgttagtcgtagaggaagatggcgtcgcggagggttaggtcgtttttcgcgggttttcggcgttgttattgttgttgttttttttcgggttttggttcgtgcgagttacggcggtaagtattcgcgggagaagaattagtttaagtcgttttcgaaacgcgagttcggagaggagtttcgtatggagaagttgaattagttgtgggagaaggtttagcgagtgagcgcggttcgcggtcggtggagcggggtttgggggcgggggtcgtggttggggtcgttggagcggggtttaggggtcggaggcggaggggggcgtatcgggtatttgtgttttacgcgttttgtttttgtatagtttttt

SEQ ID NO: 21238 - DNA, 519 bp, Artificial Sequence
  chemically treated genomic DNA (Homo sapiens) CpG-island No: 21238
aaaaaactatacaaaaacaaaacgcgtaaaacacaaatacccgatacgcccccctccgcctccgacccctaaaccccgctccaacgaccccaaccacgacccccgcccccaaaccccgctccaccgaccgcgaaccgcgctcactcgctaaaccttctcccacaactaattcaacttctccatacgaaactcctctccgaactcgcgtttcgaaaacgacttaaactaattcttctcccgcgaatacttaccgccgtaactcgcacgaaccaaaacccgaaaaaaaacaacaacaataacaacgccgaaaacccgcgaaaaacgacctaaccctccgcgacgccatcttcctctacgactaacgctacgaaaaaaacctaacctaccgataccccgcccactaccccgcccccacccaccgcgcgatctcctaaaaattataattcctccgtaaacgaccgacaacgacgaaaccgccgacgaactccaacgcctaaaaaaccctacgcaaacgcaaac

SEQ ID NO: 21239 - DNA, 519 bp, Artificial Sequence
  chemically treated genomic DNA (Homo sapiens) CpG-island No: 21239
gggaggttgtgtaaggatagggcgcgtagggtataggtgttcggtgcgttttttttcgttttcgatttttgggtttcgttttaacgattttaattacggttttcgtttttaggtttcgttttatcgatcgcgggtcgcgtttattcgttgggtttttttttatagttggtttaatttttttatgcggaattttttttcggattcgcgtttcggggacggtttgggttggtttttttttcgcgagtatttgtcgtcgtggttcgtacgggttagggttcgaggaagagtagtagtagtagtagcgtcgggagttcgcgagaaacgatttgatttttcgcggcgttatttttttttgcgattggcgttgcggagaaaatttagtttgtcgatgtttcgtttattatttcgtttttatttatcgcgcggttttttgggaattgtagttttttcgtgagcggtcggtagcggcgaggtcgtcggcggattttagcgtttaggaagttttgcgtaggcgtaagt

SEQ ID NO: 21240 - DNA, 519 bp, Artificial Sequence
  chemically treated genomic DNA (Homo sapiens) CpG-island No: 21240
acttacgcctacgcaaaacttcctaaacgctaaaatccgccgacgacctcgccgctaccgaccgctcacgaaaaaactacaattcccaaaaaaccgcgcgataaataaaaacgaaataataaacgaaacatcgacaaactaaattttctccgcaacgccaatcgcaaaaaaaaataacgccgcgaaaaatcaaatcgtttctcgcgaactcccgacgctactactactactactcttcctcgaaccctaacccgtacgaaccacgacgacaaatactcgcgaaaaaaaaaccaacccaaaccgtccccgaaacgcgaatccgaaaaaaaattccgcataaaaaaattaaaccaactataaaaaaaaacccaacgaataaacgcgacccgcgatcgataaaacgaaacctaaaaacgaaaaccgtaattaaaatcgttaaaacgaaacccaaaaatcgaaaacgaaaaaaaacgcaccgaacacctataccctacgcgccctatccttacacaacctccc

SEQ ID NO: 21241 - DNA, 651 bp, Artificial Sequence
  chemically treated genomic DNA (Homo sapiens) CpG-island No: 21241
aatagtttttagtgtttacgcgttgattgtcgtgtgtgattttagtcggcgttttagtagtttttagtgtttacgcgttgattgtcgtgtgtgattttagtcggcgttttagtagttttcggtgtttacgcgttgattgtcgtgtgtgattttagtcggcgttttagtagttttcggtgtttacgcgttgattgtcgtgtgtgattttagtcggcgttttagtagttttcggtgtttacgcgttgattgtcgtgtgtgattttagtcggcgttttagtagttttcggtgtttacgcgttgattgtcgtgtgtgattttagtcggcgttttagtagttttcggtgtttacgcgttgattgtcgtgtgtgattttagtcggcgttttagtagttttcggtgtttacgcgttgattgtcgtgtgtattttagtcggcgttttagtagttttcggtgttacgcgttgattgtcgtgtgtgattttagtcggcgttttagtagttttcggtgtttacgcgttgattgtcgtgtgtgattttagtcggcgttttaatagttttcggtgtttacgcgttgattgtcgtgtgtgattttagtcggcgttttaatagttttcggtgtttatgcgttgattgttatgatgattttaggtat

SEQ ID NO: 21242 - DNA, 651 bp, Artificial Sequence
  chemically treated genomic DNA (Homo sapiens) CpG-island No: 21242
atacctaaaatcatcataacaatcaacgcataaacaccgaaaactattaaaacgccgactaaaatcacacacgacaatcaacgcgtaaacaccgaaaactattaaaacgccgactaaaatcacacacgacaatcaacgcgtaaacaccgaaaactactaaaacgccgactaaaatcacacacgacaatcaacgcgtaacaccgaaaactactaaaacgccgactaaaatacacacgacaatcaacgcgtaaacaccgaaaactactaaaacgccgactaaaatcacacacgacaatcaacgcgtaaacaccgaaaactactaaaacgccgactaaaatcacacacgacaatcaacgcgtaaacaccgaaaactactaaaacgccgactaaaatcacacacgacaatcaacgcgtaaacaccgaaaactactaaaacgccgactaaaatcacacacgacaatcaacgcgtaaacaccgaaaactactaaaacgccgactaaaatcacacacgacaatcaacgcgtaaacaccgaaaactactaaaacgccgactaaaatcacacacgacaatcaacgcgtaaacactaaaaactactaaaacgccgactaaaatcacacacgacaatcaacgcgtaaacactaaaaactatt

SEQ ID NO: 21243 - DNA, 651 bp, Artificial Sequence
  chemically treated genomic DNA (Homo sapiens) CpG-island No: 21243
atatttggagttattatggtagttaacgtatggatatcggagattattgagacgtcgattggagttatatacggtagttaacgcgtggatatcggagattgttgagacgtcgattggagttatatacggtagttaacgcgtggatatcggagattgttgagacgtcgattggagttatatacggtagttaacgcgtggtatcggagattgttgagacgtcgattggagtatatacggtagttaacgcgtggatatcggagattgttgagacgtcgattggagttatatacggtagttaacgcgtggatatcggagattgttgagacgtcgattggagttatatacggtagttaacgcgtggatatcggagattgttgagacgtcgattggagttatatacggtagttaacgcgtggatatcggagattgttgagacgtcgattggagttatatacggtagttaacgcgtggatatcggagattgttgagacgtcgattggagttatatacggtagttaacgcgtggatatcggagattgttgagacgtcgattggagttatatacggtagttaacgcgtggatattggagattgttgagacgtcgattggagttatatacggtagttaacgcgtggatattggagattgtt

SEQ ID NO: 21244 - DNA, 651 bp, Artificial Sequence
  chemically treated genomic DNA (Homo sapiens) CpG-island No: 21244
aacaatctccaatatccacgcgttaactaccgtatataactccaatcgacgtctcaacaatctccaatatccacgcgttaactaccgtatataactccaatcgacgtctcaacaatctccgatatccacgcgttaactaccgtatataactccaatcgacgtctcaacaatctccgatatccacgcgttaactaccgtatataactccaatcgacgtctcaacaatctccgatatccacgcgttaactaccgtatataactccaatcgacgtctcaacaatctccgatatccacgcgttaactaccgtatataactccaatcgacgtctcaacaatctccgatatccacgcgttaactaccgtatataactccaatcgacgtctcaacaatctccgatatccacgcgttaactaccgtatatactccaatcgacgtctcaacaatctccgataccacgcgttaactaccgtatataactccaatcgacgtctcaacaatctccgatatccacgcgttaactaccgtatataactccaatcgacgtctcaacaatctccgatatccacgcgttaactaccgtatataactccaatcgacgtctcaataatctccgatatccatacgttaactaccataataactccaaatat

SEQ ID NO: 21245 - DNA, 890 bp, Artificial Sequence
  chemically treated genomic DNA (Homo sapiens) CpG-island No: 21245
tttatatatatttatatatattttcgcggaaattgagttaggtaggcggcggattaggtttcgtcgttttacggttcgcggttgggatcgaattcggattgcgagacgtttttcgtttcgtaggcgtttttttgtcgttgaggttcggttcggtttttatcgtcggagttttataaagaaagtttttcggttcgagttttttacgtatttatcggcgtcgacgtcggcggcgattttggttttcgtcgttttcggttttttgcgggggtcggtttttgggtcggttcgggcgtcggcggcggcgattgttttatttttacggggttcgggtcgcgttcgtttcgagttaacggtttcgttagttaggcgcgcgcgtcggtttcgcgcgttatgttttcgtcgtgttgcgcgtcgtcgcggcgttttttattgtttttaaatcgcgcgcgcgttttcgcgggtttatatatgtatcgcgtacgcgcgcgttcgtcgcgtttttttttcgcgcgtttcgtttcgcgttttttggagttggtcgttgtttttagtgtttcgtttattttcgtcgggttcgtcggattcggcgggtgagcgcgcggttttcggtttcgtatcgtcgtttgtttttttgtagattatttcggattcgatttttcggttatttttttatattgtcgttttcgttttttttacgacgcggggtttgggacgacggtttgggttaagaggaattttttcgtaagaagtgtcgagttaaggacgttattaagggggcgggatcgttatcgtggaggtgtgtaagtacgtgtttgcgtttcggagatagttagatttaacggagaagttgagtttaagttttatatttttattaatttttgcgtgttagg

SEQ ID NO: 21246 - DNA, 890 bp, Artificial Sequence
  chemically treated genomic DNA (Homo sapiens) CpG-island No: 21246
cctaacacgcaaaaattaataaaaatataaaacttaaactcaacttctccgttaaatctaactatctccgaaacgcaaacacgtacttacacacctccacgataacgatcccgcccccttaataacgtccttaactcgacacttcttacgaaaaaattcctcttaacccaaaccgtcgtcccaaaccccgcgtcgtaaaaaaaacgaaaacgacaatataaaaaaataaccgaaaaatcgaatccgaaataatctacaaaaaaacaaacgacgatacgaaaccgaaaaccgcgcgctcacccgccgaatccgacgaacccgacgaaaataaacgaaacactaaaaacaacgaccaactccaaaaaacgcgaaacgaaacgcgcgaaaaaaaaacgcgacgaacgcgcgcgtacgcgatacatatataaacccgcgaaaacgcgcgcgcgatttaaaaacaataaaaaacgccgcgacgacgcgcaacacgacgaaaacataacgcgcgaaaccgacgcgcgcgcctaactaacgaaaccgttaactcgaaacgaacgcgacccgaaccccgtaaaaataaaacaatcgccgccgccgacgcccgaaccgacccaaaaaccgacccccgcaaaaaaccgaaaacgacgaaaaccaaaatcgccgccgacgtcgacgccgataaatacgtaaaaaactcgaaccgaaaaactttctttataaaactccgacgataaaaaccgaaccgaacctcaacgacaaaaaaacgcctacgaaacgaaaaacgtctcgcaatccgaattcgatcccaaccgcgaaccgtaaaacgacgaaacctaatccgccgcctacctaactcaatttccgcgaaaatatatataaatatatataaa

SEQ ID NO: 21247 - DNA, 890 bp, Artificial Sequence
  chemically treated genomic DNA (Homo sapiens) CpG-island No: 21247
tttaatacgtaagggttagtggagatgtgggatttgaatttagttttttcgttgagtttggttgttttcgggacgtaggtacgtgtttgtatatttttacgatggcgatttcgtttttttagtagcgtttttaattcgatattttttgcggggaagttttttttggtttagatcgtcgttttaggtttcgcgtcgtgggggaagcgaaagcggtagtgtggggaaatggtcgaggggtcgggttcggggtggtttgtagagaggtaggcggcggtgcggagtcgggaatcgcgcgtttattcgtcgagttcgacgggttcggcgggggtgggcgagatattgggaatagcggttagttttagagggcgcgaggcggggcgcgcggggagggggcgcggcgaacgcgcgcgtgcgcggtgtatgtgtgggttcgcgggggcgcgcgcgcggtttgggggtagtgaggggcgtcgcggcggcgcgtagtacggcgggaatatggcgcgcggaatcggcgcgcgcgtttagttggcgggatcgttagttcgaggcggacgcggttcgggtttcgtggggatggagtagtcgtcgtcgtcggcgttcgagtcgatttaagggtcgattttcgtaaggagtcgaaggcggcgggagttagagtcgtcgtcggcgtcggcgtcggtgagtgcgtgaggggttcgggtcgggagattttttttgtgaaatttcggcggtgggagtcgggtcgggttttagcggtagaggagcgtttgcgaggcggaaggcgtttcgtagttcgggttcgattttagtcgcgagtcgtgaggcggcgggatttggttcgtcgtttgtttggtttagttttcgcgagagtgtgtgtggatgtgtgtggg

SEQ ID NO: 21248 - DNA, 890 bp, Artificial Sequence
  chemically treated genomic DNA (Homo sapiens) CpG-island No: 21248
cccacacacatccacacacactctcgcgaaaactaaaccaaacaaacgacgaaccaaatcccgccgcctcacgactcgcgactaaaatcgaacccgaactacgaaacgccttccgcctcgcaaacgctcctctaccgctaaaacccgacccgactcccaccgccgaaatttcacaaaaaaaatctcccgacccgaacccctcacgcactcaccgacgccgacgccgacgacgactctaactcccgccgccttcgactccttacgaaaatcgacccttaaatcgactcgaacgccgacgacgacgactactccatccccacgaaacccgaaccgcgtccgcctcgaactaacgatcccgccaactaaacgcgcgcgccgattccgcgcgccatattcccgccgtactacgcgccgccgcgacgcccctcactacccccaaaccgcgcgcgcgcccccgcgaacccacacatacaccgcgcacgcgcgcgttcgccgcgccccctccccgcgcgccccgcctcgcgccctctaaaactaaccgctattcccaatatctcgcccacccccgccgaacccgtcgaactcgacgaataaacgcgcgattcccgactccgcaccgccgcctacctctctacaaaccaccccgaacccgacccctcgaccatttccccacactaccgctttcgcttcccccacgacgcgaaacctaaaacgacgatctaaaccaaaaaaaacttccccgcaaaaaatatcgaattaaaaacgctactaaaaaaacgaaatcgccatcgtaaaaatatacaaacacgtacctacgtcccgaaaacaaccaaactcaacgaaaaaactaaattcaaatcccacatctccactaacccttacgtattaaa

SEQ ID NO: 21249 - DNA, 1153 bp, Artificial Sequence
  chemically treated genomic DNA (Homo sapiens) CpG-island No: 21249
gaggcggtcggttgttttcgtttcgtcgtgtttttttattaaggaaggttttttcgttaggggtcgttaacgttcgcggttttcggttagacggtgtatttgagagggatatttcgttttttttcgggagggattcgggtttgttgaagtgggtttaattttgtaaatcgcgttttaatttttcgcgtcgcgtcggggaatttttttttgatatttaacgtttttcgtttttatatttttaaatatagtttattttttttttcgtggcggtcgcggtaattcgagttcggttttcgtttcgtcgttagagaacgtttttttcgtcgggacgcggtgtcgagttcgttgtatatcgagcggtcgtggtataatatcgcggcgttgcgcgtataattatcgttttttaggattcgcggcgcgtatttcggtagtggggtgcgtttcgcgattttgggcgtttagggttagatatattttttgggcgtttcgcggtttttatagtgtagtttttatcgttttttttttattttcgggtatatttattcgtttttcgttttagtttattcggtttagggcgtagtcgttttttcgcgtttttttttttagtttcggtaaaggaagttttttttgcgtttttttttttagaatcgtttttagtttttcgtttttttaatcgtagtttaacggtcggcggtagtagtcggagaaggggggcggcggttcgggtttcggaaacggttcgatcgtcgggattcgggtcggatttcgtatttgggttggaagcgaggcggagatgggcggtcgggattcgcgagtgagcggggcgggcggcggtgatagttttatagttttagttgttgttgttgttgttgtcgtcgcggttgttcggggagaggggttggtattatcgcggcgcgttattgttcggttcgggggcgggggtggttaggaggagggtttaggcgagtagcggcggtagcggcggcggtgtcgcggttcggaggaagggggagggggtatcgggtacggggaggcgggaggggagcgtagggagggcgtaggtagggggagtaggaggagtagtaggaggaggtggcggaggggcgggtgagagggaggagtgggtacggggggaaggggagagaggaaaagg

SEQ ID NO: 21250 - DNA, 1153 bp, Artificial Sequence
  chemically treated genomic DNA (Homo sapiens) CpG-island No: 21250
ccttttcctctctccccttccccccgtacccactcctccctctcacccgcccctccgccacctcctcctactactcctcctactccccctacctacgccctccctacgctcccctcccgcctccccgtacccgataccccctcccccttcctccgaaccgcgacaccgccgccgctaccgccgctactcgcctaaaccctcctcctaaccacccccgcccccgaaccgaacaataacgcgccgcgataataccaacccctctccccgaacaaccgcgacgacaacaacaacaacaacaactaaaactataaaactatcaccgccgcccgccccgctcactcgcgaatcccgaccgcccatctccgcctcgcttccaacccaaatacgaaatccgacccgaatcccgacgatcgaaccgtttccgaaacccgaaccgccgccccccttctccgactactaccgccgaccgttaaactacgattaaaaaaacgaaaaactaaaaacgattctaaaaaaaaaaacgcaaaaaaaacttcctttaccgaaactaaaaaaaaaaacgcgaaaaaacgactacgccctaaaccgaataaactaaaacgaaaaacgaataaatatacccgaaaataaaaaaaaaacgataaaaactacactataaaaaccgcgaaacgcccaaaaaatatatctaaccctaaacgcccaaaatcgcgaaacgcaccccactaccgaaatacgcgccgcgaatcctaaaaaacgataattatacgcgcaacgccgcgatattataccacgaccgctcgatatacaacgaactcgacaccgcgtcccgacgaaaaaaacgttctctaacgacgaaacgaaaaccgaactcgaattaccgcgaccgccacgaaaaaaaaaataaactatatttaaaaatataaaaacgaaaaacgttaaatatcaaaaaaaaattccccgacgcgacgcgaaaaattaaaacgcgatttacaaaattaaacccacttcaacaaacccgaatccctcccgaaaaaaaacgaaatatccctctcaaatacaccgtctaaccgaaaaccgcgaacgttaacgacccctaacgaaaaaaccttccttaataaaaaaacacgacgaaacgaaaacaaccgaccgcctc

SEQ ID NO: 21251 - DNA, 1153 bp, Artificial Sequence
  chemically treated genomic DNA (Homo sapiens) CpG-island No: 21251
ttttttttttttttttttttttttcgtgtttattttttttttttattcgttttttcgttatttttttttgttgttttttttattttttttgtttgcgttttttttgcgtttttttttcgttttttcgtgttcggtgtttttttttttttttttcgggtcgcggtatcgtcgtcgttgtcgtcgttgttcgtttgggttttttttttggttattttcgttttcgggtcgggtagtgacgcgtcgcggtggtgttagttttttttttcgggtagtcgcggcggtagtagtagtagtagtagttggagttgtggggttgttatcgtcgttcgtttcgtttattcgcggatttcgatcgtttattttcgtttcgtttttagtttaggtacggagttcggttcggatttcggcgatcgggtcgttttcggggttcgggtcgtcgtttttttttttcggttgttgtcgtcggtcgttgagttgcggttaggggggcgaggggttgggggcggttttggggaggggggcgtagggggagttttttttgtcggggttgagggagggggcgcgggggagcggttgcgttttgggtcgagtgggttggggcggggggcgggtgagtgtgttcgagagtggagggggggcgatgaaggttgtattgtgggggtcgcggggcgtttaagaggtgtgtttggttttgagcgtttagggtcgcggggcgtattttattgtcggggtgcgcgtcgcgggttttggggggcggtgattgtgcgcgtagcgtcgcggtattgtgttacggtcgttcggtgtgtagcgggttcggtatcgcgtttcggcgagggaggcgttttttggcggcggggcgggggtcgggttcgggttgtcgcggtcgttacgagaagggaagtggattgtgtttggggatgtgaggacgggaagcgttgagtgttagggaggggtttttcggcgcggcgcggggagttgagacgcggtttgtagagttgagtttattttagtaggttcgggtttttttcgggaggggacggggtgttttttttaggtgtatcgtttgatcggaagtcgcgggcgttggcggtttttggcgaaggggttttttttaatgaggggatacggcggggcgggggtagtcggtcgtttt

SEQ ID NO: 21252 - DNA, 1153 bp, Artificial Sequence
  chemically treated genomic DNA (Homo sapiens) CpG-island No: 21252
aaaacgaccgactacccccgccccgccgtatcccctcattaaaaaaaaccccttcgccaaaaaccgccaacgcccgcgacttccgatcaaacgatacacctaaaaaaaacaccccgtcccctcccgaaaaaaacccgaacctactaaaataaactcaactctacaaaccgcgtctcaactccccgcgccgcgccgaaaaacccctccctaacactcaacgcttcccgtcctcacatccccaaacacaatccacttcccttctcgtaacgaccgcgacaacccgaacccgacccccgccccgccgccaaaaaacgcctccctcgccgaaacgcgataccgaacccgctacacaccgaacgaccgtaacacaataccgcgacgctacgcgcacaatcaccgccccccaaaacccgcgacgcgcaccccgacaataaaatacgccccgcgaccctaaacgctcaaaaccaaacacacctcttaaacgccccgcgacccccacaatacaaccttcatcgccccccctccactctcgaacacactcacccgccccccgccccaacccactcgacccaaaacgcaaccgctcccccgcgccccctccctcaaccccgacaaaaaaaactccccctacgcccccctccccaaaaccgcccccaacccctcgcccccctaaccgcaactcaacgaccgacgacaacaaccgaaaaaaaaaaacgacgacccgaaccccgaaaacgacccgatcgccgaaatccgaaccgaactccgtacctaaactaaaaacgaaacgaaaataaacgatcgaaatccgcgaataaacgaaacgaacgacgataacaaccccacaactccaactactactactactactaccgccgcgactacccgaaaaaaaaaactaacaccaccgcgacgcgtcactacccgacccgaaaacgaaaataaccaaaaaaaaaacccaaacgaacaacgacgacaacgacgacgataccgcgacccgaaaaaaaaaaaaaaaaacaccgaacacgaaaaaacgaaaaaaaaacgcaaaaaaaacgcaaacaaaaaaaataaaaaaaacaacaaaaaaaaataacgaaaaaacgaataaaaaaaaaaaataaacacgaaaaaaaaaaaaaaaaaaaaaaaa

SEQ ID NO: 21253 - DNA, 674 bp, Artificial Sequence
  chemically treated genomic DNA (Homo sapiens) CpG-island No: 21253
gtttttcgggtttttagggacgcgggtatttgtggggcggggttgtcgggtttcggggttcggttttttcgggcggtcggagcgagatttcgggttgggaaagttaggtacgtggtcggttttcggtcgtattttcgttttatttttacggtagggtttttagtgtttgattaagtttaagttcgagtttttcggcgcgttgtttatcggttgttttttcgcgttttttttttttttttattcgtatcgtttcgttttttattttttttttgttttttttttattatttagtttatatttttttcgttttttttttcgtttttcgcgggtattcgagtgttcgggaggcgtttatttgttcgatttaaatatttacgcgatttttagcgttcgtcgttcgcgtgttcgttttcgtttcgtcgtcggttattgtgtttcgttagtttatatcgggtcgggttttgacggcgcgcgagttatagttgtaaagtaataggataatttcggggacgtcgttttagtttagattcgggtacgtattgttcgtggagacggtatcgtcggggaggggagttacgcggattttagatgcggttttttaggcggatagatttttgttcggggcgtaggaggaggtaggattggtatcgcggggtgggagttttggatttttt

SEQ ID NO: 21254 - DNA, 674 bp, Artificial Sequence
  chemically treated genomic DNA (Homo sapiens) CpG-island No: 21254
aaaaaatccaaaactcccaccccgcgataccaatcctacctcctcctacgccccgaacaaaaatctatccgcctaaaaaaccgcatctaaaatccgcgtaactcccctccccgacgataccgtctccacgaacaatacgtacccgaatctaaactaaaacgacgtccccgaaattatcctattactttacaactataactcgcgcgccgtcaaaacccgacccgatataaactaacgaaacacaataaccgacgacgaaacgaaaacgaacacgcgaacgacgaacgctaaaaatcgcgtaaatatttaaatcgaacaaataaacgcctcccgaacactcgaatacccgcgaaaaacgaaaaaaaaaacgaaaaaaatataaactaaataataaaaaaaaaacaaaaaaaaaataaaaaacgaaacgatacgaataaaaaaaaaaaaaaaacgcgaaaaaacaaccgataaacaacgcgccgaaaaactcgaacttaaacttaatcaaacactaaaaaccctaccgtaaaaataaaacgaaaatacgaccgaaaaccgaccacgtacctaactttcccaacccgaaatctcgctccgaccgcccgaaaaaaccgaaccccgaaacccgacaaccccgccccacaaatacccgcgtccctaaaaacccgaaaaac

SEQ ID NO: 21255 - DNA, 674 bp, Artificial Sequence
  chemically treated genomic DNA (Homo sapiens) CpG-island No: 21255
gggaggtttagggtttttatttcgcgatgttagttttgtttttttttgcgtttcgggtaagggtttgttcgtttgggggatcgtatttggaattcgcgtggttttttttttcggcggtgtcgtttttacggatagtgcgtgttcgggtttgggttggagcgacgttttcgagattattttattattttataattgtggttcgcgcgtcgttaggattcggttcggtgtgggttggcggagtataatgatcggcggcggggcgggggcgggtacgcgggcggcgggcgttgggggtcgcgtagatgtttgggtcgaataggtgagcgtttttcggatattcgggtgttcgcggggggcggggaggagggcggagggggtgtaaattaagtggtgggaaagagataaaggaagagtgaagagcgagacggtgcggatggggaagggggaggggcgcggaggggtagtcggtgggtagcgcgtcgaggagttcgagtttgaatttgattaagtattgggggttttgtcgtgggggtggggcgggggtacggtcgagagtcggttacgtgtttggtttttttagttcggggtttcgtttcggtcgttcgggggagtcgaatttcgaggttcggtagtttcgttttataagtattcgcgtttttggggattcgaaagat

SEQ ID NO: 21256 - DNA, 674 bp, Artificial Sequence
  chemically treated genomic DNA (Homo sapiens) CpG-island No: 21256
atctttcgaatccccaaaaacgcgaatacttataaaacgaaactaccgaacctcgaaattcgactcccccgaacgaccgaaacgaaaccccgaactaaaaaaaccaaacacgtaaccgactctcgaccgtacccccgccccacccccacgacaaaacccccaatacttaatcaaattcaaactcgaactcctcgacgcgctacccaccgactacccctccgcgcccctcccccttccccatccgcaccgtctcgctcttcactcttcctttatctctttcccaccacttaatttacaccccctccgccctcctccccgccccccgcgaacacccgaatatccgaaaaacgctcacctattcgacccaaacatctacgcgacccccaacgcccgccgcccgcgtacccgcccccgccccgccgccgatcattatactccgccaacccacaccgaaccgaatcctaacgacgcgcgaaccacaattataaaataataaaataatctcgaaaacgtcgctccaacccaaacccgaacacgcactatccgtaaaaacgacaccgccgaaaaaaaaaaccacgcgaattccaaatacgatcccccaaacgaacaaacccttacccgaaacgcaaaaaaaaacaaaactaacatcgcgaaataaaaaccctaaacctccc

SEQ ID NO: 21257 - DNA, 609 bp, Artificial Sequence
  chemically treated genomic DNA (Homo sapiens) CpG-island No: 21257
agcgggtcgggtttaagtttaagcgggtagttttgcggatttttttttgtgttaggcgtttcgcgtcgtttcgggggcgggcgtaggtagggttcggggtagttaagggggcggtgttgggagggagatgttttcgtttcgtttcgatttcgttttcgttcggaggttcgggatttagtagtcgttttacgcggcgggagggcggggaaataagaggattggtcgttcgtgtatttagttaagtttttggcggacggatatcgtaggtttaggtatacgagggacgtgtagttgtattacgggagagtttttgggaatcgtttggggttttggcggagatatgttgtgtttcgggggtagcgtttttttttatatttaggaggtcgcgttgttcgggttatcgaaggtcgtcgtatcgacgtttcgtttttgatcgtcgatgttttttttacgtcggttgcggtcgttttcggcgttgtttgagagagtttgcgggattttaagggtgatttgatttcgtttgattttggtcggtagggtggggttttttggtattttttaggtcgggggatgcgacgtttgggtgtggaggtgatgagttaggggttt

SEQ ID NO: 21258 - DNA, 609 bp, Artificial Sequence
  chemically treated genomic DNA (Homo sapiens) CpG-island No: 21258
aaacccctaactcatcacctccacacccaaacgtcgcatcccccgacctaaaaaataccaaaaaaccccaccctaccgaccaaaatcaaacgaaatcaaatcacccttaaaatcccgcaaactctctcaaacaacgccgaaaacgaccgcaaccgacgtaaaaaaaacatcgacgatcaaaaacgaaacgtcgatacgacgaccttcgataacccgaacaacgcgacctcctaaatataaaaaaaaacgctacccccgaaacacaacatatctccgccaaaaccccaaacgattcccaaaaactctcccgtaatacaactacacgtccctcgtatacctaaacctacgatatccgtccgccaaaaacttaactaaatacacgaacgaccaatcctcttatttccccgccctcccgccgcgtaaaacgactactaaatcccgaacctccgaacgaaaacgaaatcgaaacgaaacgaaaacatctccctcccaacaccgcccccttaactaccccgaaccctacctacgcccgcccccgaaacgacgcgaaacgcctaacacaaaaaaaaatccgcaaaactacccgcttaaacttaaacccgacccgct

SEQ ID NO: 21259 - DNA, 609 bp, Artificial Sequence
  chemically treated genomic DNA (Homo sapiens) CpG-island No: 21259
gaatttttagtttattatttttatatttagacgtcgtatttttcggtttgaggaatgttaagaaattttattttgtcgattaggattaggcgaaattaagttatttttgaaatttcgtaaatttttttaggtagcgtcgagggcgatcgtagtcggcgtgggaggggtatcggcggttaggggcggggcgtcggtgcggcggttttcggtaattcgggtaacgcggttttttggatgtaggaaggggcgttgttttcgaaatataatatgttttcgttaagattttagacggtttttaaaggttttttcgtgatgtaattgtacgtttttcgtatgtttgggtttgcgatattcgttcgttaggagtttggttggatgtacgggcggttagtttttttattttttcgttttttcgtcgcgtggagcggttgttgggtttcgagttttcgggcgggggcggaatcggggcggggcggaggtattttttttttagtatcgtttttttagttgtttcgagttttgtttgcgttcgttttcgaagcggcgcgggacgtttggtataaaaaaagattcgtagggttgttcgtttaggtttaggttcggttcgtt

SEQ ID NO: 21260 - DNA, 609 bp, Artificial Sequence
  chemically treated genomic DNA (Homo sapiens) CpG-island No: 21260
aacgaaccgaacctaaacctaaacgaacaaccctacgaatctttttttataccaaacgtcccgcgccgcttcgaaaacgaacgcaaacaaaactcgaaacaactaaaaaaacgatactaaaaaaaaaatacctccgccccgccccgattccgcccccgcccgaaaactcgaaacccaacaaccgctccacgcgacgaaaaaacgaaaaaataaaaaaactaaccgcccgtacatccaaccaaactcctaacgaacgaatatcgcaaacccaaacatacgaaaaacgtacaattacatcacgaaaaaacctttaaaaaccgtctaaaatcttaacgaaaacatattatatttcgaaaacaacgccccttcctacatccaaaaaaccgcgttacccgaattaccgaaaaccgccgcaccgacgccccgcccctaaccgccgatacccctcccacgccgactacgatcgccctcgacgctacctaaaaaaatttacgaaatttcaaaaataacttaatttcgcctaatcctaatcgacaaaataaaatttcttaacattcctcaaaccgaaaaatacgacgtctaaatataaaaataataaactaaaaattc

SEQ ID NO: 21261 - DNA, 560 bp, Artificial Sequence
  chemically treated genomic DNA (Homo sapiens) CpG-island No: 21261
acgtcgtttaggcgtttagcgacgcgcggtaggtggtagtagttcgggttttcgtcgtattttaggcgttcgtagcgttcgttttgacgcggtcgttatggcgtaggagaacgcggttttttcgttcgggtaggaggagtcgtcgcggcgtcgcggtcgttagcgttacgtggagaaggatggtcggtgtaacgtgtagtagggtaacgtgcgcgagatatatcgttatttgacggatttgtttattacgttggtggatttgtagtggcgttttagtttgttgtttttcgttttggtttacgcgtttatttggttttttttcggcgttatttggtggttgatcgtttacggtcgcggcgatttggagtatttggaggatatcgcgtggacgtcgtgcgttaataattttaacggtttcgtggtcgttttttttttttttatcgagatcgagattattatcggttacgggtatcgcgttattatcgattagtgtttcgagggtatcgtgttgttgttgttgtaggttattttgggttttatggtgaacgtttttatggtgg

SEQ ID NO: 21262 - DNA, 560 bp, Artificial Sequence
  chemically treated genomic DNA (Homo sapiens) CpG-island No: 21262
ccaccataaaaacgttcaccataaaacccaaaataacctacaacaacaacaacacgataccctcgaaacactaatcgataataacgcgatacccgtaaccgataataatctcgatctcgataaaaaaaaaaaaaacgaccacgaaaccgttaaaattattaacgcacgacgtccacgcgatatcctccaaatactccaaatcgccgcgaccgtaaacgatcaaccaccaaataacgccgaaaaaaaaccaaataaacgcgtaaaccaaaacgaaaaacaacaaactaaaacgccactacaaatccaccaacgtaataaacaaatccgtcaaataacgatatatctcgcgcacgttaccctactacacgttacaccgaccatccttctccacgtaacgctaacgaccgcgacgccgcgacgactcctcctacccgaacgaaaaaaccgcgttctcctacgccataacgaccgcgtcaaaacgaacgctacgaacgcctaaaatacgacgaaaacccgaactactaccacctaccgcgcgtcgctaaacgcctaaacgacgt

SEQ ID NO: 21263 - DNA, 560 bp, Artificial Sequence
  chemically treated genomic DNA (Homo sapiens) CpG-island No: 21263
ttattatgaaggcgtttattatggagtttaggatggtttgtagtagtagtagtacgatgttttcggggtattggtcggtgatgacgcggtgttcgtagtcgatggtggtttcggtttcgatggagaagaggaaggcggttacgaagtcgttgaggttgttgacgtacggcgtttacgcggtgttttttaggtgttttaggtcgtcgcggtcgtaggcgattagttattagatggcgtcgaagaagagttaggtgagcgcgtaggttaggacgaagaataataggttgaggcgttattgtaggtttattagcgtggtgaataggttcgttaggtagcggtatgtttcgcgtacgttgttttgttgtacgttgtatcggttatttttttttacgtagcgttggcggtcgcggcgtcgcggcggttttttttgttcgggcgagaaggtcgcgtttttttgcgttatggcggtcgcgttagggcgagcgttgcgggcgtttggagtgcggcgggggttcgagttgttgttatttgtcgcgcgtcgttgggcgtttaggcggcgt

SEQ ID NO: 21264 - DNA, 560 bp, Artificial Sequence
  chemically treated genomic DNA (Homo sapiens) CpG-island No: 21264
acgccgcctaaacgcccaacgacgcgcgacaaataacaacaactcgaacccccgccgcactccaaacgcccgcaacgctcgccctaacgcgaccgccataacgcaaaaaaacgcgaccttctcgcccgaacaaaaaaaaccgccgcgacgccgcgaccgccaacgctacgtaaaaaaaaataaccgatacaacgtacaacaaaacaacgtacgcgaaacataccgctacctaacgaacctattcaccacgctaataaacctacaataacgcctcaacctattattcttcgtcctaacctacgcgctcacctaactcttcttcgacgccatctaataactaatcgcctacgaccgcgacgacctaaaacacctaaaaaacaccgcgtaaacgccgtacgtcaacaacctcaacgacttcgtaaccgccttcctcttctccatcgaaaccgaaaccaccatcgactacgaacaccgcgtcatcaccgaccaataccccgaaaacatcgtactactactactacaaaccatcctaaactccataataaacgccttcataataa

SEQ ID NO: 21265 - DNA, 571 bp, Artificial Sequence
  chemically treated genomic DNA (Homo sapiens) CpG-island No: 21265
tcggtttcgtttttcgttgcgttgcgaaggcggggaaggcgaggcgggttttacggtagtcgcgttgcggcggggcggggcgtcgggcggtcggcgcgtttggcggtagtcgtgggaggtaggtcggtaggtagacggattcgtaggcgtgtggcggcggtcgtgtttgttagtgagggcgggagggagtgatttattgagcgtgtgtgagggagggagcgagcgagcgaacgagtagtcggcgtcgttttttcgtagtattagttaggttacgtcgtcgtttttttttttgcgtttcgcgtttaggtcgggtcgagtcgagtcgagtcgggtcgggttcgggttatgttgtttatcgtgtattgtgtgcggagggattttttcgaggtgattttttttttttaggtcgacgtcgatttcgagttgtataattttcgcgcgttgtgcgagttcgagtttggtattttcgtagtcgagagttaggtacgtcgggtagcgagtcgggtttgtttcggagttaagtttttttcggttcggggttttattttttttttttgttattggtgaagaa

SEQ ID NO: 21266 - DNA, 571 bp, Artificial Sequence
  chemically treated genomic DNA (Homo sapiens) CpG-island No: 21266
ttcttcaccaataacaaaaaaaaaaaataaaaccccgaaccgaaaaaaacttaactccgaaacaaacccgactcgctacccgacgtacctaactctcgactacgaaaataccaaactcgaactcgcacaacgcgcgaaaattatacaactcgaaatcgacgtcgacctaaaaaaaaaaaatcacctcgaaaaaatccctccgcacacaatacacgataaacaacataacccgaacccgacccgactcgactcgactcgacccgacctaaacgcgaaacgcaaaaaaaaaaacgacgacgtaacctaactaatactacgaaaaaacgacgccgactactcgttcgctcgctcgctccctccctcacacacgctcaataaatcactccctcccgccctcactaacaaacacgaccgccgccacacgcctacgaatccgtctacctaccgacctacctcccacgactaccgccaaacgcgccgaccgcccgacgccccgccccgccgcaacgcgactaccgtaaaacccgcctcgccttccccgccttcgcaacgcaacgaaaaacgaaaccga

SEQ ID NO: 21267 - DNA, 571 bp, Artificial Sequence
  chemically treated genomic DNA (Homo sapiens) CpG-island No: 21267
ttttttattagtagtaaagggagggagtgaggtttcgagtcggggagggtttagtttcggggtaggttcggttcgttgttcggcgtatttggttttcggttgcggggatgttagattcgagttcgtatagcgcgcggaagttgtgtagttcgaagtcggcgtcgatttggagggaaaaggttatttcggagaggttttttcgtatatagtatacggtgagtagtatggttcgggttcgattcggttcggttcggttcggttcggtttgggcgcggggcgtaggggaagaggcggcggcgtggtttggttggtgttgcgggaggacggcgtcggttgttcgttcgttcgttcgtttttttttttatatacgtttagtgagttattttttttcgtttttattagtaagtacggtcgtcgttatacgtttgcgagttcgtttgtttgtcggtttgttttttacggttgtcgttaagcgcgtcggtcgttcggcgtttcgtttcgtcgtaacgcggttgtcgtaaagttcgtttcgtttttttcgttttcgtaacgtagcggggggcggggtcgg

SEQ ID NO: 21268 - DNA, 571 bp, Artificial Sequence
  chemically treated genomic DNA (Homo sapiens) CpG-island No: 21268
ccgaccccgccccccgctacgttacgaaaacgaaaaaaacgaaacgaactttacgacaaccgcgttacgacgaaacgaaacgccgaacgaccgacgcgcttaacgacaaccgtaaaaaacaaaccgacaaacaaacgaactcgcaaacgtataacgacgaccgtacttactaataaaaacgaaaaaaaataactcactaaacgtatataaaaaaaaaaacgaacgaacgaacgaacaaccgacgccgtcctcccgcaacaccaaccaaaccacgccgccgcctcttcccctacgccccgcgcccaaaccgaaccgaaccgaaccgaaccgaatcgaacccgaaccatactactcaccgtatactatatacgaaaaaacctctccgaaataaccttttccctccaaatcgacgccgacttcgaactacacaacttccgcgcgctatacgaactcgaatctaacatccccgcaaccgaaaaccaaatacgccgaacaacgaaccgaacctaccccgaaactaaaccctccccgactcgaaacctcactccctccctttactactaataaaaaa

SEQ ID NO: 21269 - DNA, 617 bp, Artificial Sequence
  chemically treated genomic DNA (Homo sapiens) CpG-island No: 21269
  unsure (523)
acgtagagcgaataaagagaaagataataaggtaaaacgggagcgcgtaagcgcgattataagcgtaataggacgaaaaagatcgcggaatcgacgtcgaaaggcgttagaaacgtatagatacggataaaagaaaaacgcgcgtacgaaaaatatcgagcgggaagagaaggggatcgagaaaaaagagaacgaggttaagggtcgcgggggagggataagggataaaggggggaaattattagcgcgtaagtaatataattatacggatcggaaaattaaaacgattatacggtcgttaagtaataaggggggaggcggaaacgacgagaaaatacgcggtaaagggaaaggcgaaaattagtaacggggggtcggacggaaaagggggaggcgtagggacgagaaagaaatataataatcgcgtaaaatagggcggggttaaaatatataggcgcggagaaagcgttattaattataaggtttagtagatagaaagaaattcgcgaagtcggcgtaattnaatacggatagcgggttattacgaaggcgcggcggcgttatacgaagacgaggaaatcgaaggtaaataaaattataattacgttttcggcgat

SEQ ID NO: 21270 - DNA, 617 bp, Artificial Sequence
  chemically treated genomic DNA (Homo sapiens) CpG-island No: 21270
  unsure (95)
atcgccgaaaacgtaattataattttatttaccttcgatttcctcgtcttcgtataacgccgccgcgccttcgtaataacccgctatccgtattnaattacgccgacttcgcgaatttctttctatctactaaaccttataattaataacgctttctccgcgcctatatattttaaccccgccctattttacgcgattattatatttctttctcgtccctacgcctcccccttttccgtccgaccccccgttactaattttcgcctttccctttaccgcgtattttctcgtcgtttccgcctccccccttattacttaacgaccgtataatcgttttaattttccgatccgtataattatattacttacgcgctaataatttcccccctttatcccttatccctcccccgcgacccttaacctcgttctcttttttctcgatccccttctcttcccgctcgatatttttcgtacgcgcgtttttcttttatccgtatctatacgtttctaacgcctttcgacgtcgattccgcgatctttttcgtcctattacgcttataatcgcgcttacgcgctcccgttttaccttattatctttctctttattcgctctacgt

SEQ ID NO: 21271 - DNA, 617 bp, Artificial Sequence
  chemically treated genomic DNA (Homo sapiens) CpG-island No: 21271
  unsure (95)
gtcgtcgggggcgtggttgtggttttgtttgttttcggttttttcgttttcgtgtggcgtcgtcgcgttttcgtggtggttcgttgttcgtgttnggttgcgtcggtttcgcgggtttttttttgtttgttgggttttgtggttggtggcgtttttttcgcgtttgtgtgttttggtttcgttttgttttgcgcggttgttgtgtttttttttcgtttttgcgtttttttttttttcgttcggtttttcgttgttggttttcgtttttttttttgtcgcgtgttttttcgtcgttttcgtttttttttttgttgtttggcggtcgtgtggtcgttttggtttttcggttcgtgtggttgtgttgtttgcgcgttggtggttttttttttttgttttttgtttttttttcgcggtttttggtttcgtttttttttttttcggttttttttttttttcgttcggtgtttttcgtgcgcgcgttttttttttgttcgtgtttgtgcgtttttggcgtttttcggcgtcggtttcgcggtttttttcgttttgttgcgtttgtggtcgcgtttgcgcgttttcgttttgttttgttgtttttttttttgttcgttttgcgt

SEQ ID NO: 21272 - DNA, 617 bp, Artificial Sequence
  chemically treated genomic DNA (Homo sapiens) CpG-island No: 21272
  unsure (523)
acgcaaaacgaacaaaaaaaaaaacaacaaaacaaaacgaaaacgcgcaaacgcgaccacaaacgcaacaaaacgaaaaaaaccgcgaaaccgacgccgaaaaacgccaaaaacgcacaaacacgaacaaaaaaaaaacgcgcgcacgaaaaacaccgaacgaaaaaaaaaaaaaaccgaaaaaaaaaaaaacgaaaccaaaaaccgcgaaaaaaaaacaaaaaacaaaaaaaaaaaaccaccaacgcgcaaacaacacaaccacacgaaccgaaaaaccaaaacgaccacacgaccgccaaacaacaaaaaaaaaaacgaaaacgacgaaaaaacacgcgacaaaaaaaaaaacgaaaaccaacaacgaaaaaccgaacgaaaaaaaaaaaaacgcaaaaacgaaaaaaaaacacaacaaccgcgcaaaacaaaacgaaaccaaaacacacaaacgcgaaaaaaacgccaccaaccacaaaacccaacaaacaaaaaaaaacccgcgaaaccgacgcaaccnaacacgaacaacgaaccaccacgaaaacgcgacgacgccacacgaaaacgaaaaaaccgaaaacaaacaaaaccacaaccacgcccccgacgac

SEQ ID NO: 21273 - DNA, 1017 bp, Artificial Sequence
  chemically treated genomic DNA (Homo sapiens) CpG-island No: 21273
  unsure (416)
gacgtcgtcgaagggggatggttttattcggagatatttttgcggcgaggcggtcgtagcggagaaggaggcggcggtggtcgcggtcgtcgataacggggaggtagcggtcgaggtgggcgtcgataatggcgtatatcgtttgcgtttcggggacgtcgggtttaatagcgggtcgaaatttagagttttttttagagtggtttcgtacgttatggtcgggggtagttgaggcgtcgggttcgggtggggtcggggacgggtgacgaaagaagagggtgagggaaggggtgaagagcggaattcgaggagagtttattcgacgggtttaggagttaagcgggtcgcggagcgtcgtttgtgaaaaggagagtcgttgcgttgttgttcggtgttaggggtagtgttagggacgntcgggtgaaagcgagaggacgtgggggtaagaagtatacgttagtcgcgttaggggggtttttcgtttttttaggcgcggtttttcgagagaagtttcgtcgtttcgtcgttcgttcgagtttgcgtcgcgtttgaggcgtttttgtgttgagattagattttttttgaagtcgaaaatagtatcgtggggtgtgaggttggaacgcggtttttaatacgatcgagtacggttagtagtttgcgagcggcgatcgatgtagagagattgcgaggtagttgtcgtagtaggaatattagcgaatacgtttattcgttttttttttttcgtataatttttttagtcgtcgtcggttttaatatggcgttaataaaacgttagtcgatttaaattcgtcggttttagagcgtttgcgtacggggtcgggttaaatcgggaatgtattttgggagttgtagtttttaggtatcgggaggaatcggtttgaaaggcgggaagggaggagttatagaaattacgattttcgttatgtaaggcgcgcgatttcgagtttcgggttggaatttaaatttttttatatagtttgagtgtaagagggaatt

SEQ ID NO: 21274 - DNA, 1017 bp, Artificial Sequence
  chemically treated genomic DNA (Homo sapiens) CpG-island No: 21274
  unsure (602)
aattccctcttacactcaaactatataaaaaaatttaaattccaacccgaaactcgaaatcgcgcgccttacataacgaaaatcgtaatttctataactcctcccttcccgcctttcaaaccgattcctcccgatacctaaaaactacaactcccaaaatacattcccgatttaacccgaccccgtacgcaaacgctctaaaaccgacgaatttaaatcgactaacgttttattaacgccatattaaaaccgacgacgactaaaaaaattatacgaaaaaaaaaaaacgaataaacgtattcgctaatattcctactacgacaactacctcgcaatctctctacatcgatcgccgctcgcaaactactaaccgtactcgatcgtattaaaaaccgcgttccaacctcacaccccacgatactattttcgacttcaaaaaaaatctaatctcaacacaaaaacgcctcaaacgcgacgcaaactcgaacgaacgacgaaacgacgaaacttctctcgaaaaaccgcgcctaaaaaaacgaaaaacccccctaacgcgactaacgtatacttcttacccccacgtcctctcgctttcacccgancgtccctaacactacccctaacaccgaacaacaacgcaacgactctccttttcacaaacgacgctccgcgacccgcttaactcctaaacccgtcgaataaactctcctcgaattccgctcttcaccccttccctcaccctcttctttcgtcacccgtccccgaccccacccgaacccgacgcctcaactacccccgaccataacgtacgaaaccactctaaaaaaaactctaaatttcgacccgctattaaacccgacgtccccgaaacgcaaacgatatacgccattatcgacgcccacctcgaccgctacctccccgttatcgacgaccgcgaccaccgccgcctccttctccgctacgaccgcctcgccgcaaaaatatctccgaataaaaccatcccccttcgacgacgtc

SEQ ID NO: 21275 - DNA, 1017 bp, Artificial Sequence
  chemically treated genomic DNA (Homo sapiens) CpG-island No: 21275
  unsure (602)
agtttttttttatatttaagttgtgtagggggatttaaattttaattcggaattcggaatcgcgcgttttgtatgacggaagtcgtagtttttgtgattttttttttttcgttttttaagtcgatttttttcggtatttaaaaattataatttttaaaatgtattttcggtttggttcgatttcgtgcgtaagcgttttgaggtcgacggatttgaatcggttggcgttttattgacgttatattggggtcggcggcggttgggagagttatacgagggaggggaagcggatggacgtgttcgttagtgtttttgttgcggtagttatttcgtaatttttttgtatcgatcgtcgttcgtaagttattgatcgtattcggtcgtattaggagtcgcgttttagttttatattttacggtgttgttttcgattttagaaaggatttagttttagtatagaagcgttttaggcgcggcgtaagttcgagcggacggcggggcgacggagtttttttcggggagtcgcgtttgagaggacgaagaatttttttgacgcgattggcgtgtgttttttgtttttacgttttttcgtttttattcggncgtttttggtattgtttttgatatcgagtagtagcgtagcggtttttttttttatagacggcgtttcgcgattcgtttggtttttgagttcgtcgggtaggtttttttcgagtttcgttttttatttttttttttatttttttttttcgttattcgttttcgattttattcgagttcggcgttttagttgttttcggttatggcgtgcggagttattttgaaaaggattttggatttcgattcgttgttgagttcggcgttttcgaagcgtaggcgatgtgcgttattgtcggcgtttatttcggtcgttgttttttcgttgtcggcggtcgcggttatcgtcgttttttttttcgttgcggtcgtttcgtcgtagaagtattttcgaatggagttattttttttcggcgacgtt

SEQ ID NO: 21276 - DNA, 1017 bp, Artificial Sequence
  chemically treated genomic DNA (Homo sapiens) CpG-island No: 21276
  unsure (416)
aacgtcgccgaaaaaaaataactccattcgaaaatacttctacgacgaaacgaccgcaacgaaaaaaaaaacgacgataaccgcgaccgccgacaacgaaaaaacaacgaccgaaataaacgccgacaataacgcacatcgcctacgcttcgaaaacgccgaactcaacaacgaatcgaaatccaaaatccttttcaaaataactccgcacgccataaccgaaaacaactaaaacgccgaactcgaataaaatcgaaaacgaataacgaaaaaaaaaaataaaaaaaaaaataaaaaacgaaactcgaaaaaaacctacccgacgaactcaaaaaccaaacgaatcgcgaaacgccgtctataaaaaaaaaaaccgctacgctactactcgatatcaaaaacaataccaaaaacgnccgaataaaaacgaaaaaacgtaaaaacaaaaaacacacgccaatcgcgtcaaaaaaattcttcgtcctctcaaacgcgactccccgaaaaaaactccgtcgccccgccgtccgctcgaacttacgccgcgcctaaaacgcttctatactaaaactaaatcctttctaaaatcgaaaacaacaccgtaaaatataaaactaaaacgcgactcctaatacgaccgaatacgatcaataacttacgaacgacgatcgatacaaaaaaattacgaaataactaccgcaacaaaaacactaacgaacacgtccatccgcttcccctccctcgtataactctcccaaccgccgccgaccccaatataacgtcaataaaacgccaaccgattcaaatccgtcgacctcaaaacgcttacgcacgaaatcgaaccaaaccgaaaatacattttaaaaattataatttttaaataccgaaaaaaatcgacttaaaaaacgaaaaaaaaaaaatcacaaaaactacgacttccgtcatacaaaacgcgcgattccgaattccgaattaaaatttaaatccccctacacaacttaaatataaaaaaaaact

SEQ ID NO: 21277 - DNA, 680 bp, Artificial Sequence
  chemically treated genomic DNA (Homo sapiens) CpG-island No: 21277
tcgtcggtttttatttttttcgcgcggcgttcggggttcggcgcggtgggttcgggtttgttgtttcgcgattttcgttgggtttttttcgcgggttggcggggtttttcgggtgtcgggcgcggcgggtggcggcggttttttttttttaggggcgggaggaggggattcggcggtttagaatcgtttttcggtaggaaattaatcgcggtttcgttttttttgcgcgtttgatttcgttttcgaggtcgtcgtcgtttttttttttcggaaacgtatttttttttcgtcgcgttagttcggttcggggttaggaggaggcggaggatggggtaggaagtgcgatcgggataaaggaatcggttgcgcgggagcgcgtttgagggaggtcgcggggggtagggtcgggattgcgttgagatagtcgtcgtgttttagtttttttttttgcgaagggcgggaggagtcggacgcgttttagagtttcgcgcgtttttggtgtagtttgttgggttcgtgttttttaagtttttttttttcggagtcgcgcgttcgattttcgttttcgtttgtttattgatgtttcgtttcgagttcgggagattttgtatttcggaagttttttgagtttcgaggtaaatcgggatcgtgagtttttttattttgtagggttttatggg

SEQ ID NO: 21278 - DNA, 680 bp, Artificial Sequence
  chemically treated genomic DNA (Homo sapiens) CpG-island No: 21278
cccataaaaccctacaaaataaaaaaactcacgatcccgatttacctcgaaactcaaaaaacttccgaaatacaaaatctcccgaactcgaaacgaaacatcaataaacaaacgaaaacgaaaatcgaacgcgcgactccgaaaaaaaaaaacttaaaaaacacgaacccaacaaactacaccaaaaacgcgcgaaactctaaaacgcgtccgactcctcccgcccttcgcaaaaaaaaaaactaaaacacgacgactatctcaacgcaatcccgaccctaccccccgcgacctccctcaaacgcgctcccgcgcaaccgattcctttatcccgatcgcacttcctaccccatcctccgcctcctcctaaccccgaaccgaactaacgcgacgaaaaaaaaatacgtttccgaaaaaaaaaaacgacgacgacctcgaaaacgaaatcaaacgcgcaaaaaaaacgaaaccgcgattaatttcctaccgaaaaacgattctaaaccgccgaatcccctcctcccgcccctaaaaaaaaaaaaccgccgccacccgccgcgcccgacacccgaaaaaccccgccaacccgcgaaaaaaacccaacgaaaatcgcgaaacaacaaacccgaacccaccgcgccgaaccccgaacgccgcgcgaaaaaaataaaaaccgacga

SEQ ID NO: 21279 - DNA, 680 bp, Artificial Sequence
  chemically treated genomic DNA (Homo sapiens) CpG-island No: 21279
tttatggagttttgtagggtaggggggtttacggtttcgatttgtttcgggatttagggggttttcgagatgtaggatttttcgggttcgaaacgggatattagtggataaacgggagcgagggtcgaacgcgcggtttcgaggaagaggaatttaaagaatacgggtttagtaggttatattaggaacgcgcggggttttagggcgcgttcgatttttttcgtttttcgtagaggaggaaattgaggtacggcgattgttttaacgtagtttcggttttgtttttcgcggttttttttaggcgcgttttcgcgtagtcggtttttttgtttcggtcgtattttttgttttatttttcgtttttttttagtttcgggtcgggttgacgcggcgggagaggaatgcgttttcggagggagagggcggcggcggtttcgggagcgggattagacgcgtagaggaggcggggtcgcggttggttttttgtcggggggcggttttgggtcgtcgagtttttttttttcgtttttgaggaggaggagtcgtcgttattcgtcgcgttcgatattcgggaggtttcgttagttcgcgggagaggtttaacgggagtcgcggaatagtaggttcgagtttatcgcgtcgggtttcggacgtcgcgcggaaaaggtaggggtcggcgg

SEQ ID NO: 21280 - DNA, 680 bp, Artificial Sequence
  chemically treated genomic DNA (Homo sapiens) CpG-island No: 21280
ccgccgacccctaccttttccgcgcgacgtccgaaacccgacgcgataaactcgaacctactattccgcgactcccgttaaacctctcccgcgaactaacgaaacctcccgaatatcgaacgcgacgaataacgacgactcctcctcctcaaaaacgaaaaaaaaaaactcgacgacccaaaaccgccccccgacaaaaaaccaaccgcgaccccgcctcctctacgcgtctaatcccgctcccgaaaccgccgccgccctctccctccgaaaacgcattcctctcccgccgcgtcaacccgacccgaaactaaaaaaaaacgaaaaataaaacaaaaaatacgaccgaaacaaaaaaaccgactacgcgaaaacgcgcctaaaaaaaaccgcgaaaaacaaaaccgaaactacgttaaaacaatcgccgtacctcaatttcctcctctacgaaaaacgaaaaaaatcgaacgcgccctaaaaccccgcgcgttcctaatataacctactaaacccgtattctttaaattcctcttcctcgaaaccgcgcgttcgaccctcgctcccgtttatccactaatatcccgtttcgaacccgaaaaatcctacatctcgaaaaccccctaaatcccgaaacaaatcgaaaccgtaaacccccctaccctacaaaactccataaa

SEQ ID NO: 21281 - DNA, 502 bp, Artificial Sequence
  chemically treated genomic DNA (Homo sapiens) CpG-island No: 21281
ttttagatgagtggtgtatcgggcgcgtagttatttttgggaaaaagacgtaggagcgttagttttcggcgtcgtcggggtttttaagtttttgtatcgcggatgtaattaattttaaaattatttgaaaggcggggacggggaagaaaagataaaagggtagcgcgcgtcgcggggaagtggagtgcgggagagtttcggtcggagtaggatcgtgcgtcggttagggagggaggcgacgcgatagttttggaggagttcggatttttttcgtttttcgcgcgttttgcggggcgttttcgaggtaattttttatttacggggattacggttataggttgtggggatcgtagcggggcgagcggttttagttaaagttgtttttaagttttcgagcgatatttatcgattgtaagaagcgtaaggtgtttacgtagtttttttcggtgtttaagatttcgttgaggacgtagaggcggaggcgtagttggcgttgggattt

SEQ ID NO: 21282 - DNA, 502 bp, Artificial Sequence
  chemically treated genomic DNA (Homo sapiens) CpG-island No: 21282
aaatcccaacgccaactacgcctccgcctctacgtcctcaacgaaatcttaaacaccgaaaaaaactacgtaaacaccttacgcttcttacaatcgataaatatcgctcgaaaacttaaaaacaactttaactaaaaccgctcgccccgctacgatccccacaacctataaccgtaatccccgtaaataaaaaattacctcgaaaacgccccgcaaaacgcgcgaaaaacgaaaaaaatccgaactcctccaaaactatcgcgtcgcctccctccctaaccgacgcacgatcctactccgaccgaaactctcccgcactccacttccccgcgacgcgcgctacccttttatcttttcttccccgtccccgcctttcaaataattttaaaattaattacatccgcgatacaaaaacttaaaaaccccgacgacgccgaaaactaacgctcctacgtctttttcccaaaaataactacgcgcccgatacaccactcatctaaaa

SEQ ID NO: 21283 - DNA, 502 bp, Artificial Sequence
  chemically treated genomic DNA (Homo sapiens) CpG-island No: 21283
gagttttagcgttagttgcgttttcgtttttgcgtttttaacgagattttgggtatcgagagggattacgtgggtattttgcgttttttgtagtcggtgagtgtcgttcgggagtttggggatagttttggttggagtcgttcgtttcgttgcggtttttataatttgtggtcgtggttttcgtgggtggagaattgtttcgggggcgtttcgtagggcgcgcggaaagcgggggggattcgagtttttttagagttgtcgcgtcgtttttttttttggtcggcgtacggttttgtttcgatcggggttttttcgtattttattttttcgcggcgcgcgttgtttttttgttttttttttttcgttttcgttttttaaatagttttaaaattagttatattcgcgatgtaggggtttggggatttcggcggcgtcgggagttggcgtttttgcgttttttttttaggaataattacgcgttcggtgtattatttatttagga

SEQ ID NO: 21284 - DNA, 502 bp, Artificial Sequence
  chemically treated genomic DNA (Homo sapiens) CpG-island No: 21284
tcctaaataaataatacaccgaacgcgtaattattcctaaaaaaaaaacgcaaaaacgccaactcccgacgccgccgaaatccccaaacccctacatcgcgaatataactaattttaaaactatttaaaaaacgaaaacgaaaaaaaaaaaacaaaaaaacaacgcgcgccgcgaaaaaataaaatacgaaaaaaccccgatcgaaacaaaaccgtacgccgaccaaaaaaaaaaacgacgcgacaactctaaaaaaactcgaatcccccccgctttccgcgcgccctacgaaacgcccccgaaacaattctccacccacgaaaaccacgaccacaaattataaaaaccgcaacgaaacgaacgactccaaccaaaactatccccaaactcccgaacgacactcaccgactacaaaaaacgcaaaatacccacgtaatccctctcgatacccaaaatctcgttaaaaacgcaaaaacgaaaacgcaactaacgctaaaactc

SEQ ID NO: 21285 - DNA, 592 bp, Artificial Sequence
  chemically treated genomic DNA (Homo sapiens) CpG-island No: 21285
tcggagttattttgttttaggagcggtcgtggagaaagtaattagtcgagagttcgcgttttagggagggaagcgggtatagggtcgtttagcgttatttatttgtgagtttttcgcgggttttgtaggcggagtttcggtacgacgttttttcgattgggcgcggtttaaagtttcggggcgggtattagaggtcgagcgttttaggggattggttattttggcggacggacgtgttgttgatcgagttggttcgttttcggttcggttcgtggagagtcggttttttcgtgagttttttgttagttattggttttttgcggtttttttggggacgtggcgtcgtcgtcggtcgggtttttttttcggttgggtaaggggtcgcggggagtagttcgggattgaatcgagaggtgtcgaaggaatcggcgggtcgtttgatttcgtgagtgtgggcgcgagagggttgtgggattcggagggacggggagaggaagcgggatttatatttcgttatttggggacgatcggtttttagaggatagagttggtttacgagaacgtttcgtttttaggatgttcgggtagggtt

SEQ ID NO: 21286 - DNA, 592 bp, Artificial Sequence
  chemically treated genomic DNA (Homo sapiens) CpG-island No: 21286
aaccctacccgaacatcctaaaaacgaaacgttctcgtaaaccaactctatcctctaaaaaccgatcgtccccaaataacgaaatataaatcccgcttcctctccccgtccctccgaatcccacaaccctctcgcgcccacactcacgaaatcaaacgacccgccgattccttcgacacctctcgattcaatcccgaactactccccgcgaccccttacccaaccgaaaaaaaaacccgaccgacgacgacgccacgtccccaaaaaaaccgcaaaaaaccaataactaacaaaaaactcacgaaaaaaccgactctccacgaaccgaaccgaaaacgaaccaactcgatcaacaacacgtccgtccgccaaaataaccaatcccctaaaacgctcgacctctaatacccgccccgaaactttaaaccgcgcccaatcgaaaaaacgtcgtaccgaaactccgcctacaaaacccgcgaaaaactcacaaataaataacgctaaacgaccctatacccgcttccctccctaaaacgcgaactctcgactaattactttctccacgaccgctcctaaaacaaaataactccga

SEQ ID NO: 21287 - DNA, 592 bp, Artificial Sequence
  chemically treated genomic DNA (Homo sapiens) CpG-island No: 21287
gattttattcgggtattttgggagcggggcgttttcgtgggttagttttgttttttaggaatcggtcgtttttaggtggcggggtgtgggtttcgtttttttttttcgttttttcgggttttatagttttttcgcgtttatatttacgggattaagcggttcgtcggttttttcggtatttttcggtttagtttcgagttgtttttcgcggttttttgtttagtcggaaggagggttcggtcggcggcggcgttacgtttttaaggaaatcgtagggagttaatgattgatagaagatttacggaggggtcggttttttacgagtcgaatcgggggcgaattagttcggttagtagtacgttcgttcgttagggtggttaattttttagagcgttcggtttttgatgttcgtttcgggattttgagtcgcgtttaatcggaaaggcgtcgtatcgaggtttcgtttgtagggttcgcggagagtttataggtgagtggcgttgggcggttttgtgttcgtttttttttttggggcgcgaattttcggttggttgttttttttacggtcgtttttgggatagagtagtttcgg

SEQ ID NO: 21288 - DNA, 592 bp, Artificial Sequence
  chemically treated genomic DNA (Homo sapiens) CpG-island No: 21288
ccgaaactactctatcccaaaaacgaccgtaaaaaaaacaaccaaccgaaaattcgcgccccaaaaaaaaaaacgaacacaaaaccgcccaacgccactcacctataaactctccgcgaaccctacaaacgaaacctcgatacgacgcctttccgattaaacgcgactcaaaatcccgaaacgaacatcaaaaaccgaacgctctaaaaaattaaccaccctaacgaacgaacgtactactaaccgaactaattcgcccccgattcgactcgtaaaaaaccgacccctccgtaaatcttctatcaatcattaactccctacgatttccttaaaaacgtaacgccgccgccgaccgaaccctccttccgactaaacaaaaaaccgcgaaaaacaactcgaaactaaaccgaaaaataccgaaaaaaccgacgaaccgcttaatcccgtaaatataaacgcgaaaaaactataaaacccgaaaaaacgaaaaaaaaaaacgaaacccacaccccgccacctaaaaacgaccgattcctaaaaaacaaaactaacccacgaaaacgccccgctcccaaaatacccgaataaaatc

SEQ ID NO: 21289 - DNA, 1077 bp, Artificial Sequence
  chemically treated genomic DNA (Homo sapiens) CpG-island No: 21289
tcgttcgttagttcgcgtgggtcgtttttttaggcggtggtaacggtcgtaaggttgtagtttttttcggagaagtttaggcggcgaggatgaagggttgggtcgtttttcgggaggaacgttgtagttgcggcgggaggtatcgaggttttcggaattttttcggcgggcgtttttttttttatttttttaagtattttttgggtatcgcggaagcgttaggttttgttaaggggcgttttgggtttcgatttcggttttcgaggggcggttaacgggcggggagcgcgagtttcgcggtttttaggcgttttttttcgtttcgcgttttgcggagttcgttggcggttttttcggagttttttgggcgttagcgatcgttcgttgggtcggattcgcgcggggtgtagggggcgttgagatatttcggcgttatcgatttttttaacggggtttcgttagtttttttagttttttaacgcgtagtaaagggagtttttttaatttgaaaagcgaagttaagtcgttttattcgagcggagattagcgtagtcgggtaggttcgagacgcgttacgcgttcgcggggtagttttcggtttttttttattggggtttcgatttcgttcggtcgggtatttttgcgtttgggattcgaggttcggggtttttattcggttttcgcggtttttttgttttcgttcgcgttttttttatttcgggcgtttatttgtttcggtcgtgaggagaggagaagttcgcggcgtcgcggttgttagcgattggttcggaggataggcgacgcgcggggtcgagggggagggacgcggggcggggaagggaagcggcggcgttcgcgggcggaggtcggcgcggggattaattgtcgcgcggttcggcgtatattttgtgttttcggcgggcggtcggtcgaggtttaagttaaagggtgtagcgttgttaagtagggtcgggaatgagttatcggaaaaaacgagttgagattcgtttgaatatttgtattagttgatatcgtttgcgggtgttatcgttttttgacgtggtttattgattgtaa

SEQ ID NO: 21290 - DNA, 1077 bp, Artificial Sequence
  chemically treated genomic DNA (Homo sapiens) CpG-island No: 21290
ttacaatcaataaaccacgtcaaaaaacgataacacccgcaaacgatatcaactaatacaaatattcaaacgaatctcaactcgttttttccgataactcattcccgaccctacttaacaacgctacaccctttaacttaaacctcgaccgaccgcccgccgaaaacacaaaatatacgccgaaccgcgcgacaattaatccccgcgccgacctccgcccgcgaacgccgccgcttcccttccccgccccgcgtccctccccctcgaccccgcgcgtcgcctatcctccgaaccaatcgctaacaaccgcgacgccgcgaacttctcctctcctcacgaccgaaacaaataaacgcccgaaataaaaaaaacgcgaacgaaaacaaaaaaaccgcgaaaaccgaataaaaaccccgaacctcgaatcccaaacgcaaaaatacccgaccgaacgaaatcgaaaccccaataaaaaaaaaccgaaaactaccccgcgaacgcgtaacgcgtctcgaacctacccgactacgctaatctccgctcgaataaaacgacttaacttcgcttttcaaattaaaaaaactccctttactacgcgttaaaaaactaaaaaaactaacgaaaccccgttaaaaaaatcgataacgccgaaatatctcaacgccccctacaccccgcgcgaatccgacccaacgaacgatcgctaacgcccaaaaaactccgaaaaaaccgccaacgaactccgcaaaacgcgaaacgaaaaaaaacgcctaaaaaccgcgaaactcgcgctccccgcccgttaaccgcccctcgaaaaccgaaatcgaaacccaaaacgccccttaacaaaacctaacgcttccgcgatacccaaaaaatacttaaaaaaataaaaaaaaaaacgcccgccgaaaaaattccgaaaacctcgatacctcccgccgcaactacaacgttcctcccgaaaaacgacccaacccttcatcctcgccgcctaaacttctccgaaaaaaactacaaccttacgaccgttaccaccgcctaaaaaaacgacccacgcgaactaacgaacga

SEQ ID NO: 21291 - DNA, 1077 bp, Artificial Sequence
  chemically treated genomic DNA (Homo sapiens) CpG-island No: 21291
ttatagttaatgagttacgttagggagcgatggtattcgtaggcggtattaattgatgtaagtgtttaagcgaattttaattcgtttttttcggtgatttattttcggttttgtttggtagcgttgtattttttaatttaaatttcggtcggtcgttcgtcgggggtatagagtgtgcgtcgggtcgcgcggtaattggttttcgcgtcgattttcgttcgcgagcgtcgtcgtttttttttttcgtttcgcgtttttttttttcggtttcgcgcgtcgtttgtttttcgagttagtcgttgatagtcgcggcgtcgcgagttttttttttttttacgatcgaggtaggtaaacgttcggggtgggaggaacgcgggcgggggtaggggagtcgcgggggtcgagtgaggatttcgggtttcgggttttaggcgtaagggtgttcggtcgggcggggtcgggattttagtgaggaggggtcgggggttgtttcgcgggcgcgtgacgcgtttcgggtttgttcggttgcgttggttttcgttcgggtgaggcggtttggtttcgttttttaggttaggaaagttttttttattgcgcgttggggggttgggggagttggcggagtttcgttagggaggtcggtggcgtcggggtgttttagcgttttttgtatttcgcgcgggttcggtttagcgggcgatcgttggcgtttagggaatttcgggagggtcgttagcgggtttcgtagggcgcggggcggggaggggcgtttgggggtcgcggggttcgcgtttttcgttcgttggtcgtttttcggaggtcgagatcggggtttagaacgttttttggtaaggtttggcgttttcgcgatgtttagagggtgtttggggggatggagagaggggcgttcgtcgggggagtttcgggagtttcggtgtttttcgtcgtagttgtagcgtttttttcgggaggcggtttagttttttattttcgtcgtttgagttttttcgaggggggttgtagttttgcggtcgttgttatcgtttggagaagcggtttacgcggattgacgggcgg

SEQ ID NO: 21292 - DNA, 1077 bp, Artificial Sequence
  chemically treated genomic DNA (Homo sapiens) CpG-island No: 21292
ccgcccgtcaatccgcgtaaaccgcttctccaaacgataacaacgaccgcaaaactacaacccccctcgaaaaaactcaaacgacgaaaataaaaaactaaaccgcctcccgaaaaaaacgctacaactacgacgaaaaacaccgaaactcccgaaactcccccgacgaacgcccctctctccatccccccaaacaccctctaaacatcgcgaaaacgccaaaccttaccaaaaaacgttctaaaccccgatctcgacctccgaaaaacgaccaacgaacgaaaaacgcgaaccccgcgacccccaaacgcccctccccgccccgcgccctacgaaacccgctaacgaccctcccgaaattccctaaacgccaacgatcgcccgctaaaccgaacccgcgcgaaatacaaaaaacgctaaaacaccccgacgccaccgacctccctaacgaaactccgccaactcccccaaccccccaacgcgcaataaaaaaaactttcctaacctaaaaaacgaaaccaaaccgcctcacccgaacgaaaaccaacgcaaccgaacaaacccgaaacgcgtcacgcgcccgcgaaacaacccccgacccctcctcactaaaatcccgaccccgcccgaccgaacacccttacgcctaaaacccgaaacccgaaatcctcactcgacccccgcgactcccctacccccgcccgcgttcctcccaccccgaacgtttacctacctcgatcgtaaaaaaaaaaaaaactcgcgacgccgcgactatcaacgactaactcgaaaaacaaacgacgcgcgaaaccgaaaaaaaaaaacgcgaaacgaaaaaaaaaaacgacgacgctcgcgaacgaaaatcgacgcgaaaaccaattaccgcgcgacccgacgcacactctatacccccgacgaacgaccgaccgaaatttaaattaaaaaatacaacgctaccaaacaaaaccgaaaataaatcaccgaaaaaaacgaattaaaattcgcttaaacacttacatcaattaataccgcctacgaataccatcgctccctaacgtaactcattaactataa

SEQ ID NO: 21293 - DNA, 595 bp, Artificial Sequence
  chemically treated genomic DNA (Homo sapiens) CpG-island No: 21293
  unsure (290)
tgtttacgttaagttcgtcgattattagtattttgaagaggtgttcgcgggtttcgggcgttggggcggcggtcgtttttaggtcggggttttcggttttttcgttcgttatgagcgttgcggttgtcgggcgcgtttcgatttcgagtttggttttttgttcggtttcgcgttttgtcgtcgcgttttcggcggtcgcggaaattttttcgaggtcggttagtttttcgtcgcgttcgttgacgtcgtttgatcggttataggatttagaattcgttagtgttcgcggntcgggcggggttagacgagggtagggtcggacgagggtagggtttggcgtcggtttggggaggattttgcgcgaggcggttttcgttttgcgtttttgaagttcggtcgggtttaattggattttttttttcgggcggcgttttcgaagttcggtcgggtttagttggattttttttttcgggcggcgttttttggcggtcgcggcgcggagggaggtttagacgttcgttggtgggttttcggggagtcggtttggagtttttatgggtttcgaaggtttattgggggtttgaggaggcgtcga

SEQ ID NO: 21294 - DNA, 595 bp, Artificial Sequence
  chemically treated genomic DNA (Homo sapiens) CpG-island No: 21294
  unsure (306)
tcgacgcctcctcaaacccccaataaaccttcgaaacccataaaaactccaaaccgactccccgaaaacccaccaacgaacgtctaaacctccctccgcgccgcgaccgccaaaaaacgccgcccgaaaaaaaaaatccaactaaacccgaccgaacttcgaaaacgccgcccgaaaaaaaaaatccaattaaacccgaccgaacttcaaaaacgcaaaacgaaaaccgcctcgcgcaaaatcctccccaaaccgacgccaaaccctaccctcgtccgaccctaccctcgtctaaccccgcccganccgcgaacactaacgaattctaaatcctataaccgatcaaacgacgtcaacgaacgcgacgaaaaactaaccgacctcgaaaaaatttccgcgaccgccgaaaacgcgacgacaaaacgcgaaaccgaacaaaaaaccaaactcgaaatcgaaacgcgcccgacaaccgcaacgctcataacgaacgaaaaaaccgaaaaccccgacctaaaaacgaccgccgccccaacgcccgaaacccgcgaacacctcttcaaaatactaataatcgacgaacttaacgtaaaca

SEQ ID NO: 21295 - DNA, 595 bp, Artificial Sequence
  chemically treated genomic DNA (Homo sapiens) CpG-island No: 21295
  unsure (306)
tcggcgtttttttaggtttttagtgaattttcggggtttataaaggttttaggtcggtttttcggaggtttattagcgggcgtttgggttttttttcgcgtcgcgatcgttaggaggcgtcgttcgggagaggaagtttagttgggttcggtcgggtttcggaggcgtcgttcgggagaggaagtttagttgggttcggtcgggttttagaggcgtagggcgggagtcgtttcgcgtagggttttttttaagtcggcgttaggttttgttttcgttcggttttgttttcgtttggtttcgttcggntcgcgagtattggcgggttttgggttttgtgatcggttaggcggcgttagcgggcgcggcggagggttggtcggtttcgggggagttttcgcggtcgtcgggggcgcggcggtagagcgcgaggtcgggtagggggttagattcggagtcgaggcgcgttcgatagtcgtagcgtttatggcgggcggaggagtcggggatttcggtttgggggcggtcgtcgttttagcgttcgagattcgcgagtatttttttaaggtgttggtgatcggcgagtttggcgtgggta

SEQ ID NO: 21296 - DNA, 595 bp, Artificial Sequence
  chemically treated genomic DNA (Homo sapiens) CpG-island No: 21296
  unsure (290)
tacccacgccaaactcgccgatcaccaacaccttaaaaaaatactcgcgaatctcgaacgctaaaacgacgaccgcccccaaaccgaaatccccgactcctccgcccgccataaacgctacgactatcgaacgcgcctcgactccgaatctaaccccctacccgacctcgcgctctaccgccgcgcccccgacgaccgcgaaaactcccccgaaaccgaccaaccctccgccgcgcccgctaacgccgcctaaccgatcacaaaacccaaaacccgccaatactcgcganccgaacgaaaccaaacgaaaacaaaaccgaacgaaaacaaaacctaacgccgacttaaaaaaaaccctacgcgaaacgactcccgccctacgcctctaaaacccgaccgaacccaactaaacttcctctcccgaacgacgcctccgaaacccgaccgaacccaactaaacttcctctcccgaacgacgcctcctaacgatcgcgacgcgaaaaaaaacccaaacgcccgctaataaacctccgaaaaaccgacctaaaacctttataaaccccgaaaattcactaaaaacctaaaaaaacgccga

SEQ ID NO: 21297 - DNA, 660 bp, Artificial Sequence
  chemically treated genomic DNA (Homo sapiens) CpG-island No: 21297
gggagcgaagaggagggtaaaaaagaagttatatttattcggagtttagttgatttttcggtagaataagtgttaacgtttttaaagggcgcggtttgttttagttacgaaaacgtatcggttggtaaggtaggcggttgggggttgtttattcggaagtcgggtggggtgggggcgggaatattttcgaatttcgatttcgcggtcgtcgtttaggcgcgtcgttttttttttcgcgttcgtttttatcgcgggaaagggtatttcgggttcgagtcgtcgggtagtcgacgtcggcgagacggtagggcgtcggagcggaggtaaatttagcgcgaacgagggaagacgttattttgtttattttattttttatggtggttgaaggcgaacgttagcgtttcggtcgtgtggtcgtaggcgtattatggtatgttatagggaggaggagcggcggggcgggcggggaggaggcgcgcgggagggattgagtgttcgtagtgttaataagttagcggtagggatcggtcgggtaatttagggcgttttagagattcggcgtggagggtagggttttttgtgcggcggtttagggtatcgagttcgaattcgtaattatgttatagttgttttttgtgtgaaattgttattcgtttataa

SEQ ID NO: 21298 - DNA, 660 bp, Artificial Sequence
  chemically treated genomic DNA (Homo sapiens) CpG-island No: 21298
ttataaacgaataacaatttcacacaaaaaacaactataacataattacgaattcgaactcgataccctaaaccgccgcacaaaaaaccctaccctccacgccgaatctctaaaacgccctaaattacccgaccgatccctaccgctaacttattaacactacgaacactcaatccctcccgcgcgcctcctccccgcccgccccgccgctcctcctccctataacataccataatacgcctacgaccacacgaccgaaacgctaacgttcgccttcaaccaccataaaaaataaaataaacaaaataacgtcttccctcgttcgcgctaaatttacctccgctccgacgccctaccgtctcgccgacgtcgactacccgacgactcgaacccgaaataccctttcccgcgataaaaacgaacgcgaaaaaaaaaacgacgcgcctaaacgacgaccgcgaaatcgaaattcgaaaatattcccgcccccaccccacccgacttccgaataaacaacccccaaccgcctaccttaccaaccgatacgttttcgtaactaaaacaaaccgcgccctttaaaaacgttaacacttattctaccgaaaaatcaactaaactccgaataaatataacttcttttttaccctcctcttcgctccc

SEQ ID NO: 21299 - DNA, 660 bp, Artificial Sequence
  chemically treated genomic DNA (Homo sapiens) CpG-island No: 21299
ttgtgagcgaataataattttatataggaaatagttatgatatgattacgaattcgagttcggtattttaggtcgtcgtatagaaagttttgttttttacgtcgggtttttggagcgttttgggttgttcggtcggtttttgtcgttgatttgttgatattgcgagtatttagtttttttcgcgcgtttttttttcgttcgtttcgtcgttttttttttttgtaatatgttatagtgcgtttgcgattatacggtcggggcgttagcgttcgtttttagttattatggggaatgggatgaataaggtaacgttttttttcgttcgcgttgggtttgttttcgtttcgacgttttgtcgtttcgtcggcgtcggttgttcgacgattcgagttcggggtgttttttttcgcggtggggacgggcgcggagggaggggcggcgcgtttgggcggcgatcgcggagtcggggttcggaggtgttttcgtttttattttattcggttttcgggtaggtagtttttagtcgtttgttttgttagtcggtgcgttttcgtggttgaaataagtcgcgttttttgaaagcgttgatatttgttttgtcgagaggttagttgagtttcgaatggatgtggttttttttttgttttttttttcgttttt

SEQ ID NO: 21300 - DNA, 660 bp, Artificial Sequence
  chemically treated genomic DNA (Homo sapiens) CpG-island No: 21300
aaaaacgaaaaaaaaaacaaaaaaaaaaccacatccattcgaaactcaactaacctctcgacaaaacaaatatcaacgctttcaaaaaacgcgacttatttcaaccacgaaaacgcaccgactaacaaaacaaacgactaaaaactacctacccgaaaaccgaataaaataaaaacgaaaacacctccgaaccccgactccgcgatcgccgcccaaacgcgccgcccctccctccgcgcccgtccccaccgcgaaaaaaaacaccccgaactcgaatcgtcgaacaaccgacgccgacgaaacgacaaaacgtcgaaacgaaaacaaacccaacgcgaacgaaaaaaaacgttaccttattcatcccattccccataataactaaaaacgaacgctaacgccccgaccgtataatcgcaaacgcactataacatattacaaaaaaaaaaaacgacgaaacgaacgaaaaaaaaacgcgcgaaaaaaactaaatactcgcaatatcaacaaatcaacgacaaaaaccgaccgaacaacccaaaacgctccaaaaacccgacgtaaaaaacaaaactttctatacgacgacctaaaataccgaactcgaattcgtaatcatatcataactatttcctatataaaattattattcgctcacaa

SEQ ID NO: 21301 - DNA, 1202 bp, Artificial Sequence
  chemically treated genomic DNA (Homo sapiens) CpG-island No: 21301
ttcggtcgcggggttcggggcgagcgcggcgtcggttagggagacggtgttcgcgtttcgattcgtagttgttttattttgtttagtagggttttcgttttggcgttatttttatgaaattttacgaatttaaagaggcggttgtggagatagatatagtttattcgttaacgtttagggaacgttatcgattcgtttttgttcgagttcgaggttttagcggaggcggcgcgaagagcgttaaatcgaggtgttcgtttcgtcgtcgttagagataagtcgcgttcggttttttcgggagagcggttattgttcgttcggagtcgatcgggcgagtgacggcggttcgtatttgtttagttcgtcgagcgttttttttttttcggttgttaggttgggggacgttttttcgttttcgtcgttcgtttttttcgtcgttatttttttttttttattatcgaaagcggcggcggtagcggcggcggtagcgagcgatatttcgtaggattttatggaaacgtagcgaatttataattttaacgtcgatattttttttcggatcggggttcgtagtgacgtttttaatttgcgcgcgggattagtatattaattttatcgtcgttttttttttcgtcgcgggcggcggcgacgaaaaattttaacgcggcggcggtgaaggcggcggcggcggcggtaggggttgcggagttttcgggtcggtagcggcggttttcggttgtagggttatatcgcggggttgggtagggggtagttataggcggggacggcgggaacggtcggagcgcgcggggttggggagtattgaggggattcgttggagatataaattttttcggtattagtataaagttgttgtaattgtgttatatagcgaattttacgtcgtcgtcgtgatttttttttttcgttcggttggcgttattaatcggcgcggttcgtacgttttacgtgatttttgttgatttacgttagtcgtggttttatttaatttgttagttgttcgagtttcgtttatcgaggtcgttatcgagatgggagcgggacgtaggttaattttagtcggtggttggttgttgggcgcgtttgtcgggggaagggttgttatcgagagggagttttttgttaggttgtgttggttaaatatattggggtagagaatggagggttcgggtcgtgttatt

SEQ ID NO: 21302 - DNA, 1202 bp, Artificial Sequence
  chemically treated genomic DNA (Homo sapiens) CpG-island No: 21302
aataacacgacccgaaccctccattctctaccccaatatatttaaccaacacaacctaacaaaaaactccctctcgataacaacccttcccccgacaaacgcgcccaacaaccaaccaccgactaaaattaacctacgtcccgctcccatctcgataacgacctcgataaacgaaactcgaacaactaacaaattaaataaaaccacgactaacgtaaatcaacaaaaatcacgtaaaacgtacgaaccgcgccgattaataacgccaaccgaacgaaaaaaaaaaatcacgacgacgacgtaaaattcgctatataacacaattacaacaactttatactaataccgaaaaaatttatatctccaacgaatcccctcaatactccccaaccccgcgcgctccgaccgttcccgccgtccccgcctataactaccccctacccaaccccgcgatataaccctacaaccgaaaaccgccgctaccgacccgaaaactccgcaacccctaccgccgccgccgccgccttcaccgccgccgcgttaaaatttttcgtcgccgccgcccgcgacgaaaaaaaaaacgacgataaaattaatatactaatcccgcgcgcaaattaaaaacgtcactacgaaccccgatccgaaaaaaaatatcgacgttaaaattataaattcgctacgtttccataaaatcctacgaaatatcgctcgctaccgccgccgctaccgccgccgctttcgataataaaaaaaaaaaaataacgacgaaaaaaacgaacgacgaaaacgaaaaaacgtcccccaacctaacaaccgaaaaaaaaaaaacgctcgacgaactaaacaaatacgaaccgccgtcactcgcccgatcgactccgaacgaacaataaccgctctcccgaaaaaaccgaacgcgacttatctctaacgacgacgaaacgaacacctcgatttaacgctcttcgcgccgcctccgctaaaacctcgaactcgaacaaaaacgaatcgataacgttccctaaacgttaacgaataaactatatctatctccacaaccgcctctttaaattcgtaaaatttcataaaaataacgccaaaacgaaaaccctactaaacaaaataaaacaactacgaatcgaaacgcgaacaccgtctccctaaccgacgccgcgctcgccccgaaccccgcgaccgaa

SEQ ID NO: 21303 - DNA, 1202 bp, Artificial Sequence
  chemically treated genomic DNA (Homo sapiens) CpG-island No: 21303
ggtgatacggttcggattttttattttttgttttagtgtatttaattagtataatttaataggaagttttttttcggtgataatttttttttcgatagacgcgtttagtagttaattatcggttagaattggtttgcgtttcgtttttatttcggtggcggtttcggtgggcggggttcgggtagttagtaagttaagtggagttacggttgacgtgagttaataaaggttacgtgaggcgtgcgggtcgcgtcgattggtggcgttagtcgggcggggagggggggttacggcggcggcgtggggttcgttgtgtgatataattataataattttgtgttggtgtcggggaagtttgtgtttttaacgaatttttttagtgttttttagtttcgcgcgtttcggtcgttttcgtcgttttcgtttgtggttgttttttgtttaatttcgcgatgtgattttatagtcgaaagtcgtcgttgtcgattcgggggtttcgtagtttttgtcgtcgtcgtcgtcgtttttatcgtcgtcgcgttgggatttttcgtcgtcgtcgttcgcggcggaggaggaggcggcgataaagttggtgtgttggtttcgcgcgtagattgggggcgttattgcgggtttcggttcgagggggggtgtcggcgttggagttgtgaattcgttgcgtttttatgaaattttgcggagtgtcgttcgttatcgtcgtcgttgtcgtcgtcgttttcggtgatgaggaaaagaaaatggcggcgggaaaagcgagcggcgagagcgaggaggcgttttttagtttgatagtcgaggagagggaggcgttcggcggattggataggtacgggtcgtcgttattcgttcggtcggtttcggacgggtagtagtcgttttttcgggaggatcgagcgcggtttgtttttggcggcggcggggcgggtatttcggtttggcgtttttcgcgtcgttttcgttggggtttcgggttcgggtagggacgggtcggtggcgttttttgagcgttaacgagtaaattgtgtttgtttttatagtcgtttttttgggttcgtgagattttatgaagatggcgttaggacgaaggttttattgggtaaggtaaggtagttgcgagtcggagcgcggatatcgtttttttggtcggcgtcgcgttcgtttcgggtttcgcggtcggg

SEQ ID NO: 21304 - DNA, 1202 bp, Artificial Sequence
  chemically treated genomic DNA (Homo sapiens) CpG-island No: 21304
cccgaccgcgaaacccgaaacgaacgcgacgccgaccaaaaaaacgatatccgcgctccgactcgcaactaccttaccttacccaataaaaccttcgtcctaacgccatcttcataaaatctcacgaacccaaaaaaacgactataaaaacaaacacaatttactcgttaacgctcaaaaaacgccaccgacccgtccctacccgaacccgaaaccccaacgaaaacgacgcgaaaaacgccaaaccgaaatacccgccccgccgccgccaaaaacaaaccgcgctcgatcctcccgaaaaaacgactactacccgtccgaaaccgaccgaacgaataacgacgacccgtacctatccaatccgccgaacgcctccctctcctcgactatcaaactaaaaaacgcctcctcgctctcgccgctcgcttttcccgccgccattttcttttcctcatcaccgaaaacgacgacgacaacgacgacgataacgaacgacactccgcaaaatttcataaaaacgcaacgaattcacaactccaacgccgacaccccccctcgaaccgaaacccgcaataacgcccccaatctacgcgcgaaaccaacacaccaactttatcgccgcctcctcctccgccgcgaacgacgacgacgaaaaatcccaacgcgacgacgataaaaacgacgacgacgacgacaaaaactacgaaacccccgaatcgacaacgacgactttcgactataaaatcacatcgcgaaattaaacaaaaaacaaccacaaacgaaaacgacgaaaacgaccgaaacgcgcgaaactaaaaaacactaaaaaaattcgttaaaaacacaaacttccccgacaccaacacaaaattattataattatatcacacaacgaaccccacgccgccgccgtaaccccccctccccgcccgactaacgccaccaatcgacgcgacccgcacgcctcacgtaacctttattaactcacgtcaaccgtaactccacttaacttactaactacccgaaccccgcccaccgaaaccgccaccgaaataaaaacgaaacgcaaaccaattctaaccgataattaactactaaacgcgtctatcgaaaaaaaaattatcaccgaaaaaaaacttcctattaaattatactaattaaatacactaaaacaaaaaataaaaaatccgaaccgtatcacc

SEQ ID NO: 21305 - DNA, 836 bp, Artificial Sequence
  chemically treated genomic DNA (Homo sapiens) CpG-island No: 21305
gtatttcggtatttaatcgtcgtcgtcgtcgtttttttttttttttcgttttcgtcgtcgtcgttttcgtcgtataagttgtcggttagcggtggttttcgagatgggttttgtaggttcggtttattgtttttttttttagtcgtcgtagtcgtttgggttttttgtttttcgtttgtcgtcgtcgtttttgttttcgtttttcgttatagcgtcgtcgtcgtcgtattcgggtagtttttggtcgtcgtcggtattttacgttttggggtcgttttatcgggttcgttcgggtttcgttcgaggtcgggattattttttcgcggttttttgcggagcggtttttcggcgggggacgacgcggtttttttgtcggttttcgtcgtcgagggggagtcgtcgggttgaagggcgagggtcgtttcgttcgttattttttaattgtttttttggtttttttttttcgttttttttgttttcgttcgacgcgcggtattggcgttttcgcggtttcggttgcgggagatttaaattttattacgtgattcgttttatcgtcgttttcgttttttcggcgttttcgttatttacgcgggttagattataatattacgggttacgtggcgggcggaggttgttgcgtttatcgtttcgtttgggttggaagcgtattcggtttcggcggtcggcggttttttttttttgtggcgagcgtgtagtgtagttaaattcgtttttcggtcgtttttttaattttttttttaaattgattttaaattattatcgtcggaatagtttaagttttggttcgttttgggaatttttacgtttttttg

SEQ ID NO: 21306 - DNA, 836 bp, Artificial Sequence
  chemically treated genomic DNA (Homo sapiens) CpG-island No: 21306
caaaaaaacgtaaaaattcccaaaacgaaccaaaacttaaactattccgacgataataatttaaaatcaatttaaaaaaaaaattaaaaaaacgaccgaaaaacgaatttaactacactacacgctcgccacaaaaaaaaaaaaccgccgaccgccgaaaccgaatacgcttccaacccaaacgaaacgataaacgcaacaacctccgcccgccacgtaacccgtaatattataatctaacccgcgtaaataacgaaaacgccgaaaaaacgaaaacgacgataaaacgaatcacgtaataaaatttaaatctcccgcaaccgaaaccgcgaaaacgccaataccgcgcgtcgaacgaaaacaaaaaaaacgaaaaaaaaaaaccaaaaaaacaattaaaaaataacgaacgaaacgaccctcgcccttcaacccgacgactccccctcgacgacgaaaaccgacaaaaaaaccgcgtcgtcccccgccgaaaaaccgctccgcaaaaaaccgcgaaaaaataatcccgacctcgaacgaaacccgaacgaacccgataaaacgaccccaaaacgtaaaataccgacgacgaccaaaaactacccgaatacgacgacgacgacgctataacgaaaaacgaaaacaaaaacgacgacgacaaacgaaaaacaaaaaacccaaacgactacgacgactaaaaaaaaaaacaataaaccgaacctacaaaacccatctcgaaaaccaccgctaaccgacaacttatacgacgaaaacgacgacgacgaaaacgaaaaaaaaaaaaaaacgacgacgacgacgattaaataccgaaatac

SEQ ID NO: 21307 - DNA, 836 bp, Artificial Sequence
  chemically treated genomic DNA (Homo sapiens) CpG-island No: 21307
taggaagacgtggaaatttttagggcggattaaaatttgagttgtttcggcggtagtgatttgaggttagtttgaaagagaagttgagaaagcggtcgaggggcgaatttggttgtattatacgttcgttataaagaggaagggtcgtcggtcgtcggggtcgagtgcgtttttagtttaggcggagcggtagacgtaatagttttcgttcgttacgtgattcgtagtgttgtggtttggttcgcgtgggtggcgggagcgtcgagagggcgggggcggcgatggggcgggttacgtgatggggtttaaatttttcgtagtcggagtcgcgggggcgttagtgtcgcgcgtcgagcgggagtagaggaggcgagggaggagggttagagaggtagttggaagatggcggacgaggcggttttcgttttttagttcggcggttttttttcggcggcgggggtcgatagggaggtcgcgtcgtttttcgtcggggagtcgtttcgtaagaggtcgcggagagatggtttcggtttcgagcggagttcgggcgagttcggtggggcggttttagagcgtgaggtgtcggcggcggttaggggttgttcgggtgcggcggcggcggcgttgtggcgggaggcggaggtagaggcggcggcggtaggcggggagtaagaggtttaggcgattgcggcggttggggaaggagataatgggtcgggtttgtagggtttatttcgggagttatcgttggtcgataatttgtacgacgaagacgacgacgacgagggcgaggaggaggaagaggcggcggcggcggcgattgggtatcgaggtgt

SEQ ID NO: 21308 - DNA, 836 bp, Artificial Sequence
  chemically treated genomic DNA (Homo sapiens) CpG-island No: 21308
acacctcgatacccaatcgccgccgccgccgcctcttcctcctcctcgccctcgtcgtcgtcgtcttcgtcgtacaaattatcgaccaacgataactcccgaaataaaccctacaaacccgacccattatctccttccccaaccgccgcaatcgcctaaacctcttactccccgcctaccgccgccgcctctacctccgcctcccgccacaacgccgccgccgccgcacccgaacaacccctaaccgccgccgacacctcacgctctaaaaccgccccaccgaactcgcccgaactccgctcgaaaccgaaaccatctctccgcgacctcttacgaaacgactccccgacgaaaaacgacgcgacctccctatcgacccccgccgccgaaaaaaaaccgccgaactaaaaaacgaaaaccgcctcgtccgccatcttccaactacctctctaaccctcctccctcgcctcctctactcccgctcgacgcgcgacactaacgcccccgcgactccgactacgaaaaatttaaaccccatcacgtaacccgccccatcgccgcccccgccctctcgacgctcccgccacccacgcgaaccaaaccacaacactacgaatcacgtaacgaacgaaaactattacgtctaccgctccgcctaaactaaaaacgcactcgaccccgacgaccgacgacccttcctctttataacgaacgtataatacaaccaaattcgcccctcgaccgctttctcaacttctctttcaaactaacctcaaatcactaccgccgaaacaactcaaattttaatccgccctaaaaatttccacgtcttccta

SEQ ID NO: 21309 - DNA, 868 bp, Artificial Sequence
  chemically treated genomic DNA (Homo sapiens) CpG-island No: 21309
aggcgcgcggtttaggttaggtgcgtttgagttcgggttgtattgtagtttgcgttttggtttttgcgagtcgttggcgcggttattttgggtttcgttgggtcgatacgtgtcgttgtttcgcgttttttttggcgattgagtgggattcggggtagcggggagcggggtcgtttacgagttgcgggagatgttcggtattatcgtggcgtacgtttttttttagatcgtagggttattatgaagtttatttcgttgtagggtttaggttgcggcgataaggcgtttcgaaatgttagtttatttcgcgaggtttaatttttttttcgtttacgaatttcgcgtttttgagttttcgggtatcgtcgtttttatttaaaattttcgcgcgtcgtacgtttttttaagcggaggcggcgaggattttgtttttcgttcggcggtcgttcggttgtttagtaaattcgttcgtagaaaggatgggaaggaagggggttagtgtatcgagtagcggtcgcggcggcggcgtcggaattcggtttttcgattttttacgtcgcgtttttcgtagcggataacgtgggttttttgttgcgcgttcggtttaggtattttattttagtttcgggatttttcgtttcgacgtaatcgataggttggtagttaatggggacgcgaagttcgcgggttatttaaatagtttcgtttttttttttattttttttttttcgagaggcgtcgttttcgtcgcgcgtaggttttaagattcgggaatttttgtaggtatgcgaagagtcgcgaggtgttaaaggcgaagaggttatcgttagtaagaatgatttgattaatatttcgatttgaagttttt

SEQ ID NO: 21310 - DNA, 868 bp, Artificial Sequence
  chemically treated genomic DNA (Homo sapiens) CpG-island No: 21310
aaaaacttcaaatcgaaatattaatcaaatcattcttactaacgataacctcttcgcctttaacacctcgcgactcttcgcatacctacaaaaattcccgaatcttaaaacctacgcgcgacgaaaacgacgcctctcgaaaaaaaaaaaataaaaaaaaaaacgaaactatttaaataacccgcgaacttcgcgtccccattaactaccaacctatcgattacgtcgaaacgaaaaatcccgaaactaaaataaaatacctaaaccgaacgcgcaacaaaaaacccacgttatccgctacgaaaaacgcgacgtaaaaaatcgaaaaaccgaattccgacgccgccgccgcgaccgctactcgatacactaacccccttccttcccatcctttctacgaacgaatttactaaacaaccgaacgaccgccgaacgaaaaacaaaatcctcgccgcctccgcttaaaaaaacgtacgacgcgcgaaaattttaaataaaaacgacgatacccgaaaactcaaaaacgcgaaattcgtaaacgaaaaaaaaattaaacctcgcgaaataaactaacatttcgaaacgccttatcgccgcaacctaaaccctacaacgaaataaacttcataataaccctacgatctaaaaaaaaacgtacgccacgataataccgaacatctcccgcaactcgtaaacgaccccgctccccgctaccccgaatcccactcaatcgccaaaaaaaacgcgaaacaacgacacgtatcgacccaacgaaacccaaaataaccgcgccaacgactcgcaaaaaccaaaacgcaaactacaatacaacccgaactcaaacgcacctaacctaaaccgcgcgcct

SEQ ID NO: 21311 - DNA, 868 bp, Artificial Sequence
  chemically treated genomic DNA (Homo sapiens) CpG-island No: 21311
gaaagttttagatcggggtattggttagattatttttattagcgatgattttttcgtttttggtatttcgcggtttttcgtatgtttataagaattttcgggttttgaaatttacgcgcggcggaagcgacgtttttcgggagagggagggtgaaagaaggggcggggttatttaaatagttcgcgagtttcgcgtttttattggttgttagtttgtcggttacgtcggggcgggaagtttcggggttgaagtgaggtatttgagtcgggcgcgtagtagaaagtttacgttgttcgttgcggggagcgcggcgtggaaagtcgggagatcgaatttcggcgtcgtcgtcgcggtcgttgttcggtgtattagttttttttttttttattttttttgcgagcgggtttgttgggtagtcgggcgatcgtcgaacggaaagtaagattttcgtcgttttcgtttgaggaggcgtgcggcgcgcggagattttgagtgggagcgacggtgttcgagagtttaggggcgcggagttcgtgagcgagaaggaagttaaatttcgcggaatagattggtatttcgggacgttttgtcgtcgtagtttgggttttgtaacggggtaaattttatggtggttttgcgatttggggaggggcgtgcgttacggtgatgtcgggtatttttcgtagttcgtgagcggtttcgtttttcgttgtttcgggttttatttagtcgttagggagagcgcggggtagcggtacgtgtcggtttagcgaggtttagagtgatcgcgttagcgattcgtaggagttagggcgtaggttgtagtgtagttcggatttagacgtatttggtttggatcgcgcgttt

SEQ ID NO: 21312 - DNA, 868 bp, Artificial Sequence
  chemically treated genomic DNA (Homo sapiens) CpG-island No: 21312
aaacgcgcgatccaaaccaaatacgtctaaatccgaactacactacaacctacgccctaactcctacgaatcgctaacgcgatcactctaaacctcgctaaaccgacacgtaccgctaccccgcgctctccctaacgactaaataaaacccgaaacaacgaaaaacgaaaccgctcacgaactacgaaaaatacccgacatcaccgtaacgcacgcccctccccaaatcgcaaaaccaccataaaatttaccccgttacaaaacccaaactacgacgacaaaacgtcccgaaataccaatctattccgcgaaatttaacttccttctcgctcacgaactccgcgcccctaaactctcgaacaccgtcgctcccactcaaaatctccgcgcgccgcacgcctcctcaaacgaaaacgacgaaaatcttactttccgttcgacgatcgcccgactacccaacaaacccgctcgcaaaaaaaataaaaaaaaaaaaaactaatacaccgaacaacgaccgcgacgacgacgccgaaattcgatctcccgactttccacgccgcgctccccgcaacgaacaacgtaaactttctactacgcgcccgactcaaatacctcacttcaaccccgaaacttcccgccccgacgtaaccgacaaactaacaaccaataaaaacgcgaaactcgcgaactatttaaataaccccgccccttctttcaccctccctctcccgaaaaacgtcgcttccgccgcgcgtaaatttcaaaacccgaaaattcttataaacatacgaaaaaccgcgaaataccaaaaacgaaaaaatcatcgctaataaaaataatctaaccaataccccgatctaaaactttc

SEQ ID NO: 21313 - DNA, 692 bp, Artificial Sequence
  chemically treated genomic DNA (Homo sapiens) CpG-island No: 21313
tcgtcgcgcgttttgtgtaggtgatcggggtgcgcgcggggcgtgtgtcgagcgcgtaggcgtagcgcgtagacgttggggtacgagcgatcgtcggagtcgtagacggtgtcgcgttgcgcgtatacgtagagttcggtgttttcgggcgttgttttagcggtttggttcgcgtatattaggtcggggttatagcgttcgtcggcgcggttttcgtagttcgcgttttcggtttttaggtagcgggcgtagtagtcgtattcgtcgagcgtcgagatttcgggcgtcgggtagggcgtaggcgtcgggtagttttttggtcggtacggattatatttggggcgtcgatcgtttacgtcgcggattttaaggttcggggatagcggcggtagtagcggtagtagtagtagaagtagtagcggtaagagtagagataagcgcggtatggtttgtttcgggatagcggcggcgtttttgtttcgcgtttcgtttcgcgttcgtcgagtagttatcgttttcgtttcgcggtcgttgattggtcgggtttgtatcgcggggcgttcgtagatcgttgttttagttcgggattcgcgcggtgttcgcggttcgggttttcgagttggagggtcgtttcgagagtagtttttcgattttcgattggatttttgagggaatcgagatttagtcggggt

SEQ ID NO: 21314 - DNA, 692 bp, Artificial Sequence
  chemically treated genomic DNA (Homo sapiens) CpG-island No: 21314
accccgactaaatctcgattccctcaaaaatccaatcgaaaatcgaaaaactactctcgaaacgaccctccaactcgaaaacccgaaccgcgaacaccgcgcgaatcccgaactaaaacaacgatctacgaacgccccgcgatacaaacccgaccaatcaacgaccgcgaaacgaaaacgataactactcgacgaacgcgaaacgaaacgcgaaacaaaaacgccgccgctatcccgaaacaaaccataccgcgcttatctctactcttaccgctactacttctactactactaccgctactaccgccgctatccccgaaccttaaaatccgcgacgtaaacgatcgacgccccaaatataatccgtaccgaccaaaaaactacccgacgcctacgccctacccgacgcccgaaatctcgacgctcgacgaatacgactactacgcccgctacctaaaaaccgaaaacgcgaactacgaaaaccgcgccgacgaacgctataaccccgacctaatatacgcgaaccaaaccgctaaaacaacgcccgaaaacaccgaactctacgtatacgcgcaacgcgacaccgtctacgactccgacgatcgctcgtaccccaacgtctacgcgctacgcctacgcgctcgacacacgccccgcgcgcaccccgatcacctacacaaaacgcgcgacga

SEQ ID NO: 21315 - DNA, 692 bp, Artificial Sequence
  chemically treated genomic DNA (Homo sapiens) CpG-island No: 21315
gtttcgattgggtttcggtttttttaagagtttaatcggaggtcggagagttgttttcggggcgattttttagttcggagattcgggtcgcgggtatcgcgcgggtttcgggttggagtagcggtttgcgggcgtttcgcggtgtaggttcggttaattagcggtcgcggggcgggagcggtgattgttcggcgggcgcggagcggagcgcgaagtagaggcgtcgtcgttgtttcggagtaagttatgtcgcgtttgtttttgtttttgtcgttgttgtttttgttgttgttgtcgttgttgtcgtcgttgttttcgagttttgggattcgcgacgtgggcggtcggcgttttaagtgtggttcgtgtcggttagagggttgttcggcgtttgcgttttgttcggcgttcgggatttcggcgttcgacgagtgcggttgttgcgttcgttgtttgggagtcgagggcgcgagttgcgggggtcgcgtcggcgggcgttgtggtttcggtttggtatgcgcgagttaggtcgttggggtagcgttcgagggtatcgggttttgcgtgtgcgcgtagcgcggtatcgtttgcggtttcgacggtcgttcgtattttagcgtttgcgcgttgcgtttgcgcgttcggtatacgtttcgcgcgtatttcggttatttgtataaggcgcgcgacgg

SEQ ID NO: 21316 - DNA, 692 bp, Artificial Sequence
  chemically treated genomic DNA (Homo sapiens) CpG-island No: 21316
ccgtcgcgcgccttatacaaataaccgaaatacgcgcgaaacgtataccgaacgcgcaaacgcaacgcgcaaacgctaaaatacgaacgaccgtcgaaaccgcaaacgataccgcgctacgcgcacacgcaaaacccgataccctcgaacgctaccccaacgacctaactcgcgcataccaaaccgaaaccacaacgcccgccgacgcgacccccgcaactcgcgccctcgactcccaaacaacgaacgcaacaaccgcactcgtcgaacgccgaaatcccgaacgccgaacaaaacgcaaacgccgaacaaccctctaaccgacacgaaccacacttaaaacgccgaccgcccacgtcgcgaatcccaaaactcgaaaacaacgacgacaacaacgacaacaacaacaaaaacaacaacgacaaaaacaaaaacaaacgcgacataacttactccgaaacaacgacgacgcctctacttcgcgctccgctccgcgcccgccgaacaatcaccgctcccgccccgcgaccgctaattaaccgaacctacaccgcgaaacgcccgcaaaccgctactccaacccgaaacccgcgcgatacccgcgacccgaatctccgaactaaaaaatcgccccgaaaacaactctccgacctccgattaaactcttaaaaaaaccgaaacccaatcgaaac

SEQ ID NO: 21317 - DNA, 693 bp, Artificial Sequence
  chemically treated genomic DNA (Homo sapiens) CpG-island No: 21317
aaggtcgcggtggtggttgtgtttagtttcggggttatagaggtttacgtttcgcggatcggggtcggaaggcgtcgtgggtttttcgcggttagttttcgaagtttttttacgttcgtaggttttattttgagtgtttcgtaggcggttgttattagtaggaaagttttttcggcgttttgcggcgttcgttcggggttttcgttttcgggttggggtcggtagcggttagggtggtagcgtcgggttagttggcggtaggttcgcgcgattttcgttttgttcgtcgagcggtttacgtttagtatttcgtagtagtttcgcgtgtcgtagtagagtttttttattagggttttcgcgggtcgtattagtagtagcgtcggtagtaggggcgttagtagtatttattagcgtcggtcggtagtttcggttttttagtcgggagagagtagcggcgtttttatttttagtttcgttggcggttttgttattttagcgattttgtagtatttagtcgcgcgttcggttagtttcgtttggttttagttatacgttagtagtcgacgttttcgcgtaggcgtatagggcgcggttatagtaattatttttttcgtaattcgttggtagggagaaggacgttttagttattaggttgttttcggtgtgttattgaatatttttttcgtattagta

SEQ ID NO: 21318 - DNA, 693 bp, Artificial Sequence
  chemically treated genomic DNA (Homo sapiens) CpG-island No: 21318
tactaatacgaaaaaaatattcaataacacaccgaaaacaacctaataactaaaacgtccttctccctaccaacgaattacgaaaaaaataattactataaccgcgccctatacgcctacgcgaaaacgtcgactactaacgtataactaaaaccaaacgaaactaaccgaacgcgcgactaaatactacaaaatcgctaaaataacaaaaccgccaacgaaactaaaaataaaaacgccgctactctctcccgactaaaaaaccgaaactaccgaccgacgctaataaatactactaacgcccctactaccgacgctactactaatacgacccgcgaaaaccctaataaaaaaactctactacgacacgcgaaactactacgaaatactaaacgtaaaccgctcgacgaacaaaacgaaaatcgcgcgaacctaccgccaactaacccgacgctaccaccctaaccgctaccgaccccaacccgaaaacgaaaaccccgaacgaacgccgcaaaacgccgaaaaaactttcctactaataacaaccgcctacgaaacactcaaaataaaacctacgaacgtaaaaaaacttcgaaaactaaccgcgaaaaacccacgacgccttccgaccccgatccgcgaaacgtaaacctctataaccccgaaactaaacacaaccaccaccgcgacctt

SEQ ID NO: 21319 - DNA, 693 bp, Artificial Sequence
  chemically treated genomic DNA (Homo sapiens) CpG-island No: 21319
tgttggtacggggaaggtgtttagtgatatatcggaagtagtttagtggttgaggcgtttttttttttattaacgggttgcgaaggaagtagttgttgtagtcgcgttttgtgcgtttgcgcggaggcgtcggttgttgacgtgtagttggggttagacgggattagtcgggcgcgcggttgagtgttgtagaatcgttggggtggtagagtcgttagcgaggttggggatgggggcgtcgttgttttttttcggttggggagtcggggttgtcggtcggcgttggtggatgttgttggcgtttttgttgtcggcgttgttgttggtgcggttcgcgggggttttggtggaggggttttattgcggtacgcgggattgttacgaggtgttgggcgtgagtcgttcggcgggtaaggcggagatcgcgcgggtttatcgttagttggttcggcgttattattttgatcgttatcggttttagttcggagacgagggtttcgggcggacgtcgtagagcgtcgaggaggtttttttgttggtggtaatcgtttacgagatatttaaggtgaggtttgcgggcgtggaggggtttcgaagattggtcgcgggaagtttacggcgtttttcgatttcggttcgcggagcgtgggtttttgtgatttcgaaattgagtatagttattatcgcgatttt

SEQ ID NO: 21320 - DNA, 693 bp, Artificial Sequence
  chemically treated genomic DNA (Homo sapiens) CpG-island No: 21320
aaaatcgcgataataactatactcaatttcgaaatcacaaaaacccacgctccgcgaaccgaaatcgaaaaacgccgtaaacttcccgcgaccaatcttcgaaacccctccacgcccgcaaacctcaccttaaatatctcgtaaacgattaccaccaacaaaaaaacctcctcgacgctctacgacgtccgcccgaaaccctcgtctccgaactaaaaccgataacgatcaaaataataacgccgaaccaactaacgataaacccgcgcgatctccgccttacccgccgaacgactcacgcccaacacctcgtaacaatcccgcgtaccgcaataaaacccctccaccaaaacccccgcgaaccgcaccaacaacaacgccgacaacaaaaacgccaacaacatccaccaacgccgaccgacaaccccgactccccaaccgaaaaaaaacaacgacgcccccatccccaacctcgctaacgactctaccaccccaacgattctacaacactcaaccgcgcgcccgactaatcccgtctaaccccaactacacgtcaacaaccgacgcctccgcgcaaacgcacaaaacgcgactacaacaactacttccttcgcaacccgttaataaaaaaaaaaacgcctcaaccactaaactacttccgatatatcactaaacaccttccccgtaccaaca

SEQ ID NO: 21321 - DNA, 600 bp, Artificial Sequence
  chemically treated genomic DNA (Homo sapiens) CpG-island No: 21321
cggtattttttgcgtttttcgaggaattgattacggtcgttttttggagtgggcgtatttttagggatcgggatcgattacgatcgcggggttttttaggcgcggttttttttcgttaggttcgggttttcggtttgtttcgcgtttttttttatcgcggattttatcgttttcgcgtttcgtcgaggtttcgtcgtcgttatcgagtttttcgttggcgttcggttcgggtcgtcggttttttttttttacgtttcgcgggcggaaggatcggagcgtgggtattcggggttcgtattttgattttttttacgttagtttttaatttgagttgttttattaagcgttgtagggcgttcgcgttagtttcggaggatatggcggcggcgttgggtttttaggggttgttgggttcggtcgggcggggaggagtcgttagtttcgagcgcgggtgtcgtttcggggcggggaagtagttgcgttcgtttcgtcgttttagtttattcggcgcggagtcgtttgttagagatagcggggattttagcgagttggtagtgtttttcgttttttagcgtttgaaatttgggtggtatttgtagt

SEQ ID NO: 21322 - DNA, 600 bp, Artificial Sequence
  chemically treated genomic DNA (Homo sapiens) CpG-island No: 21322
actacaaataccacccaaatttcaaacgctaaaaaacgaaaaacactaccaactcgctaaaatccccgctatctctaacaaacgactccgcgccgaataaactaaaacgacgaaacgaacgcaactacttccccgccccgaaacgacacccgcgctcgaaactaacgactcctccccgcccgaccgaacccaacaacccctaaaaacccaacgccgccgccatatcctccgaaactaacgcgaacgccctacaacgcttaataaaacaactcaaattaaaaactaacgtaaaaaaaatcaaaatacgaaccccgaatacccacgctccgatccttccgcccgcgaaacgtaaaaaaaaaaaaccgacgacccgaaccgaacgccaacgaaaaactcgataacgacgacgaaacctcgacgaaacgcgaaaacgataaaatccgcgataaaaaaaaacgcgaaacaaaccgaaaacccgaacctaacgaaaaaaaaccgcgcctaaaaaaccccgcgatcgtaatcgatcccgatccctaaaaatacgcccactccaaaaaacgaccgtaatcaattcctcgaaaaacgcaaaaaataccg

SEQ ID NO: 21323 - DNA, 600 bp, Artificial Sequence
  chemically treated genomic DNA (Homo sapiens) CpG-island No: 21323
gttgtaggtgttatttaggttttaggcgttgaggagcggagagtattgttagttcgttggggttttcgttgtttttggtaagcggtttcgcgtcgggtgggttggggcggcggggcgggcgtagttgttttttcgtttcggggcggtattcgcgttcggggttggcggttttttttcgttcggtcgggtttagtagtttttaggagtttagcgtcgtcgttatgtttttcggggttagcgcgagcgttttgtagcgtttggtagagtagtttaagttggaggttggcgtggagaggattaaggtgcgggtttcgggtatttacgtttcggttttttcgttcgcggggcgtgagaagaggaggtcggcggttcggatcgggcgttagcgggggattcggtggcggcggcgaggtttcggcggggcgcgggggcggtggggttcgcggtgagggagggcgcggggtaagtcgggggttcgggtttgacgggaggaagtcgcgtttggggggtttcgcggtcgtggtcggtttcggtttttgggggtgcgtttattttagaaggcggtcgtggttagtttttcggagggcgtaagggatgtcg

SEQ ID NO: 21324 - DNA, 600 bp, Artificial Sequence
  chemically treated genomic DNA (Homo sapiens) CpG-island No: 21324
cgacatcccttacgccctccgaaaaactaaccacgaccgccttctaaaataaacgcacccccaaaaaccgaaaccgaccacgaccgcgaaaccccccaaacgcgacttcctcccgtcaaacccgaacccccgacttaccccgcgccctccctcaccgcgaaccccaccgcccccgcgccccgccgaaacctcgccgccgccaccgaatcccccgctaacgcccgatccgaaccgccgacctcctcttctcacgccccgcgaacgaaaaaaccgaaacgtaaatacccgaaacccgcaccttaatcctctccacgccaacctccaacttaaactactctaccaaacgctacaaaacgctcgcgctaaccccgaaaaacataacgacgacgctaaactcctaaaaactactaaacccgaccgaacgaaaaaaaaccgccaaccccgaacgcgaataccgccccgaaacgaaaaaacaactacgcccgccccgccgccccaacccacccgacgcgaaaccgcttaccaaaaacaacgaaaaccccaacgaactaacaatactctccgctcctcaacgcctaaaacctaaataacacctacaac

SEQ ID NO: 21325 - DNA, 858 bp, Artificial Sequence
  chemically treated genomic DNA (Homo sapiens) CpG-island No: 21325
tagggcgcgaggcgttgggtgtaggggaatttagtagttgcgtttattttcggttgtttgtagaacgttgatttttagttttttaaacgttttgttggcgagtttttttagcgcgtatagcggcgaggtttgcgagagtagcgcgcggttcgttaggggtaagtcgttttgcgcgtgtttgttcgcggcggttagtaggtgcgtcgtttcgtatagcgagtaattttttcgtatagacggtttgttgaggatgttttcgatgttgaacggcgttagtggtttgttggagttggtaggcggaggtaggtggtttagcgggttgcgtcgtcgtttttttttcggcgtcgttttgtcgttttttttggaagttatttcggttttgttcggggtttcggtcggggcggttcgggtcgcggggatttagttcgcgggtagttcgggcgtcggacggcgcgggtaggtagcggcgggtggaaaggaggtcgtattgggtagggcgcgggtcgggcgcggggtcgattagcgcggcggttgaggaggggagaatagcgcggggtttcgggaagagggcgttgacgcgggcgtcgttgttgttggggtttttagtaattcggggtcggagtcggggcgcgttgcgcggggttttagtttcgttaatttcggtgttatttaaaggtgttaggtggttcggtagtggtttttggtttcgggttttggcggtcgtagttggaagagtcgaggcgagggcgttcgattttcggattgcgagggaggcggagagacggggtaattgattattgttaataagttagttttgatcgcggtgtaattaattatttgtagcggtatttttttttt

SEQ ID NO: 21326 - DNA, 858 bp, Artificial Sequence
  chemically treated genomic DNA (Homo sapiens) CpG-island No: 21326
aaaaaaaaaataccgctacaaataattaattacaccgcgatcaaaactaacttattaacaataatcaattaccccgtctctccgcctccctcgcaatccgaaaatcgaacgccctcgcctcgactcttccaactacgaccgccaaaacccgaaaccaaaaaccactaccgaaccacctaacacctttaaataacaccgaaattaacgaaactaaaaccccgcgcaacgcgccccgactccgaccccgaattactaaaaaccccaacaacaacgacgcccgcgtcaacgccctcttcccgaaaccccgcgctattctcccctcctcaaccgccgcgctaatcgaccccgcgcccgacccgcgccctacccaatacgacctcctttccacccgccgctacctacccgcgccgtccgacgcccgaactacccgcgaactaaatccccgcgacccgaaccgccccgaccgaaaccccgaacaaaaccgaaataacttccaaaaaaaacgacaaaacgacgccgaaaaaaaaacgacgacgcaacccgctaaaccacctacctccgcctaccaactccaacaaaccactaacgccgttcaacatcgaaaacatcctcaacaaaccgtctatacgaaaaaattactcgctatacgaaacgacgcacctactaaccgccgcgaacaaacacgcgcaaaacgacttacccctaacgaaccgcgcgctactctcgcaaacctcgccgctatacgcgctaaaaaaactcgccaacaaaacgtttaaaaaactaaaaatcaacgttctacaaacaaccgaaaataaacgcaactactaaattcccctacacccaacgcctcgcgcccta

SEQ ID NO: 21327 - DNA, 858 bp, Artificial Sequence
  chemically treated genomic DNA (Homo sapiens) CpG-island No: 21327
gagaaagaagtgtcgttgtagataattgattatatcgcgattaaggttaatttgttagtaatagttaattgtttcgttttttcgtttttttcgtagttcggggatcgggcgttttcgtttcggtttttttaattgcggtcgttaggattcggggttaggagttattgtcgagttatttgatatttttaaatagtatcggggttggcgaaattggagtttcgcgtagcgcgtttcggtttcggtttcggattgttggaagttttagtagtagcggcgttcgcgttagcgtttttttttcggggtttcgcgttgtttttttttttttagtcgtcgcgttaatcggtttcgcgttcggttcgcgttttgtttagtgcggttttttttttattcgtcgttgtttgttcgcgtcgttcggcgttcgagttgttcgcgggttgggttttcgcggttcgagtcgtttcggtcgggatttcgaataaggtcgagatgatttttaaggaggacggtaaggcggcgtcgggggaggagcggcggcgtagttcgttggattatttgttttcgtttgttaattttaataagttattgacgtcgtttagtatcgaggatatttttaataagtcgtttgtgcggagaagttattcgttgtgcggggcggcgtatttgttggtcgtcgcggataagtacgcgtagggcggtttgtttttggcgggtcgcgcgttgttttcgtagatttcgtcgttgtgcgcgttggaggagttcgttagtaagacgtttaaggggttggaggttagcgttttgtaggtagtcgaaggtaggcgtagttgttgggtttttttgtatttagcgtttcgcgttttg

SEQ ID NO: 21328 - DNA, 858 bp, Artificial Sequence
  chemically treated genomic DNA (Homo sapiens) CpG-island No: 21328
caaaacgcgaaacgctaaatacaaaaaaacccaacaactacgcctaccttcgactacctacaaaacgctaacctccaaccccttaaacgtcttactaacgaactcctccaacgcgcacaacgacgaaatctacgaaaacaacgcgcgacccgccaaaaacaaaccgccctacgcgtacttatccgcgacgaccaacaaatacgccgccccgcacaacgaataacttctccgcacaaacgacttattaaaaatatcctcgatactaaacgacgtcaataacttattaaaattaacaaacgaaaacaaataatccaacgaactacgccgccgctcctcccccgacgccgccttaccgtcctccttaaaaatcatctcgaccttattcgaaatcccgaccgaaacgactcgaaccgcgaaaacccaacccgcgaacaactcgaacgccgaacgacgcgaacaaacaacgacgaataaaaaaaaaaccgcactaaacaaaacgcgaaccgaacgcgaaaccgattaacgcgacgactaaaaaaaaaaaaacaacgcgaaaccccgaaaaaaaaacgctaacgcgaacgccgctactactaaaacttccaacaatccgaaaccgaaaccgaaacgcgctacgcgaaactccaatttcgccaaccccgatactatttaaaaatatcaaataactcgacaataactcctaaccccgaatcctaacgaccgcaattaaaaaaaccgaaacgaaaacgcccgatccccgaactacgaaaaaaacgaaaaaacgaaacaattaactattactaacaaattaaccttaatcgcgatataatcaattatctacaacgacacttctttctc

SEQ ID NO: 21329 - DNA, 511 bp, Artificial Sequence
  chemically treated genomic DNA (Homo sapiens) CpG-island No: 21329
atgagcgtgttgggcgggcggtttggggtttcgggcgcggggcgggggtcgagtgggggggtgcgtacggcgggcgtagatgttcgggtgatcgattcgtcgtggtttttgcgtcgtttttgtgtcgaggaggcgcgcgcggggatttaatttattaaattgtttataaattgtgaagaaaatttaaaaattatatggtcgttagcgtcggcgcgttttgggttgcggagggtcgcggtcgtgttcgtatcgggagtcgcggggggttgggttcggttattgtcgtttgttagcggtcgtttaggtttattcgtttcggtttttatggttcgcgtttcgaattatagatttatttattttaagagagggtaatttttgtcgttcgggaggaattagtcgtacgtttgtttcgttgttttgtcgtttttttttttttttgttttttttttttttttttttttttttttattttttttttttttttttgtttttgttttttttttttcgtttt

SEQ ID NO: 21330 - DNA, 511 bp, Artificial Sequence
  chemically treated genomic DNA (Homo sapiens) CpG-island No: 21330
aaaacgaaaaaaaaaaaacaaaaacaaaaaaaaaaaaaaaaaataaaaaaaaaaaaaaaaaaaaaaaaaaaacaaaaaaaaaaaaaaacgacaaaacaacgaaacaaacgtacgactaattcctcccgaacgacaaaaattaccctctcttaaaataaataaatctataattcgaaacgcgaaccataaaaaccgaaacgaataaacctaaacgaccgctaacaaacgacaataaccgaacccaaccccccgcgactcccgatacgaacacgaccgcgaccctccgcaacccaaaacgcgccgacgctaacgaccatataatttttaaattttcttcacaatttataaacaatttaataaattaaatccccgcgcgcgcctcctcgacacaaaaacgacgcaaaaaccacgacgaatcgatcacccgaacatctacgcccgccgtacgcacccccccactcgacccccgccccgcgcccgaaaccccaaaccgcccgcccaacacgctcat

SEQ ID NO: 21331 - DNA, 511 bp, Artificial Sequence
  chemically treated genomic DNA (Homo sapiens) CpG-island No: 21331
gaaacggagaaagggagatagagatagagggagaaaaaaagaatgggaagagaggagaagagagagaaggagtagagaaggaaggagacggtagggtagcggggtaggcgtgcggttggtttttttcgggcgataaaaattgtttttttttaggatggatgggtttgtaattcggagcgcggattatgaaggtcgggacgaatgggtttgggcggtcgttgataggcgataatagtcgggtttagtttttcgcggttttcggtgcgggtacggtcgcggtttttcgtagtttagagcgcgtcggcgttggcgattatatggtttttgaattttttttataatttgtagataatttgatggattaggttttcgcgcgcgttttttcggtataaaggcggcgtagggattacggcgggtcggttattcgggtatttgcgttcgtcgtgcgtatttttttattcggttttcgtttcgcgttcgaagttttaggtcgttcgtttaatacgtttat

SEQ ID NO: 21332 - DNA, 511 bp, Artificial Sequence
  chemically treated genomic DNA (Homo sapiens) CpG-island No: 21332
ataaacgtattaaacgaacgacctaaaacttcgaacgcgaaacgaaaaccgaataaaaaaatacgcacgacgaacgcaaatacccgaataaccgacccgccgtaatccctacgccgcctttataccgaaaaaacgcgcgcgaaaacctaatccatcaaattatctacaaattataaaaaaaattcaaaaaccatataatcgccaacgccgacgcgctctaaactacgaaaaaccgcgaccgtacccgcaccgaaaaccgcgaaaaactaaacccgactattatcgcctatcaacgaccgcccaaacccattcgtcccgaccttcataatccgcgctccgaattacaaacccatccatcctaaaaaaaaacaatttttatcgcccgaaaaaaaccaaccgcacgcctaccccgctaccctaccgtctccttccttctctactccttctctctcttctcctctcttcccattctttttttctccctctatctctatctccctttctccgtttc

SEQ ID NO: 21333 - DNA, 671 bp, Artificial Sequence
  chemically treated genomic DNA (Homo sapiens) CpG-island No: 21333
  unsure (389)
cggaggtcgttggtggcggtcggttcggtcggttagtttgggtttattgtttcgagagggaagaggcggttgttaggagtcgagttcggggtcggggataggggaggaggcgggagttggtagaggaggttttagtttttttcggcggttcggttcgggaggcgttgggttttcgagcgttaggagtttagggcggcggaagattcggggcgtcgtttaatcgtttacgtcgattttttcgtttttttcgtttttcgagtagttttggttgttggtcggttggttcgtgagcggagaggtaggcgagagttgtagggcgttagcgttcggggttttcggggcgtttggggggaggatcggagagtcggttttcgatttggttttgtcgnagacgtcgttatcgtcggttgtggtttttaagttttgttcgagttcgaatagcgttacgatgtttatttgttcgttggggtttagttttttggcggattttacgtcggtttttattttttttaggtttcgtttgagtttagcgcgtcgattttggaattaggtgatgatttgcgcgttggtgaggtttagttgttgcgcgatttggtcgcgatcggcgggggataggtatttttggtatagaaagcgtttttttaatttataaatattggtggttggtgaag

SEQ ID NO: 21334 - DNA, 671 bp, Artificial Sequence
  chemically treated genomic DNA (Homo sapiens) CpG-island No: 21334
  unsure (283)
cttcaccaaccaccaatatttataaattaaaaaaacgctttctataccaaaaatacctatcccccgccgatcgcgaccaaatcgcgcaacaactaaacctcaccaacgcgcaaatcatcacctaattccaaaatcgacgcgctaaactcaaacgaaacctaaaaaaaataaaaaccgacgtaaaatccgccaaaaaactaaaccccaacgaacaaataaacatcgtaacgctattcgaactcgaacaaaacttaaaaaccacaaccgacgataacgacgtctncgacaaaaccaaatcgaaaaccgactctccgatcctccccccaaacgccccgaaaaccccgaacgctaacgccctacaactctcgcctacctctccgctcacgaaccaaccgaccaacaaccaaaactactcgaaaaacgaaaaaaacgaaaaaatcgacgtaaacgattaaacgacgccccgaatcttccgccgccctaaactcctaacgctcgaaaacccaacgcctcccgaaccgaaccgccgaaaaaaactaaaacctcctctaccaactcccgcctcctcccctatccccgaccccgaactcgactcctaacaaccgcctcttccctctcgaaacaataaacccaaactaaccgaccgaaccgaccgccaccaacgacctccg

SEQ ID NO: 21335 - DNA, 671 bp, Artificial Sequence
  chemically treated genomic DNA (Homo sapiens) CpG-island No: 21335
  unsure (283)
ttttattaattattagtatttatgaattggaaaagcgttttttatattagaagtatttgtttttcgtcgatcgcgattaaatcgcgtagtagttgggttttattaacgcgtaagttattatttggttttagaatcggcgcgttaagtttaagcgggatttggaggagatgaaggtcgacgtagagttcgttaagaaattgggttttagcgggtagatggatatcgtggcgttgttcgaattcgagtagaatttggaggttatagtcggcggtggcggcgtttncggtagggttaagtcgaggatcggtttttcggttttttttttaggcgtttcgaaggtttcgggcgttggcgttttgtagttttcgtttgttttttcgtttacggattagtcggttagtagttaggattgttcggaggacgaggaagacgaagagatcgacgtggacgattgagcggcgtttcgggtttttcgtcgttttgggtttttagcgttcgaaagtttaacgtttttcggatcggatcgtcgaggggagttgggattttttttgttaattttcgtttttttttttgttttcggtttcggattcggtttttggtagtcgttttttttttttcgaagtaataaatttaggttggtcggtcgggtcggtcgttattagcggttttcg

SEQ ID NO: 21336 - DNA, 671 bp, Artificial Sequence
  chemically treated genomic DNA (Homo sapiens) CpG-island No: 21336
  unsure (389)
cgaaaaccgctaataacgaccgacccgaccgaccaacctaaatttattacttcgaaaaaaaaaaaacgactaccaaaaaccgaatccgaaaccgaaaacaaaaaaaaaaacgaaaattaacaaaaaaaatcccaactcccctcgacgatccgatccgaaaaacgttaaactttcgaacgctaaaaacccaaaacgacgaaaaacccgaaacgccgctcaatcgtccacgtcgatctcttcgtcttcctcgtcctccgaacaatcctaactactaaccgactaatccgtaaacgaaaaaacaaacgaaaactacaaaacgccaacgcccgaaaccttcgaaacgcctaaaaaaaaaaccgaaaaaccgatcctcgacttaaccctaccgnaaacgccgccaccgccgactataacctccaaattctactcgaattcgaacaacgccacgatatccatctacccgctaaaacccaatttcttaacgaactctacgtcgaccttcatctcctccaaatcccgcttaaacttaacgcgccgattctaaaaccaaataataacttacgcgttaataaaacccaactactacgcgatttaatcgcgatcgacgaaaaacaaatacttctaatataaaaaacgcttttccaattcataaatactaataattaataaaa

SEQ ID NO: 21337 - DNA, 741 bp, Artificial Sequence
  chemically treated genomic DNA (Homo sapiens) CpG-island No: 21337
acgttttttacgtcggagaaagttgttattgtcgaatatgttttgggaggcggggtttaggttttagtagttgtttttgtttgggcggttcggttcgcgggggattttgacgaagtagtcgtttagcgagaggttgtggcggatgttgttttgttaggcggggaatttgcggcggtagtaggggaagcggttattaatgaaggcgtagatgtcgttgagcgtgaggcgtttgtgcgggttttgtaggatggttatggtgatgagcgcgatgtacgagtaggggggttttgtcggttgtcgggtatttttagaggtcgtcgtagattttggcggtgttttgaattcggtgttaaattttgaggggtcgttcgggtcgtcgtcgttttcgatgtgttttcggggaagcgtaatttcgttttatcgggttatttgtagtttcggttggagcgattgttttaggaattgttggttcgttttttttttttcgttttttatttcgtttttatttttttttttttttaggatatcgattttatcgttttttttatcggagtttcggaggttgcgttgcggtgtggagcgaaggcgtttagtttttggtaagtttatggcggagtaggtgttttagtcgtaggggatgtggcggtcgattatttggttcggggcgggttgagttggaagttcgggatgaatgttgtaagaagtaggaacgttagtggttattttttgggatgttttttt

SEQ ID NO: 21338 - DNA, 741 bp, Artificial Sequence
  chemically treated genomic DNA (Homo sapiens) CpG-island No: 21338
aaaaaaacatcccaaaaaataaccactaacgttcctacttcttacaacattcatcccgaacttccaactcaacccgccccgaaccaaataatcgaccgccacatcccctacgactaaaacacctactccgccataaacttaccaaaaactaaacgccttcgctccacaccgcaacgcaacctccgaaactccgataaaaaaaacgataaaatcgatatcctaaaaaaaaaaaaaaataaaaacgaaataaaaaacgaaaaaaaaaaaacgaaccaacaattcctaaaacaatcgctccaaccgaaactacaaataacccgataaaacgaaattacgcttccccgaaaacacatcgaaaacgacgacgacccgaacgacccctcaaaatttaacaccgaattcaaaacaccgccaaaatctacgacgacctctaaaaatacccgacaaccgacaaaacccccctactcgtacatcgcgctcatcaccataaccatcctacaaaacccgcacaaacgcctcacgctcaacgacatctacgccttcattaataaccgcttcccctactaccgccgcaaattccccgcctaacaaaacaacatccgccacaacctctcgctaaacgactacttcgtcaaaatcccccgcgaaccgaaccgcccaaacaaaaacaactactaaaacctaaaccccgcctcccaaaacatattcgacaataacaactttctccgacgtaaaaaacgt

SEQ ID NO: 21339 - DNA, 741 bp, Artificial Sequence
  chemically treated genomic DNA (Homo sapiens) CpG-island No: 21339
aggaaaatattttaaagggtaattattagcgtttttgttttttgtaatatttatttcgggtttttagtttagttcgtttcgggttaggtgatcggtcgttatattttttgcgattgaagtatttgtttcgttatgaatttgttaagagttgagcgttttcgttttatatcgtagcgtagttttcgggatttcgatggggaagacggtaaaatcgatgttttgggagaggaggaagatgaagacgaggtggaagacgaggaggaggaggcgagttagtagtttttagagtagtcgttttagtcggggttgtaggtggttcggtggggcggggttgcgttttttcgagagtatatcgagggcggcggcggttcgagcgattttttagagtttggtatcgagtttagggtatcgttaaggtttgcggcggtttttgaagatgttcggtagtcggtaaagtttttttattcgtatatcgcgtttattattatggttattttgtaaagttcgtataagcgttttacgtttagcggtatttgcgtttttattagtggtcgttttttttattatcgtcgtaagtttttcgtttggtagaatagtattcgttataatttttcgttgaacgattgtttcgttaagatttttcgcgagtcgggtcgtttaggtaagggtaattattggagtttggatttcgttttttaggatatgttcgataatggtagtttttttcggcgtaggaagcgt

SEQ ID NO: 21340 - DNA, 741 bp, Artificial Sequence
  chemically treated genomic DNA (Homo sapiens) CpG-island No: 21340
acgcttcctacgccgaaaaaaactaccattatcgaacatatcctaaaaaacgaaatccaaactccaataattacccttacctaaacgacccgactcgcgaaaaatcttaacgaaacaatcgttcaacgaaaaattataacgaatactattctaccaaacgaaaaacttacgacgataataaaaaaaacgaccactaataaaaacgcaaataccgctaaacgtaaaacgcttatacgaactttacaaaataaccataataataaacgcgatatacgaataaaaaaactttaccgactaccgaacatcttcaaaaaccgccgcaaaccttaacgataccctaaactcgataccaaactctaaaaaatcgctcgaaccgccgccgccctcgatatactctcgaaaaaacgcaaccccgccccaccgaaccacctacaaccccgactaaaacgactactctaaaaactactaactcgcctcctcctcctcgtcttccacctcgtcttcatcttcctcctctcccaaaacatcgattttaccgtcttccccatcgaaatcccgaaaactacgctacgatataaaacgaaaacgctcaactcttaacaaattcataacgaaacaaatacttcaatcgcaaaaaatataacgaccgatcacctaacccgaaacgaactaaactaaaaacccgaaataaatattacaaaaaacaaaaacgctaataattaccctttaaaatattttcct

SEQ ID NO: 21341 - DNA, 517 bp, Artificial Sequence
  chemically treated genomic DNA (Homo sapiens) CpG-island No: 21341
tcgagcgcggagggtcgggaggcgcggggaggttttttattcgttttattgtttttttcgttaatgacgtcgatgatagcgatagcgtcggtcgagtgttttttttttgtttcgggttcgttaggtatcgggtttttttttagtattcgtagtacgtattgaagaagacgttacggaagttttcgttttttagattcgggggaattaggaaacgcgttcggcgattttcgggtagtagtatcgggttaggtttgttttcggaatcgttgattttattcgtcgtttttttcgtttgggtttttcgcgggtcgtaggggtggaagttcgatttgggttagggttcggatttttttttttcggtttttgcgttatcgttttcggtgtaggacgcgttttgttttcgtcgagatttagacgcgtcgaaagtttcgcgcgggtagtttttcgttttacgtttcgggttgcgcgttttttcgcgaagtttttgtcgagtgcgcgtaacggcgtcgacggattt

SEQ ID NO: 21342 - DNA, 517 bp, Artificial Sequence
  chemically treated genomic DNA (Homo sapiens) CpG-island No: 21342
aaatccgtcgacgccgttacgcgcactcgacaaaaacttcgcgaaaaaacgcgcaacccgaaacgtaaaacgaaaaactacccgcgcgaaactttcgacgcgtctaaatctcgacgaaaacaaaacgcgtcctacaccgaaaacgataacgcaaaaaccgaaaaaaaaaaatccgaaccctaacccaaatcgaacttccacccctacgacccgcgaaaaacccaaacgaaaaaaacgacgaataaaatcaacgattccgaaaacaaacctaacccgatactactacccgaaaatcgccgaacgcgtttcctaattcccccgaatctaaaaaacgaaaacttccgtaacgtcttcttcaatacgtactacgaatactaaaaaaaaacccgatacctaacgaacccgaaacaaaaaaaaaacactcgaccgacgctatcgctatcatcgacgtcattaacgaaaaaaacaataaaacgaataaaaaacctccccgcgcctcccgaccctccgcgctcga

SEQ ID NO: 21343 - DNA, 517 bp, Artificial Sequence
  chemically treated genomic DNA (Homo sapiens) CpG-island No: 21343
gagttcgtcggcgtcgttgcgcgtattcgatagaggtttcgcgggagaacgcgtagttcggggcgtggggcggggaattgttcgcgcgaggttttcggcgcgtttgggtttcggcgagagtaaagcgcgttttgtatcgggggcggtggcgtagaggtcgggaggaagaaattcgggttttggtttaggtcgggtttttatttttgcgattcgcgagaggtttaggcgggaaaggcggcgagtggagttagcggtttcgaaagtaaatttggttcggtgttattgttcgagggtcgtcgggcgcgttttttaattttttcgagtttggaaaacggagattttcgtagcgttttttttagtgcgtgttgcgagtgttgaaggaggattcggtgtttggcggattcggagtaggggggaagtattcggtcgacgttgtcgttgttatcggcgttattggcggggaggatagtggggcgggtaaggggttttttcgcgtttttcggtttttcgcgttcgg

SEQ ID NO: 21344 - DNA, 517 bp, Artificial Sequence
  chemically treated genomic DNA (Homo sapiens) CpG-island No: 21344
ccgaacgcgaaaaaccgaaaaacgcgaaaaaaccccttacccgccccactatcctccccgccaataacgccgataacaacgacaacgtcgaccgaatacttcccccctactccgaatccgccaaacaccgaatcctccttcaacactcgcaacacgcactaaaaaaaacgctacgaaaatctccgttttccaaactcgaaaaaattaaaaaacgcgcccgacgaccctcgaacaataacaccgaaccaaatttactttcgaaaccgctaactccactcgccgcctttcccgcctaaacctctcgcgaatcgcaaaaataaaaacccgacctaaaccaaaacccgaatttcttcctcccgacctctacgccaccgcccccgatacaaaacgcgctttactctcgccgaaacccaaacgcgccgaaaacctcgcgcgaacaattccccgccccacgccccgaactacgcgttctcccgcgaaacctctatcgaatacgcgcaacgacgccgacgaactc

SEQ ID NO: 21345 - DNA, 590 bp, Artificial Sequence
  chemically treated genomic DNA (Homo sapiens) CpG-island No: 21345
ggcggcgggggcgttttttttgtggcgcggggttggtcggttgtcggggttcggattttttcgggtgttcgggcgtcgtcgtcgtcgtcgtcgtcgtcgtcgtttttgcgttttcgtttgtttcggcgtttcgtcggcgagttcgttttttcgcgtttaaggatagttatcgcgttttttttaaacgttaaagagagagagcgaattatcgggttgcgggcgcgtcgcggtcgaggcgggggtcggggcgcgtagtttggttttaggcggttgtagttgttgttgttgtttaggatttaattttttatttcggtttcgtcgtcgttatcgttcggtttttttcgcgcgttgtcgtcggtttcgcgtcgttcgcggggatggtgtgcgttcgttcggtcgttcggagtttttcgtattttcggttcgggtcgcggcgcgttgttcgtcgtcgagggtagagagggggcggcggtttaggggcggggaggggatcgtgcgttttttttcgggtttttttttttttcgggaaggtttattttcgtttagtttttttttgtttttggttttatttttttttttttgattacgat

SEQ ID NO: 21346 - DNA, 590 bp, Artificial Sequence
  chemically treated genomic DNA (Homo sapiens) CpG-island No: 21346
atcgtaatcaaaaaaaaaaaaataaaaccaaaaacaaaaaaaaactaaacgaaaataaaccttcccgaaaaaaaaaaaaacccgaaaaaaaacgcacgatcccctccccgcccctaaaccgccgccccctctctaccctcgacgacgaacaacgcgccgcgacccgaaccgaaaatacgaaaaactccgaacgaccgaacgaacgcacaccatccccgcgaacgacgcgaaaccgacgacaacgcgcgaaaaaaaccgaacgataacgacgacgaaaccgaaataaaaaattaaatcctaaacaacaacaacaactacaaccgcctaaaaccaaactacgcgccccgacccccgcctcgaccgcgacgcgcccgcaacccgataattcgctctctctctttaacgtttaaaaaaaacgcgataactatccttaaacgcgaaaaaacgaactcgccgacgaaacgccgaaacaaacgaaaacgcaaaaacgacgacgacgacgacgacgacgacgacgcccgaacacccgaaaaaatccgaaccccgacaaccgaccaaccccgcgccacaaaaaaaacgcccccgccgcc

SEQ ID NO: 21347 - DNA, 590 bp, Artificial Sequence
  chemically treated genomic DNA (Homo sapiens) CpG-island No: 21347
atcgtgattaggaaaaaggaaatgaaattagagatagagggaagttgagcgaaaatagattttttcgagagaggaggaagttcggagagagacgtacggtttttttttcgtttttaggtcgtcgttttttttttgttttcggcggcgagtagcgcgtcgcgattcgggtcgaaggtgcgaggggtttcgggcggtcgggcgggcgtatattattttcgcgggcggcgcggagtcggcgatagcgcgcgagagggatcgggcggtggcggcggcgggatcgggatggaaggttaagttttgagtagtagtagtagttgtagtcgtttggagttaggttgcgcgtttcggttttcgtttcggtcgcggcgcgttcgtagttcggtgattcgttttttttttttggcgtttgaagggagcgcggtgattgtttttgagcgcggaggggcgagttcgtcggcggagcgtcggagtaagcggaggcgtaggagcggcggcgacggcggcggcggcggcggcgttcgagtattcgagggggttcgagtttcggtagtcggttagtttcgcgttataaagggagcgttttcgtcgtt

SEQ ID NO: 21348 - DNA, 590 bp, Artificial Sequence
  chemically treated genomic DNA (Homo sapiens) CpG-island No: 21348
aacgacgaaaacgctccctttataacgcgaaactaaccgactaccgaaactcgaaccccctcgaatactcgaacgccgccgccgccgccgccgtcgccgccgctcctacgcctccgcttactccgacgctccgccgacgaactcgcccctccgcgctcaaaaacaatcaccgcgctcccttcaaacgccaaaaaaaaaaaacgaatcaccgaactacgaacgcgccgcgaccgaaacgaaaaccgaaacgcgcaacctaactccaaacgactacaactactactactactcaaaacttaaccttccatcccgatcccgccgccgccaccgcccgatccctctcgcgcgctatcgccgactccgcgccgcccgcgaaaataatatacgcccgcccgaccgcccgaaacccctcgcaccttcgacccgaatcgcgacgcgctactcgccgccgaaaacaaaaaaaaaacgacgacctaaaaacgaaaaaaaaaccgtacgtctctctccgaacttcctcctctctcgaaaaaatctattttcgctcaacttccctctatctctaatttcatttcctttttcctaatcacgat

SEQ ID NO: 21349 - DNA, 1022 bp, Artificial Sequence
  chemically treated genomic DNA (Homo sapiens) CpG-island No: 21349
cgtttaaagatcggttcggcgtatgttgcgttaggtcgcgcgttcggttttataaaaaaggtatcgtcgcgggggcggggtttgcgcgatagtgagaagtggtttcgtttttcgtttcgtttttcgtttcgtttcggtcgtttcgcggtttgttggcggttacgttgtttgcggcgggcggttttgtttttattgagagggcgagtttcgggcgggggcgcgaggatcgttcggggacggtttggcgtagggtcgttattagtttttatcggtttttggggtaggagagagagaacgcgtcggcggagggcgcggggagggtcggagagttcggggtagttttttattttttttatttatttcgtcgtcggagaaagtcgggttcgtagcgtcgaagcgtttttcggcgggtgcgcggcggttacggtggtttcgtttattgtttttgtagatatttttttttcggttaggcgtcgttttgcggtcggatttttatttttttttttaattcgagtcggcggtgcgcgttatttttcggggtttatttttggggcgtaggtttgcgcgcgcgatttcgttcgttaggttttttcgttttcgtcgtcgggatttcggtttcgagaatttcgacgaaagtcggtttttgtttttaagtcgttttggggaagtgagttaagtttttagcggggtcggcggcggcgtttatttagttcgtttagtaggaaggattcgttttttttttgcgtttcggttttttttttgtggcggggtcgtagtagggattcgagtcgggttttggttagcgcgttttgtattttttttatgggtagcgggcggcggggcgcgcggtagacgagagcgatcggcgagtattgacgtttttttgaaggagtcgtcgtgatttaggtcgggtaagattttttgtttcgagttttaaaataaataaatggtttttgtgtacggtcgggtcgttttcgaaaacgttttttttgtgtttttggttaaaattaagtaaggttgaa

SEQ ID NO: 21350 - DNA, 1022 bp, Artificial Sequence
  chemically treated genomic DNA (Homo sapiens) CpG-island No: 21350
ttcaaccttacttaattttaaccaaaaacacaaaaaaaacgttttcgaaaacgacccgaccgtacacaaaaaccatttatttattttaaaactcgaaacaaaaaatcttacccgacctaaatcacgacgactccttcaaaaaaacgtcaatactcgccgatcgctctcgtctaccgcgcgccccgccgcccgctacccataaaaaaaatacaaaacgcgctaaccaaaacccgactcgaatccctactacgaccccgccacaaaaaaaaaaccgaaacgcaaaaaaaaaacgaatccttcctactaaacgaactaaataaacgccgccgccgaccccgctaaaaacttaactcacttccccaaaacgacttaaaaacaaaaaccgactttcgtcgaaattctcgaaaccgaaatcccgacgacgaaaacgaaaaaacctaacgaacgaaatcgcgcgcgcaaacctacgccccaaaaataaaccccgaaaaataacgcgcaccgccgactcgaattaaaaaaaaaaataaaaatccgaccgcaaaacgacgcctaaccgaaaaaaaaatatctacaaaaacaataaacgaaaccaccgtaaccgccgcgcacccgccgaaaaacgcttcgacgctacgaacccgactttctccgacgacgaaataaataaaaaaaataaaaaactaccccgaactctccgaccctccccgcgccctccgccgacgcgttctctctctcctaccccaaaaaccgataaaaactaataacgaccctacgccaaaccgtccccgaacgatcctcgcgcccccgcccgaaactcgccctctcaataaaaacaaaaccgcccgccgcaaacaacgtaaccgccaacaaaccgcgaaacgaccgaaacgaaacgaaaaacgaaacgaaaaacgaaaccacttctcactatcgcgcaaaccccgcccccgcgacgataccttttttataaaaccgaacgcgcgacctaacgcaacatacgccgaaccgatctttaaacg

SEQ ID NO: 21351 - DNA, 1022 bp, Artificial Sequence
  chemically treated genomic DNA (Homo sapiens) CpG-island No: 21351
tttagttttgtttggttttggttaaaagtataaaaaaggcgttttcggaagcgattcgatcgtgtataagggttatttgtttgttttgggattcggggtaggaaattttgttcggtttgagttacggcggtttttttaaggaaacgttagtgttcgtcggtcgttttcgtttgtcgcgcgtttcgtcgttcgttgtttatgggggagatgtagggcgcgttggttagagttcggttcgagtttttgttgcggtttcgttataaaaagagggtcgaggcgtagaaaaggagcgagttttttttgttgagcggattgggtaagcgtcgtcgtcggtttcgttgggggtttggtttatttttttagagcggtttggaggtaggggtcggttttcgtcggagttttcggggtcggggtttcggcggcgggaacgggaggatttggcgggcgaggtcgcgcgcgtaggtttgcgttttagggataaatttcggagggtggcgcgtatcgtcggttcgggttggggaggagggtgggagttcggtcgtaggacggcgtttggtcggggagagggtatttgtagggatagtgagcgaagttatcgtggtcgtcgcgtattcgtcgggaagcgtttcggcgttgcgaattcggtttttttcggcggcggaataaatgagagaggtggaaaattatttcgggtttttcggtttttttcgcgtttttcgtcggcgcgtttttttttttttgttttaggagtcgatggagattgataacggttttgcgttaggtcgttttcgggcggttttcgcgttttcgttcggggttcgtttttttaatggggatagaatcgttcgtcgtaggtagcgtagtcgttagtaaatcgcgaggcggtcggggcggggcgaggggcgaggcgaagggcggggttattttttattgtcgcgtaggtttcgttttcgcggcggtgttttttttataaggtcgagcgcgcggtttggcgtagtatacgtcgagtcggtttttgagcg

SEQ ID NO: 21352 - DNA, 1022 bp, Artificial Sequence
  chemically treated genomic DNA (Homo sapiens) CpG-island No: 21352
cgctcaaaaaccgactcgacgtatactacgccaaaccgcgcgctcgaccttataaaaaaaacaccgccgcgaaaacgaaacctacgcgacaataaaaaataaccccgcccttcgcctcgcccctcgccccgccccgaccgcctcgcgatttactaacgactacgctacctacgacgaacgattctatccccattaaaaaaacgaaccccgaacgaaaacgcgaaaaccgcccgaaaacgacctaacgcaaaaccgttatcaatctccatcgactcctaaaacaaaaaaaaaaaaacgcgccgacgaaaaacgcgaaaaaaaccgaaaaacccgaaataattttccacctctctcatttattccgccgccgaaaaaaaccgaattcgcaacgccgaaacgcttcccgacgaatacgcgacgaccacgataacttcgctcactatccctacaaataccctctccccgaccaaacgccgtcctacgaccgaactcccaccctcctccccaacccgaaccgacgatacgcgccaccctccgaaatttatccctaaaacgcaaacctacgcgcgcgacctcgcccgccaaatcctcccgttcccgccgccgaaaccccgaccccgaaaactccgacgaaaaccgacccctacctccaaaccgctctaaaaaaataaaccaaacccccaacgaaaccgacgacgacgcttacccaatccgctcaacaaaaaaaactcgctccttttctacgcctcgaccctctttttataacgaaaccgcaacaaaaactcgaaccgaactctaaccaacgcgccctacatctcccccataaacaacgaacgacgaaacgcgcgacaaacgaaaacgaccgacgaacactaacgtttccttaaaaaaaccgccgtaactcaaaccgaacaaaatttcctaccccgaatcccaaaacaaacaaataacccttatacacgatcgaatcgcttccgaaaacgccttttttatacttttaaccaaaaccaaacaaaactaaa

SEQ ID NO: 21353 - DNA, 876 bp, Artificial Sequence
  chemically treated genomic DNA (Homo sapiens) CpG-island No: 21353
ggcgcggggcggatttttttaatttttttttcgcgttttcgaaagagcggcgtattagtagtcgaattgtcggcgtttaggttttttggttcggtcgggatgcggtcggtattcgtttttcgtcgggaataatttttttattttttttgtagggagttggtgttagtcgatagtcgcgttagggtcgtttcgggtattagggtcggatcgggtgacgtcgcgaatttgcgtttggtcgttaagtcggtttttaggttgaagaaggattcgtttcggttttgattcgggtttcgtttttttagtcggggtatcgagtttcggttttagttgttcgtttttattcgtcggtattcgttcggttcgttcgttttcgtatttagtttacgcgttatagttatgtgttttcgagtcgcgcgggcgttcgcgacgttatttttcgttttgggcgcggtgttgtggtttgcggttggcgtttgggagtttacgattttgtatattaacgacgtgtatagtcggttggagtagattagcgaggattttagtaagtgcgttaacgttagtcgttgtatgggtggcgtggttcggttttttattaaggtttagtagattcgtcgcgtcgaatttaacgtgttgttgttggacgtcggcgattagtattagggtattatttggtttatcgtgtataagggcgtcgaggtggcgtattttatgaacgttttgcgttacgatgttatggtaagattcgagttcgcgttcgggatagtagtttcggattgagagaggagtcgggttggaaaagtagcggatggtagagtgtggtaagtttaggtttagggcgcggagagatgtggggataaagtgagatttcggttagtg

SEQ ID NO: 21354 - DNA, 876 bp, Artificial Sequence
  chemically treated genomic DNA (Homo sapiens) CpG-island No: 21354
cactaaccgaaatctcactttatccccacatctctccgcgccctaaacctaaacttaccacactctaccatccgctacttttccaacccgactcctctctcaatccgaaactactatcccgaacgcgaactcgaatcttaccataacatcgtaacgcaaaacgttcataaaatacgccacctcgacgcccttatacacgataaaccaaataataccctaatactaatcgccgacgtccaacaacaacacgttaaattcgacgcgacgaatctactaaaccttaataaaaaaccgaaccacgccacccatacaacgactaacgttaacgcacttactaaaatcctcgctaatctactccaaccgactatacacgtcgttaatatacaaaatcgtaaactcccaaacgccaaccgcaaaccacaacaccgcgcccaaaacgaaaaataacgtcgcgaacgcccgcgcgactcgaaaacacataactataacgcgtaaactaaatacgaaaacgaacgaaccgaacgaataccgacgaataaaaacgaacaactaaaaccgaaactcgataccccgactaaaaaaacgaaacccgaatcaaaaccgaaacgaatccttcttcaacctaaaaaccgacttaacgaccaaacgcaaattcgcgacgtcacccgatccgaccctaatacccgaaacgaccctaacgcgactatcgactaacaccaactccctacaaaaaaaataaaaaaattattcccgacgaaaaacgaataccgaccgcatcccgaccgaaccaaaaaacctaaacgccgacaattcgactactaatacgccgctctttcgaaaacgcgaaaaaaaaattaaaaaaatccgccccgcgcc

SEQ ID NO: 21355 - DNA, 876 bp, Artificial Sequence
  chemically treated genomic DNA (Homo sapiens) CpG-island No: 21355
tattggtcggagttttattttatttttatattttttcgcgttttggatttaggtttgttatattttgttattcgttgtttttttagttcggttttttttttagttcgggattattatttcgggcgcgggttcgggttttattatggtatcgtagcgtagggcgtttatgaagtgcgttatttcggcgtttttgtatacggtgaattagatagtgttttggtattggtcgtcggcgtttagtagtagtacgttgggttcggcgcggcggatttgttgaattttggtgaagagtcgagttacgttatttatgtagcggttggcgttgacgtatttgttggagttttcgttggtttgttttagtcggttgtgtacgtcgttggtgtgtaaaatcgtaagtttttaggcgttagtcgtaggttatagtatcgcgtttagggcgaggagtagcgtcgcgggcgttcgcgcggttcggggatatatagttgtggcgcgtgaattgggtgcgaaagcgggcgagtcgggcgagtgtcggcgagtaggggcgagtagttagggtcggggttcggtgtttcggttggaggggcggggttcgggttaaggtcggggcgggtttttttttagtttggaggtcggtttggcggttaggcgtaagttcgcgacgttattcgattcgattttggtattcggagcggttttggcgcggttgtcggttggtattagttttttgtaggaagagtggagaggttgttttcggcggggagcgggtatcggtcgtatttcggtcggattagggagtttgggcgtcggtagttcggttgttggtgcgtcgttttttcgggggcgcgaggaaggaattggaggggttcgtttcgcgtt

SEQ ID NO: 21356 - DNA, 876 bp, Artificial Sequence
  chemically treated genomic DNA (Homo sapiens) CpG-island No: 21356
aacgcgaaacgaacccctccaattccttcctcgcgcccccgaaaaaacgacgcaccaacaaccgaactaccgacgcccaaactccctaatccgaccgaaatacgaccgatacccgctccccgccgaaaacaacctctccactcttcctacaaaaaactaataccaaccgacaaccgcgccaaaaccgctccgaataccaaaatcgaatcgaataacgtcgcgaacttacgcctaaccgccaaaccgacctccaaactaaaaaaaaacccgccccgaccttaacccgaaccccgcccctccaaccgaaacaccgaaccccgaccctaactactcgcccctactcgccgacactcgcccgactcgcccgctttcgcacccaattcacgcgccacaactatatatccccgaaccgcgcgaacgcccgcgacgctactcctcgccctaaacgcgatactataacctacgactaacgcctaaaaacttacgattttacacaccaacgacgtacacaaccgactaaaacaaaccaacgaaaactccaacaaatacgtcaacgccaaccgctacataaataacgtaactcgactcttcaccaaaattcaacaaatccgccgcgccgaacccaacgtactactactaaacgccgacgaccaataccaaaacactatctaattcaccgtatacaaaaacgccgaaataacgcacttcataaacgccctacgctacgataccataataaaacccgaacccgcgcccgaaataataatcccgaactaaaaaaaaaaccgaactaaaaaaacaacgaataacaaaatataacaaacctaaatccaaaacgcgaaaaaatataaaaataaaataaaactccgaccaata

SEQ ID NO: 21357 - DNA, 1400 bp, Artificial Sequence
  chemically treated genomic DNA (Homo sapiens) CpG-island No: 21357
gagtattttcggtagttttttttttttttcgtttcggggatgtttcgattcggcgtttagttatttattaatcggtttatatcggcggcggtcgtcgcggagtgacgttcggagggggcgggttttcgttttcgtttgtcggtttttggttcgcggttttaggtcgcgattggtggttggagggttgtacgtcgcgtcggttataaaggggagggtttgtgacgtaagggcgtttcggcgcgtgtattggttttttcggttgcgggtcggttcggttacgcgttttgtttcgagtcgtttattgtatggtagagtttggtgttttcgtcgtcgtttgtatcgtcgttatcgtcgtttcgttacgattatcgtcgttttttgttttgtagttatcgttatcgtttgtgtcgtcgtcgtttcgggatcggttgtatgattaggttataatttttaatgagtaaatatatttttgtgagtagtcgtcgtatcgtcgtttttcgggttgggaatttacgatcggttttttattttcgttgtcgtttttgttcggagttcggcgttttttttaggttgtttcgggttgcggtttcggtgggtttcgggtgggagcgggcgggttatggttttgtggtcggtcgattgcggtcggttgtgcggaggtagatgtcgggtttttcggggttgcggggtggcggttggtcgtcggaggtatcggtttttgagtttttttcgagttcggagcgacgggggcggcgcggttcggtttttgcggcggtcgggggtagtttcggttttcgtagcgggtcgggtgggtggtataaaagtcgttttgtgatcgtcgttttcgtttttggttttttggtttggcgcgattcgttcgggtatggtaggtttcgcggcgtttcggggtttttttgttcggtcggaggagagtggttgtattgggagcgggagacgtggttcggggtggggcgagggttgcgcgtgttattgcggagtcggatacggggagggcgcggcggtggcgggttcgtttttagattcgggcgggcgtggggtaggtcggatagttaggtacgggtggtaacgatttggttttagagtttttcggagtttcggggtgggcgcgggatagttattgggtgtagttatatttttgtgttcgacggtcgggattcgagttttagataaaatggtttcggcgttcgcgtttgattgaaggcgcggcgcgaattcgtgattgcggcgcggagagggggcgtagcgggcgtgttcgggcgtatatagtcgcgtgcgcggggcggcggttttttggggtatttcgcgagttgtatttttgttcgggttagagtggggttttgttaggtgagaatttcggtcgttcgtttcgtttttttttt

SEQ ID NO: 21358 - DNA, 1400 bp, Artificial Sequence
  chemically treated genomic DNA (Homo sapiens) CpG-island No: 21358
aaaaaaaaaacgaaacgaacgaccgaaattctcacctaacaaaaccccactctaacccgaacaaaaatacaactcgcgaaataccccaaaaaaccgccgccccgcgcacgcgactatatacgcccgaacacgcccgctacgccccctctccgcgccgcaatcacgaattcgcgccgcgccttcaatcaaacgcgaacgccgaaaccattttatctaaaactcgaatcccgaccgtcgaacacaaaaatataactacacccaataactatcccgcgcccaccccgaaactccgaaaaactctaaaaccaaatcgttaccacccgtacctaactatccgacctaccccacgcccgcccgaatctaaaaacgaacccgccaccgccgcgccctccccgtatccgactccgcaataacacgcgcaaccctcgccccaccccgaaccacgtctcccgctcccaatacaaccactctcctccgaccgaacaaaaaaaccccgaaacgccgcgaaacctaccatacccgaacgaatcgcgccaaaccaaaaaaccaaaaacgaaaacgacgatcacaaaacgacttttataccacccacccgacccgctacgaaaaccgaaactacccccgaccgccgcaaaaaccgaaccgcgccgcccccgtcgctccgaactcgaaaaaaactcaaaaaccgatacctccgacgaccaaccgccaccccgcaaccccgaaaaacccgacatctacctccgcacaaccgaccgcaatcgaccgaccacaaaaccataacccgcccgctcccacccgaaacccaccgaaaccgcaacccgaaacaacctaaaaaaaacgccgaactccgaacaaaaacgacaacgaaaataaaaaaccgatcgtaaattcccaacccgaaaaacgacgatacgacgactactcacaaaaatatatttactcattaaaaattataacctaatcatacaaccgatcccgaaacgacgacgacacaaacgataacgataactacaaaacaaaaaacgacgataatcgtaacgaaacgacgataacgacgatacaaacgacgacgaaaacaccaaactctaccatacaataaacgactcgaaacaaaacgcgtaaccgaaccgacccgcaaccgaaaaaaccaatacacgcgccgaaacgcccttacgtcacaaaccctcccctttataaccgacgcgacgtacaaccctccaaccaccaatcgcgacctaaaaccgcgaaccaaaaaccgacaaacgaaaacgaaaacccgccccctccgaacgtcactccgcgacgaccgccgccgatataaaccgattaataaataactaaacgccgaatcgaaacatccccgaaacgaaaaaaaaaaaaaactaccgaaaatactc

SEQ ID NO: 21359 - DNA, 1400 bp, Artificial Sequence
  chemically treated genomic DNA (Homo sapiens) CpG-island No: 21359
gggaggagggcggggcggacggtcgaagtttttatttagtagaattttattttggttcgggtaggggtgtagttcgcggaatgttttagagggtcgtcgtttcgcgtacgcggttgtgtgcgttcgagtacgttcgttgcgtttttttttcgcgtcgtaattacgggttcgcgtcgcgtttttagttaggcgcgggcgtcgaggttattttgtttgaggttcgggtttcggtcgtcgagtataagagtgtagttgtatttagtggttgtttcgcgtttatttcggagtttcgagaagttttggaattagatcgttattattcgtgtttggttgttcggtttattttacgttcgttcggatttggaggcgaattcgttatcgtcgcgtttttttcgtattcggtttcgtagtgatacgcgtagttttcgttttatttcgggttacgtttttcgtttttagtgtagttattttttttcggtcgaataaagaggtttcgggacgtcgcggagtttgttatgttcggacgggtcgcgttagattaaagggttaagggcggaggcggcggttataaagcggtttttgtgttatttattcggttcgttgcggaagtcgaaattgttttcggtcgtcgtagaagtcggatcgcgtcgttttcgtcgtttcgggttcgggagggatttaaaagtcggtgttttcggcggttaatcgttatttcgtagtttcgaggggttcggtatttgttttcgtatagtcggtcgtaatcggtcggttatagggttataattcgttcgtttttattcgggatttatcggaatcgtaattcggggtaatttggaggagacgtcgggtttcgaataaaggcgatagcggggatggggggtcggtcgtggatttttagttcgagaggcgacgatgcgacggttatttataggaatatgtttatttattgaagattgtggtttaattatatagtcggtttcgaggcggcggcgatataggcggtggcggtggttgtagggtaggaggcggcggtggtcgtggcggagcggcggtggcggcgatgtaggcggcggcgggggtattagattttattatgtagtgagcggttcggagtagagcgcgtagtcgagtcggttcgtagtcgaaggagttaatatacgcgtcgaggcgtttttgcgttataagtttttttttttatagtcggcgcgacgtgtaattttttagttattaatcgcggtttggaatcgcgggttaggagtcgataggcgggggcggaggttcgtttttttcggacgttatttcgcggcggtcgtcgtcggtgtgaatcggttgatgaatggttaagcgtcgagtcggagtattttcggggcgggggagggaaggggttgtcgggagtgttt

SEQ ID NO: 21360 - DNA, 1400 bp, Artificial Sequence
  chemically treated genomic DNA (Homo sapiens) CpG-island No: 21360
aaacactcccgacaaccccttccctcccccgccccgaaaatactccgactcgacgcttaaccattcatcaaccgattcacaccgacgacgaccgccgcgaaataacgtccgaaaaaaacgaacctccgcccccgcctatcgactcctaacccgcgattccaaaccgcgattaataactaaaaaattacacgtcgcgccgactataaaaaaaaaaacttataacgcaaaaacgcctcgacgcgtatattaactccttcgactacgaaccgactcgactacgcgctctactccgaaccgctcactacataataaaatctaatacccccgccgccgcctacatcgccgccaccgccgctccgccacgaccaccgccgcctcctaccctacaaccaccgccaccgcctatatcgccgccgcctcgaaaccgactatataattaaaccacaatcttcaataaataaacatattcctataaataaccgtcgcatcgtcgcctctcgaactaaaaatccacgaccgaccccccatccccgctatcgcctttattcgaaacccgacgtctcctccaaattaccccgaattacgattccgataaatcccgaataaaaacgaacgaattataaccctataaccgaccgattacgaccgactatacgaaaacaaataccgaacccctcgaaactacgaaataacgattaaccgccgaaaacaccgacttttaaatccctcccgaacccgaaacgacgaaaacgacgcgatccgacttctacgacgaccgaaaacaatttcgacttccgcaacgaaccgaataaataacacaaaaaccgctttataaccgccgcctccgcccttaaccctttaatctaacgcgacccgtccgaacataacaaactccgcgacgtcccgaaacctctttattcgaccgaaaaaaaataactacactaaaaacgaaaaacgtaacccgaaataaaacgaaaactacgcgtatcactacgaaaccgaatacgaaaaaaacgcgacgataacgaattcgcctccaaatccgaacgaacgtaaaataaaccgaacaaccaaacacgaataataacgatctaattccaaaacttctcgaaactccgaaataaacgcgaaacaaccactaaatacaactacactcttatactcgacgaccgaaacccgaacctcaaacaaaataacctcgacgcccgcgcctaactaaaaacgcgacgcgaacccgtaattacgacgcgaaaaaaaaacgcaacgaacgtactcgaacgcacacaaccgcgtacgcgaaacgacgaccctctaaaacattccgcgaactacacccctacccgaaccaaaataaaattctactaaataaaaacttcgaccgtccgccccgccctcctccc

SEQ ID NO: 21361 - DNA, 618 bp, Artificial Sequence
  chemically treated genomic DNA (Homo sapiens) CpG-island No: 21361
aaggtttaatttttttttagcggtttaatattcgattttcgtttttcgttttcgcgttttttttatcggttatttaattggataaaaatgtcgatttcgtttttttttcggagttttattttcgttatagttttgtttttttttttgttgtttttgtttttttttttttttcgtcgtgtttcgcggtcgggtcggggtagtcgggaagcgggtggggtggtgtgttatttagtagtttttgggatatcgttcgggtacgttttacgtcgtcgtagttattgttgtggtcgtcggtcggtcgaggggtcgcgatattggttgttcgcggtgtaagtagaattcgacgtgtatcgttgtcgttaagatggaggggtttttgttcgtgttcggtgatcgtagtattggggaaacgattcgtttttaaaacggtaagggcgggtcgggtttgggtcgggtttgcggtcggggagggtcgagttttatcgcgatcggatttcggttgttttcgttttttttttttattttcgtagaaagggtttcggggtttcgtagtcggatttagtttattcgtcgttttttggggtagggcgttgtggttttattttttttatagcgagg

SEQ ID NO: 21362 - DNA, 618 bp, Artificial Sequence
  chemically treated genomic DNA (Homo sapiens) CpG-island No: 21362
cctcgctataaaaaaaataaaaccacaacgccctaccccaaaaaacgacgaataaactaaatccgactacgaaaccccgaaaccctttctacgaaaataaaaaaaaaaaacgaaaacaaccgaaatccgatcgcgataaaactcgaccctccccgaccgcaaacccgacccaaacccgacccgcccttaccgttttaaaaacgaatcgtttccccaatactacgatcaccgaacacgaacaaaaacccctccatcttaacgacaacgatacacgtcgaattctacttacaccgcgaacaaccaatatcgcgacccctcgaccgaccgacgaccacaacaataactacgacgacgtaaaacgtacccgaacgatatcccaaaaactactaaataacacaccaccccacccgcttcccgactaccccgacccgaccgcgaaacacgacgaaaaaaaaaaaaaaacaaaaacaacaaaaaaaaaaacaaaactataacgaaaataaaactccgaaaaaaaaacgaaatcgacatttttatccaattaaataaccgataaaaaaaacgcgaaaacgaaaaacgaaaatcgaatattaaaccgctaaaaaaaaattaaacctt

SEQ ID NO: 21363 - DNA, 618 bp, Artificial Sequence
  chemically treated genomic DNA (Homo sapiens) CpG-island No: 21363
tttcgttgtgggaaaagtggggttatagcgttttgttttagagaacggcgggtgggttgggttcggttgcggggtttcgaggttttttttgcggaggtaaaggagagaaacgagggtagtcggggttcggtcgcggtgggattcggtttttttcggtcgtaaattcgatttaggttcggttcgtttttatcgttttgggagcggatcgtttttttagtgttgcggttatcgaatacggataaaggtttttttattttgacggtagcgatatacgtcgaattttgtttatatcgcgggtaattagtatcgcggtttttcggtcgatcggcgattatagtagtggttgcgacggcgtggagcgtattcgagcgatgttttaggagttattgggtaatatattattttattcgtttttcggttgtttcggttcggtcgcggggtacggcgggaaggaaaaagaggtagggataatagggagagaaataggattgtgacggaagtgaggtttcggggaaggggcggggtcggtatttttgtttaattagatagtcgatgggaagggcgcgaaagcggagaacggaagtcggatgttggatcgttgggaagaggttgaatttt

SEQ ID NO: 21364 - DNA, 618 bp, Artificial Sequence
  chemically treated genomic DNA (Homo sapiens) CpG-island No: 21364
aaaattcaacctcttcccaacgatccaacatccgacttccgttctccgctttcgcgcccttcccatcgactatctaattaaacaaaaataccgaccccgccccttccccgaaacctcacttccgtcacaatcctatttctctccctattatccctacctctttttccttcccgccgtaccccgcgaccgaaccgaaacaaccgaaaaacgaataaaataatatattacccaataactcctaaaacatcgctcgaatacgctccacgccgtcgcaaccactactataatcgccgatcgaccgaaaaaccgcgatactaattacccgcgatataaacaaaattcgacgtatatcgctaccgtcaaaataaaaaaacctttatccgtattcgataaccgcaacactaaaaaaacgatccgctcccaaaacgataaaaacgaaccgaacctaaatcgaatttacgaccgaaaaaaaccgaatcccaccgcgaccgaaccccgactaccctcgtttctctcctttacctccgcaaaaaaaacctcgaaaccccgcaaccgaacccaacccacccgccgttctctaaaacaaaacgctataaccccacttttcccacaacgaaa

SEQ ID NO: 21365 - DNA, 1036 bp, Artificial Sequence
  chemically treated genomic DNA (Homo sapiens) CpG-island No: 21365
gcggatatagcgtaattttcgacgttagagaataatagtttttcgatgcgtttttagagatgttaaggaggaacgaatttagcggttaggagattgcgttttacgattgatgagagggaaggtatcggtttttaagtttttaaaatttataggtgagtttttgttaagagtaaacgttcgcggttcgtcgtttacggtttatattttgaggtggtatttggtttttcgatacgttgaagtattaacggatgagcgttacgaatatagagcggttaattacgcgtcgttttcgtttagattttttcgtacgaggtagtttcgtagtcgtaggtggtttcggcgagtatttttatttttttttttcgtgatgttttggggttgattttcgatttcgttggttcgttttttttttcggtcgttttttttattgagtttgttgagtttcggggttcgcggagttcgcgttaggtttttgggaaaggacggggagtgttatcggggagtagttgttttattgtgtttcgaggtttcgatcgggttaggtcgacggtttttttttttttatttttttttttttggcggggttcggcggcgggcgagtgattgcggttacgtttgaaaggcgatttttttgtgagtgggttagaaggcgaatatggcggagcggggaggttggcgggaggcgggaggcgggaggcgggaggtagtggcgttggtttgcggcgcgttcggatcggttgtggggcggggtagggcggagcggagtcgtgcggcggggcggggtcgggcggcggggtttggtttttttttttagcgttattttgtggtagcgagatttataaataaaggggagcgtaggggttgcggcgggattaggagcgcggcggggtcggcggtaaagttgttcggttgcgcggtggttcggggggttcgggcggtagggtaagtagcgcggtttcggtttatgcgatcggtggcgtcggcgcggtttttgtttggagaggtaggcgcgggtcggttggcgggagcggacgcg

SEQ ID NO: 21366 - DNA, 1036 bp, Artificial Sequence
  chemically treated genomic DNA (Homo sapiens) CpG-island No: 21366
cgcgtccgctcccgccaaccgacccgcgcctacctctccaaacaaaaaccgcgccgacgccaccgatcgcataaaccgaaaccgcgctacttaccctaccgcccgaaccccccgaaccaccgcgcaaccgaacaactttaccgccgaccccgccgcgctcctaatcccgccgcaacccctacgctcccctttatttataaatctcgctaccacaaaataacgctaaaaaaaaaaaccaaaccccgccgcccgaccccgccccgccgcacgactccgctccgccctaccccgccccacaaccgatccgaacgcgccgcaaaccaacgccactacctcccgcctcccgcctcccgcctcccgccaacctccccgctccgccatattcgccttctaacccactcacaaaaaaatcgcctttcaaacgtaaccgcaatcactcgcccgccgccgaaccccgccaaaaaaaaaaaaataaaaaaaaaaaaaccgtcgacctaacccgatcgaaacctcgaaacacaataaaacaactactccccgataacactccccgtcctttcccaaaaacctaacgcgaactccgcgaaccccgaaactcaacaaactcaataaaaaaaacgaccgaaaaaaaaaacgaaccaacgaaatcgaaaatcaaccccaaaacatcacgaaaaaaaaaaataaaaatactcgccgaaaccacctacgactacgaaactacctcgtacgaaaaaatctaaacgaaaacgacgcgtaattaaccgctctatattcgtaacgctcatccgttaatacttcaacgtatcgaaaaaccaaataccacctcaaaatataaaccgtaaacgacgaaccgcgaacgtttactcttaacaaaaactcacctataaattttaaaaacttaaaaaccgataccttccctctcatcaatcgtaaaacgcaatctcctaaccgctaaattcgttcctccttaacatctctaaaaacgcatcgaaaaactattattctctaacgtcgaaaattacgctatatccgc

SEQ ID NO: 21367 - DNA, 1036 bp, Artificial Sequence
  chemically treated genomic DNA (Homo sapiens) CpG-island No: 21367
cgcgttcgttttcgttagtcggttcgcgtttatttttttaggtagaagtcgcgtcggcgttatcggtcgtataggtcgaggtcgcgttgtttgttttgtcgttcgggtttttcgggttatcgcgtagtcggatagttttgtcgtcggtttcgtcgcgtttttagtttcgtcgtaatttttgcgtttttttttatttgtgggtttcgttgttataaaatggcgttgagggaggaaattaggtttcgtcgttcggtttcgtttcgtcgtacggtttcgtttcgttttgtttcgttttatagtcggttcgaacgcgtcgtaggttagcgttattgtttttcgtttttcgtttttcgtttttcgttagttttttcgtttcgttatgttcgttttttggtttatttataggagagtcgttttttaggcgtggtcgtagttattcgttcgtcgtcgaatttcgttaggagaggaaaggtgaagggagggaggtcgtcggtttagttcgatcggggtttcgaggtataatggagtagttgtttttcggtaatatttttcgtttttttttaggagtttggcgcgagtttcgcgggtttcggagtttagtaagtttagtaagggaagcggtcgaggggaggggcgggttagcgaggtcggaggttagttttagggtattacgggaagggaaggtggaagtattcgtcggggttatttgcggttgcggggttgtttcgtgcggagggatttgggcgaaggcggcgcgtgattggtcgttttgtgttcgtgacgtttattcgttgatgttttagcgtgtcggaggattaggtgttattttaagatataggtcgtgggcggcgagtcgcgggcgtttatttttagtagaagtttatttgtaagttttgagaatttagaaatcgatgtttttttttttattagtcgtgaggcgtagttttttggtcgttgggttcgtttttttttgatatttttggagacgtatcgaggagttattgttttttggcgtcggaggttgcgttgtgttcgt

SEQ ID NO: 21368 - DNA, 1036 bp, Artificial Sequence
  chemically treated genomic DNA (Homo sapiens) CpG-island No: 21368
acgaacacaacgcaacctccgacgccaaaaaacaataactcctcgatacgtctccaaaaatatcaaaaaaaaacgaacccaacgaccaaaaaactacgcctcacgactaataaaaaaaaaaacatcgatttctaaattctcaaaacttacaaataaacttctactaaaaataaacgcccgcgactcgccgcccacgacctatatcttaaaataacacctaatcctccgacacgctaaaacatcaacgaataaacgtcacgaacacaaaacgaccaatcacgcgccgccttcgcccaaatccctccgcacgaaacaaccccgcaaccgcaaataaccccgacgaatacttccaccttcccttcccgtaataccctaaaactaacctccgacctcgctaacccgcccctcccctcgaccgcttcccttactaaacttactaaactccgaaacccgcgaaactcgcgccaaactcctaaaaaaaaacgaaaaatattaccgaaaaacaactactccattatacctcgaaaccccgatcgaactaaaccgacgacctccctcccttcacctttcctctcctaacgaaattcgacgacgaacgaataactacgaccacgcctaaaaaacgactctcctataaataaaccaaaaaacgaacataacgaaacgaaaaaactaacgaaaaacgaaaaacgaaaaacgaaaaacaataacgctaacctacgacgcgttcgaaccgactataaaacgaaacaaaacgaaacgaaaccgtacgacgaaacgaaaccgaacgacgaaacctaatttcctccctcaacgccattttataacaacgaaacccacaaataaaaaaaaacgcaaaaattacgacgaaactaaaaacgcgacgaaaccgacgacaaaactatccgactacgcgataacccgaaaaacccgaacgacaaaacaaacaacgcgacctcgacctatacgaccgataacgccgacgcgacttctacctaaaaaaataaacgcgaaccgactaacgaaaacgaacgcg

SEQ ID NO: 21369 - DNA, 634 bp, Artificial Sequence
  chemically treated genomic DNA (Homo sapiens) CpG-island No: 21369
tcgggaagtcgtgcgttttgtagcggtagtaggcgacggtagcggagaagttttgggatgttaaggttttcgagggtcggttgcggaagtgtgagagtatcgattcggggtatttgtcgcgtttcgatagcgcggagtagtcgtatgcgttttgtagttttttgtatagtttttcggagtatagcgtcgagttcgagggggagggcggttcgggttcggggttaggggtcgtaggggtcgagttcggggcgcgagaagtcggtttggagttggagaagaagcggttggaggagcgtatcgtttagtttattttttataattaggcggtggtggacgatgtttagttggataacgtgcggtttcggaagatcgggttgtttaaatagggtagtatcgatttgtttacgttttatatttataaggattttttttattttgatattcgcgcgttggagttaggtcgtaggagggtttcgggtttcgtgcgttttatttggacgtttttagataagtttcggtttttttttttttatttcgtttttatttagttttttattatcgtggaatgtgttttcgttattaggagtaattcgttgtttttcgtcgagggttttaggacgtggttggagtttag

SEQ ID NO: 21370 - DNA, 634 bp, Artificial Sequence
  chemically treated genomic DNA (Homo sapiens) CpG-island No: 21370
ctaaactccaaccacgtcctaaaaccctcgacgaaaaacaacgaattactcctaataacgaaaacacattccacgataataaaaaactaaataaaaacgaaataaaaaaaaaaaaaccgaaacttatctaaaaacgtccaaataaaacgcacgaaacccgaaaccctcctacgacctaactccaacgcgcgaatatcaaaataaaaaaaatccttataaatataaaacgtaaacaaatcgatactaccctatttaaacaacccgatcttccgaaaccgcacgttatccaactaaacatcgtccaccaccgcctaattataaaaaataaactaaacgatacgctcctccaaccgcttcttctccaactccaaaccgacttctcgcgccccgaactcgacccctacgacccctaaccccgaacccgaaccgccctccccctcgaactcgacgctatactccgaaaaactatacaaaaaactacaaaacgcatacgactactccgcgctatcgaaacgcgacaaataccccgaatcgatactctcacacttccgcaaccgaccctcgaaaaccttaacatcccaaaacttctccgctaccgtcgcctactaccgctacaaaacgcacgacttcccga

SEQ ID NO: 21371 - DNA, 634 bp, Artificial Sequence
  chemically treated genomic DNA (Homo sapiens) CpG-island No: 21371
ttgggttttagttacgttttggagttttcgacgaagggtagcgagttgtttttggtgacggggatatattttacggtggtggagagttgagtggggacggagtggaagaagaggggtcgagatttgtttgggggcgtttaggtggagcgtacggggttcggggtttttttacggtttggttttagcgcgcggatgttaaagtggaaggagtttttgtaggtgtagggcgtgggtaggtcgatgttgttttgtttggatagttcggtttttcggggtcgtacgttgtttagttgggtatcgtttattatcgtttggttgtgggagatgagttgggcgatgcgtttttttagtcgttttttttttagttttaggtcggtttttcgcgtttcgggttcggtttttgcgatttttggtttcgggttcgggtcgttttttttttcggattcggcgttgtgtttcgaaaggttgtgtagggggttgtagggcgtatgcggttgtttcgcgttgtcggagcgcgataggtatttcgagtcggtgtttttatattttcgtagtcggttttcgggggttttggtattttagggttttttcgttgtcgtcgtttgttgtcgttgtagggcgtacggtttttcgg

SEQ ID NO: 21372 - DNA, 634 bp, Artificial Sequence
  chemically treated genomic DNA (Homo sapiens) CpG-island No: 21372
ccgaaaaaccgtacgccctacaacgacaacaaacgacgacaacgaaaaaaccctaaaataccaaaacccccgaaaaccgactacgaaaatataaaaacaccgactcgaaatacctatcgcgctccgacaacgcgaaacaaccgcatacgccctacaaccccctacacaacctttcgaaacacaacgccgaatccgaaaaaaaaaacgacccgaacccgaaaccaaaaatcgcaaaaaccgaacccgaaacgcgaaaaaccgacctaaaactaaaaaaaaaacgactaaaaaaacgcatcgcccaactcatctcccacaaccaaacgataataaacgatacccaactaaacaacgtacgaccccgaaaaaccgaactatccaaacaaaacaacatcgacctacccacgccctacacctacaaaaactccttccactttaacatccgcgcgctaaaaccaaaccgtaaaaaaaccccgaaccccgtacgctccacctaaacgcccccaaacaaatctcgacccctcttcttccactccgtccccactcaactctccaccaccgtaaaatatatccccgtcaccaaaaacaactcgctacccttcgtcgaaaactccaaaacgtaactaaaacccaa

SEQ ID NO: 21373 - DNA, 750 bp, Artificial Sequence
  chemically treated genomic DNA (Homo sapiens) CpG-island No: 21373
  unsure (252, 270)
aggggggcgtcgtttttcgtgattttttaatcggtttttggagttagaggttttttttcgtttttcggcgggagaaagttcgcggtcggttgttgttgttcgtttttttgtttcgaggaaaaacgattttataattttgtgcgcgagagaggttcgttttttcggcggtttttttttttttttttcgttgcgggtttgtttttttgttggagtcgagcgttggaggcggaggagggagggtggggcgtaggntcgttgggtcgcgcgttntcgtttttatttttcgggaaggggttcgttttcgggtagttaggggttcgttttttagatgagaagggtgtagattagcgttagtttttcggttcgcgtttttgtagcgtttcggttttttttcggcgttttcgtttcgtcgtcgtcggtttagtaattttgtttcggaagattagttttattacgttttcgggttagcgtttgtcgggtttcggcggttatcgcggttatcgcgtcgggaatttggcgttttaagttatttgattgcgcgtttcgttaattagcgtcggttttgcgcgtttttttagttcgtagtagttcggttcggcgtttggttggtttggggcgcgcgttttagagtgaatcgtgcgtgtcgggagtcgggagttcggagatcgaattagaatggatgtttcgagtagatataattttttttatttagattattcgaaaatgtgagttacgtttttttaggtaaaa

SEQ ID NO: 21374 - DNA, 750 bp, Artificial Sequence
  chemically treated genomic DNA (Homo sapiens) CpG-island No: 21374
  unsure (481, 499)
ttttacctaaaaaaacgtaactcacattttcgaataatctaaataaaaaaaattatatctactcgaaacatccattctaattcgatctccgaactcccgactcccgacacgcacgattcactctaaaacgcgcgccccaaaccaaccaaacgccgaaccgaactactacgaactaaaaaaacgcgcaaaaccgacgctaattaacgaaacgcgcaatcaaataacttaaaacgccaaattcccgacgcgataaccgcgataaccgccgaaacccgacaaacgctaacccgaaaacgtaataaaactaatcttccgaaacaaaattactaaaccgacgacgacgaaacgaaaacgccgaaaaaaaaccgaaacgctacaaaaacgcgaaccgaaaaactaacgctaatctacacccttctcatctaaaaaacgaacccctaactacccgaaaacgaaccccttcccgaaaaataaaaacganaacgcgcgacccaacgancctacgccccaccctccctcctccgcctccaacgctcgactccaacaaaaaaacaaacccgcaacgaaaaaaaaaaaaaaaaaccgccgaaaaaacgaacctctctcgcgcacaaaattataaaatcgtttttcctcgaaacaaaaaaacgaacaacaacaaccgaccgcgaactttctcccgccgaaaaacgaaaaaaaacctctaactccaaaaaccgattaaaaaatcacgaaaaacgacgcccccct

SEQ ID NO: 21375 - DNA, 750 bp, Artificial Sequence
  chemically treated genomic DNA (Homo sapiens) CpG-island No: 21375
  unsure (481, 499)
ttttgtttaaggggacgtgatttatattttcggataatttgaataaggggaattgtgtttgttcgaggtatttattttggttcggttttcggattttcggttttcggtacgtacggtttattttggagcgcgcgttttaggttagttaagcgtcgagtcgggttgttgcgggttgggagggcgcgtagggtcggcgttgattgacggggcgcgtagttaggtgatttggggcgttaagttttcgacgcggtggtcgcggtgatcgtcgaggttcggtagacgttgattcgggaacgtagtggggttgatttttcggaataaagttgttgggtcggcggcggcggggcgagagcgtcgagggggagtcggagcgttgtagaggcgcgggtcggagggttggcgttgatttgtattttttttatttggagagcggatttttggttgttcggaggcgagttttttttcggggggtgggggcggnaacgcgcgatttagcggntttgcgttttattttttttttttcgtttttagcgttcggttttaataaaggggtaggttcgtagcggggaggaggaggaggagtcgtcgaaggagcgagtttttttcgcgtataaagttgtggagtcgttttttttcggagtagggaagcgggtagtagtagtcggtcgcgggttttttttcgtcgaggggcgaggaggagtttttggttttagaagtcgattggggaattacggggagcggcgttttttt

SEQ ID NO: 21376 - DNA, 750 bp, Artificial Sequence
  chemically treated genomic DNA (Homo sapiens) CpG-island No: 21376
  unsure (252, 270)
aaaaaaacgccgctccccgtaattccccaatcgacttctaaaaccaaaaactcctcctcgcccctcgacgaaaaaaaacccgcgaccgactactactacccgcttccctactccgaaaaaaaacgactccacaactttatacgcgaaaaaaactcgctccttcgacgactcctcctcctcctccccgctacgaacctacccctttattaaaaccgaacgctaaaaacgaaaaaaaaaaaataaaacgcaaanccgctaaatcgcgcgttnccgcccccaccccccgaaaaaaaactcgcctccgaacaaccaaaaatccgctctccaaataaaaaaaatacaaatcaacgccaaccctccgacccgcgcctctacaacgctccgactccccctcgacgctctcgccccgccgccgccgacccaacaactttattccgaaaaatcaaccccactacgttcccgaatcaacgtctaccgaacctcgacgatcaccgcgaccaccgcgtcgaaaacttaacgccccaaatcacctaactacgcgccccgtcaatcaacgccgaccctacgcgccctcccaacccgcaacaacccgactcgacgcttaactaacctaaaacgcgcgctccaaaataaaccgtacgtaccgaaaaccgaaaatccgaaaaccgaaccaaaataaatacctcgaacaaacacaattccccttattcaaattatccgaaaatataaatcacgtccccttaaacaaaa

SEQ ID NO: 21377 - DNA, 775 bp, Artificial Sequence
  chemically treated genomic DNA (Homo sapiens) CpG-island No: 21377
tagtcgatcgttttttgtacgttgagttcgatgacgtttagggtgtcggtttgtttttttattagtatcgttatttgtaagaagagttcgtgtacgtcgcggatgtcgttttttaggcgtaatagttcgcggtggcggttttcgatttcgttgagggcggttcgcgcgtttttttacgtcgttagtaagttttcggtaaatacgtgttatttattttgttcgaatatgttttcgatttggtcgttcgagattttttggtttatgatttttagttggcgttggatgcggattttgtagttgtcgcgttgtttttatttcggtttgggttgtagtcgtgtatggcgcgttggaaggtgagggtgagcgcgttgtattgcgttcgcgaaatgcgcgttattgtcgagtgcgggtcgtgttgggttttagtcgtttcgtttagtttttttatggcgcgtagtttgtagtggatgatttcgtttcgggttttgatggttttggcgatggagttggtgtcgcgtttgatgttgttgaggcgtcgtatggacgtgaggaagcgggcgttttgtttttttagtcgttttacgtcggttattagtagttggtttttattttgaatgtttcggatgtttcggtatagggattttaggatgtggttcgtttcgaatacgatgttttcgtggggcgagttaaatttatcgttttcgtttgggaattgttggttatattgtttggataagtttagaagttttgttagtcggttttttattttgtttgt

SEQ ID NO: 21378 - DNA, 775 bp, Artificial Sequence
  chemically treated genomic DNA (Homo sapiens) CpG-island No: 21378
acaaacaaaataaaaaaccgactaacaaaacttctaaacttatccaaacaatataaccaacaattcccaaacgaaaacgataaatttaactcgccccacgaaaacatcgtattcgaaacgaaccacatcctaaaatccctataccgaaacatccgaaacattcaaaataaaaaccaactactaataaccgacgtaaaacgactaaaaaaacaaaacgcccgcttcctcacgtccatacgacgcctcaacaacatcaaacgcgacaccaactccatcgccaaaaccatcaaaacccgaaacgaaatcatccactacaaactacgcgccataaaaaaactaaacgaaacgactaaaacccaacacgacccgcactcgacaataacgcgcatttcgcgaacgcaatacaacgcgctcaccctcaccttccaacgcgccatacacgactacaacccaaaccgaaataaaaacaacgcgacaactacaaaatccgcatccaacgccaactaaaaatcataaaccaaaaaatctcgaacgaccaaatcgaaaacatattcgaacaaaataaataacacgtatttaccgaaaacttactaacgacgtaaaaaaacgcgcgaaccgccctcaacgaaatcgaaaaccgccaccgcgaactattacgcctaaaaaacgacatccgcgacgtacacgaactcttcttacaaataacgatactaataaaaaaacaaaccgacaccctaaacgtcatcgaactcaacgtacaaaaaacgatcgacta

SEQ ID NO: 21379 - DNA, 775 bp, Artificial Sequence
  chemically treated genomic DNA (Homo sapiens) CpG-island No: 21379
gtaggtaaaatgaaagatcggttagtagaatttttggatttgtttaagtaatatgattagtagtttttagacggggacgatgagtttgattcgttttacgaggatatcgtgttcgagacggattatattttggagtttttgtatcgagatattcgggatatttaggatgaaaattagttgttggtggtcgacgtgaagcggttgggaaagtagaacgttcgtttttttacgtttatgcggcgttttagtagtattaagcgcgatattaattttatcgttaaggttattaaggttcggggcgaggttatttattgtaagttgcgcgttatgaaggagttgagcgaggcggttgaggtttagtacggttcgtattcggtagtggcgcgtatttcgcgggcgtagtataacgcgtttatttttattttttagcgcgttatgtacgattataatttaggtcgagatgaaagtagcgcgataattgtaagattcgtatttagcgttagttggagattatgggttaggaagtttcgggcgattaaatcgaagatatgttcgagtagggtaagtggtacgtgtttatcgagaatttgttggcgacgtgaaagggcgcgcgggtcgtttttaacgagatcgagagtcgttatcgcgaattgttgcgtttggagagcggtattcgcgacgtatacgagttttttttgtagatggcggtgttggtggagaagtaggtcgatattttgaacgttatcgagtttaacgtataaaagacggtcgatta

SEQ ID NO: 21380 - DNA, 775 bp, Artificial Sequence
  chemically treated genomic DNA (Homo sapiens) CpG-island No: 21380
taatcgaccgtcttttatacgttaaactcgataacgttcaaaatatcgacctacttctccaccaacaccgccatctacaaaaaaaactcgtatacgtcgcgaataccgctctccaaacgcaacaattcgcgataacgactctcgatctcgttaaaaacgacccgcgcgccctttcacgtcgccaacaaattctcgataaacacgtaccacttaccctactcgaacatatcttcgatttaatcgcccgaaacttcctaacccataatctccaactaacgctaaatacgaatcttacaattatcgcgctactttcatctcgacctaaattataatcgtacataacgcgctaaaaaataaaaataaacgcgttatactacgcccgcgaaatacgcgccactaccgaatacgaaccgtactaaacctcaaccgcctcgctcaactccttcataacgcgcaacttacaataaataacctcgccccgaaccttaataaccttaacgataaaattaatatcgcgcttaatactactaaaacgccgcataaacgtaaaaaaacgaacgttctactttcccaaccgcttcacgtcgaccaccaacaactaattttcatcctaaatatcccgaatatctcgatacaaaaactccaaaatataatccgtctcgaacacgatatcctcgtaaaacgaatcaaactcatcgtccccgtctaaaaactactaatcatattacttaaacaaatccaaaaattctactaaccgatctttcattttacctac

SEQ ID NO: 21381 - DNA, 922 bp, Artificial Sequence
  chemically treated genomic DNA (Homo sapiens) CpG-island No: 21381
ggagaagacgtttcggttagatcgaacgtagggtaggggaggcgagtaggcgaggaggagggaaggggacgggaggggcggagttttcgcggtcgcggggttttgtgtagagttaaggtcgggatagaaattttgtttcgcgggggacgggtcgagggggtaggaggtcgacgcggggtattttaaatttgcgttgttacgaatggtgggcgggagaagggagagaatgggtcgtttttttcgtcgtcgttattattaaggcggggtaggtcggcgtcgtttttagcggcggttattttcgaggttgcggattgtacggtcgaagggggagaggtaggagataagacgggcgggttttttgattttcgttcgtaggaatcgcgggggttgcgttaggaagagggtttcgttttaattgtgtcgggtcgggaacgggttaagatgcggttaaatgtcggtttttttttttttttattttttagtttcggcgtttattcgcgacggtagtcgcggaatttagcgttcggtttcgcgcgtttatttcgatatcggttcggtcgtttatcgtcgtagtagtagtagattttttttttgtcgtttttttgattgtacgttatgggtttttcggttatcgtcgttatcgggtttttttttttgttgttgttgttgttgttgttgtcgtcgcggttcggtcgggagagaaaagggttgagggaaacgtgggggcgatagtttcgcggggaagggtaggtcggtgggaggagaggagggggcgtcgggaaggttcggtattattcggtagaggtgtcgaaagttcggaatcggagttgtagcggtattaattcgcgaggagggggttattaaattattttaggaggtcgtagggaggtgagcgtatttattgcggtttttacggggagga

SEQ ID NO: 21382 - DNA, 922 bp, Artificial Sequence
  chemically treated genomic DNA (Homo sapiens) CpG-island No: 21382
tcctccccgtaaaaaccgcaataaatacgctcacctccctacgacctcctaaaataatttaataaccccctcctcgcgaattaataccgctacaactccgattccgaactttcgacacctctaccgaataataccgaaccttcccgacgccccctcctctcctcccaccgacctacccttccccgcgaaactatcgcccccacgtttccctcaacccttttctctcccgaccgaaccgcgacgacaacaacaacaacaacaacaacaaaaaaaaaaacccgataacgacgataaccgaaaaacccataacgtacaatcaaaaaaacgacaaaaaaaaaatctactactactacgacgataaacgaccgaaccgatatcgaaataaacgcgcgaaaccgaacgctaaattccgcgactaccgtcgcgaataaacgccgaaactaaaaaataaaaaaaaaaaaaaaccgacatttaaccgcatcttaacccgttcccgacccgacacaattaaaacgaaaccctcttcctaacgcaacccccgcgattcctacgaacgaaaatcaaaaaacccgcccgtcttatctcctacctctcccccttcgaccgtacaatccgcaacctcgaaaataaccgccgctaaaaacgacgccgacctaccccgccttaataataacgacgacgaaaaaaacgacccattctctcccttctcccgcccaccattcgtaacaacgcaaatttaaaataccccgcgtcgacctcctaccccctcgacccgtcccccgcgaaacaaaatttctatcccgaccttaactctacacaaaaccccgcgaccgcgaaaactccgcccctcccgtccccttccctcctcctcgcctactcgcctcccctaccctacgttcgatctaaccgaaacgtcttctcc

SEQ ID NO: 21383 - DNA, 922 bp, Artificial Sequence
  chemically treated genomic DNA (Homo sapiens) CpG-island No: 21383
tttttttcgtggaggtcgtagtggatgcgtttatttttttgcggttttttgaggtggtttggtggtttttttttcgcgagttggtgtcgttgtaatttcgatttcgagttttcggtatttttgtcgggtggtatcgagttttttcggcgtttttttttttttttttatcggtttgttttttttcgcgggattatcgtttttacgttttttttagtttttttttttttcggtcgagtcgcggcggtagtagtagtagtagtagtagtaggaggaggagttcggtggcggcggtggtcggggagtttatggcgtatagttaaggaggcggtaaaaaaaaagtttgttattattacgacggtgagcggtcgggtcggtgtcggggtgggcgcgcggggtcgggcgttgggtttcgcggttgtcgtcgcgagtgggcgtcggggttgaggggtgggaaggaggagggatcgatatttggtcgtattttaattcgttttcggttcggtatagttagaacgagattttttttttggcgtagttttcgcggtttttgcgggcgggaattagggggttcgttcgttttgttttttgttttttttttttcggtcgtgtagttcgtagtttcgaaggtggtcgtcgttggggacggcgtcggtttatttcgttttggtggtggcggcggcgaagggggcggtttatttttttttttttttcgtttattattcgtggtaacgtaggtttggggtgtttcgcgtcggttttttattttttcgattcgtttttcgcgaggtaaaatttttatttcggttttgattttatataaagtttcgcggtcgcgagagtttcgtttttttcgtttttttttttttttttcgtttgttcgttttttttattttgcgttcggtttggtcggagcgtttttttt

SEQ ID NO: 21384 - DNA, 922 bp, Artificial Sequence
  chemically treated genomic DNA (Homo sapiens) CpG-island No: 21384
aaaaaaaacgctccgaccaaaccgaacgcaaaataaaaaaaacgaacaaacgaaaaaaaaaaaaaaaaacgaaaaaaacgaaactctcgcgaccgcgaaactttatataaaatcaaaaccgaaataaaaattttacctcgcgaaaaacgaatcgaaaaaataaaaaaccgacgcgaaacaccccaaacctacgttaccacgaataataaacgaaaaaaaaaaaaaaataaaccgcccccttcgccgccgccaccaccaaaacgaaataaaccgacgccgtccccaacgacgaccaccttcgaaactacgaactacacgaccgaaaaaaaaaaaacaaaaaacaaaacgaacgaaccccctaattcccgcccgcaaaaaccgcgaaaactacgccaaaaaaaaaatctcgttctaactataccgaaccgaaaacgaattaaaatacgaccaaatatcgatccctcctccttcccacccctcaaccccgacgcccactcgcgacgacaaccgcgaaacccaacgcccgaccccgcgcgcccaccccgacaccgacccgaccgctcaccgtcgtaataataacaaactttttttttaccgcctccttaactatacgccataaactccccgaccaccgccgccaccgaactcctcctcctactactactactactactactaccgccgcgactcgaccgaaaaaaaaaaaaactaaaaaaaacgtaaaaacgataatcccgcgaaaaaaaacaaaccgataaaaaaaaaaaaaaaaacgccgaaaaaactcgataccacccgacaaaaataccgaaaactcgaaatcgaaattacaacgacaccaactcgcgaaaaaaaaaccaccaaaccacctcaaaaaaccgcaaaaaaataaacgcatccactacgacctccacgaaaaaaa

SEQ ID NO: 21385 - DNA, 734 bp, Artificial Sequence
  chemically treated genomic DNA (Homo sapiens) CpG-island No: 21385
ttcgagagcgaaagatatagatggggttttgtcgtttttcgaagagtcggatgggcgcgttcgttttcggtgtattaagaggttggttcggttaggggcgaggggttcgtatcgaatttcgcgtatttcgtcgcgggcggggttgggtcgtagtcggttcgatttaaggttggtatttaaggttgcggtcggttaggcgaggcgaggcgacgtgagcgagggtgtttagggagaatagtcgttggtagtttaatgttgggtggttaacgttcgacggtgttcggtagtaattcggtcgatatttcgattcggatttcgagttgcgtcgcggacgatgtcgcgggttcgttcgggattacgattttcgacgggttttgcgatcgtttcggggcggtttagcgtgtattgcgtcggttagtttgatagtcgggcgttttattcggttagttttgtttttagcgagggacgttggttttttcgcggttttttttcgatatttttttttattttagttgtttgaaattcggttttacgaatggtaggtagcgtttaaaatttaatttcgtaaagttagtattagttaataaagcgtacggatggaggttacgtgatagtagtgggtcggtttttcggttgagttttgatttttatggttttcgcggttcgttagaaggagtgtggtttatcggaggattttttatattttttttttattattttattgttttcggtgg

SEQ ID NO: 21386 - DNA, 734 bp, Artificial Sequence
  chemically treated genomic DNA (Homo sapiens) CpG-island No: 21386
ccaccgaaaacaataaaataataaaaaaaaaatataaaaaatcctccgataaaccacactccttctaacgaaccgcgaaaaccataaaaatcaaaactcaaccgaaaaaccgacccactactatcacgtaacctccatccgtacgctttattaactaatactaactttacgaaattaaattttaaacgctacctaccattcgtaaaaccgaatttcaaacaactaaaataaaaaaaaatatcgaaaaaaaaccgcgaaaaaaccaacgtccctcgctaaaaacaaaactaaccgaataaaacgcccgactatcaaactaaccgacgcaatacacgctaaaccgccccgaaacgatcgcaaaacccgtcgaaaatcgtaatcccgaacgaacccgcgacatcgtccgcgacgcaactcgaaatccgaatcgaaatatcgaccgaattactaccgaacaccgtcgaacgttaaccacccaacattaaactaccaacgactattctccctaaacaccctcgctcacgtcgcctcgcctcgcctaaccgaccgcaaccttaaataccaaccttaaatcgaaccgactacgacccaaccccgcccgcgacgaaatacgcgaaattcgatacgaacccctcgcccctaaccgaaccaacctcttaatacaccgaaaacgaacgcgcccatccgactcttcgaaaaacgacaaaaccccatctatatctttcgctctcgaa

SEQ ID NO: 21387 - DNA, 734 bp, Artificial Sequence
  chemically treated genomic DNA (Homo sapiens) CpG-island No: 21387
ttatcggaggtagtgaggtaatggaggaagaatgtagggagtttttcggtggattatattttttttagcgagtcgcggaaattatagagattagggtttagtcggagggtcggtttattgttgttacgtggtttttattcgtgcgttttattggttggtgttggttttacggggttgaattttggacgttgtttgttattcgtgggatcgagttttaggtagttggaataaagagagatatcgggggaaagtcgcgagaaggttagcgtttttcgttgggagtagagttagtcgagtagggcgttcggttgttaaattggtcggcgtagtgtacgttgggtcgtttcggagcgatcgtagagttcgtcgggagtcgtagtttcggacgggttcgcggtatcgttcgcgacgtagttcgggattcgggtcggggtgtcggtcgggttgttgtcgggtatcgtcgagcgttagttatttagtattgagttgttagcggttgttttttttaagtattttcgtttacgtcgtttcgtttcgtttgatcggtcgtagttttggatattagttttaaatcgagtcgattacggtttagtttcgttcgcggcgaggtgcgcggggttcggtgcgagtttttcgtttttggtcgggttagttttttgatgtatcggggacgggcgcgtttattcgatttttcgaggggcggtagggttttatttgtgtttttcgttttcgag

SEQ ID NO: 21388 - DNA, 734 bp, Artificial Sequence
  chemically treated genomic DNA (Homo sapiens) CpG-island No: 21388
ctcgaaaacgaaaaacacaaataaaaccctaccgcccctcgaaaaatcgaataaacgcgcccgtccccgatacatcaaaaaactaacccgaccaaaaacgaaaaactcgcaccgaaccccgcgcacctcgccgcgaacgaaactaaaccgtaatcgactcgatttaaaactaatatccaaaactacgaccgatcaaacgaaacgaaacgacgtaaacgaaaatacttaaaaaaaacaaccgctaacaactcaatactaaataactaacgctcgacgatacccgacaacaacccgaccgacaccccgacccgaatcccgaactacgtcgcgaacgataccgcgaacccgtccgaaactacgactcccgacgaactctacgatcgctccgaaacgacccaacgtacactacgccgaccaatttaacaaccgaacgccctactcgactaactctactcccaacgaaaaacgctaaccttctcgcgactttcccccgatatctctctttattccaactacctaaaactcgatcccacgaataacaaacaacgtccaaaattcaaccccgtaaaaccaacaccaaccaataaaacgcacgaataaaaaccacgtaacaacaataaaccgaccctccgactaaaccctaatctctataatttccgcgactcgctaaaaaaaatataatccaccgaaaaactccctacattcttcctccattacctcactacctccgataa

SEQ ID NO: 21389 - DNA, 945 bp, Artificial Sequence
  chemically treated genomic DNA (Homo sapiens) CpG-island No: 21389
cgatttagttttttagtcgttcggggaatatttttagtttttttcggtcgtcgtcgtcgtcgtcgtttcgtcgttttttttttcgtttgtcggtttttttcgtttcgtttcgttcgcgtagcgcgttcggttcgttcgtaggttagtttttttcgggagtttttatttaggcgtatggttttatgaagtaagaggaggaggtagagcgcgagaggtttcgttcgttttagtcgcgtttgggttaggataaaaggtgggaaattcgggttgcgtcgtattttttttttcgttgtcgggttaggtttttttcggttcgtcgtcgttttgttcgtcgggtttgttttcgtcggggcgggcggcggggtcgggaagagatttcgcggttttggggcgagggttcgggggtagcgtgggggaggggtttcgggcggcgggcggggttttaggttatgttttagcggagggtagggggtcgggaggtattgtcggggaggggtaggcggcgtcgtgtttcgggtcgcgaggttcggttttcgtttttggtttttgtttgtattttttttaggaagtaggttcgttcgttgtaatgtttggtggttttcggcgtcgtttggtggtttttatttatcgtttcgtcgtttcgtcgttttttttttcgttcggcgtttggattttattttcgcggttcggtttaagttgttttatttgtcgttttatcgtttttttaattttttagcgtttcgggttttttttttttttattttcgttttttattttttattttgtttttcggttcgtttttttttttttcgttttgttttgtcgtttttttaatattttttatacgcgtatttttttttttttttttttttttttttttatttttatttttgggttttttttttttaattttcgttggttttttattttatgattcgtttattt

SEQ ID NO: 21390 - DNA, 945 bp, Artificial Sequence
  chemically treated genomic DNA (Homo sapiens) CpG-island No: 21390
aaataaacgaatcataaaataaaaaaccaacgaaaattaaaaaaaaaaaacccaaaaataaaaataaaaaaaaaaaaaaaaaaaaaaaaaaaaatacgcgtataaaaaatattaaaaaaacgacaaaacaaaacgaaaaaaaaaaaaacgaaccgaaaaacaaaataaaaaataaaaaacgaaaataaaaaaaaaaaaaacccgaaacgctaaaaaattaaaaaaacgataaaacgacaaataaaacaacttaaaccgaaccgcgaaaataaaatccaaacgccgaacgaaaaaaaaaacgacgaaacgacgaaacgataaataaaaaccaccaaacgacgccgaaaaccaccaaacattacaacgaacgaacctacttcctaaaaaaaatacaaacaaaaaccaaaaacgaaaaccgaacctcgcgacccgaaacacgacgccgcctacccctccccgacaatacctcccgaccccctaccctccgctaaaacataacctaaaaccccgcccgccgcccgaaacccctcccccacgctacccccgaaccctcgccccaaaaccgcgaaatctcttcccgaccccgccgcccgccccgacgaaaacaaacccgacgaacaaaacgacgacgaaccgaaaaaaacctaacccgacaacgaaaaaaaaaatacgacgcaacccgaatttcccaccttttatcctaacccaaacgcgactaaaacgaacgaaacctctcgcgctctacctcctcctcttacttcataaaaccatacgcctaaataaaaactcccgaaaaaaactaacctacgaacgaaccgaacgcgctacgcgaacgaaacgaaacgaaaaaaaccgacaaacgaaaaaaaaaacgacgaaacgacgacgacgacgacgaccgaaaaaaactaaaaatattccccgaacgactaaaaaactaaatcg

SEQ ID NO: 21391 - DNA, 945 bp, Artificial Sequence
  chemically treated genomic DNA (Homo sapiens) CpG-island No: 21391
aggtggacggattatggaatggggggttagcggaggttaaggaaggagggtttaaaggtaggggtgggaaaaagagaagaggaggaggaggaagtgcgcgtgtgaagagtgttaagaaaacgataggatagagcggggaggggaaaagcgggtcgagggatagggtgaaaggtgagaaacgagggtaagaggaaagagggttcggggcgttggggagttggggagacgatggagcgataggtagagtagtttgggtcgagtcgcgggggtggaatttagacgtcgggcgggggagggggcggcggggcggcgggacggtgggtgggggttattaggcggcgtcggagattattaaatattatagcgagcgagtttgttttttggagggagtgtagataaggattaggagcgggagtcgagtttcgcggttcggggtacggcgtcgtttgttttttttcggtagtgtttttcgattttttgtttttcgttgggatatggtttgaggtttcgttcgtcgttcgggattttttttttacgttgttttcggattttcgttttaggatcgcggggttttttttcggtttcgtcgttcgtttcggcgagaataggttcggcgggtaaggcggcggcggatcgagggaggtttggttcggtagcggggagaagggtgcggcgtagttcgagttttttattttttattttggtttagacgcggttggggcggacgggatttttcgcgttttgttttttttttttgttttatggagttatgcgtttgggtgggggttttcgagagaagttggtttgcgggcgggtcggacgcgttgcgcggacgggacggggcgaaggaggtcggtaggcggaggaggaagcggcggggcggcggcggcggcggcggtcgggaagaattagaggtatttttcgggcggttggaggattgagtcg

SEQ ID NO: 21392 - DNA, 945 bp, Artificial Sequence
  chemically treated genomic DNA (Homo sapiens) CpG-island No: 21392
cgactcaatcctccaaccgcccgaaaaatacctctaattcttcccgaccgccgccgccgccgccgccccgccgcttcctcctccgcctaccgacctccttcgccccgtcccgtccgcgcaacgcgtccgacccgcccgcaaaccaacttctctcgaaaacccccacccaaacgcataactccataaaacaaaaaaaaaaaacaaaacgcgaaaaatcccgtccgccccaaccgcgtctaaaccaaaataaaaaataaaaaactcgaactacgccgcacccttctccccgctaccgaaccaaacctccctcgatccgccgccgccttacccgccgaacctattctcgccgaaacgaacgacgaaaccgaaaaaaaaccccgcgatcctaaaacgaaaatccgaaaacaacgtaaaaaaaaaatcccgaacgacgaacgaaacctcaaaccatatcccaacgaaaaacaaaaaatcgaaaaacactaccgaaaaaaaacaaacgacgccgtaccccgaaccgcgaaactcgactcccgctcctaatccttatctacactccctccaaaaaacaaactcgctcgctataatatttaataatctccgacgccgcctaataacccccacccaccgtcccgccgccccgccgccccctcccccgcccgacgtctaaattccacccccgcgactcgacccaaactactctacctatcgctccatcgtctccccaactccccaacgccccgaaccctctttcctcttaccctcgtttctcacctttcaccctatccctcgacccgcttttcccctccccgctctatcctatcgttttcttaacactcttcacacgcgcacttcctcctcctcctcttctctttttcccacccctacctttaaaccctccttccttaacctccgctaaccccccattccataatccgtccacct

SEQ ID NO: 21393 - DNA, 553 bp, Artificial Sequence
  chemically treated genomic DNA (Homo sapiens) CpG-island No: 21393
gagtacgagtgagaaagcggaggaggaggttggttagaggcgtttagtttttttagcggtttgaatttttgattcgatgcgtagagggcggggcgggtcgtttggggtcgcggcgggcggaggtttagtttttttttcggtttagtagggggtacggggagtggtttttcgtcgttttttttttttttgcgggcgtcgggtagattgttgtagtcgtaagcggcgagcgtagtgggcggggcgggtttggtcgggtcgggcggcggcgttgcgttgacgggttgagtttggcggcggcggaagttgtagaggttatcggggcgttaattgggtggtcggtgggtcgttgtggtttcgagtagttttttcgcgcggtttcgtatttcggtaagtagtagcgggtcgcgacgtttagtttgttagtgagttgcgacgggtatatttcggagcgtcggcgattgcggataggttagagtgggggtaggggcgggcgcgggagtagtttagggttagagagggagttcgagttaggttatttttaattatgttcgat

SEQ ID NO: 21394 - DNA, 553 bp, Artificial Sequence
  chemically treated genomic DNA (Homo sapiens) CpG-island No: 21394
atcgaacataattaaaaataacctaactcgaactccctctctaaccctaaactactcccgcgcccgcccctacccccactctaacctatccgcaatcgccgacgctccgaaatatacccgtcgcaactcactaacaaactaaacgtcgcgacccgctactacttaccgaaatacgaaaccgcgcgaaaaaactactcgaaaccacaacgacccaccgaccacccaattaacgccccgataacctctacaacttccgccgccgccaaactcaacccgtcaacgcaacgccgccgcccgacccgaccaaacccgccccgcccactacgctcgccgcttacgactacaacaatctacccgacgcccgcaaaaaaaaaaaaaacgacgaaaaaccactccccgtaccccctactaaaccgaaaaaaaaactaaacctccgcccgccgcgaccccaaacgacccgccccgccctctacgcatcgaatcaaaaattcaaaccgctaaaaaaactaaacgcctctaaccaacctcctcctccgctttctcactcgtactc

SEQ ID NO: 21395 - DNA, 553 bp, Artificial Sequence
  chemically treated genomic DNA (Homo sapiens) CpG-island No: 21395
gtcggatatggttggagatggtttggttcgggttttttttttggttttgggttgttttcgcgttcgtttttgtttttattttaatttgttcgtagtcgtcgacgtttcggggtgtgttcgtcgtagtttattggtaggttgggcgtcgcggttcgttgttgtttgtcggggtgcggggtcgcgcgaagaggttgttcgaggttatagcggtttatcggttatttagttagcgtttcggtggtttttgtagttttcgtcgtcgttagatttagttcgttagcgtagcgtcgtcgttcggttcggttaggttcgtttcgtttattgcgttcgtcgtttgcgattgtagtagtttgttcggcgttcgtaaggaggggaagggcggcgggaagttatttttcgtgttttttgttggatcggaggaggaattgaattttcgttcgtcgcggttttaagcggttcgtttcgttttttacgtatcgaattagggatttaggtcgttagaaaggttaggcgtttttggttaattttttttttcgtttttttattcgtattt

SEQ ID NO: 21396 - DNA, 553 bp, Artificial Sequence
  chemically treated genomic DNA (Homo sapiens) CpG-island No: 21396
aaatacgaataaaaaaacgaaaaaaaaaattaaccaaaaacgcctaacctttctaacgacctaaatccctaattcgatacgtaaaaaacgaaacgaaccgcttaaaaccgcgacgaacgaaaattcaattcctcctccgatccaacaaaaaacacgaaaaataacttcccgccgcccttcccctccttacgaacgccgaacaaactactacaatcgcaaacgacgaacgcaataaacgaaacgaacctaaccgaaccgaacgacgacgctacgctaacgaactaaatctaacgacgacgaaaactacaaaaaccaccgaaacgctaactaaataaccgataaaccgctataacctcgaacaacctcttcgcgcgaccccgcaccccgacaaacaacaacgaaccgcgacgcccaacctaccaataaactacgacgaacacaccccgaaacgtcgacgactacgaacaaattaaaataaaaacaaaaacgaacgcgaaaacaacccaaaaccaaaaaaaaaacccgaaccaaaccatctccaaccatatccgac

SEQ ID NO: 21397 - DNA, 630 bp, Artificial Sequence
  chemically treated genomic DNA (Homo sapiens) CpG-island No: 21397
cgcgtttcggagtcggttttagcgtcgtttaattagtttttatttttttcggtgaaattgttaaattaaaatgaattatttggtttataatggtcgaggcgtttatcgggggcgggcggattcgcggtagtgttttatttttgcggcgtatacggtttcggcgcgtttcggtttatgttaacgaggtttggaacgtgagtgggattatagcgcgtcggtggaggggtcgggcgggcgcggggcgggcgggggagcgggggtcgcgggaggggtcgggtcgtcgtcgtttaggatcgggttttaaaatggttatacgcgtattttcgtagcggaaaaacgtgagtattttggtttttttttaggggaaaagtaattcgcggttttttatcgaattttttattaatttttttttttttttttttacgttcgtaaaagaggttttcgttttttttttttcggtttttttcgatggtcggggggggcggtgggggggtattttttacggacgttttcgtttcggttgtcgtcgtttttttcgtttcggagattttttttttttttttttttttttttttacgtaatatatagaaatgcgcgaggttgtggttggtttttatttttttttcgtgg

SEQ ID NO: 21398 - DNA, 630 bp, Artificial Sequence
  chemically treated genomic DNA (Homo sapiens) CpG-island No: 21398
ccacgaaaaaaaaataaaaaccaaccacaacctcgcgcatttctatatattacgtaaaaaaaaaaaaaaaaaaaaaaaaaaaatctccgaaacgaaaaaaacgacgacaaccgaaacgaaaacgtccgtaaaaaatacccccccaccgccccccccgaccatcgaaaaaaaccgaaaaaaaaaaaacgaaaacctcttttacgaacgtaaaaaaaaaaaaaaaaaaattaataaaaaattcgataaaaaaccgcgaattacttttcccctaaaaaaaaaccaaaatactcacgtttttccgctacgaaaatacgcgtataaccattttaaaacccgatcctaaacgacgacgacccgacccctcccgcgacccccgctcccccgcccgccccgcgcccgcccgacccctccaccgacgcgctataatcccactcacgttccaaacctcgttaacataaaccgaaacgcgccgaaaccgtatacgccgcaaaaataaaacactaccgcgaatccgcccgcccccgataaacgcctcgaccattataaaccaaataattcattttaatttaacaatttcaccgaaaaaaataaaaactaattaaacgacgctaaaaccgactccgaaacgcg

SEQ ID NO: 21399 - DNA, 630 bp, Artificial Sequence
  chemically treated genomic DNA (Homo sapiens) CpG-island No: 21399
ttacgaagaagaaatgaaaattaattatagtttcgcgtatttttgtatattgcgtaaggaaaagggggaaggaaggaagagagttttcgaggcgggaggggcggcggtagtcggggcgggggcgttcgtggaaaatgtttttttatcgtttttttcggttatcgaaaggaatcgagggaaagggagcgaagattttttttgcggacgtggggaaaaagaggaggaaattgatgaagaattcggtgggaggtcgcgggttgttttttttttagaaaaaggttagaatgtttacgttttttcgttacgggggtacgcgtgtggttattttgaggttcggttttgagcggcggcggttcggtttttttcgcggttttcgttttttcgttcgtttcgcgttcgttcggtttttttatcgacgcgttgtaattttatttacgttttaggtttcgttagtatgggtcgaggcgcgtcggggtcgtgtgcgtcgtagagataaggtattgtcgcgggttcgttcgttttcgataagcgtttcggttattatgggttaaatgatttattttaatttggtaattttatcggagggagtggggattggttgagcggcgttaggatcggtttcggaacgcg

SEQ ID NO: 21400 - DNA, 630 bp, Artificial Sequence
  chemically treated genomic DNA (Homo sapiens) CpG-island No: 21400
cgcgttccgaaaccgatcctaacgccgctcaaccaatccccactccctccgataaaattaccaaattaaaataaatcatttaacccataataaccgaaacgcttatcgaaaacgaacgaacccgcgacaataccttatctctacgacgcacacgaccccgacgcgcctcgacccatactaacgaaacctaaaacgtaaataaaattacaacgcgtcgataaaaaaaccgaacgaacgcgaaacgaacgaaaaaacgaaaaccgcgaaaaaaaccgaaccgccgccgctcaaaaccgaacctcaaaataaccacacgcgtacccccgtaacgaaaaaacgtaaacattctaacctttttctaaaaaaaaaacaacccgcgacctcccaccgaattcttcatcaatttcctcctctttttccccacgtccgcaaaaaaaatcttcgctccctttccctcgattcctttcgataaccgaaaaaaacgataaaaaaacattttccacgaacgcccccgccccgactaccgccgcccctcccgcctcgaaaactctcttccttccttcccccttttccttacgcaatatacaaaaatacgcgaaactataattaattttcatttcttcttcgtaa

SEQ ID NO: 21401 - DNA, 504 bp, Artificial Sequence
  chemically treated genomic DNA (Homo sapiens) CpG-island No: 21401
  unsure (196)
atcggtttgtgttttcggtttcgacgtttcgtcgtgtttttcgaggtcgtttttttgcggagttcgttttttttattggtttttagtttcgtagttacgcggttttcgtacggttaagtagtacgggtcgggcgtttgtattttcggagaaaagtcgtcgtttaggtttcgcgttgcggcgttatttgttaaaaantaggggagtcgcgttgagatagagtagtaggaagtagaatagcgggtattggcggtagatttcgcgttttacgtttagtcgtagtcgttgttttagtttttgttttatcgttcgtatttagggtattattttcgtaacggcgaggtcgagattgcgttattggttgaggtagaggttaaggcgattttttatttatatttcgggttttcgttttatcgatttggcggggtatatagacgtttatcggtagttagtcgtcgaaggttgaggtcgcgttcggttgggttaagtttaacgtttttcgtcgt

SEQ ID NO: 21402 - DNA, 504 bp, Artificial Sequence
  chemically treated genomic DNA (Homo sapiens) CpG-island No: 21402
  unsure (309)
acgacgaaaaacgttaaacttaacccaaccgaacgcgacctcaaccttcgacgactaactaccgataaacgtctatataccccgccaaatcgataaaacgaaaacccgaaatataaataaaaaatcgccttaacctctacctcaaccaataacgcaatctcgacctcgccgttacgaaaataataccctaaatacgaacgataaaacaaaaactaaaacaacgactacgactaaacgtaaaacgcgaaatctaccgccaatacccgctattctacttcctactactctatctcaacgcgactcccctantttttaacaaataacgccgcaacgcgaaacctaaacgacgacttttctccgaaaatacaaacgcccgacccgtactacttaaccgtacgaaaaccgcgtaactacgaaactaaaaaccaataaaaaaaacgaactccgcaaaaaaacgacctcgaaaaacacgacgaaacgtcgaaaccgaaaacacaaaccgat

SEQ ID NO: 21403 - DNA, 504 bp, Artificial Sequence
  chemically treated genomic DNA (Homo sapiens) CpG-island No: 21403
  unsure (309)
gcggcggggggcgttgggtttggtttaatcggacgcgattttagttttcggcggttaattgtcggtaggcgtttgtgtgtttcgttaagtcggtggggcggggattcgaagtgtggatggggggtcgttttgatttttgttttagttagtagcgtagtttcggtttcgtcgttacggagatggtgttttgggtgcggacgatggggtagaagttgaagtagcggttgcgattgaacgtgggacgcgagatttgtcgttagtattcgttgttttgttttttgttgttttgttttagcgcggtttttttgntttttaataggtaacgtcgtagcgcggagtttgggcggcggttttttttcgaaggtgtaaacgttcggttcgtgttgtttaatcgtgcggaggtcgcgtaattgcgggattggggattagtggggaaagcgagtttcgtaaaggaacggtttcggggagtacggcggagcgtcgaggtcggaagtataggtcggt

SEQ ID NO: 21404 - DNA, 504 bp, Artificial Sequence
  chemically treated genomic DNA (Homo sapiens) CpG-island No: 21404
  unsure (196)
accgacctatacttccgacctcgacgctccgccgtactccccgaaaccgttcctttacgaaactcgctttccccactaatccccaatcccgcaattacgcgacctccgcacgattaaacaacacgaaccgaacgtttacaccttcgaaaaaaaaccgccgcccaaactccgcgctacgacgttacctattaaaaancaaaaaaaccgcgctaaaacaaaacaacaaaaaacaaaacaacgaatactaacgacaaatctcgcgtcccacgttcaatcgcaaccgctacttcaacttctaccccatcgtccgcacccaaaacaccatctccgtaacgacgaaaccgaaactacgctactaactaaaacaaaaatcaaaacgaccccccatccacacttcgaatccccgccccaccgacttaacgaaacacacaaacgcctaccgacaattaaccgccgaaaactaaaatcgcgtccgattaaaccaaacccaacgccccccgccgc

SEQ ID NO: 21405 - DNA, 743 bp, Artificial Sequence
  chemically treated genomic DNA (Homo sapiens) CpG-island No: 21405
tcgagcgtcgaattgttcgggaggcgttcgttcgtgcggatgttaggggtatcggggtagttcgggttcgtagttttcgagtttttcgtacgcgtttttgataaggtattttttattcgggtttcgttttgtgtgtgtatttttttttttttttttagtgttcggtatcgggttttcggtcgttttttttttttttttcgtttttcgttttttttttcggggcggattatttttttcgggttgcgtttcggatttcggggatgtttttagcgttcggcgagtaggcgatttatagtcgagcggttcgagtcggttggaggagcgttgggggcgcgcgggggcggcgaggggcgcgagcgggttagaattttcgatttcggaggtttcgtcgtaggttggggttgggggttagggggcgcggcgttagagggaggcggggggagaaaggattcgagtagtttcgatttggggagagagcgagcgagggggcgaggagagggagcgagggcgcggcgagtcggagggagagcgagcggtgtagtgatagggattgttattggggttaaaggagtatagttttaggaagtagggcggtcgaggcgtcgtttcgtgcgcgtttttcggcgggatttcgcgtttttgtacgtttttttcgtagtttttgtttattcggatttttatcggtgtttcgaagttttagggtttcgagaggaggagggagtcgagggcgaggttcggtagtt

SEQ ID NO: 21406 - DNA, 743 bp, Artificial Sequence
  chemically treated genomic DNA (Homo sapiens) CpG-island No: 21406
aactaccgaacctcgccctcgactccctcctcctctcgaaaccctaaaacttcgaaacaccgataaaaatccgaataaacaaaaactacgaaaaaaacgtacaaaaacgcgaaatcccgccgaaaaacgcgcacgaaacgacgcctcgaccgccctacttcctaaaactatactcctttaaccccaataacaatccctatcactacaccgctcgctctccctccgactcgccgcgccctcgctccctctcctcgccccctcgctcgctctctccccaaatcgaaactactcgaatcctttctccccccgcctccctctaacgccgcgccccctaacccccaaccccaacctacgacgaaacctccgaaatcgaaaattctaacccgctcgcgcccctcgccgcccccgcgcgcccccaacgctcctccaaccgactcgaaccgctcgactataaatcgcctactcgccgaacgctaaaaacatccccgaaatccgaaacgcaacccgaaaaaaataatccgccccgaaaaaaaaaacgaaaaacgaaaaaaaaaaaaaaaacgaccgaaaacccgataccgaacactaaaaaaaaaaaaaaaaatacacacacaaaacgaaacccgaataaaaaataccttatcaaaaacgcgtacgaaaaactcgaaaactacgaacccgaactaccccgatacccctaacatccgcacgaacgaacgcctcccgaacaattcgacgctcga

SEQ ID NO: 21407 - DNA, 743 bp, Artificial Sequence
  chemically treated genomic DNA (Homo sapiens) CpG-island No: 21407
ggttatcgggtttcgttttcggttttttttttttttcgaaattttggggtttcggggtatcggtgggggttcgagtgggtagggattgcgggaggggcgtgtaggggcgcggggtttcgtcggggagcgcgtacggagcggcgtttcggtcgttttgttttttggagttgtgtttttttgattttagtggtagtttttgttattgtatcgttcgtttttttttcggttcgtcgcgttttcgtttttttttttcgttttttcgttcgttttttttttagatcgaggttgttcgggtttttttttttttcgtttttttttagcgtcgcgttttttggtttttagttttagtttgcggcgggattttcggggtcgaaggttttggttcgttcgcgtttttcgtcgttttcgcgcgtttttagcgtttttttagtcggttcgggtcgttcggttatggatcgtttgttcgtcgggcgttgaaggtattttcgggattcggagcgtagttcgggaaaggtaattcgtttcgggaagggaggcggagggcgggggagggggaggaggcggtcgggagttcggtgtcgagtattagaggaagggaaaaaaatgtatatataaagcggagttcgggtgagaggtgttttgttagaggcgcgtgcgaggggttcggaggttgcggattcgggttgtttcggtgtttttgatattcgtacgagcgggcgtttttcgggtaattcggcgttcgg

SEQ ID NO: 21408 - DNA, 743 bp, Artificial Sequence
  chemically treated genomic DNA (Homo sapiens) CpG-island No: 21408
ccgaacgccgaattacccgaaaaacgcccgctcgtacgaatatcaaaaacaccgaaacaacccgaatccgcaacctccgaacccctcgcacgcgcctctaacaaaacacctctcacccgaactccgctttatatatacatttttttcccttcctctaatactcgacaccgaactcccgaccgcctcctccccctcccccgccctccgcctcccttcccgaaacgaattacctttcccgaactacgctccgaatcccgaaaataccttcaacgcccgacgaacaaacgatccataaccgaacgacccgaaccgactaaaaaaacgctaaaaacgcgcgaaaacgacgaaaaacgcgaacgaaccaaaaccttcgaccccgaaaatcccgccgcaaactaaaactaaaaaccaaaaaacgcgacgctaaaaaaaaacgaaaaaaaaaaaaacccgaacaacctcgatctaaaaaaaaaacgaacgaaaaaacgaaaaaaaaaaacgaaaacgcgacgaaccgaaaaaaaaacgaacgatacaataacaaaaactaccactaaaatcaaaaaaacacaactccaaaaaacaaaacgaccgaaacgccgctccgtacgcgctccccgacgaaaccccgcgcccctacacgcccctcccgcaatccctacccactcgaacccccaccgataccccgaaaccccaaaatttcgaaaaaaaaaaaaaaccgaaaacgaaacccgataacc

SEQ ID NO: 21409 - DNA, 504 bp, Artificial Sequence
  chemically treated genomic DNA (Homo sapiens) CpG-island No: 21409
cgcgcgcggggatcgtttggacgtaatcgtttttcgtttcggtgttcgtttatttagtcggggttggttttgttattgtcgttatatttcgtttttaattttcgtttcgttttcgttcggttttgatatcgcgttttatagttatttcggtttattcgattcgtttcgtattttatatacggttcgtcggcggtcgtcgttattttcgcgcgttcgttcgttttaatttcgtttttagacgttatgtttacgtgatcgttcgttttcggattcggagcgtgggcggggatttcgttacgtgacgttgtcgcggggcggtgttaagatggcgaggtttaaagaggtgaggagtcggtagcgggggcggttgtaattgtgaggaaggttgtagagtggcgacgtttacgtcgtaggttggaggttgtggggggtggtcgggcgttagtttttaggtcgtagaagtgatttgcggtggagtttttttttcgttgttggagaacggag

SEQ ID NO: 21410 - DNA, 504 bp, Artificial Sequence
  chemically treated genomic DNA (Homo sapiens) CpG-island No: 21410
ctccgttctccaacaacgaaaaaaaaactccaccgcaaatcacttctacgacctaaaaactaacgcccgaccaccccccacaacctccaacctacgacgtaaacgtcgccactctacaaccttcctcacaattacaaccgcccccgctaccgactcctcacctctttaaacctcgccatcttaacaccgccccgcgacaacgtcacgtaacgaaatccccgcccacgctccgaatccgaaaacgaacgatcacgtaaacataacgtctaaaaacgaaattaaaacgaacgaacgcgcgaaaataacgacgaccgccgacgaaccgtatataaaatacgaaacgaatcgaataaaccgaaataactataaaacgcgatatcaaaaccgaacgaaaacgaaacgaaaattaaaaacgaaatataacgacaataacaaaaccaaccccgactaaataaacgaacaccgaaacgaaaaacgattacgtccaaacgatccccgcgcgcg

SEQ ID NO: 21411 - DNA, 504 bp, Artificial Sequence
  chemically treated genomic DNA (Homo sapiens) CpG-island No: 21411
tttcgttttttagtagcgaggagggaattttatcgtaggttatttttgcggtttgggagttggcgttcggttattttttatagtttttaatttacggcgtagacgtcgttattttgtagttttttttatagttatagtcgttttcgttgtcggttttttatttttttgggtttcgttattttggtatcgtttcgcggtaacgttacgtgacgaaattttcgtttacgtttcgggttcgggggcgagcggttacgtgggtatggcgtttgggggcggggttagggcgagcgggcgcgcgaagatggcggcggtcgtcggcgggtcgtgtgtgaggtgcggagcgggtcgaatggatcggggtggttgtgaagcgcggtgttaaagtcgagcggaagcggggcgggaattggaggcgggatgtggcgatagtggtagggttaatttcggttggatggacgggtatcgagacgggaggcggttacgtttaaacggttttcgcgcgcg

SEQ ID NO: 21412 - DNA, 504 bp, Artificial Sequence
  chemically treated genomic DNA (Homo sapiens) CpG-island No: 21412
cgcgcgcgaaaaccgtttaaacgtaaccgcctcccgtctcgatacccgtccatccaaccgaaattaaccctaccactatcgccacatcccgcctccaattcccgccccgcttccgctcgactttaacaccgcgcttcacaaccaccccgatccattcgacccgctccgcacctcacacacgacccgccgacgaccgccgccatcttcgcgcgcccgctcgccctaaccccgcccccaaacgccatacccacgtaaccgctcgcccccgaacccgaaacgtaaacgaaaatttcgtcacgtaacgttaccgcgaaacgataccaaaataacgaaacccaaaaaaataaaaaaccgacaacgaaaacgactataactataaaaaaaactacaaaataacgacgtctacgccgtaaattaaaaactataaaaaataaccgaacgccaactcccaaaccgcaaaaataacctacgataaaattccctcctcgctactaaaaaacgaaa

SEQ ID NO: 21413 - DNA, 689 bp, Artificial Sequence
  chemically treated genomic DNA (Homo sapiens) CpG-island No: 21413
tcgacgtcgtagcggaaagttttttttttattttttcgtcgagtttcgtttcgcggcggcggtcgtcgtttattttaggtttcgtggtttttagcgatcgtcgcggtcgtcgttttttcgaattcggggttcgggttttttgtgtagtattaatttcgttttttcggtcgtcgtcgttattttagtttgtgcggtaaaatgcgtttttttggatggttgggatttagtttagggcgtagtttttcgggttcgagagtcggaggtcgggttttttaagttttttcgttatttttagtttcgtcgttgttatagtttagaggttcgaaatttattcgggttttagcgaatttgattaaataatttttgaaatttatagtttggtgtcgtgtgcgttaaatcggggcgacgttgggagtacgcggcgttttcgcgttatacgtcgttttgtacgttattcggttttagcggttttttttcgtttttcgtttttcgtttttagtttcggtttttacggcgtaggcgcgttgttttttcgtttttgtcgggttgcgggtcgcgggggtggttagcgaggagttttcgggaagtttcgcgttggtggagcgtttgggttaattagataaacgagggtagcggaaatagtgtattattgttttcgggtgttagaaattaaataaggttattttttt

SEQ ID NO: 21414 - DNA, 689 bp, Artificial Sequence
  chemically treated genomic DNA (Homo sapiens) CpG-island No: 21414
aaaaaaataaccttatttaatttctaacacccgaaaacaataatacactatttccgctaccctcgtttatctaattaacccaaacgctccaccaacgcgaaacttcccgaaaactcctcgctaaccacccccgcgacccgcaacccgacaaaaacgaaaaaacaacgcgcctacgccgtaaaaaccgaaactaaaaacgaaaaacgaaaaacgaaaaaaaaccgctaaaaccgaataacgtacaaaacgacgtataacgcgaaaacgccgcgtactcccaacgtcgccccgatttaacgcacacgacaccaaactataaatttcaaaaattatttaatcaaattcgctaaaacccgaataaatttcgaacctctaaactataacaacgacgaaactaaaaataacgaaaaaacttaaaaaacccgacctccgactctcgaacccgaaaaactacgccctaaactaaatcccaaccatccaaaaaaacgcattttaccgcacaaactaaaataacgacgacgaccgaaaaaacgaaattaatactacacaaaaaacccgaaccccgaattcgaaaaaacgacgaccgcgacgatcgctaaaaaccacgaaacctaaaataaacgacgaccgccgccgcgaaacgaaactcgacgaaaaaataaaaaaaaaactttccgctacgacgtcga

SEQ ID NO: 21415 - DNA, 689 bp, Artificial Sequence
  chemically treated genomic DNA (Homo sapiens) CpG-island No: 21415
ggggaggtgattttgtttggtttttggtattcgagaatagtggtgtattgttttcgttgttttcgtttgtttaattggtttagacgttttattagcgcgaagtttttcgggagtttttcgttggttattttcgcggttcgtagttcggtagaggcgggaaagtagcgcgtttgcgtcgtgggaatcggggttggaggcgaaaagcggggagcggaggggggtcgttggagtcgagtagcgtatagagcggcgtgtgacgcggggacgtcgcgtgtttttaacgtcgtttcggtttgacgtatacggtattaaattgtgagttttaggggttatttggttagattcgttgggattcgagtgggtttcgggtttttgggttgtggtagcggcgggattgagggtggcggaagaatttgggggattcggttttcggttttcgggttcggggagttacgttttaggttgggttttagttatttaaaaggacgtattttgtcgtataggttaagatggcggcggcggtcgaggaggcggagttggtgttatataaggagttcgggtttcgggttcggggaggcggcggtcgcggcggtcgttgggggttacggagtttgaggtgagcggcggtcgtcgtcgcggggcgggattcggcggggggatggggggggggtttttcgttgcggcgtcgg

SEQ ID NO: 21416 - DNA, 689 bp, Artificial Sequence
  chemically treated genomic DNA (Homo sapiens) CpG-island No: 21416
ccgacgccgcaacgaaaaaccccccccccatccccccgccgaatcccgccccgcgacgacgaccgccgctcacctcaaactccgtaacccccaacgaccgccgcgaccgccgcctccccgaacccgaaacccgaactccttatataacaccaactccgcctcctcgaccgccgccgccatcttaacctatacgacaaaatacgtccttttaaataactaaaacccaacctaaaacgtaactccccgaacccgaaaaccgaaaaccgaatcccccaaattcttccgccaccctcaatcccgccgctaccacaacccaaaaacccgaaacccactcgaatcccaacgaatctaaccaaataacccctaaaactcacaatttaataccgtatacgtcaaaccgaaacgacgttaaaaacacgcgacgtccccgcgtcacacgccgctctatacgctactcgactccaacgacccccctccgctccccgcttttcgcctccaaccccgattcccacgacgcaaacgcgctactttcccgcctctaccgaactacgaaccgcgaaaataaccaacgaaaaactcccgaaaaacttcgcgctaataaaacgtctaaaccaattaaacaaacgaaaacaacgaaaacaatacaccactattctcgaataccaaaaaccaaacaaaatcacctcccc

SEQ ID NO: 21417 - DNA, 558 bp, Artificial Sequence
  chemically treated genomic DNA (Homo sapiens) CpG-island No: 21417
gttttcgttcgtcgcggggttagcgtcggtttttaagagtaggagtttcgttagtcggttcgggttgttgacgcgtaggatgttgatgtcgttttcgtagtaaaacgtttggattagggtgaagtggatttgtagagttatatttttgtcgtcgttttcgttcgtcgttagtaggtataatattacgttatcggggtcgttgggggtagcgggcggggttagtgagcgtagaagcgcgggcgtttttaattattgttcgggtttttgggggtcgtcgttcggttcgttcgttttttttttttcgagataggtagaaaagcgataggaagtggcgcggtcgggcgaggggcgtttagttaaggcgatttttcgggttggggcgggaaggggtgttatgggggacgcgtaagggttttatttatacgttgagtagtttggtcgtttcgtatatttcgatagtgatcgtgcgttgatttagggttttgttgagtattttttttagggtattttttattttatttattttatacgcgggtaagggcgaggggtttcgttagt

SEQ ID NO: 21418 - DNA, 558 bp, Artificial Sequence
  chemically treated genomic DNA (Homo sapiens) CpG-island No: 21418
actaacgaaacccctcgcccttacccgcgtataaaataaataaaataaaaaataccctaaaaaaaatactcaacaaaaccctaaatcaacgcacgatcactatcgaaatatacgaaacgaccaaactactcaacgtataaataaaacccttacgcgtcccccataacaccccttcccgccccaacccgaaaaatcgccttaactaaacgcccctcgcccgaccgcgccacttcctatcgcttttctacctatctcgaaaaaaaaaaaacgaacgaaccgaacgacgacccccaaaaacccgaacaataattaaaaacgcccgcgcttctacgctcactaaccccgcccgctacccccaacgaccccgataacgtaatattatacctactaacgacgaacgaaaacgacgacaaaaatataactctacaaatccacttcaccctaatccaaacgttttactacgaaaacgacatcaacatcctacgcgtcaacaacccgaaccgactaacgaaactcctactcttaaaaaccgacgctaaccccgcgacgaacgaaaac

SEQ ID NO: 21419 - DNA, 558 bp, Artificial Sequence
  chemically treated genomic DNA (Homo sapiens) CpG-island No: 21419
gttgacgggatttttcgtttttgttcgcgtgtaggatggataaggtgggggatgttttggaggaagtgtttagtaaagttttgagttagcgtacgattattgtcggggtgtacgaagcggttaagttgtttaacgtgtaagtggggtttttgcgcgttttttatggtattttttttcgttttagttcgggaggtcgttttggttgggcgtttttcgttcggtcgcgttattttttgtcgtttttttgtttgtttcggaagggagggggcgagcgggtcgggcggcgatttttagggattcgggtagtggttgagggcgttcgcgtttttgcgtttattggtttcgttcgttgtttttagcgatttcgataacgtggtgttgtgtttgttggcggcggacgaggacgacgatagagatgtggttttgtagatttattttattttgatttaggcgttttgttgcgagaacgatattaatattttgcgcgttagtaattcgggtcggttggcggagtttttgtttttggagatcgacgttggtttcgcggcgagcgagggt

SEQ ID NO: 21420 - DNA, 558 bp, Artificial Sequence
  chemically treated genomic DNA (Homo sapiens) CpG-island No: 21420
accctcgctcgccgcgaaaccaacgtcgatctccaaaaacaaaaactccgccaaccgacccgaattactaacgcgcaaaatattaatatcgttctcgcaacaaaacgcctaaatcaaaataaaataaatctacaaaaccacatctctatcgtcgtcctcgtccgccgccaacaaacacaacaccacgttatcgaaatcgctaaaaacaacgaacgaaaccaataaacgcaaaaacgcgaacgccctcaaccactacccgaatccctaaaaatcgccgcccgacccgctcgccccctcccttccgaaacaaacaaaaaaacgacaaaaaataacgcgaccgaacgaaaaacgcccaaccaaaacgacctcccgaactaaaacgaaaaaaaataccataaaaaacgcgcaaaaaccccacttacacgttaaacaacttaaccgcttcgtacaccccgacaataatcgtacgctaactcaaaactttactaaacacttcctccaaaacatcccccaccttatccatcctacacgcgaacaaaaacgaaaaatcccgtcaac

SEQ ID NO: 21421 - DNA, 538 bp, Artificial Sequence
  chemically treated genomic DNA (Homo sapiens) CpG-island No: 21421
ttttcgcgggaggtttggtttgcgggatttcgggttggggtcgtacgggttggtaggcgggtttcgggtaataagggcgcggttgcggattggcgggcggatttcggggaggggttttacggaggcgtcgcggtcggagcggagcggagtcgttcgggttgggcgcgtagcgttgtcgggcgggcggtggcgttgcggaggcggtggtcgaggtcgacgagcgcggaggaggggttcgaggttggggcggttggtggtagttgttttagtgacgattgtcggtatcgcggcgatttgaggagattaagtcgtaggtttcgtcgtcgttattattttcgttagtttttttttttcgttttcggtcggggcgttaggaatgggttttaatcgtcgtgggtttcgtattttgcgtcgttcgtaggttttagtagtcggaggtcgatcggttttttattatttttcgttttagttaagtcgtttttattttaaattttcgggaaggaagatgagggagacgggttcggcgtttagtagttag

SEQ ID NO: 21422 - DNA, 538 bp, Artificial Sequence
  chemically treated genomic DNA (Homo sapiens) CpG-island No: 21422
ctaactactaaacgccgaacccgtctccctcatcttccttcccgaaaatttaaaataaaaacgacttaactaaaacgaaaaataataaaaaaccgatcgacctccgactactaaaacctacgaacgacgcaaaatacgaaacccacgacgattaaaacccattcctaacgccccgaccgaaaacgaaaaaaaaaaactaacgaaaataataacgacgacgaaacctacgacttaatctcctcaaatcgccgcgataccgacaatcgtcactaaaacaactaccaccaaccgccccaacctcgaacccctcctccgcgctcgtcgacctcgaccaccgcctccgcaacgccaccgcccgcccgacaacgctacgcgcccaacccgaacgactccgctccgctccgaccgcgacgcctccgtaaaacccctccccgaaatccgcccgccaatccgcaaccgcgcccttattacccgaaacccgcctaccaacccgtacgaccccaacccgaaatcccgcaaaccaaacctcccgcgaaaa

SEQ ID NO: 21423 - DNA, 538 bp, Artificial Sequence
  chemically treated genomic DNA (Homo sapiens) CpG-island No: 21423
ttggttgttaagcgtcgggttcgttttttttattttttttttcggggatttggggtggggacggtttggttagggcgaggggtagtgggaggtcggtcggttttcggttattggggtttacgggcgacgtagggtgcggggtttacggcgattggggtttatttttgacgtttcggtcgggagcggagaaggaagattggcgggagtggtggcgacggcggggtttgcggtttgatttttttaggtcgtcgcgatgtcggtagtcgttattgaggtagttgttattagtcgttttagtttcgggtttttttttcgcgttcgtcggtttcggttatcgttttcgtagcgttatcgttcgttcggtagcgttgcgcgtttagttcgggcggtttcgtttcgtttcggtcgcggcgttttcgtgaagttttttttcggggttcgttcgttagttcgtagtcgcgtttttgttgttcggagttcgtttgttagttcgtgcggttttaattcggagtttcgtaagttaagtttttcgcgaaag

SEQ ID NO: 21424 - DNA, 538 bp, Artificial Sequence
  chemically treated genomic DNA (Homo sapiens) CpG-island No: 21424
ctttcgcgaaaaacttaacttacgaaactccgaattaaaaccgcacgaactaacaaacgaactccgaacaacaaaaacgcgactacgaactaacgaacgaaccccgaaaaaaaacttcacgaaaacgccgcgaccgaaacgaaacgaaaccgcccgaactaaacgcgcaacgctaccgaacgaacgataacgctacgaaaacgataaccgaaaccgacgaacgcgaaaaaaaaacccgaaactaaaacgactaataacaactacctcaataacgactaccgacatcgcgacgacctaaaaaaatcaaaccgcaaaccccgccgtcgccaccactcccgccaatcttccttctccgctcccgaccgaaacgtcaaaaataaaccccaatcgccgtaaaccccgcaccctacgtcgcccgtaaaccccaataaccgaaaaccgaccgacctcccactacccctcgccctaaccaaaccgtccccaccccaaatccccgaaaaaaaaaataaaaaaaacgaacccgacgcttaacaaccaa

SEQ ID NO: 21425 - DNA, 550 bp, Artificial Sequence
  chemically treated genomic DNA (Homo sapiens) CpG-island No: 21425
gcgcggaaataggagtttattaagtcgttgtttataggtttttcgcgtttagtttagtttcgcggtttttcgattcgggggttcgaatcgtcgtcgcgttcggaggagacgttttttcggttataaagggaagattcgggttacgttcgtcgttatattttttttgttcggttttcgcgttcgaaatcgtatcgcgtcgttatttattcgtcgtttttcgtcgcgttgtttcgttcggggttggaattcgttcgggaggcgcgcgtaggtcgcgtagttagaagtcgtagtcgggatcggttgtgtcgtagcggcgcgcgtttttcgtttcggatcgcgcggttacgcggttgagttatttagcgttttacgttaagagtttttttcgcgcgtggtacgtcgggaaggtcgtgtttggggatttcgttcggggtcgtatcgtaaatgggtgtcgttttttttttagtttattttgtatttaattttagcgggcgtatttttttgagttgcgtatatttttttaattattaaaggttgtagacggaaaagt

SEQ ID NO: 21426 - DNA, 550 bp, Artificial Sequence
  chemically treated genomic DNA (Homo sapiens) CpG-island No: 21426
acttttccgtctacaacctttaataattaaaaaaatatacgcaactcaaaaaaatacgcccgctaaaattaaatacaaaataaactaaaaaaaaaacgacacccatttacgatacgaccccgaacgaaatccccaaacacgaccttcccgacgtaccacgcgcgaaaaaaactcttaacgtaaaacgctaaataactcaaccgcgtaaccgcgcgatccgaaacgaaaaacgcgcgccgctacgacacaaccgatcccgactacgacttctaactacgcgacctacgcgcgcctcccgaacgaattccaaccccgaacgaaacaacgcgacgaaaaacgacgaataaataacgacgcgatacgatttcgaacgcgaaaaccgaacaaaaaaaatataacgacgaacgtaacccgaatcttccctttataaccgaaaaaacgtctcctccgaacgcgacgacgattcgaacccccgaatcgaaaaaccgcgaaactaaactaaacgcgaaaaacctataaacaacgacttaataaactcctatttccgcgc

SEQ ID NO: 21427 - DNA, 550 bp, Artificial Sequence
  chemically treated genomic DNA (Homo sapiens) CpG-island No: 21427
attttttcgtttgtaatttttaataattgagagggtatgcgtaatttagaaaagtgcgttcgttgaggttgggtgtagagtggattggaggaaaggcgatatttatttacggtgcggtttcggacggggtttttagatacggttttttcggcgtgttacgcgcggaggggatttttaacgtgaagcgttgggtgatttagtcgcgtggtcgcgcggttcggggcggggggcgcgcgtcgttgcggtatagtcggtttcggttgcggtttttggttgcgcggtttgcgcgcgtttttcgggcggattttagtttcgagcgggatagcgcggcggggagcgacgagtaagtggcggcgcggtacggtttcgggcgcgaagatcgggtagggagagtgtggcggcgggcgtggttcgagttttttttttgtggtcgagggggcgtttttttcggacgcggcggcggttcggattttcgagtcgaaaggtcgcggggttgagttgggcgcgaggaatttgtgggtagcggtttgatgggtttttgttttcgcgt

SEQ ID NO: 21428 - DNA, 550 bp, Artificial Sequence
  chemically treated genomic DNA (Homo sapiens) CpG-island No: 21428
acgcgaaaacaaaaacccatcaaaccgctacccacaaattcctcgcgcccaactcaaccccgcgacctttcgactcgaaaatccgaaccgccgccgcgtccgaaaaaaacgccccctcgaccacaaaaaaaaaactcgaaccacgcccgccgccacactctccctacccgatcttcgcgcccgaaaccgtaccgcgccgccacttactcgtcgctccccgccgcgctatcccgctcgaaactaaaatccgcccgaaaaacgcgcgcaaaccgcgcaaccaaaaaccgcaaccgaaaccgactataccgcaacgacgcgcgccccccgccccgaaccgcgcgaccacgcgactaaatcacccaacgcttcacgttaaaaatcccctccgcgcgtaacacgccgaaaaaaccgtatctaaaaaccccgtccgaaaccgcaccgtaaataaatatcgcctttcctccaatccactctacacccaacctcaacgaacgcacttttctaaattacgcataccctctcaattattaaaaattacaaacgaaaaaat

SEQ ID NO: 21429 - DNA, 971 bp, Artificial Sequence
  chemically treated genomic DNA (Homo sapiens) CpG-island No: 21429
cgtttgcgagagtattacggcgatggttatgtaggttgtcgtttttttttttttaagtatttgtttcgtatttagtagtcgttcgtcgttagtttttaatttcgggttttttttttcgttatatagatttcgttcggttaggcgttgtagggttatcggagaaagcgttcgtaattatatggaggttcgggttcgttttattggttgcggtcgggttagtcgcggtattcgtcggttgcggttggttttagagttgtagcgtttgtacgggttcggagtttatgttacgttttgtttaatttttttcgttatagagttatgtgttgttgttttcgtcgtcgttgttgtcgttgtcgttgtcgtcgttcgtggtgtttcggttttttcgtcgcgtttcgaggtggtagtcgcgggcggggtcgcgggagtagggtttagggtgtagcgcgttttcgtcgtttcggcgcgtttcggtgtagtcgtcgttcgtcgcgggtgatgtcgttattttcggttttagtataagtcgtggtttggcggtcgagttgtattttaaggttggtgcgtatttttttcggtaggggtcgggggttgcgagggaaggcgacgcgtaggtggagtcgcgtcgagtcggagcgcgtaattttggcgtaggcgtcgcggttcgagttgcggttgcggtcgggaatttattcggggacgttcgggggtcgggaggaggtggcggcgagcggagtgggttttcgtttgttgtcgttagggtttgggagattgtttcgttttttgtagtttgagcgtcggtcgtttcggtttcgggcggtcggttttgcgggaggggagtgcggttttttggtttttgaatttttcgcgcgcgttttttttttttattttttttcgttttatcggaaaggcggggagagtcggtttcggttttgttggtttttttcggaggtgggtgtttggtgtttggt

SEQ ID NO: 21430 - DNA, 971 bp, Artificial Sequence
  chemically treated genomic DNA (Homo sapiens) CpG-island No: 21430
accaaacaccaaacacccacctccgaaaaaaaccaacaaaaccgaaaccgactctccccgcctttccgataaaacgaaaaaaaataaaaaaaaaaaacgcgcgcgaaaaattcaaaaaccaaaaaaccgcactcccctcccgcaaaaccgaccgcccgaaaccgaaacgaccgacgctcaaactacaaaaaacgaaacaatctcccaaaccctaacgacaacaaacgaaaacccactccgctcgccgccacctcctcccgacccccgaacgtccccgaataaattcccgaccgcaaccgcaactcgaaccgcgacgcctacgccaaaattacgcgctccgactcgacgcgactccacctacgcgtcgccttccctcgcaacccccgacccctaccgaaaaaaatacgcaccaaccttaaaatacaactcgaccgccaaaccacgacttatactaaaaccgaaaataacgacatcacccgcgacgaacgacgactacaccgaaacgcgccgaaacgacgaaaacgcgctacaccctaaaccctactcccgcgaccccgcccgcgactaccacctcgaaacgcgacgaaaaaaccgaaacaccacgaacgacgacaacgacaacgacaacaacgacgacgaaaacaacaacacataactctataacgaaaaaaattaaacaaaacgtaacataaactccgaacccgtacaaacgctacaactctaaaaccaaccgcaaccgacgaataccgcgactaacccgaccgcaaccaataaaacgaacccgaacctccatataattacgaacgctttctccgataaccctacaacgcctaaccgaacgaaatctatataacgaaaaaaaaaacccgaaattaaaaactaacgacgaacgactactaaatacgaaacaaatacttaaaaaaaaaaaaacgacaacctacataaccatcgccgtaatactctcgcaaacg

SEQ ID NO: 21431 - DNA, 971 bp, Artificial Sequence
  chemically treated genomic DNA (Homo sapiens) CpG-island No: 21431
gttagatattaaatatttattttcgggaggaattagtagagtcgaaatcggtttttttcgttttttcgatagggcggagggaggtgagagaagggagcgcgcgcgaggggtttaggagttaggaagtcgtatttttttttcgtagggtcggtcgttcggggtcgaagcggtcgacgtttagattgtagaaagcggaataattttttaggttttggcggtagtaaacgggagtttatttcgttcgtcgttattttttttcgattttcggacgttttcgaatgagttttcggtcgtaatcgtagttcgggtcgcggcgtttgcgttagggttgcgcgtttcggttcggcgcggttttatttgcgcgtcgttttttttcgtagttttcggtttttgtcgggagaggtgcgtattaattttggggtgtagttcggtcgttaagttacggtttatgttgaggtcggaggtggcggtattattcgcggcgggcggcggttgtatcgggacgcgtcggggcggcgaaggcgcgttgtattttggattttgttttcgcggtttcgttcgcggttgttatttcgaagcgcggcggaggagtcggggtattacgggcggcggtagcggtagcggtagtagcggcgacgggagtagtagtatatgattttgtaacgaggggaattagataaagcgtaatatggatttcgggttcgtgtaggcgttgtagttttgggattaatcgtagtcggcgagtgtcgcgattggttcggtcgtagttaatggggcgggttcgggtttttatgtgattgcgagcgtttttttcggtggttttgtagcgtttgatcggacggggtttgtgtggcgagggaggggattcggggttggagattggcggcgagcgattgttagatgcggagtaggtgtttgggaggggaagaacggtagtttatataattatcgtcgtaatgttttcgtaagcg

SEQ ID NO: 21432 - DNA, 971 bp, Artificial Sequence
  chemically treated genomic DNA (Homo sapiens) CpG-island No: 21432
cgcttacgaaaacattacgacgataattatataaactaccgttcttcccctcccaaacacctactccgcatctaacaatcgctcgccgccaatctccaaccccgaatcccctccctcgccacacaaaccccgtccgatcaaacgctacaaaaccaccgaaaaaaacgctcgcaatcacataaaaacccgaacccgccccattaactacgaccgaaccaatcgcgacactcgccgactacgattaatcccaaaactacaacgcctacacgaacccgaaatccatattacgctttatctaattcccctcgttacaaaatcatatactactactcccgtcgccgctactaccgctaccgctaccgccgcccgtaataccccgactcctccgccgcgcttcgaaataacaaccgcgaacgaaaccgcgaaaacaaaatccaaaatacaacgcgccttcgccgccccgacgcgtcccgatacaaccgccgcccgccgcgaataataccgccacctccgacctcaacataaaccgtaacttaacgaccgaactacaccccaaaattaatacgcacctctcccgacaaaaaccgaaaactacgaaaaaaaacgacgcgcaaataaaaccgcgccgaaccgaaacgcgcaaccctaacgcaaacgccgcgacccgaactacgattacgaccgaaaactcattcgaaaacgtccgaaaatcgaaaaaaaataacgacgaacgaaataaactcccgtttactaccgccaaaacctaaaaaattattccgctttctacaatctaaacgtcgaccgcttcgaccccgaacgaccgaccctacgaaaaaaaaatacgacttcctaactcctaaacccctcgcgcgcgctcccttctctcacctccctccgccctatcgaaaaaacgaaaaaaaccgatttcgactctactaattcctcccgaaaataaatatttaatatctaac

SEQ ID NO: 21433 - DNA, 550 bp, Artificial Sequence
  chemically treated genomic DNA (Homo sapiens) CpG-island No: 21433
gcggttatgttcgggttttagagcgtttgtcgtagtttgcgtttcgtagtttcgtagtttcgcgttcgtcgtcgtttttttaatgggtaatttgttcggcggggttagttttcgcgagtttattatcgtggaggattgcgattttatttggtagatcgattcggagttcgagttcgaagaattagggtcgggcggcggtagcgagggttcggggtaggagttcgagtagttcgcgtagttttcggagtaagtcggcgggcggttcggcgttagtttcgcgtcggacgaggacgtcgaggcggcgggcgtcgagtaggtacgcggtttagcggtggtttcgggtcgggttggggcgtttcgatattttagaggggtaagtgttaagtcgttttcgcgttcggaggttaggggcgttaggtggttgttcgtcgttgcgattcgattttttcgcgtcgcggttgatttgtttttcggtggagttcgggggtttgtaggagtttaaagcgtcggatttttttattgtcggtttggggtttggtcgagggtacgg

SEQ ID NO: 21434 - DNA, 550 bp, Artificial Sequence
  chemically treated genomic DNA (Homo sapiens) CpG-island No: 21434
ccgtaccctcgaccaaaccccaaaccgacaataaaaaaatccgacgctttaaactcctacaaacccccgaactccaccgaaaaacaaatcaaccgcgacgcgaaaaaatcgaatcgcaacgacgaacaaccacctaacgcccctaacctccgaacgcgaaaacgacttaacacttacccctctaaaatatcgaaacgccccaacccgacccgaaaccaccgctaaaccgcgtacctactcgacgcccgccgcctcgacgtcctcgtccgacgcgaaactaacgccgaaccgcccgccgacttactccgaaaactacgcgaactactcgaactcctaccccgaaccctcgctaccgccgcccgaccctaattcttcgaactcgaactccgaatcgatctaccaaataaaatcgcaatcctccacgataataaactcgcgaaaactaaccccgccgaacaaattacccattaaaaaaacgacgacgaacgcgaaactacgaaactacgaaacgcaaactacgacaaacgctctaaaacccgaacataaccgc

SEQ ID NO: 21435 - DNA, 550 bp, Artificial Sequence
  chemically treated genomic DNA (Homo sapiens) CpG-island No: 21435
tcgtgttttcggttaggttttaggtcggtagtgggagggttcggcgttttgggtttttgtaggttttcgggttttatcgggagataggttagtcgcggcgcggaggggtcgggtcgtagcggcgagtagttatttggcgtttttggttttcgagcgcgagggcggtttggtatttgtttttttggggtgtcggggcgttttagttcgattcgaggttatcgttgggtcgcgtatttgttcggcgttcgtcgtttcggcgttttcgttcggcgcggggttggcgtcgggtcgttcgtcggtttgtttcgggggttgcgcgggttgttcggatttttgtttcgggttttcgttgtcgtcgttcggttttggtttttcgggttcgggtttcgagtcggtttgttaggtggagtcgtagttttttacggtggtgggttcgcggaagttgatttcgtcgagtaggttgtttattgaagaggcggcggcgggcgcggggttgcggggttgcggggcgtaagttgcggtaggcgttttagggttcgggtatggtcgt

SEQ ID NO: 21436 - DNA, 550 bp, Artificial Sequence
  chemically treated genomic DNA (Homo sapiens) CpG-island No: 21436
acgaccatacccgaaccctaaaacgcctaccgcaacttacgccccgcaaccccgcaaccccgcgcccgccgccgcctcttcaataaacaacctactcgacgaaatcaacttccgcgaacccaccaccgtaaaaaactacgactccacctaacaaaccgactcgaaacccgaacccgaaaaaccaaaaccgaacgacgacaacgaaaacccgaaacaaaaatccgaacaacccgcgcaacccccgaaacaaaccgacgaacgacccgacgccaaccccgcgccgaacgaaaacgccgaaacgacgaacgccgaacaaatacgcgacccaacgataacctcgaatcgaactaaaacgccccgacaccccaaaaaaacaaataccaaaccgccctcgcgctcgaaaaccaaaaacgccaaataactactcgccgctacgacccgacccctccgcgccgcgactaacctatctcccgataaaacccgaaaacctacaaaaacccaaaacgccgaaccctcccactaccgacctaaaacctaaccgaaaacacga

SEQ ID NO: 21437 - DNA, 591 bp, Artificial Sequence
  chemically treated genomic DNA (Homo sapiens) CpG-island No: 21437
tttcgcgtcgcgatcgttaggaggcgtcgttcgggagaggaagtttagttgggttcggtcgggtttcggaggcgtcgttcgggagaggaagtttagttgggttcggtcgggttttagaggcgtagggcgggagtcgtttcgcgtagggttttttttaagtcggcgttaggttttgttttcgttcggttttgttttcgtttggtttcgttcgggtcgcgagtattggcgggttttgggttttgtgatcggttaggcggcgttagcgggcgcggcggagggttggtcggtttcgggggagttttcgcggtcgtcgggggcgcggcggtagagcgcgaggtcgggtagggggttagattcggagtcgaggcgcgttcgatagtcgtagcgtttatggcgggcggaggagtcggggatttcggtttgggggcggtcgtcgttttagcgttcgagattcgcgagtatttttttaaggtgttggtgatcggcgagtttggcgtgggtaagattagtattattaagcgttacgtttattagttttttttttagtattatcgggttattatcggggtggatttcgtttttaaggttttt

SEQ ID NO: 21438 - DNA, 591 bp, Artificial Sequence
  chemically treated genomic DNA (Homo sapiens) CpG-island No: 21438
aaaaaccttaaaaacgaaatccaccccgataataacccgataatactaaaaaaaaaactaataaacgtaacgcttaataatactaatcttacccacgccaaactcgccgatcaccaacaccttaaaaaaatactcgcgaatctcgaacgctaaaacgacgaccgcccccaaaccgaaatccccgactcctccgcccgccataaacgctacgactatcgaacgcgcctcgactccgaatctaaccccctacccgacctcgcgctctaccgccgcgcccccgacgaccgcgaaaactcccccgaaaccgaccaaccctccgccgcgcccgctaacgccgcctaaccgatcacaaaacccaaaacccgccaatactcgcgacccgaacgaaaccaaacgaaaacaaaaccgaacgaaaacaaaacctaacgccgacttaaaaaaaaccctacgcgaaacgactcccgccctacgcctctaaaacccgaccgaacccaactaaacttcctctcccgaacgacgcctccgaaacccgaccgaacccaactaaacttcctctcccgaacgacgcctcctaacgatcgcgacgcgaaa

SEQ ID NO: 21439 - DNA, 591 bp, Artificial Sequence
  chemically treated genomic DNA (Homo sapiens) CpG-island No: 21439
gaggattttgagggcgaagtttatttcgatggtggttcggtagtgttgggagaagagttggtggacgtagcgtttgatgatgttggttttgtttacgttaagttcgtcgattattagtattttgaagaggtgttcgcgggtttcgggcgttggggcggcggtcgtttttaggtcggggttttcggttttttcgttcgttatgagcgttgcggttgtcgggcgcgtttcgatttcgagtttggttttttgttcggtttcgcgttttgtcgtcgcgttttcggcggtcgcggaaattttttcgaggtcggttagtttttcgtcgcgttcgttgacgtcgtttgatcggttataggatttagaattcgttagtgttcgcggttcgggcggggttagacgagggtagggtcggacgagggtagggtttggcgtcggtttggggaggattttgcgcgaggcggttttcgttttgcgtttttgaagttcggtcgggtttaattggattttttttttcgggcggcgttttcgaagttcggtcgggtttagttggattttttttttcgggcggcgttttttggcggtcgcggcgcggag

SEQ ID NO: 21440 - DNA, 591 bp, Artificial Sequence
  chemically treated genomic DNA (Homo sapiens) CpG-island No: 21440
ctccgcgccgcgaccgccaaaaaacgccgcccgaaaaaaaaaatccaactaaacccgaccgaacttcgaaaacgccgcccgaaaaaaaaaatccaattaaacccgaccgaacttcaaaaacgcaaaacgaaaaccgcctcgcgcaaaatcctccccaaaccgacgccaaaccctaccctcgtccgaccctaccctcgtctaaccccgcccgaaccgcgaacactaacgaattctaaatcctataaccgatcaaacgacgtcaacgaacgcgacgaaaaactaaccgacctcgaaaaaatttccgcgaccgccgaaaacgcgacgacaaaacgcgaaaccgaacaaaaaaccaaactcgaaatcgaaacgcgcccgacaaccgcaacgctcataacgaacgaaaaaaccgaaaaccccgacctaaaaacgaccgccgccccaacgcccgaaacccgcgaacacctcttcaaaatactaataatcgacgaacttaacgtaaacaaaaccaacatcatcaaacgctacgtccaccaactcttctcccaacactaccgaaccaccatcgaaataaacttcgccctcaaaatcctc

SEQ ID NO: 21441 - DNA, 534 bp, Artificial Sequence
  chemically treated genomic DNA (Homo sapiens) CpG-island No: 21441
aagcggtttcgtttcgggtttatttcgaggtttggtttaatcgcgtttcggtagttttcggaataggagcgttgcgagacggtcggttttaagtgggtttgggcgcgggggagaggcgggtttgttttcgggaattgtaaggttttgtgagcgggaggattgggatttcggtcgcggttgttggaagcgtcgaagtttagcggggtcgcggatattgatttgtgtttagaatttattttggttcgtagagtttgtcgcgagtttttggcgttttttgtggcgggtttttggagttattttttcgagcggaagttagttcgcggttcggatttcggcgggatttgttcggaggaatggcgtcgtcgggtgaggagttgcgcgtggttttggggagagggttgtcgttcgcgggaggttattagtcgtcgttcgagagtcggttaggcgggattttttttttttgcgggataggggtatgggtataagttttggttggggcgttttcggatcgagggttcgaaggagggttgcgag

SEQ ID NO: 21442 - DNA, 534 bp, Artificial Sequence
  chemically treated genomic DNA (Homo sapiens) CpG-island No: 21442
ctcgcaaccctccttcgaaccctcgatccgaaaacgccccaaccaaaacttatacccatacccctatcccgcaaaaaaaaaaaatcccgcctaaccgactctcgaacgacgactaataacctcccgcgaacgacaaccctctccccaaaaccacgcgcaactcctcacccgacgacgccattcctccgaacaaatcccgccgaaatccgaaccgcgaactaacttccgctcgaaaaaataactccaaaaacccgccacaaaaaacgccaaaaactcgcgacaaactctacgaaccaaaataaattctaaacacaaatcaatatccgcgaccccgctaaacttcgacgcttccaacaaccgcgaccgaaatcccaatcctcccgctcacaaaaccttacaattcccgaaaacaaacccgcctctcccccgcgcccaaacccacttaaaaccgaccgtctcgcaacgctcctattccgaaaactaccgaaacgcgattaaaccaaacctcgaaataaacccgaaacgaaaccgctt

SEQ ID NO: 21443 - DNA, 534 bp, Artificial Sequence
  chemically treated genomic DNA (Homo sapiens) CpG-island No: 21443
ttcgtagttttttttcggattttcgattcgagagcgttttagttagagtttgtgtttatgtttttgtttcgtaggggaaggggatttcgtttggtcggttttcgagcggcgattagtaatttttcgcgggcgatagttttttttttaaagttacgcgtaattttttattcggcggcgttattttttcgagtaggtttcgtcggagttcgagtcgcgggttgattttcgttcgggaaagtggttttaagagttcgttataggggacgttagggattcgcggtaggttttgcgggttaggatgagttttaagtataggttagtgttcgcggtttcgttgagtttcgacgtttttagtagtcgcggtcgggattttagttttttcgtttatagggttttgtagttttcgaggatagattcgtttttttttcgcgtttaggtttatttggaatcgatcgtttcgtaacgtttttatttcgggagttatcgggacgcggttgggttaggtttcggggtgggttcgagacggggtcgttt

SEQ ID NO: 21444 - DNA, 534 bp, Artificial Sequence
  chemically treated genomic DNA (Homo sapiens) CpG-island No: 21444
aaacgaccccgtctcgaacccaccccgaaacctaacccaaccgcgtcccgataactcccgaaataaaaacgttacgaaacgatcgattccaaataaacctaaacgcgaaaaaaaaacgaatctatcctcgaaaactacaaaaccctataaacgaaaaaactaaaatcccgaccgcgactactaaaaacgtcgaaactcaacgaaaccgcgaacactaacctatacttaaaactcatcctaacccgcaaaacctaccgcgaatccctaacgtcccctataacgaactcttaaaaccactttcccgaacgaaaatcaacccgcgactcgaactccgacgaaacctactcgaaaaaataacgccgccgaataaaaaattacgcgtaactttaaaaaaaaaactatcgcccgcgaaaaattactaatcgccgctcgaaaaccgaccaaacgaaatccccttcccctacgaaacaaaaacataaacacaaactctaactaaaacgctctcgaatcgaaaatccgaaaaaaaactacgaa

SEQ ID NO: 21445 - DNA, 736 bp, Artificial Sequence
  chemically treated genomic DNA (Homo sapiens) CpG-island No: 21445
ttgacgttatttgcggtagtcggggtcggtcggtatttttgttttagagttcgtagttcgtttgtcgggttttatcgaagtttcgtcgttgtttgaaaggtcggtttgagggtatcgcgcgggttcggttgggcgcgtaggtcggggttttggggcgcggggatgtgtttgcggtttgggggtttcgggggtttcgcgtttcgcgtttaagggtttcggggttcgcgttgagtacggcggttgcggttgcgggaggtaattcgttcggtgacgttaggttataatattttttaaaggggaggttagtgcgtcgtttttattgggtcgacgtataattcgttcgttcggattcgtgacgttacggcgtagagagtttgggttcgcggatcgggacgcgaggggcggggtttttgggcgcgttatagtttcgtgacgttatgggtagcgcgggagtttttttcgtagttcgaatttaaggtaaggttcggagggcggtggggtcgttttaggtcgatggagcgggcgggttaggttgtagttttacggtattatttttcgtttttatcgagtttgtgttaggattgacgcggttttgggcgtcgtgggaaatagtcggagttaaaggttcggcgtttttacggggtttagggcgagagaagggagaaggtgcgggaggtatagttagatataggatagaataggatgttagaaatgaacgtttaggtttgaaaaagaa

SEQ ID NO: 21446 - DNA, 736 bp, Artificial Sequence
  chemically treated genomic DNA (Homo sapiens) CpG-island No: 21446
ttctttttcaaacctaaacgttcatttctaacatcctattctatcctatatctaactatacctcccgcaccttctcccttctctcgccctaaaccccgtaaaaacgccgaacctttaactccgactatttcccacgacgcccaaaaccgcgtcaatcctaacacaaactcgataaaaacgaaaaataataccgtaaaactacaacctaacccgcccgctccatcgacctaaaacgaccccaccgccctccgaaccttaccttaaattcgaactacgaaaaaaactcccgcgctacccataacgtcacgaaactataacgcgcccaaaaaccccgcccctcgcgtcccgatccgcgaacccaaactctctacgccgtaacgtcacgaatccgaacgaacgaattatacgtcgacccaataaaaacgacgcactaacctcccctttaaaaaatattataacctaacgtcaccgaacgaattacctcccgcaaccgcaaccgccgtactcaacgcgaaccccgaaacccttaaacgcgaaacgcgaaacccccgaaacccccaaaccgcaaacacatccccgcgccccaaaaccccgacctacgcgcccaaccgaacccgcgcgataccctcaaaccgacctttcaaacaacgacgaaacttcgataaaacccgacaaacgaactacgaactctaaaacaaaaataccgaccgaccccgactaccgcaaataacgtcaa

SEQ ID NO: 21447 - DNA, 736 bp, Artificial Sequence
  chemically treated genomic DNA (Homo sapiens) CpG-island No: 21447
tttttttttaaatttgggcgtttatttttagtattttgttttattttgtgtttgattgtgtttttcgtatttttttttttttttcgttttaagtttcgtgaaggcgtcgggtttttggtttcggttgttttttacggcgtttagaatcgcgttagttttgatatagattcggtgagggcgggaagtggtgtcgtggggttgtagtttggttcgttcgttttatcggtttagggcggttttatcgtttttcgggttttattttgagttcgggttgcgggagaagttttcgcgttgtttatgacgttacgggattgtgacgcgtttagaagtttcgtttttcgcgtttcggttcgcggatttaggttttttgcgtcgtgacgttacgggttcgggcgggcgggttgtgcgtcggtttaatgggagcggcgtattggttttttttttaaggaatgttgtgatttgacgttatcgggcgagttatttttcgtagtcgtagtcgtcgtgtttagcgcgagtttcggagtttttgagcgcgaggcgcggagttttcggagtttttaaatcgtagatatattttcgcgttttagagtttcggtttgcgcgtttagtcgggttcgcgcgatgtttttagatcggttttttaagtagcggcggagtttcggtgaggttcggtaggcgagttgcgagttttggggtaggggtgtcggtcgatttcgattgtcgtaggtgacgttag

SEQ ID NO: 21448 - DNA, 736 bp, Artificial Sequence
  chemically treated genomic DNA (Homo sapiens) CpG-island No: 21448
ctaacgtcacctacgacaatcgaaatcgaccgacacccctaccccaaaactcgcaactcgcctaccgaacctcaccgaaactccgccgctacttaaaaaaccgatctaaaaacatcgcgcgaacccgactaaacgcgcaaaccgaaactctaaaacgcgaaaatatatctacgatttaaaaactccgaaaactccgcgcctcgcgctcaaaaactccgaaactcgcgctaaacacgacgactacgactacgaaaaataactcgcccgataacgtcaaatcacaacattccttaaaaaaaaaaccaatacgccgctcccattaaaccgacgcacaacccgcccgcccgaacccgtaacgtcacgacgcaaaaaacctaaatccgcgaaccgaaacgcgaaaaacgaaacttctaaacgcgtcacaatcccgtaacgtcataaacaacgcgaaaacttctcccgcaacccgaactcaaaataaaacccgaaaaacgataaaaccgccctaaaccgataaaacgaacgaaccaaactacaaccccacgacaccacttcccgccctcaccgaatctatatcaaaactaacgcgattctaaacgccgtaaaaaacaaccgaaaccaaaaacccgacgccttcacgaaacttaaaacgaaaaaaaaaaaaaaatacgaaaaacacaatcaaacacaaaataaaacaaaatactaaaaataaacgcccaaatttaaaaaaaaa

SEQ ID NO: 21449 - DNA, 562 bp, Artificial Sequence
  chemically treated genomic DNA (Homo sapiens) CpG-island No: 21449
tattcgtttttgtagtcgcgttatcggttcgtagtttggttcgtaggtgaggcgtgaataggtaatcgtatttgttcggttagttttatttgttgcgttttcgtattcggttttttttttttattatttcggtcggcgcggttcgtttttttggaatcggggtgttacgtttcgatttatttgcgcgattttagtttcggacgttcgcgtttttcgcggcgtgtttttgggtcgtttcgggcgggtaggttgcggtttcgcgttcgtattttttcggttgtcggaggttgcgggtttagcgggaagtttcggcgttgttcggttcgtcgttttcgatcggttttattgtgacgcgacgcgtttcgttggttaatgggcgttcggcggcgcgaatcgttgattaagttcgcgggtggaggaggaggggacggggcggaggtagggcgcggaggcggttattacggtggtggcggtagtagtggcggaggaggatgtagagggaggaagaggaggaagaggttgtagtcgtttcggtagttgtttttgttgtgaattttttagt

SEQ ID NO: 21450 - DNA, 562 bp, Artificial Sequence
  chemically treated genomic DNA (Homo sapiens) CpG-island No: 21450
actaaaaaattcacaacaaaaacaactaccgaaacgactacaacctcttcctcctcttcctccctctacatcctcctccgccactactaccgccaccaccgtaataaccgcctccgcgccctacctccgccccgtcccctcctcctccacccgcgaacttaatcaacgattcgcgccgccgaacgcccattaaccaacgaaacgcgtcgcgtcacaataaaaccgatcgaaaacgacgaaccgaacaacgccgaaacttcccgctaaacccgcaacctccgacaaccgaaaaaatacgaacgcgaaaccgcaacctacccgcccgaaacgacccaaaaacacgccgcgaaaaacgcgaacgtccgaaactaaaatcgcgcaaataaatcgaaacgtaacaccccgattccaaaaaaacgaaccgcgccgaccgaaataataaaaaaaaaaaaccgaatacgaaaacgcaacaaataaaactaaccgaacaaatacgattacctattcacgcctcacctacgaaccaaactacgaaccgataacgcgactacaaaaacgaata

SEQ ID NO: 21451 - DNA, 562 bp, Artificial Sequence
  chemically treated genomic DNA (Homo sapiens) CpG-island No: 21451
gttgaaaaatttatagtaggagtagttatcgaagcgattgtagttttttttttttttttttttttttatattttttttcgttattgttatcgttattatcgtggtagtcgttttcgcgttttgttttcgtttcgttttttttttttttattcgcgaatttagttagcggttcgcgtcgtcgagcgtttattggttagcggaacgcgtcgcgttataatggagtcggtcggaggcggcgagtcggatagcgtcggggtttttcgttgagttcgtagttttcggtagtcgggaaagtgcgggcgcggggtcgtagtttgttcgttcggagcggtttaggagtacgtcgcggggagcgcgggcgttcggggttggagtcgcgtaggtaggtcggagcgtgatatttcggttttaggagggcgagtcgcgtcgatcgaggtggtggaggaggaggatcggatacggggacgtagtaggtggggttggtcgaataggtgcggttatttgtttacgttttatttgcgagttaggttgcgggtcggtagcgcggttgtagagacgagtg

SEQ ID NO: 21452 - DNA, 562 bp, Artificial Sequence
  chemically treated genomic DNA (Homo sapiens) CpG-island No: 21452
cactcgtctctacaaccgcgctaccgacccgcaacctaactcgcaaataaaacgtaaacaaataaccgcacctattcgaccaaccccacctactacgtccccgtatccgatcctcctcctccaccacctcgatcgacgcgactcgccctcctaaaaccgaaatatcacgctccgacctacctacgcgactccaaccccgaacgcccgcgctccccgcgacgtactcctaaaccgctccgaacgaacaaactacgaccccgcgcccgcactttcccgactaccgaaaactacgaactcaacgaaaaaccccgacgctatccgactcgccgcctccgaccgactccattataacgcgacgcgttccgctaaccaataaacgctcgacgacgcgaaccgctaactaaattcgcgaataaaaaaaaaaaaaacgaaacgaaaacaaaacgcgaaaacgactaccacgataataacgataacaataacgaaaaaaaatataaaaaaaaaaaaaaaaaaaaaaaactacaatcgcttcgataactactcctactataaatttttcaac

SEQ ID NO: 21453 - DNA, 580 bp, Artificial Sequence
  chemically treated genomic DNA (Homo sapiens) CpG-island No: 21453
ggggggggggatatggaaaatcgagaaaggggaatgggggcgagggggaggggtagggaaaaaagaaaaacgacgggggataaacgttagaaaagtcgcggcggggggaggaaaggagaggagggggcgggaaggaaaaaggaggggaaaaagggggggaatcgagggggggaaaaaaagggaggggaaagaagaagaggagcgagcgaacgatggggggggagggggggaacggacgggaaaaaaaaaggggcgaaagaggaaggaaaggcgattaaagagggggaaattaagagaaggggggggggggaaaaaaagaggggaaagggggcgcgggaaaagaatgggggattaggagaaggggaaaaataggggggggttcgggggcgggggagtgaggggaataaaggggggggacgggatgagtgagcgtaggttgaaatagttaatacgggggtaaaaaaggcgggtacgggtaaagggacgcggttttaaaatagggggggggagattatatagttaagggggttaggggtgtggcgggttgcgaaaaagagaatgattaaggtgattaagtcga

SEQ ID NO: 21454 - DNA, 580 bp, Artificial Sequence
  chemically treated genomic DNA (Homo sapiens) CpG-island No: 21454
tcgacttaatcaccttaatcattctctttttcgcaacccgccacacccctaacccccttaactatataatctccccccccctattttaaaaccgcgtccctttacccgtacccgccttttttacccccgtattaactatttcaacctacgctcactcatcccgtcccccccctttattcccctcactcccccgcccccgaacccccccctatttttccccttctcctaatcccccattcttttcccgcgccccctttcccctctttttttccccccccccccttctcttaatttccccctctttaatcgcctttccttcctctttcgcccctttttttttcccgtccgttccccccctccccccccatcgttcgctcgctcctcttcttctttcccctccctttttttccccccctcgattccccccctttttcccctcctttttccttcccgccccctcctctcctttcctccccccgccgcgacttttctaacgtttatcccccgtcgtttttcttttttccctacccctccccctcgcccccattcccctttctcgattttccatatcccccccccc

SEQ ID NO: 21455 - DNA, 580 bp, Artificial Sequence
  chemically treated genomic DNA (Homo sapiens) CpG-island No: 21455
tcgatttaattattttggttattttttttttcgtaattcgttatatttttgatttttttggttgtatgatttttttttttttattttggggtcgcgtttttttattcgtattcgttttttttgttttcgtgttggttattttagtttgcgtttatttatttcgttttttttttttattttttttattttttcgttttcgggtttttttttattttttttttttttttaattttttatttttttttcgcgttttttttttttttttttttttttttttttttttttttttggtttttttttttttggtcgttttttttttttttttcgtttttttttttttttcgttcgttttttttttttttttttatcgttcgttcgttttttttttttttttttttttttttttttttttttttcggttttttttttttttttttttttttttttttttcgttttttttttttttttttttttttcgtcgcggtttttttggcgtttgtttttcgtcgttttttttttttttttgtttttttttttcgtttttatttttttttttcggttttttatgttttttttttt

SEQ ID NO: 21456 - DNA, 580 bp, Artificial Sequence
  chemically treated genomic DNA (Homo sapiens) CpG-island No: 21456
aaaaaaaaaaacataaaaaaccgaaaaaaaaaaataaaaacgaaaaaaaaaaacaaaaaaaaaaaaaaaacgacgaaaaacaaacgccaaaaaaaccgcgacgaaaaaaaaaaaaaaaaaaaaaaaacgaaaaaaaaaaaaaaaaaaaaaaaaaaaaaaaaccgaaaaaaaaaaaaaaaaaaaaaaaaaaaaaaaaaaaaaacgaacgaacgataaaaaaaaaaaaaaaaaacgaacgaaaaaaaaaaaaaaacgaaaaaaaaaaaaaaaacgaccaaaaaaaaaaaaaccaaaaaaaaaaaaaaaaaaaaaaaaaaaaaaaaaaaaaaaacgcgaaaaaaaaataaaaaattaaaaaaaaaaaaaaaataaaaaaaaacccgaaaacgaaaaaataaaaaaaataaaaaaaaaaaacgaaataaataaacgcaaactaaaataaccaacacgaaaacaaaaaaaacgaatacgaataaaaaaacgcgaccccaaaataaaaaaaaaaaaatcatacaaccaaaaaaatcaaaaatataacgaattacgaaaaaaaaaataaccaaaataattaaatcga

SEQ ID NO: 21457 - DNA, 661 bp, Artificial Sequence
  chemically treated genomic DNA (Homo sapiens) CpG-island No: 21457
gcgggaaggtcgggttgtggttattggcgtttaggatatatacgttgaagatagtcgtggcggagcgtagcgggcggttatcgtttagggttattagttttaggttgtcggcggtttggttttcgcggtttagtttttgtagtagtattaggttcgtatattgagcgtcgttcgcgcgtttttgtagttttacgcgaaaaggggttgtgcggttgggttaggcgtacgttttgtagtttattggtgtttacgttttagtttatcggtatttttagggtgcgtgtatacggtcgtatttttaaatatttttatcgggatttgggttcgggggaagcgcggcgcgtggtcgttgatattttttatttttatttttacgtgtattagtaggaattgtttttgcgagaagttgattacgtcgaagattagtacgtattgcggggtttggtcgtatagcgtttcgtagtttaggtcggtgttttcgacggttagttgttcgtagttttcgcgtattcggagtagagagttgttgaattgttttattagttgaaattgatttggtatttcgcgttgcgaattaaattggacgtgattagataaaatatcgacgttggtgttaggggtgttttttttataggtgaggaaattgatagtatcggtataa

SEQ ID NO: 21458 - DNA, 661 bp, Artificial Sequence
  chemically treated genomic DNA (Homo sapiens) CpG-island No: 21458
ttataccgatactatcaatttcctcacctataaaaaaaacacccctaacaccaacgtcgatattttatctaatcacgtccaatttaattcgcaacgcgaaataccaaatcaatttcaactaataaaacaattcaacaactctctactccgaatacgcgaaaactacgaacaactaaccgtcgaaaacaccgacctaaactacgaaacgctatacgaccaaaccccgcaatacgtactaatcttcgacgtaatcaacttctcgcaaaaacaattcctactaatacacgtaaaaataaaaataaaaaatatcaacgaccacgcgccgcgcttcccccgaacccaaatcccgataaaaatatttaaaaatacgaccgtatacacgcaccctaaaaataccgataaactaaaacgtaaacaccaataaactacaaaacgtacgcctaacccaaccgcacaaccccttttcgcgtaaaactacaaaaacgcgcgaacgacgctcaatatacgaacctaatactactacaaaaactaaaccgcgaaaaccaaaccgccgacaacctaaaactaataaccctaaacgataaccgcccgctacgctccgccacgactatcttcaacgtatatatcctaaacgccaataaccacaacccgaccttcccgc

SEQ ID NO: 21459 - DNA, 661 bp, Artificial Sequence
  chemically treated genomic DNA (Homo sapiens) CpG-island No: 21459
ttgtatcgatattgttaatttttttatttgtgaggaagatatttttggtattagcgtcggtgttttgtttgattacgtttagtttaattcgtagcgcgaggtgttaagttagttttagttgatgaaataatttaatagttttttgtttcgggtgcgcgagggttacgggtagttgatcgtcggggatatcggtttggattgcgaggcgttgtgcggttaggtttcgtagtgcgtgttggttttcgacgtggttagtttttcgtaggaatagtttttgttggtgtacgtggaggtggaggtgaggaatgttaacgattacgcgtcgcgtttttttcgggtttagatttcggtggagatgtttgagggtgcggtcgtgtgtacgtattttggaggtgtcggtggattaggacgtgggtattaatgggttgtagagcgtgcgtttggtttaatcgtatagttttttttcgcgtggagttgtagaagcgcgcggacggcgtttagtgtgcggatttggtgttgttgtaggagttggatcgcgagagttaggtcgtcgatagtttggagttggtggttttggacggtggtcgttcgttgcgtttcgttacggttgtttttaacgtgtgtgttttggacgttaatgattatagttcggttttttcgt

SEQ ID NO: 21460 - DNA, 661 bp, Artificial Sequence
  chemically treated genomic DNA (Homo sapiens) CpG-island No: 21460
acgaaaaaaccgaactataatcattaacgtccaaaacacacacgttaaaaacaaccgtaacgaaacgcaacgaacgaccaccgtccaaaaccaccaactccaaactatcgacgacctaactctcgcgatccaactcctacaacaacaccaaatccgcacactaaacgccgtccgcgcgcttctacaactccacgcgaaaaaaaactatacgattaaaccaaacgcacgctctacaacccattaatacccacgtcctaatccaccgacacctccaaaatacgtacacacgaccgcaccctcaaacatctccaccgaaatctaaacccgaaaaaaacgcgacgcgtaatcgttaacattcctcacctccacctccacgtacaccaacaaaaactattcctacgaaaaactaaccacgtcgaaaaccaacacgcactacgaaacctaaccgcacaacgcctcgcaatccaaaccgatatccccgacgatcaactacccgtaaccctcgcgcacccgaaacaaaaaactattaaattatttcatcaactaaaactaacttaacacctcgcgctacgaattaaactaaacgtaatcaaacaaaacaccgacgctaataccaaaaatatcttcctcacaaataaaaaaattaacaatatcgatacaa

SEQ ID NO: 21461 - DNA, 666 bp, Artificial Sequence
  chemically treated genomic DNA (Homo sapiens) CpG-island No: 21461
atagcgcgcggattgagtcgagggcggacgttacggtttggtttgggtcgggcgtttaatagattaatatcgtcgtttatttgagggacgttagacgagttttagagtcgatcgcggcgtttcggtcgttcggcgtttgcgtagtgaagatcgcggcgagtcgcgcgtatgcgtgtaggttcggagttttaggcgttggcggggtagaaacgcggcgttttgcgttttttggtttcgaggttggtttttatcgttttcgtttcggcggaagtgaggaggagggtttttcgattcgtgttgagttggatggatcgcgagacgcgcgttttcgtcgatagttattttcgaggtttgggggtcgatgttttcggcgtcggttaggtttcgggtcgggtagttttcgtttcggagtcgggcgtttttttttacgtcgattttgtgcggggttttttgttgtttaatttgttttgcgtgttttttagcgtttttacgtagggttggggtagtcggcggcgttgggtgacgttcgcggggaggttcgatttcgattatttgttacggatttacggtggggcggcggtcgtagatttcgggcggggaggaaaggtcggcgggatttaggttcgggaggttttcgtttagagaggggtattagggagggtgagg

SEQ ID NO: 21462 - DNA, 666 bp, Artificial Sequence
  chemically treated genomic DNA (Homo sapiens) CpG-island No: 21462
cctcaccctccctaatacccctctctaaacgaaaacctcccgaacctaaatcccgccgacctttcctccccgcccgaaatctacgaccgccgccccaccgtaaatccgtaacaaataatcgaaatcgaacctccccgcgaacgtcacccaacgccgccgactaccccaaccctacgtaaaaacgctaaaaaacacgcaaaacaaattaaacaacaaaaaaccccgcacaaaatcgacgtaaaaaaaaacgcccgactccgaaacgaaaactacccgacccgaaacctaaccgacgccgaaaacatcgacccccaaacctcgaaaataactatcgacgaaaacgcgcgtctcgcgatccatccaactcaacacgaatcgaaaaaccctcctcctcacttccgccgaaacgaaaacgataaaaaccaacctcgaaaccaaaaaacgcaaaacgccgcgtttctaccccgccaacgcctaaaactccgaacctacacgcatacgcgcgactcgccgcgatcttcactacgcaaacgccgaacgaccgaaacgccgcgatcgactctaaaactcgtctaacgtccctcaaataaacgacgatattaatctattaaacgcccgacccaaaccaaaccgtaacgtccgccctcgactcaatccgcgcgctat

SEQ ID NO: 21463 - DNA, 666 bp, Artificial Sequence
  chemically treated genomic DNA (Homo sapiens) CpG-island No: 21463
ttttattttttttggtgtttttttttaggcgggggtttttcgggtttgggtttcgtcggtttttttttttcgttcggggtttgcggtcgtcgttttatcgtaggttcgtagtaggtggtcgaagtcgggttttttcgcgggcgttatttagcgtcgtcggttgttttagttttgcgtgaaggcgttggaaaatacgtagggtaggttgggtagtaagaagtttcgtataaagtcggcgtaggagaaggcgttcggtttcgagacgaaggttattcggttcggagtttggtcgacgtcggggatatcgatttttaggtttcggaagtggttgtcggcgagggcgcgcgtttcgcggtttatttagtttagtacgggtcgaaggatttttttttttattttcgtcggagcggaaacggtgaggattagtttcggaattagaagacgtagggcgtcgcgtttttgtttcgttagcgtttggggtttcgggtttgtacgtatgcgcgcggttcgtcgcggtttttattgcgtaggcgtcgagcggtcgaggcgtcgcggtcggttttgggattcgtttggcgttttttaggtgagcgacggtgttggtttgttgggcgttcggtttaagttaagtcgtagcgttcgttttcggtttagttcgcgcgttgt

SEQ ID NO: 21464 - DNA, 666 bp, Artificial Sequence
  chemically treated genomic DNA (Homo sapiens) CpG-island No: 21464
acaacgcgcgaactaaaccgaaaacgaacgctacgacttaacttaaaccgaacgcccaacaaaccaacaccgtcgctcacctaaaaaacgccaaacgaatcccaaaaccgaccgcgacgcctcgaccgctcgacgcctacgcaataaaaaccgcgacgaaccgcgcgcatacgtacaaacccgaaaccccaaacgctaacgaaacaaaaacgcgacgccctacgtcttctaattccgaaactaatcctcaccgtttccgctccgacgaaaataaaaaaaaaaatccttcgacccgtactaaactaaataaaccgcgaaacgcgcgccctcgccgacaaccacttccgaaacctaaaaatcgatatccccgacgtcgaccaaactccgaaccgaataaccttcgtctcgaaaccgaacgccttctcctacgccgactttatacgaaacttcttactacccaacctaccctacgtattttccaacgccttcacgcaaaactaaaacaaccgacgacgctaaataacgcccgcgaaaaaacccgacttcgaccacctactacgaacctacgataaaacgacgaccgcaaaccccgaacgaaaaaaaaaaaccgacgaaacccaaacccgaaaaacccccgcctaaaaaaaaacaccaaaaaaaataaaa

SEQ ID NO: 21465 - DNA, 984 bp, Artificial Sequence
  chemically treated genomic DNA (Homo sapiens) CpG-island No: 21465
cgcggaagatttataggcgtaggcgtagacgggtgcgcgtttttagggtgcgcgcgagttaagatcgcggttcggggtagggtgttttcggtttcgttttttgtagttttatcggagttagcgcgtttgcgtcgcgggcgtacggtgggcggagttttcggcgttttcgttttttattcggcgtgtttcgcgttcggaggcgttgacgtggtcgtcgttagagtcgttattttgtgggagtaaaattaacgtttggttcggagtagtagtttttgaggtgagggcgaggggcgcgggtcggtgtgggtcgtagagacgttggagtcggcgggggttggggattggtttcggggcgatttgaggttcgcgaagggtacgtcgattttcgcggcggcggcggcgatagggtcgggtcgggggcggacgtagacgggtcgggttgaggttggggttcggtcggagtcggggttgggcggacgggcgggtcggtgagtttttcgtattttttataggttttcgaagtcgttcgcggtcgtttgtttttttttgtttgtttttgttttcgttcgtcgttcggaagttcgtttggacgtcgggtttttttttaggaaatttgggttttttgtttttttcgtttttgtttttttcgtttttcgaggtcgttcgcgcgtggacggttgggattagcggtcgcgggggtcggtgggggtcgtggggttttttttattcgagtataggcgagcgagcggtattcgggcggattttcgtttcggggatcgggaaattgaggttcgggcggtttgagacgtcgttaaggttatgtaggtggtgggggtttgtattttcgtttttcgattttatttagttcgtgtttgttgtgaagacggtatcgggttaggggtggtgagagcgggcgggtaggtggataggaatttcgtgtttttttttgtttgttgaacggaatgcgtggattttcgggggagt

SEQ ID NO: 21466 - DNA, 984 bp, Artificial Sequence
  chemically treated genomic DNA (Homo sapiens) CpG-island No: 21466
actcccccgaaaatccacgcattccgttcaacaaacaaaaaaaaacacgaaattcctatccacctacccgcccgctctcaccacccctaacccgataccgtcttcacaacaaacacgaactaaataaaatcgaaaaacgaaaatacaaacccccaccacctacataaccttaacgacgtctcaaaccgcccgaacctcaatttcccgatccccgaaacgaaaatccgcccgaataccgctcgctcgcctatactcgaataaaaaaaaccccacgacccccaccgacccccgcgaccgctaatcccaaccgtccacgcgcgaacgacctcgaaaaacgaaaaaaacaaaaacgaaaaaaacaaaaaacccaaatttcctaaaaaaaaacccgacgtccaaacgaacttccgaacgacgaacgaaaacaaaaacaaacaaaaaaaaacaaacgaccgcgaacgacttcgaaaacctataaaaaatacgaaaaactcaccgacccgcccgtccgcccaaccccgactccgaccgaaccccaacctcaacccgacccgtctacgtccgcccccgacccgaccctatcgccgccgccgccgcgaaaatcgacgtacccttcgcgaacctcaaatcgccccgaaaccaatccccaacccccgccgactccaacgtctctacgacccacaccgacccgcgcccctcgccctcacctcaaaaactactactccgaaccaaacgttaattttactcccacaaaataacgactctaacgacgaccacgtcaacgcctccgaacgcgaaacacgccgaataaaaaacgaaaacgccgaaaactccgcccaccgtacgcccgcgacgcaaacgcgctaactccgataaaactacaaaaaacgaaaccgaaaacaccctaccccgaaccgcgatcttaactcgcgcgcaccctaaaaacgcgcacccgtctacgcctacgcctataaatcttccgcg

SEQ ID NO: 21467 - DNA, 984 bp, Artificial Sequence
  chemically treated genomic DNA (Homo sapiens) CpG-island No: 21467
gttttttcggaggtttacgtatttcgtttagtagatagggaagggtacggggtttttgtttatttgttcgttcgtttttattatttttgattcggtatcgtttttatagtaaatacgaattggatggagtcgggaggcgaagatgtaagtttttattatttatatgattttgacggcgttttaggtcgttcgagttttagtttttcggttttcgaggcgggggttcgttcggatgtcgttcgttcgtttgtattcgggtgggggaggttttacgatttttatcggttttcgcggtcgttaattttaatcgtttacgcgcgggcggtttcgggaaacgagaaaggtagaggcgagggaagtaggaagtttaggttttttggagaagagttcggcgtttaagcggattttcgggcgacgggcgggggtagggataggtagaggaggataagcggtcgcgagcgatttcgggaatttgtgaggggtgcgaggagtttatcgattcgttcgttcgtttagtttcgatttcggtcgggttttagttttagttcggttcgtttgcgttcgttttcggttcggttttgtcgtcgtcgtcgtcgcgggggtcgacgtgtttttcgcgaattttaagtcgtttcgaggttagtttttagttttcgtcggttttaacgtttttgcggtttatatcggttcgcgtttttcgtttttattttagaggttgttgtttcgagttaggcgttggttttgtttttataagatggcggttttgacggcggttacgttagcgttttcgggcgcggggtacgtcgggtaaggggcggagacgtcgggaatttcgtttatcgtgcgttcgcgacgtaggcgcgttggtttcggtagggttgtagggggcggggtcggggatattttgtttcgggtcgcggttttagttcgcgcgtattttaggggcgcgtattcgtttgcgtttgcgtttgtgagtttttcgcg

SEQ ID NO: 21468 - DNA, 984 bp, Artificial Sequence
  chemically treated genomic DNA (Homo sapiens) CpG-island No: 21468
cgcgaaaaactcacaaacgcaaacgcaaacgaatacgcgcccctaaaatacgcgcgaactaaaaccgcgacccgaaacaaaatatccccgaccccgccccctacaaccctaccgaaaccaacgcgcctacgtcgcgaacgcacgataaacgaaattcccgacgtctccgccccttacccgacgtaccccgcgcccgaaaacgctaacgtaaccgccgtcaaaaccgccatcttataaaaacaaaaccaacgcctaactcgaaacaacaacctctaaaataaaaacgaaaaacgcgaaccgatataaaccgcaaaaacgttaaaaccgacgaaaactaaaaactaacctcgaaacgacttaaaattcgcgaaaaacacgtcgacccccgcgacgacgacgacgacaaaaccgaaccgaaaacgaacgcaaacgaaccgaactaaaactaaaacccgaccgaaatcgaaactaaacgaacgaacgaatcgataaactcctcgcacccctcacaaattcccgaaatcgctcgcgaccgcttatcctcctctacctatccctacccccgcccgtcgcccgaaaatccgcttaaacgccgaactcttctccaaaaaacctaaacttcctacttccctcgcctctacctttctcgtttcccgaaaccgcccgcgcgtaaacgattaaaattaacgaccgcgaaaaccgataaaaatcgtaaaacctcccccacccgaatacaaacgaacgaacgacatccgaacgaacccccgcctcgaaaaccgaaaaactaaaactcgaacgacctaaaacgccgtcaaaatcatataaataataaaaacttacatcttcgcctcccgactccatccaattcgtatttactataaaaacgataccgaatcaaaaataataaaaacgaacgaacaaataaacaaaaaccccgtacccttccctatctactaaacgaaatacgtaaacctccgaaaaaac

SEQ ID NO: 21469 - DNA, 1157 bp, Artificial Sequence
  chemically treated genomic DNA (Homo sapiens) CpG-island No: 21469
cgggatatcgttacgcggtttacggagttattgtagggatatggcgatgaagatagtacggtaggggttcgttttattcgagtaatcgagtttagtgttgtttttttttggaaattcgttcgtattttgcgttttttagttttagtagtcggtttacgttttttttttcggggtcgtttttttttcgtttgtagattttcgcgaagttttgtaggtgcgagagtatagggagcgttcgagtcggttttatatttacggttttttacgcgttttttatttcggggagttatttttttgtttaggttcgtgggttgtttttttacgtttttgtagttattgcgagagggtcggggtaggcgttaggacggacggatttttttttattataggtttttattattttagttttcgtttttagggtttcgttcgcgcgagttttcgtagtttcgttttcgtttagttcgatttttagttttcggtttcggttttattttgtttcggtagcgtcgttttaggtatcgatcgttgtcgttcgcggatatttatagggcggttagtagcgtttcgcgtttcgtttttcgtacggttgttagttttttttcgcggttcgggttcgcgtatggcgttcggtttttggcgtattaggtgaggtcgcggtttttttgttagcggtttatcggcgttattagcgagttgtttgcggacgtagacgttgtgagtttagcgttcgttcgggatttcggagttcggagttcggagttcgtttatcgcgcgtatttatttaggtagttttttcgttgtttgttagtttttacgtttttttagttgaattggttttgttcgtcgcgtacgtttttacgattggagtcgaatatggcgtcgggaaggtagttgtttggggtttgcggtttgtaatttgtaattcgtaattcgagattcgttatttattatcgtcggatttaggttcgatttcgttttcgcgtcgcgcgtcgtgacgttattttcgcgtttattcggtttcgtcgcgcgtttttgcgtagcgtattgtttcggatttgtgttttcgcgtattatttttacgtcggttttgggcgtttgcgtattgcgtttattttgtcgggcgcgggaacgtttttgaattggaagtttaaaaatgg

SEQ ID NO: 21470 - DNA, 1157 bp, Artificial Sequence
  chemically treated genomic DNA (Homo sapiens) CpG-island No: 21470
ccatttttaaacttccaattcaaaaacgttcccgcgcccgacaaaataaacgcaatacgcaaacgcccaaaaccgacgtaaaaataatacgcgaaaacacaaatccgaaacaatacgctacgcaaaaacgcgcgacgaaaccgaataaacgcgaaaataacgtcacgacgcgcgacgcgaaaacgaaatcgaacctaaatccgacgataataaataacgaatctcgaattacgaattacaaattacaaaccgcaaaccccaaacaactaccttcccgacgccatattcgactccaatcgtaaaaacgtacgcgacgaacaaaaccaattcaactaaaaaaacgtaaaaactaacaaacaacgaaaaaactacctaaataaatacgcgcgataaacgaactccgaactccgaactccgaaatcccgaacgaacgctaaactcacaacgtctacgtccgcaaacaactcgctaataacgccgataaaccgctaacaaaaaaaccgcgacctcacctaatacgccaaaaaccgaacgccatacgcgaacccgaaccgcgaaaaaaaactaacaaccgtacgaaaaacgaaacgcgaaacgctactaaccgccctataaatatccgcgaacgacaacgatcgatacctaaaacgacgctaccgaaacaaaataaaaccgaaaccgaaaactaaaaatcgaactaaacgaaaacgaaactacgaaaactcgcgcgaacgaaaccctaaaaacgaaaactaaaataataaaaacctataataaaaaaaaatccgtccgtcctaacgcctaccccgaccctctcgcaataactacaaaaacgtaaaaaaacaacccacgaacctaaacaaaaaaataactccccgaaataaaaaacgcgtaaaaaaccgtaaatataaaaccgactcgaacgctccctatactctcgcacctacaaaacttcgcgaaaatctacaaacgaaaaaaaaacgaccccgaaaaaaaaaacgtaaaccgactactaaaactaaaaaacgcaaaatacgaacgaatttccaaaaaaaaacaacactaaactcgattactcgaataaaacgaacccctaccgtactatcttcatcgccatatccctacaataactccgtaaaccgcgtaacgatatcccg

SEQ ID NO: 21471 - DNA, 1157 bp, Artificial Sequence
  chemically treated genomic DNA (Homo sapiens) CpG-island No: 21471
ttatttttaaatttttagtttagaggcgttttcgcgttcggtagggtaggcgtagtgcgtaggcgtttaaagtcgacgtggaggtgatgcgcgggagtatagattcggggtagtgcgttgcgtagaggcgcgcggcgaagtcgagtgggcgcgggagtgacgttacggcgcgcgacgcggaggcggggtcgggtttgggttcgacggtagtgggtagcgggtttcgggttgcgggttgtaggttgtaagtcgtaggttttaggtaattgttttttcggcgttatgttcggttttagtcgtggaggcgtgcgcggcgggtaggattagtttaattgggaggacgtgaagattgataagtagcgggagaattatttgggtgggtgcgcgcggtgggcgggtttcgggtttcgggtttcgggatttcgggcgggcgttggatttatagcgtttacgttcgtaggtaattcgttgatggcgtcggtaggtcgttggtagaagggtcgcgattttatttggtacgttaagggtcgggcgttatgcgcgggttcgagtcgcgaggaggaattggtagtcgtgcgggaggcggagcgcgaggcgttgttggtcgttttgtgagtgttcgcggacggtagcggtcggtgtttgggacggcgttgtcggggtagggtggggtcggggtcggggattgggggtcgggttgggcgggagcggggttgcggggattcgcgcgggcgggattttgaggacgaaggttggagtggtgaggatttgtggtgggaggaggttcgttcgttttgacgtttgtttcggttttttcgtagtggttataagaacgtgaagaagtagtttacgggtttgagtaaggaggtaatttttcggggtggggggcgcgtggagggtcgtgggtgtggggtcgattcgagcgttttttgtgttttcgtatttgtaggatttcgcggaggtttgtaagcgggaaggaggcgatttcgaggagaagggcgtggatcggttgttggggttggggagcgtaaggtgcgggcgggtttttaggggagggtagtattgggttcgattgttcgggtgaggcggatttttgtcgtattgtttttatcgttatgtttttgtagtggtttcgtgggtcgcgtggcgatgtttcg

SEQ ID NO: 21472 - DNA, 1157 bp, Artificial Sequence
  chemically treated genomic DNA (Homo sapiens) CpG-island No: 21472
cgaaacatcgccacgcgacccacgaaaccactacaaaaacataacgataaaaacaatacgacaaaaatccgcctcacccgaacaatcgaacccaatactaccctcccctaaaaacccgcccgcaccttacgctccccaaccccaacaaccgatccacgcccttctcctcgaaatcgcctccttcccgcttacaaacctccgcgaaatcctacaaatacgaaaacacaaaaaacgctcgaatcgaccccacacccacgaccctccacgcgccccccaccccgaaaaattacctccttactcaaacccgtaaactacttcttcacgttcttataaccactacgaaaaaaccgaaacaaacgtcaaaacgaacgaacctcctcccaccacaaatcctcaccactccaaccttcgtcctcaaaatcccgcccgcgcgaatccccgcaaccccgctcccgcccaacccgacccccaatccccgaccccgaccccaccctaccccgacaacgccgtcccaaacaccgaccgctaccgtccgcgaacactcacaaaacgaccaacaacgcctcgcgctccgcctcccgcacgactaccaattcctcctcgcgactcgaacccgcgcataacgcccgacccttaacgtaccaaataaaatcgcgacccttctaccaacgacctaccgacgccatcaacgaattacctacgaacgtaaacgctataaatccaacgcccgcccgaaatcccgaaacccgaaacccgaaacccgcccaccgcgcgcacccacccaaataattctcccgctacttatcaatcttcacgtcctcccaattaaactaatcctacccgccgcgcacgcctccacgactaaaaccgaacataacgccgaaaaaacaattacctaaaacctacgacttacaacctacaacccgcaacccgaaacccgctacccactaccgtcgaacccaaacccgaccccgcctccgcgtcgcgcgccgtaacgtcactcccgcgcccactcgacttcgccgcgcgcctctacgcaacgcactaccccgaatctatactcccgcgcatcacctccacgtcgactttaaacgcctacgcactacgcctaccctaccgaacgcgaaaacgcctctaaactaaaaatttaaaaataa

SEQ ID NO: 21473 - DNA, 504 bp, Artificial Sequence
  chemically treated genomic DNA (Homo sapiens) CpG-island No: 21473
gaggcgttaatttgcggtcgttatagtcgttgcggaggggtttgaggataggcggttttgattttcgttgttcggtggaattaagattagggacgaggttacgtaggagattaaggtatttattgcgttgggtgttgttgcgttgtagtttacgacgttattggtaggcgttgcgtcgcgcggtatgacgtgttttatggtagggagaggtaagagtgggcggtgagatacgaagatatacgtttttgttgggcggggtcggcgcggcgtgatgtaatttcgggggcgggacgaagtttaggtgggcggggtttgcgggggcgttgtggcggtataagaatttaggcggggtcggcgagtaggtgattttcgtttttatcgggaggattagggcgggtcggcgaggtcgagggggattcgcgggtttgagggaggacggagtgggggagtgttgagggaggattcggggtggggagttgagggaggattcgtagggttgaggga

SEQ ID NO: 21474 - DNA, 504 bp, Artificial Sequence
  chemically treated genomic DNA (Homo sapiens) CpG-island No: 21474
tccctcaaccctacgaatcctccctcaactccccaccccgaatcctccctcaacactcccccactccgtcctccctcaaacccgcgaatccccctcgacctcgccgacccgccctaatcctcccgataaaaacgaaaatcacctactcgccgaccccgcctaaattcttataccgccacaacgcccccgcaaaccccgcccacctaaacttcgtcccgcccccgaaattacatcacgccgcgccgaccccgcccaacaaaaacgtatatcttcgtatctcaccgcccactcttacctctccctaccataaaacacgtcataccgcgcgacgcaacgcctaccaataacgtcgtaaactacaacgcaacaacacccaacgcaataaataccttaatctcctacgtaacctcgtccctaatcttaattccaccgaacaacgaaaatcaaaaccgcctatcctcaaacccctccgcaacgactataacgaccgcaaattaacgcctc

SEQ ID NO: 21475 - DNA, 504 bp, Artificial Sequence
  chemically treated genomic DNA (Homo sapiens) CpG-island No: 21475
ttttttagttttgcggatttttttttagttttttatttcgggtttttttttagtatttttttatttcgtttttttttagattcgcgggtttttttcgatttcgtcggttcgttttggttttttcggtagggacggaggttatttgttcgtcggtttcgtttgggtttttgtatcgttatagcgttttcgtaggtttcgtttatttaggtttcgtttcgttttcgagattatattacgtcgcgtcggtttcgtttaataggggcgtatattttcgtgttttatcgtttatttttgtttttttttgttatggaatacgttatatcgcgcgacgtagcgtttgttagtgacgtcgtgggttgtagcgtagtagtatttaacgtagtgagtattttgattttttgcgtggtttcgtttttggttttagttttatcgggtagcgggagttaggatcgtttgtttttagattttttcgtagcgattgtggcggtcgtaggttggcgtttt

SEQ ID NO: 21476 - DNA, 504 bp, Artificial Sequence
  chemically treated genomic DNA (Homo sapiens) CpG-island No: 21476
aaaacgccaacctacgaccgccacaatcgctacgaaaaaatctaaaaacaaacgatcctaactcccgctacccgataaaactaaaaccaaaaacgaaaccacgcaaaaaatcaaaatactcactacgttaaatactactacgctacaacccacgacgtcactaacaaacgctacgtcgcgcgatataacgtattccataacaaaaaaaaacaaaaataaacgataaaacacgaaaatatacgcccctattaaacgaaaccgacgcgacgtaatataatctcgaaaacgaaacgaaacctaaataaacgaaacctacgaaaacgctataacgatacaaaaacccaaacgaaaccgacgaacaaataacctccgtccctaccgaaaaaaccaaaacgaaccgacgaaatcgaaaaaaacccgcgaatctaaaaaaaaacgaaataaaaaaatactaaaaaaaaacccgaaataaaaaactaaaaaaaaatccgcaaaactaaaaaa

SEQ ID NO: 21477 - DNA, 567 bp, Artificial Sequence
  chemically treated genomic DNA (Homo sapiens) CpG-island No: 21477
tttgcgcgtgtttcgtaggttatcgttagttatatgtattttaagtgtaagtgttacgggttgtcgggtagttgcgaggtgaagatatgttggtggtcgtaattcgattttcgcgttatcggtgatttttttaaggataagtacgatagcgtttcggagatggtggtggagaagtatcgggagtttcgcggttgggtggagattttgcggtcgcgttatatttattttaaggtgtttacggagcgcgatttggtttattacgaggtttcgtttaatttttgcgagtttaattttgagacgggttttttcggtacgcgcgatcgtatttgtaacgttagttcgtacggtatcgacggttgcgatttgttgtgttgcggtcgcggttataacgcgcgagcggagcggcgtcgggagaagtgtcgttgcgtgttttattggtgttgttacgttagttgttaggagtgtacgcgcgtttacgacgtgtatatttgtaagtaggtatcggtcgcggttttttttggacggggcgggttttgtttgagggtgggtttttttttgggtggagta

SEQ ID NO: 21478 - DNA, 567 bp, Artificial Sequence
  chemically treated genomic DNA (Homo sapiens) CpG-island No: 21478
tactccacccaaaaaaaaacccaccctcaaacaaaacccgccccgtccaaaaaaaaccgcgaccgatacctacttacaaatatacacgtcgtaaacgcgcgtacactcctaacaactaacgtaacaacaccaataaaacacgcaacgacacttctcccgacgccgctccgctcgcgcgttataaccgcgaccgcaacacaacaaatcgcaaccgtcgataccgtacgaactaacgttacaaatacgatcgcgcgtaccgaaaaaacccgtctcaaaattaaactcgcaaaaattaaacgaaacctcgtaataaaccaaatcgcgctccgtaaacaccttaaaataaatataacgcgaccgcaaaatctccacccaaccgcgaaactcccgatacttctccaccaccatctccgaaacgctatcgtacttatccttaaaaaaatcaccgataacgcgaaaatcgaattacgaccaccaacatatcttcacctcgcaactacccgacaacccgtaacacttacacttaaaatacatataactaacgataacctacgaaacacgcgcaaa

SEQ ID NO: 21479 - DNA, 567 bp, Artificial Sequence
  chemically treated genomic DNA (Homo sapiens) CpG-island No: 21479
tgttttatttagggaaaagtttatttttaggtagggttcgtttcgtttagggggagtcgcggtcggtgtttatttgtaggtgtgtacgtcgtagacgcgcgtgtatttttggtagttgacgtagtagtattagtggaatacgtagcggtatttttttcggcgtcgtttcgttcgcgcgttgtggtcgcggtcgtagtatagtaggtcgtagtcgtcgatgtcgtgcgagttgacgttgtaggtgcggtcgcgcgtgtcgaaggagttcgttttagggttgggttcgtagaagttgggcgaggtttcgtagtagattaggtcgcgtttcgtgggtattttgaagtaggtgtagcgcggtcgtagggtttttatttagtcgcgggattttcggtgtttttttattattattttcgaggcgttgtcgtatttgtttttgaggaagttatcgatggcgcggaagtcgggttgcgattattagtatgtttttatttcgtagttgttcgatagttcgtggtatttgtatttgaggtgtatgtggttggcgatggtttgcggggtacgcgtagg

SEQ ID NO: 21480 - DNA, 567 bp, Artificial Sequence
  chemically treated genomic DNA (Homo sapiens) CpG-island No: 21480
cctacgcgtaccccgcaaaccatcgccaaccacatacacctcaaatacaaataccacgaactatcgaacaactacgaaataaaaacatactaataatcgcaacccgacttccgcgccatcgataacttcctcaaaaacaaatacgacaacgcctcgaaaataataataaaaaaacaccgaaaatcccgcgactaaataaaaaccctacgaccgcgctacacctacttcaaaatacccacgaaacgcgacctaatctactacgaaacctcgcccaacttctacgaacccaaccctaaaacgaactccttcgacacgcgcgaccgcacctacaacgtcaactcgcacgacatcgacgactacgacctactatactacgaccgcgaccacaacgcgcgaacgaaacgacgccgaaaaaaataccgctacgtattccactaatactactacgtcaactaccaaaaatacacgcgcgtctacgacgtacacacctacaaataaacaccgaccgcgactccccctaaacgaaacgaaccctacctaaaaataaacttttccctaaataaaaca

SEQ ID NO: 21481 - DNA, 591 bp, Artificial Sequence
  chemically treated genomic DNA (Homo sapiens) CpG-island No: 21481
gtagggcgcgcggggttggaaatttaggacgcggttcgggagttttaggagggcgtttgcggatcgcgcggtttcgggtcggtcgtttgtttatttggcgtattttagcgcgtcgcgtatatttgggggttcgtatattagtacgtttttagatatatcgatatttacggtagtaggcgggggttaacgtcgtcgtcgcggttcgggttttcgtggtttcgtttgtttttgtttgtttcgttcgggtttcggtttcggcgggcgtttttcgcggcgttgtttcgttttcgtcgtttcgcgtcgtttcgggtttcggttcgtagttcggtcgtcggtttatttggcgtagcgtcgttttcggagttcgcgtatattcgcgtattcgcggtcgtaggagggtttagcgacgtcgtcgcgttagtttttagggttcggtttttttcggcgtttacgttttcggggcggattttcggtttttcgcgttttttcgcgcggcgatggttttattcggatattttttatttttttgtagtttgaagtaggttttgggtagttattcgatttggtggtgagtgagttttttcgcgttcg

SEQ ID NO: 21482 - DNA, 591 bp, Artificial Sequence
  chemically treated genomic DNA (Homo sapiens) CpG-island No: 21482
cgaacgcgaaaaaactcactcaccaccaaatcgaataactacccaaaacctacttcaaactacaaaaaaataaaaaatatccgaataaaaccatcgccgcgcgaaaaaacgcgaaaaaccgaaaatccgccccgaaaacgtaaacgccgaaaaaaaccgaaccctaaaaactaacgcgacgacgtcgctaaaccctcctacgaccgcgaatacgcgaatatacgcgaactccgaaaacgacgctacgccaaataaaccgacgaccgaactacgaaccgaaacccgaaacgacgcgaaacgacgaaaacgaaacaacgccgcgaaaaacgcccgccgaaaccgaaacccgaacgaaacaaacaaaaacaaacgaaaccacgaaaacccgaaccgcgacgacgacgttaacccccgcctactaccgtaaatatcgatatatctaaaaacgtactaatatacgaacccccaaatatacgcgacgcgctaaaatacgccaaataaacaaacgaccgacccgaaaccgcgcgatccgcaaacgccctcctaaaactcccgaaccgcgtcctaaatttccaaccccgcgcgccctac

SEQ ID NO: 21483 - DNA, 591 bp, Artificial Sequence
  chemically treated genomic DNA (Homo sapiens) CpG-island No: 21483
cgaacgcgaggaggtttatttattattagatcgggtagttgtttagagtttgttttaggttgtagaggagtaagaagtattcgagtggggttatcgtcgcgcgagagggcgcggagggtcgggagttcgtttcgagagcgtgagcgtcggggggggtcgggttttgggagttggcgcggcggcgtcgttgggtttttttgcggtcgcgggtgcgcgggtgtgcgcgggtttcgagggcggcgttgcgttaggtgggtcggcggtcgggttgcgggtcgaggttcggggcggcgcggggcggcgggggcggggtagcgtcgcggggggcgttcgtcggggtcggggttcgggcggggtaggtaggggtaggcggggttacgggagttcgaatcgcggcggcggcgttggttttcgtttgttgtcgtgggtgtcggtgtgtttgaggacgtgttggtgtgcgggtttttaggtgtgcgcggcgcgttggggtgcgttagatgggtaggcggtcggttcggggtcgcgcgattcgtaggcgtttttttggagttttcgggtcgcgttttgggtttttagtttcgcgcgttttgt

SEQ ID NO: 21484 - DNA, 591 bp, Artificial Sequence
  chemically treated genomic DNA (Homo sapiens) CpG-island No: 21484
acaaaacgcgcgaaactaaaaacccaaaacgcgacccgaaaactccaaaaaaacgcctacgaatcgcgcgaccccgaaccgaccgcctacccatctaacgcaccccaacgcgccgcgcacacctaaaaacccgcacaccaacacgtcctcaaacacaccgacacccacgacaacaaacgaaaaccaacgccgccgccgcgattcgaactcccgtaaccccgcctacccctacctaccccgcccgaaccccgaccccgacgaacgccccccgcgacgctaccccgcccccgccgccccgcgccgccccgaacctcgacccgcaacccgaccgccgacccacctaacgcaacgccgccctcgaaacccgcgcacacccgcgcacccgcgaccgcaaaaaaacccaacgacgccgccgcgccaactcccaaaacccgaccccccccgacgctcacgctctcgaaacgaactcccgaccctccgcgccctctcgcgcgacgataaccccactcgaatacttcttactcctctacaacctaaaacaaactctaaacaactacccgatctaataataaataaacctcctcgcgttcg

SEQ ID NO: 21485 - DNA, 974 bp, Artificial Sequence
  chemically treated genomic DNA (Homo sapiens) CpG-island No: 21485
tgggcggtcggcggttcgaggtagcggcgtaggtaggtagcgcgacgtagaaggttttcgaagaagtttaggtcgcgtagggcggcggcgttcgaggtttgggtcgggttgggggattagtcggggtttagtttttacgggaagtcggcggtatattgggtgcggtagcgtaggcgaagggcgcggagggttgttcgggagcgtagcgttcgttttatgtttaggattatttcgggttagttttcgcgcgcgtaggttgcggttttttcggcgaagagtagattaggcgttattatgttttattttgtttcggattcgatttcggtttgggaggtagcggttacgatagttagtagtgtggttagtagttttaacgcgcgtatcgttatcgtttttttagatttaacggaatcgttagttattcgttattaaggtcggagttttattttcggcgaaggttcgttttcgggcgaagttttattttttaagtcgggcggcgtatgtttacgaggtttgtatcgttttttttttttttagttagttcggatttttttatcggtttttagcgaatttcggcgcgttagtcggagtttcgttttcgagtttaggttttgtttagtcgaattgacgtttagtagataagaaagacggaagtttcgtttacgcgtttttatgcgtaggttttttttattcgtatagtttagggagtggggaggataaggcgttgttatggaggacgtcgtcgcgtcggggcggatcgagggggtttttgaaaggtaaggagcgtcgttagttgtaggttagggaggtatgcggggcgggagttagtagggggaagttagttttcgcgaggtagtcggtttcggggtttcgcgggaggtcgacggcgggagtttacggtttgtgtttttgggtgtgtgtcgtaggagttttggtggagtttatttcgattttcggcggtttggttttggtga

SEQ ID NO: 21486 - DNA, 974 bp, Artificial Sequence
  chemically treated genomic DNA (Homo sapiens) CpG-island No: 21486
tcaccaaaaccaaaccgccgaaaatcgaaataaactccaccaaaactcctacgacacacacccaaaaacacaaaccgtaaactcccgccgtcgacctcccgcgaaaccccgaaaccgactacctcgcgaaaactaacttccccctactaactcccgccccgcatacctccctaacctacaactaacgacgctccttacctttcaaaaaccccctcgatccgccccgacgcgacgacgtcctccataacaacgccttatcctccccactccctaaactatacgaataaaaaaaacctacgcataaaaacgcgtaaacgaaacttccgtctttcttatctactaaacgtcaattcgactaaacaaaacctaaactcgaaaacgaaactccgactaacgcgccgaaattcgctaaaaaccgataaaaaaatccgaactaactaaaaaaaaaaaaaacgatacaaacctcgtaaacatacgccgcccgacttaaaaaataaaacttcgcccgaaaacgaaccttcgccgaaaataaaactccgaccttaataacgaataactaacgattccgttaaatctaaaaaaacgataacgatacgcgcgttaaaactactaaccacactactaactatcgtaaccgctacctcccaaaccgaaatcgaatccgaaacaaaataaaacataataacgcctaatctactcttcgccgaaaaaaccgcaacctacgcgcgcgaaaactaacccgaaataatcctaaacataaaacgaacgctacgctcccgaacaaccctccgcgcccttcgcctacgctaccgcacccaatataccgccgacttcccgtaaaaactaaaccccgactaatcccccaacccgacccaaacctcgaacgccgccgccctacgcgacctaaacttcttcgaaaaccttctacgtcgcgctacctacctacgccgctacctcgaaccgccgaccgccca

SEQ ID NO: 21487 - DNA, 974 bp, Artificial Sequence
  chemically treated genomic DNA (Homo sapiens) CpG-island No: 21487
ttattagggttaggtcgtcgggggtcggggtgagttttattagggtttttgcgatatatatttaggaatataagtcgtgagttttcgtcgtcggtttttcgcggagtttcgagatcggttgtttcgcgggagttgatttttttttgttgattttcgtttcgtatatttttttggtttgtagttggcggcgttttttgttttttaaggattttttcggttcgtttcggcgcggcggcgttttttatgatagcgttttattttttttattttttgggttgtgcgagtaggaagagtttgcgtataaaggcgcgtgggcggagttttcgttttttttgtttattgggcgttagttcgattgagtaaggtttgagttcggaggcggggtttcggttgacgcgtcgggattcgttgagggtcggtggggggattcgggttgattgaaaggaaaagaggcggtgtaagtttcgtgggtatgcgtcgttcggtttggaaggtggggtttcgttcgggggcgggttttcgtcgggggtaggatttcggttttggtggcgggtggttggcggtttcgttaggtttgagggagcgatggcggtacgcgcgttgaagttgttgattatattgttggttgtcgtggtcgttgttttttaagtcgaggtcgagttcgaggtaggatggggtatggtgacgtttgatttgtttttcgtcgaggggatcgtagtttacgcgcgcggggattggttcggggtggttttgagtatggaacgggcgttgcgttttcgggtagtttttcgcgtttttcgtttgcgttgtcgtatttagtgtgtcgtcgatttttcgtgggagttggatttcgattggttttttagttcggtttaggtttcgggcgtcgtcgttttgcgcgatttgagttttttcgggggttttttgcgtcgcgttgtttgtttgcgtcgttgtttcgggtcgtcggtcgttta

SEQ ID NO: 21488 - DNA, 974 bp, Artificial Sequence
  chemically treated genomic DNA (Homo sapiens) CpG-island No: 21488
taaacgaccgacgacccgaaacaacgacgcaaacaaacaacgcgacgcaaaaaacccccgaaaaaactcaaatcgcgcaaaacgacgacgcccgaaacctaaaccgaactaaaaaaccaatcgaaatccaactcccacgaaaaatcgacgacacactaaatacgacaacgcaaacgaaaaacgcgaaaaactacccgaaaacgcaacgcccgttccatactcaaaaccaccccgaaccaatccccgcgcgcgtaaactacgatcccctcgacgaaaaacaaatcaaacgtcaccataccccatcctacctcgaactcgacctcgacttaaaaaacaacgaccacgacaaccaacaatataatcaacaacttcaacgcgcgtaccgccatcgctccctcaaacctaacgaaaccgccaaccacccgccaccaaaaccgaaatcctacccccgacgaaaacccgcccccgaacgaaaccccaccttccaaaccgaacgacgcatacccacgaaacttacaccgcctcttttcctttcaatcaacccgaatccccccaccgaccctcaacgaatcccgacgcgtcaaccgaaaccccgcctccgaactcaaaccttactcaatcgaactaacgcccaataaacaaaaaaaacgaaaactccgcccacgcgcctttatacgcaaactcttcctactcgcacaacccaaaaaataaaaaaaataaaacgctatcataaaaaacgccgccgcgccgaaacgaaccgaaaaaatccttaaaaaacaaaaaacgccgccaactacaaaccaaaaaaatatacgaaacgaaaatcaacaaaaaaaaatcaactcccgcgaaacaaccgatctcgaaactccgcgaaaaaccgacgacgaaaactcacgacttatattcctaaatatatatcgcaaaaaccctaataaaactcaccccgacccccgacgacctaaccctaataa

SEQ ID NO: 21489 - DNA, 2561 bp, Artificial Sequence
  chemically treated genomic DNA (Homo sapiens) CpG-island No: 21489
ttgtatatgaaagtatcgggtgatataagttttcgtttgatgaagtaatttaatagttttttgtttcgggtgcgcgaaggcgacgggtagttgatcgtcggggacgtcggtttggatcgcgagcggttgtgtggttaggtttcgtagtgcgtgttggttttcgatgtggttagtttttcgtaggagtagtttcggttggtgtacgtggaggtagaggtgagggacgttaacgattacgcgtcgcgtttttttagggtttagatttcggtagaggtgttcgagggtgcggtagtgggtacgcgtatttttttggaggtgtcggtggacgaggacgtgggcgttaacgggttgtagatcgtgcgtttggtcgagtcgtatagtttttttcgcgtggagttgtagacgcgagcggacggcgtttagtgcgtagatttggtgttgttgtaggagttggatcgcgagagttaggtcgtttatagtttggagttggtggtttaggacggcggtcgttcgtcgcgtttcgttacggttgtttttagcgtgcgcgttttggatgcgaatgattatagttcggttttttcgtagggcgtcgtggtcgaagtggagttggcggaagacgcgttcgtgggttttttgtttttcgatttggacgtagtcgatttcgacgagggatttacggcgacgtggtgttcgtatttggcgttcgtatttcgtcggaggcgcgtcgtttttttcggtttgattcgcgattaggtcgttttattttggtcgggttcgtggattacgagcgttaggatatttacgagttggacgtgcgggcgtaggatcgcggattcgggtttcgcgttgttatttgtaaggttatcgtgcgtattcgagacgttaatgataacgtattcgatatcgttattatttcgttggtcgttttaggcgcgtcggtaattttatttttcgtcgttgtcgtcgtcgtcgttgtattcgggggagcggacgttagttcgtcggcgggagtcgggacgtcggaggttggtgttatttcgttggtgtcggagggggcggcgcgcgagagtttggtggttttggttagtatttcggatagggattcgggcgttaacgggtaagtgcgttgcgttttttatgggtacgagtattttcggttgtagtcggtttacgcgggtagttatttggtggtgatcgcggcgtcgttggatcgcgaacgtatcgtcgagtataatttgacgttggtggtcgaggatcgcggcgcgttttcgttgcgtatagtgcggttttatacggtgcgtgtgggcgacgagaacgataacgcgtcgttttttacgcggtcggtttatgaggtgtcggtgcgcgagaataattcgttaggcgtttatttggttacggtggtcgttcgcgatcgggatttgggtcgtaacggttaggttatttatcggttgttggaggtcgaggtgggtcgcgtcgggggcgtcgtgtttatttatgtttcggtggatttagttatcggagttatttacgcgttgcgtagtttcgattatgagacgttgcgttaattcgacgttcgtatttaagttagcgacggcggttttttttagttttttagtagcgttttagtgtaagtgcgcgtgttggattagaacgattatgcgttagttttggtgtattcggcgttagttaatggttttttagaagtggcggtgtttgggcgtatcgtaaaggatacggttgtggttcgtgtgtaggttcgggatgtagacgagggagttaacggggagttggcgttcgagttgtagtagtaggagtcgcgcgaagttttcgttatcggtcgtcgtacgggggagatattgtttatcggcgatttttcgtaggagttattcggtcgcgtgtttagggcgtttttggttatattcgacggcggtcgtttttcgtttattattatcgtaattgttagtttcgtggtaatagtagggggcgggcgtgggtcggttgcgtttgttagtgtaggaagttcggagcgttttcgttcgtttggttttcggttcggggtgttcgggtcggtgttgtaatgggatacgtcgttgatcgttattatcgtgttggtcgggagttgtacgttgttgttggtcgttattatcgttatcgttattatttgtaatcgtcgtaagaaggaggtgcgtaaagggggggtttttcgggaagagcggttcggggcggcgggcggcggagtttcggttttcggtttttcggaggaggtcgttcggggagtcgggtttaggtttaatatgttcgacgtgtttattttttttggtatcggtaaagcgttttttggtagtttcgcggcggacgcgttttcgtttgcggtcgtcgcggtcgaagtgtcgggtttagagggcggtagcgttattggggaaagcgtttgttatttcgaggggtagtagcggtttcgcggcgcgtacgtcgaggtgaggttttttttcggttgggcgttttttttcgagtttcgcggataggttgggggaagggagattggagggggtagggtgggtgta

SEQ ID NO: 21490 - DNA, 2561 bp, Artificial Sequence
  chemically treated genomic DNA (Homo sapiens) CpG-island No: 21490
tacacccaccctaccccctccaatctcccttcccccaacctatccgcgaaactcgaaaaaaaacgcccaaccgaaaaaaaacctcacctcgacgtacgcgccgcgaaaccgctactacccctcgaaataacaaacgctttccccaataacgctaccgccctctaaacccgacacttcgaccgcgacgaccgcaaacgaaaacgcgtccgccgcgaaactaccaaaaaacgctttaccgataccaaaaaaaataaacacgtcgaacatattaaacctaaacccgactccccgaacgacctcctccgaaaaaccgaaaaccgaaactccgccgcccgccgccccgaaccgctcttcccgaaaaaccccccctttacgcacctccttcttacgacgattacaaataataacgataacgataataacgaccaacaacaacgtacaactcccgaccaacacgataataacgatcaacgacgtatcccattacaacaccgacccgaacaccccgaaccgaaaaccaaacgaacgaaaacgctccgaacttcctacactaacaaacgcaaccgacccacgcccgccccctactattaccacgaaactaacaattacgataataataaacgaaaaacgaccgccgtcgaatataaccaaaaacgccctaaacacgcgaccgaataactcctacgaaaaatcgccgataaacaatatctcccccgtacgacgaccgataacgaaaacttcgcgcgactcctactactacaactcgaacgccaactccccgttaactccctcgtctacatcccgaacctacacacgaaccacaaccgtatcctttacgatacgcccaaacaccgccacttctaaaaaaccattaactaacgccgaatacaccaaaactaacgcataatcgttctaatccaacacgcgcacttacactaaaacgctactaaaaaactaaaaaaaaccgccgtcgctaacttaaatacgaacgtcgaattaacgcaacgtctcataatcgaaactacgcaacgcgtaaataactccgataactaaatccaccgaaacataaataaacacgacgcccccgacgcgacccacctcgacctccaacaaccgataaataacctaaccgttacgacccaaatcccgatcgcgaacgaccaccgtaaccaaataaacgcctaacgaattattctcgcgcaccgacacctcataaaccgaccgcgtaaaaaacgacgcgttatcgttctcgtcgcccacacgcaccgtataaaaccgcactatacgcaacgaaaacgcgccgcgatcctcgaccaccaacgtcaaattatactcgacgatacgttcgcgatccaacgacgccgcgatcaccaccaaataactacccgcgtaaaccgactacaaccgaaaatactcgtacccataaaaaacgcaacgcacttacccgttaacgcccgaatccctatccgaaatactaaccaaaaccaccaaactctcgcgcgccgccccctccgacaccaacgaaataacaccaacctccgacgtcccgactcccgccgacgaactaacgtccgctcccccgaatacaacgacgacgacgacaacgacgaaaaataaaattaccgacgcgcctaaaacgaccaacgaaataataacgatatcgaatacgttatcattaacgtctcgaatacgcacgataaccttacaaataacaacgcgaaacccgaatccgcgatcctacgcccgcacgtccaactcgtaaatatcctaacgctcgtaatccacgaacccgaccaaaataaaacgacctaatcgcgaatcaaaccgaaaaaaacgacgcgcctccgacgaaatacgaacgccaaatacgaacaccacgtcgccgtaaatccctcgtcgaaatcgactacgtccaaatcgaaaaacaaaaaacccacgaacgcgtcttccgccaactccacttcgaccacgacgccctacgaaaaaaccgaactataatcattcgcatccaaaacgcgcacgctaaaaacaaccgtaacgaaacgcgacgaacgaccgccgtcctaaaccaccaactccaaactataaacgacctaactctcgcgatccaactcctacaacaacaccaaatctacgcactaaacgccgtccgctcgcgtctacaactccacgcgaaaaaaactatacgactcgaccaaacgcacgatctacaacccgttaacgcccacgtcctcgtccaccgacacctccaaaaaaatacgcgtacccactaccgcaccctcgaacacctctaccgaaatctaaaccctaaaaaaacgcgacgcgtaatcgttaacgtccctcacctctacctccacgtacaccaaccgaaactactcctacgaaaaactaaccacatcgaaaaccaacacgcactacgaaacctaaccacacaaccgctcgcgatccaaaccgacgtccccgacgatcaactacccgtcgccttcgcgcacccgaaacaaaaaactattaaattacttcatcaaacgaaaacttatatcacccgatactttcatatacaa

SEQ ID NO: 21491 - DNA, 2561 bp, Artificial Sequence
  chemically treated genomic DNA (Homo sapiens) CpG-island No: 21491
tgtatttattttattttttttagtttttttttttttagtttgttcgcggagttcggaggggggcgtttagtcgaaggaaggttttatttcggcgtgcgcgtcgcggagtcgttgttgtttttcgaagtgataggcgttttttttagtggcgttgtcgttttttgagttcggtatttcggtcgcggcgatcgtaggcggaggcgcgttcgtcgcggggttgttaaagggcgttttgtcggtgttagggaaggtgagtacgtcgaatatgttgggtttgggttcggtttttcgggcggtttttttcggggagtcgggagtcgaggtttcgtcgttcgtcgtttcgggtcgtttttttcggagggttttttttttgcgtattttttttttgcggcggttgtaggtggtggcgatggcgatgatggcggttagtagtagcgtgtagttttcggttagtacgatgatgacgattagcggcgtgttttattgtagtatcgattcggatatttcgagtcgagagttaggcgggcgggaacgtttcgggttttttgtattggtaggcgtagtcggtttacgttcgttttttgttgttattacgaagttgatagttgcggtggtggtgagcgggggacggtcgtcgtcggatatgattaggagcgttttgaatacgcgatcgggtggtttttgcgagaggtcgtcggtgagtagtatttttttcgtgcggcggtcgatggcgaaggtttcgcgcggtttttgttgttgtagttcgaacgttagtttttcgttggttttttcgtttgtatttcgggtttgtatacgggttataatcgtgttttttgcggtgcgtttaggtatcgttatttttagggagttattggttggcgtcgggtgtattaggattggcgtatggtcgttttggtttagtacgcgtatttgtattagggcgttgttggaaagttgaggggagtcgtcgtcgttagtttggatgcgaacgtcgagttggcgtagcgttttatagtcgaagttgcgtagcgcgtagatggtttcggtagttgggtttatcgagatataagtggatacggcgttttcggcgcggtttatttcggtttttagtagtcggtaggtgatttggtcgttgcggtttaggtttcggtcgcgggcggttatcgtggttaggtaggcgtttggcgggttgttttcgcgtatcgatattttatagatcggtcgcgtgaagagcggcgcgttgtcgttttcgtcgtttatacgtatcgtgtagggtcgtattgtgcgtagcgggggcgcgtcgcgattttcggttattagcgttaagttgtattcggcgatgcgttcgcggtttagcgacgtcgcggttattattaggtagttgttcgcgtaggtcggttgtagtcggaagtgttcgtgtttatagagggcgtagcgtatttgttcgttggcgttcgagtttttgttcgaggtgttgattagggttattaggttttcgcgcgtcgtttttttcggtattagcgaagtggtattagttttcggcgtttcggttttcgtcggcgagttagcgttcgttttttcgagtgtagcggcggcggcggtagcggcgaagggtgaggttgtcggcgcgtttggggcggttagcggggtgatggcgatgtcgggtgcgttgttattgacgtttcggatgcgtacgatgattttgtaggtggtagcgcggggttcgggttcgcggttttgcgttcgtacgtttagttcgtaggtgttttgacgttcgtagtttacgggttcggttagggtgaggcggtttgatcgcgggttaagtcgaaagaggcggcgcgttttcggcggggtgcgggcgttaaatgcgaatattacgtcgtcgtaggtttttcgtcggggtcggttgcgtttaggtcgagaagtagggagtttacgggcgcgtttttcgttagttttatttcggttacggcgttttgcgggaaggtcgggttgtggttattcgtatttaggacgcgtacgttgagggtagtcgtggcggagcgcggcgggcggtcgtcgttttgggttattagttttaggttgtaggcggtttggttttcgcggtttagtttttgtagtagtattaggtttgcgtattgagcgtcgttcgttcgcgtttgtagttttacgcgaaaggggttgtgcggttcggttaggcgtacggtttgtagttcgttggcgtttacgttttcgtttatcggtatttttaaggggatgcgcgtgtttattgtcgtattttcggatatttttatcgggatttgggttttggggaagcgcggcgcgtggtcgttgacgttttttatttttatttttacgtgtattagtcggaattgtttttgcgagaagttgattatatcgaaggttagtacgtattgcggggtttggttatatagtcgttcgcggtttaggtcggcgttttcgacggttagttgttcgtcgttttcgcgtattcggagtagagagttgttgaattgttttattaggcggaagtttgtgttattcgatatttttatatgtag

SEQ ID NO: 21492 - DNA, 2561 bp, Artificial Sequence
  chemically treated genomic DNA (Homo sapiens) CpG-island No: 21492
ctacatataaaaatatcgaataacacaaacttccgcctaataaaacaattcaacaactctctactccgaatacgcgaaaacgacgaacaactaaccgtcgaaaacgccgacctaaaccgcgaacgactatataaccaaaccccgcaatacgtactaaccttcgatataatcaacttctcgcaaaaacaattccgactaatacacgtaaaaataaaaataaaaaacgtcaacgaccacgcgccgcgcttccccaaaacccaaatcccgataaaaatatccgaaaatacgacaataaacacgcgcatccccttaaaaataccgataaacgaaaacgtaaacgccaacgaactacaaaccgtacgcctaaccgaaccgcacaacccctttcgcgtaaaactacaaacgcgaacgaacgacgctcaatacgcaaacctaatactactacaaaaactaaaccgcgaaaaccaaaccgcctacaacctaaaactaataacccaaaacgacgaccgcccgccgcgctccgccacgactaccctcaacgtacgcgtcctaaatacgaataaccacaacccgaccttcccgcaaaacgccgtaaccgaaataaaactaacgaaaaacgcgcccgtaaactccctacttctcgacctaaacgcaaccgaccccgacgaaaaacctacgacgacgtaatattcgcatttaacgcccgcaccccgccgaaaacgcgccgcctctttcgacttaacccgcgatcaaaccgcctcaccctaaccgaacccgtaaactacgaacgtcaaaacacctacgaactaaacgtacgaacgcaaaaccgcgaacccgaaccccgcgctaccacctacaaaatcatcgtacgcatccgaaacgtcaataacaacgcacccgacatcgccatcaccccgctaaccgccccaaacgcgccgacaacctcacccttcgccgctaccgccgccgccgctacactcgaaaaaacgaacgctaactcgccgacgaaaaccgaaacgccgaaaactaataccacttcgctaataccgaaaaaaacgacgcgcgaaaacctaataaccctaatcaacacctcgaacaaaaactcgaacgccaacgaacaaatacgctacgccctctataaacacgaacacttccgactacaaccgacctacgcgaacaactacctaataataaccgcgacgtcgctaaaccgcgaacgcatcgccgaatacaacttaacgctaataaccgaaaatcgcgacgcgcccccgctacgcacaatacgaccctacacgatacgtataaacgacgaaaacgacaacgcgccgctcttcacgcgaccgatctataaaatatcgatacgcgaaaacaacccgccaaacgcctacctaaccacgataaccgcccgcgaccgaaacctaaaccgcaacgaccaaatcacctaccgactactaaaaaccgaaataaaccgcgccgaaaacgccgtatccacttatatctcgataaacccaactaccgaaaccatctacgcgctacgcaacttcgactataaaacgctacgccaactcgacgttcgcatccaaactaacgacgacgactcccctcaactttccaacaacgccctaatacaaatacgcgtactaaaccaaaacgaccatacgccaatcctaatacacccgacgccaaccaataactccctaaaaataacgatacctaaacgcaccgcaaaaaacacgattataacccgtatacaaacccgaaatacaaacgaaaaaaccaacgaaaaactaacgttcgaactacaacaacaaaaaccgcgcgaaaccttcgccatcgaccgccgcacgaaaaaaatactactcaccgacgacctctcgcaaaaaccacccgatcgcgtattcaaaacgctcctaatcatatccgacgacgaccgtcccccgctcaccaccaccgcaactatcaacttcgtaataacaacaaaaaacgaacgtaaaccgactacgcctaccaatacaaaaaacccgaaacgttcccgcccgcctaactctcgactcgaaatatccgaatcgatactacaataaaacacgccgctaatcgtcatcatcgtactaaccgaaaactacacgctactactaaccgccatcatcgccatcgccaccacctacaaccgccgcaaaaaaaaaatacgcaaaaaaaaaaccctccgaaaaaaacgacccgaaacgacgaacgacgaaacctcgactcccgactccccgaaaaaaaccgcccgaaaaaccgaacccaaacccaacatattcgacgtactcaccttccctaacaccgacaaaacgccctttaacaaccccgcgacgaacgcgcctccgcctacgatcgccgcgaccgaaataccgaactcaaaaaacgacaacgccactaaaaaaaacgcctatcacttcgaaaaacaacaacgactccgcgacgcgcacgccgaaataaaaccttccttcgactaaacgcccccctccgaactccgcgaacaaactaaaaaaaaaaaaactaaaaaaaataaaataaataca

SEQ ID NO: 21493 - DNA, 792 bp, Artificial Sequence
  chemically treated genomic DNA (Homo sapiens) CpG-island No: 21493
agtaggacggtgttttttaaacggcgttgatgttcgatttcgatttcgaggagattgcggatttcgattgcggtttttattagggtcggttcgtttttattttattttttgaggttggggcggagtcgatcggtcggtttcgagattttttgttttatcggtggagtaaggaatcggaagtcgcggtttttatataatcgggatgatgttagggcgggcgattttcggggggcgggattagggcggaggtcgcgtcgggagcgcggtggggttaggcgtggggcgttttcggtatgtttttgtatcgtagcgtcgtgtggttcgttaaggggttgcgcgagtatattaagtaaggcggcgcggcggggcgcggggtttcgggttgttacgtggttcgtttcggcgcgggcgagtagggttggcggggacgcgttcgcggttttttcgttttttcgttgggtcgattaagcgtgtttagaacgacgggtgcgttcgtcgtttagcgatttacggttgggcgtggggtagtcgttagattttagtcgtttaatgttcgcgatcgagattggcgttcgaggggcggggttgtggcgcgtttaagtttagggtcgttttattgacgttaggcggtttcggcgttaaggagttttttgggcggtatttcggcgtttcgttgggtgtgttcgtggaagtgttttcgtggtgttgttggcggcgttagatagggttggatttaaatcgttagttaaggttttgttttagtgtttttgggtgtgttttttttaaaaagat

SEQ ID NO: 21494 - DNA, 792 bp, Artificial Sequence
  chemically treated genomic DNA (Homo sapiens) CpG-island No: 21494
atctttttaaaaaaaacacacccaaaaacactaaaacaaaaccttaactaacgatttaaatccaaccctatctaacgccgccaacaacaccacgaaaacacttccacgaacacacccaacgaaacgccgaaataccgcccaaaaaactccttaacgccgaaaccgcctaacgtcaataaaacgaccctaaacttaaacgcgccacaaccccgcccctcgaacgccaatctcgatcgcgaacattaaacgactaaaatctaacgactaccccacgcccaaccgtaaatcgctaaacgacgaacgcacccgtcgttctaaacacgcttaatcgacccaacgaaaaaacgaaaaaaccgcgaacgcgtccccgccaaccctactcgcccgcgccgaaacgaaccacgtaacaacccgaaaccccgcgccccgccgcgccgccttacttaatatactcgcgcaaccccttaacgaaccacacgacgctacgatacaaaaacataccgaaaacgccccacgcctaaccccaccgcgctcccgacgcgacctccgccctaatcccgccccccgaaaatcgcccgccctaacatcatcccgattatataaaaaccgcgacttccgattccttactccaccgataaaacaaaaaatctcgaaaccgaccgatcgactccgccccaacctcaaaaaataaaataaaaacgaaccgaccctaataaaaaccgcaatcgaaatccgcaatctcctcgaaatcgaaatcgaacatcaacgccgtttaaaaaacaccgtcctact

SEQ ID NO: 21495 - DNA, 792 bp, Artificial Sequence
  chemically treated genomic DNA (Homo sapiens) CpG-island No: 21495
atttttttaaaggaaatatatttaaaggtattaggatagagttttagttagcgatttagatttagttttatttgacgtcgttagtagtattacgaagatatttttacgagtatatttagcggggcgtcgaggtgtcgtttaagaggttttttggcgtcggggtcgtttgacgttagtgggacggttttgggtttgggcgcgttatagtttcgtttttcgggcgttagtttcggtcgcgggtattgagcggttggagtttggcgattgttttacgtttagtcgtgggtcgttagacggcgggcgtattcgtcgttttggatacgtttagtcggtttagcgagagggcgaaggagtcgcgggcgcgttttcgttaattttgttcgttcgcgtcgaggcgggttacgtgatagttcggggtttcgcgtttcgtcgcgtcgttttatttggtgtattcgcgtagttttttggcgaattatacgacgttgcggtatagggatatgtcgggagcgttttacgtttagttttatcgcgttttcggcgcggttttcgttttggtttcgtttttcgggagtcgttcgttttgatattatttcggttatgtaagagtcgcggttttcggttttttgttttatcggtaaggtaaggggtttcggggtcggtcggtcgatttcgttttagttttagagggtggagtgagggcggatcggttttggtgggggtcgtagtcgaggttcgtagttttttcggggtcgaaatcgggtattagcgtcgtttagagaatatcgttttgtt

SEQ ID NO: 21496 - DNA, 792 bp, Artificial Sequence
  chemically treated genomic DNA (Homo sapiens) CpG-island No: 21496
aacaaaacgatattctctaaacgacgctaatacccgatttcgaccccgaaaaaactacgaacctcgactacgacccccaccaaaaccgatccgccctcactccaccctctaaaactaaaacgaaatcgaccgaccgaccccgaaaccccttaccttaccgataaaacaaaaaaccgaaaaccgcgactcttacataaccgaaataatatcaaaacgaacgactcccgaaaaacgaaaccaaaacgaaaaccgcgccgaaaacgcgataaaactaaacgtaaaacgctcccgacatatccctataccgcaacgtcgtataattcgccaaaaaactacgcgaatacaccaaataaaacgacgcgacgaaacgcgaaaccccgaactatcacgtaacccgcctcgacgcgaacgaacaaaattaacgaaaacgcgcccgcgactccttcgccctctcgctaaaccgactaaacgtatccaaaacgacgaatacgcccgccgtctaacgacccacgactaaacgtaaaacaatcgccaaactccaaccgctcaatacccgcgaccgaaactaacgcccgaaaaacgaaactataacgcgcccaaacccaaaaccgtcccactaacgtcaaacgaccccgacgccaaaaaacctcttaaacgacacctcgacgccccgctaaatatactcgtaaaaatatcttcgtaatactactaacgacgtcaaataaaactaaatctaaatcgctaactaaaactctatcctaatacctttaaatatatttcctttaaaaaaat

SEQ ID NO: 21497 - DNA, 628 bp, Artificial Sequence
  chemically treated genomic DNA (Homo sapiens) CpG-island No: 21497
ttcggtgcggtgagttttttttttcggtcgcgtttttttcgttttttttttttcgttatgcgaaggcgtagttttcgggcggtttcgaagttagaagggggattagcggtaggcggaggggttggagcgtcggagtcgggtcgttttatttatgtcggtcgtatattcgtcgttattttatttaaacgtagttttcgcggcgagtacgtcggcgttcggtttatttgggggtcgtagttttcgtagtttatagatatgttatcggttttaacgattcgtgagcgagtcgggtaagtaagttggttttttttcgcgttgatttttagtttttttttttttagtttcgcggttcgttttcgttttgtttatttttcggttttcgtcgtcgtcgtcgtcgtcgtagtttcggttcgtaatatcgtttattttttacgttttttattttttttcgcgagagggtagcgcgtttttcgcgagaaaaatttcgcggtcgagttcgcgtaaaagtgggtgggcgtttaaaaagggaaagaaggaataggaaaaaaagtttttttacgtgttttagtgtagttcgcggagtagttcgcggggtagtttcgttggttatatgatttaaagggggttt

SEQ ID NO: 21498 - DNA, 628 bp, Artificial Sequence
  chemically treated genomic DNA (Homo sapiens) CpG-island No: 21498
aaaccccctttaaatcatataaccaacgaaactaccccgcgaactactccgcgaactacactaaaacacgtaaaaaaactttttttcctattccttctttccctttttaaacgcccacccacttttacgcgaactcgaccgcgaaatttttctcgcgaaaaacgcgctaccctctcgcgaaaaaaaataaaaaacgtaaaaaataaacgatattacgaaccgaaactacgacgacgacgacgacgacgaaaaccgaaaaataaacaaaacgaaaacgaaccgcgaaactaaaaaaaaaaaaactaaaaatcaacgcgaaaaaaaaccaacttacttacccgactcgctcacgaatcgttaaaaccgataacatatctataaactacgaaaactacgacccccaaataaaccgaacgccgacgtactcgccgcgaaaactacgtttaaataaaataacgacgaatatacgaccgacataaataaaacgacccgactccgacgctccaacccctccgcctaccgctaatcccccttctaacttcgaaaccgcccgaaaactacgccttcgcataacgaaaaaaaaaaaacgaaaaaaacgcgaccgaaaaaaaaaactcaccgcaccgaa

SEQ ID NO: 21499 - DNA, 628 bp, Artificial Sequence
  chemically treated genomic DNA (Homo sapiens) CpG-island No: 21499
aggttttttttaagttatgtgattagcggggttgtttcgcgggttgtttcgcgggttgtattggagtacgtgggaaggtttttttttttgttttttttttttttttttaaacgtttatttatttttgcgcgggttcggtcgcggaatttttttcgcgagaggcgcgttgttttttcgcgagagagagtgggaggcgtggagagtaggcggtgttgcgggtcggagttgcggcggcggcggcggcggcggaagtcgaggggtgggtagggcgggggcgggtcgcggggttgggagggggagggttgggggttagcgcgggagggggttagtttgtttgttcggttcgtttacgggtcgttgaggtcggtgatatgtttgtgagttgcggaggttgcggtttttaggtgagtcgggcgtcgacgtgttcgtcgcggaggttgcgtttagatggggtggcggcgggtgtgcggtcggtatggatggagcggttcggtttcggcgttttagttttttcgtttgtcgttggttttttttttggtttcggggtcgttcgagagttgcgttttcgtatggcggagggaggagggcgggaggagcgcggtcgaaggaggaaatttatcgtatcggg

SEQ ID NO: 21500 - DNA, 628 bp, Artificial Sequence
  chemically treated genomic DNA (Homo sapiens) CpG-island No: 21500
cccgatacgataaatttcctccttcgaccgcgctcctcccgccctcctccctccgccatacgaaaacgcaactctcgaacgaccccgaaaccaaaaaaaaaaccaacgacaaacgaaaaaactaaaacgccgaaaccgaaccgctccatccataccgaccgcacacccgccgccaccccatctaaacgcaacctccgcgacgaacacgtcgacgcccgactcacctaaaaaccgcaacctccgcaactcacaaacatatcaccgacctcaacgacccgtaaacgaaccgaacaaacaaactaaccccctcccgcgctaacccccaaccctccccctcccaaccccgcgacccgcccccgccctacccacccctcgacttccgccgccgccgccgccgccgcaactccgacccgcaacaccgcctactctccacgcctcccactctctctcgcgaaaaaacaacgcgcctctcgcgaaaaaaattccgcgaccgaacccgcgcaaaaataaataaacgtttaaaaaaaaaaaaaaaaaacaaaaaaaaaaaccttcccacgtactccaatacaacccgcgaaacaacccgcgaaacaaccccgctaatcacataacttaaaaaaaacct

SEQ ID NO: 21501 - DNA, 1062 bp, Artificial Sequence
  chemically treated genomic DNA (Homo sapiens) CpG-island No: 21501
ttgaatttcgtttaatgggcgtaagtttgtttttttacgttaaaatgtaagaggtagggacgttttttatgttttatagtatttttacgtggggtggcgttttcgtaagtggatttagcggttttattaattttcgaaatggggtcgcgttttcggaaggggatttagcggtttcgttgagtttcggatatggggtcgcgttttcggaaggggatttagcggtttcgttgagtttcggatatggggtcgcgttttcggaaggggatttagcggtttcgttgagtttcggatatggggtcgcgttttcggaaggggatttagcggtttcgttgagtttcggatatggggtcgcgttttcggaaggggatttagcggtttcgttgagtttcggatatggggtcgcgttttcggaaggggatttagcggtttcgttgagtttcggatatggggtcgcgttttcggaaggggatttagcggtttcgttgagtttcggatatggggtcgcgttttcggaaggggatttagcggtttcgttgagtttcggatatggggtcgcgttttcggaaggggatttagcggtttcgttgagtttcggatatggggtcgcgttttcggaaggggatttagcggtttcgttgagtttcggatatggggtcgcgttttcggaaggggatttagcggtttcgttgagtttcggatatggggtcgcgttttcggaaggggatttagcggtttcgttgagtttcggatatggggtcgcgttttcggaaggggatttagcggtttcgttgagtttcggatatggggtcgcgttttcggaaggggatttagcggtttcgttgagtttcggatatggggtcgcgttttcggaaggggatttagcggtttcgttgagtttcggatatggggtcgcgttttcggaaggggatttagtggtttcgttgagtttcggatatggggtcgcgtttttagaaggggatttagtggtttcgttaattttcgaacgggtttggtttttgtttttgtgaatgagattgatggacggtgttcgtagtttatttt

SEQ ID NO: 21502 - DNA, 1062 bp, Artificial Sequence
  chemically treated genomic DNA (Homo sapiens) CpG-island No: 21502
aaaataaactacgaacaccgtccatcaatctcattcacaaaaacaaaaaccaaacccgttcgaaaattaacgaaaccactaaatccccttctaaaaacgcgaccccatatccgaaactcaacgaaaccactaaatccccttccgaaaacgcgaccccatatccgaaactcaacgaaaccgctaaatccccttccgaaaacgcgaccccatatccgaaactcaacgaaaccgctaaatccccttccgaaaacgcgaccccatatccgaaactcaacgaaaccgctaaatccccttccgaaaacgcgaccccatatccgaaactcaacgaaaccgctaaatccccttccgaaaacgcgaccccatatccgaaactcaacgaaaccgctaaatccccttccgaaaacgcgaccccatatccgaaactcaacgaaaccgctaaatccccttccgaaaacgcgaccccatatccgaaactcaacgaaaccgctaaatccccttccgaaaacgcgaccccatatccgaaactcaacgaaaccgctaaatccccttccgaaaacgcgaccccatatccgaaactcaacgaaaccgctaaatccccttccgaaaacgcgaccccatatccgaaactcaacgaaaccgctaaatccccttccgaaaacgcgaccccatatccgaaactcaacgaaaccgctaaatccccttccgaaaacgcgaccccatatccgaaactcaacgaaaccgctaaatccccttccgaaaacgcgaccccatatccgaaactcaacgaaaccgctaaatccccttccgaaaacgcgaccccatatccgaaactcaacgaaaccgctaaatccccttccgaaaacgcgaccccatatccgaaactcaacgaaaccgctaaatccccttccgaaaacgcgaccccatttcgaaaattaataaaaccgctaaatccacttacgaaaacgccaccccacgtaaaaatactataaaacataaaaaacgtccctacctcttacattttaacgtaaaaaaacaaacttacgcccattaaacgaaattcaa

SEQ ID NO: 21503 - DNA, 1062 bp, Artificial Sequence
  chemically treated genomic DNA (Homo sapiens) CpG-island No: 21503
gaagtgagttgcgggtatcgtttattagttttatttataagagtaaggattagattcgttcgaggattagcggggttattaggtttttttttgaaggcgcgattttatgttcggggtttagcggggttattggattttttttcgaaggcgcgattttatgttcggggtttagcggggtcgttgggttttttttcgaaggcgcgattttatgttcggggtttagcggggtcgttgggttttttttcgaaggcgcgattttatgttcggggtttagcggggtcgttgggttttttttcgaaggcgcgattttatgttcggggtttagcggggtcgttgggttttttttcgaaggcgcgattttatgttcggggtttagcggggtcgttgggttttttttcgaaggcgcgattttatgttcggggtttagcggggtcgttgggttttttttcgaaggcgcgattttatgttcggggtttagcggggtcgttgggttttttttcgaaggcgcgattttatgttcggggtttagcggggtcgttgggttttttttcgaaggcgcgattttatgttcggggtttagcggggtcgttgggttttttttcgaaggcgcgattttatgttcggggtttagcggggtcgttgggttttttttcgaaggcgcgattttatgttcggggtttagcggggtcgttgggttttttttcgaaggcgcgattttatgttcggggtttagcggggtcgttgggttttttttcgaaggcgcgattttatgttcggggtttagcggggtcgttgggttttttttcgaaggcgcgattttatgttcggggtttagcggggtcgttgggttttttttcgaaggcgcgattttatgttcggggtttagcggggtcgttgggttttttttcgaaggcgcgattttatttcgggggttagtggggtcgttgagtttatttgcgaaggcgttattttacgtgagggtgttgtggagtatgggagacgtttttgttttttgtattttaacgtgaaaaggtaagtttgcgtttattagacgaggtttag

SEQ ID NO: 21504 - DNA, 1062 bp, Artificial Sequence
  chemically treated genomic DNA (Homo sapiens) CpG-island No: 21504
ctaaacctcgtctaataaacgcaaacttaccttttcacgttaaaatacaaaaaacaaaaacgtctcccatactccacaacaccctcacgtaaaataacgccttcgcaaataaactcaacgaccccactaacccccgaaataaaatcgcgccttcgaaaaaaaacccaacgaccccgctaaaccccgaacataaaatcgcgccttcgaaaaaaaacccaacgaccccgctaaaccccgaacataaaatcgcgccttcgaaaaaaaacccaacgaccccgctaaaccccgaacataaaatcgcgccttcgaaaaaaaacccaacgaccccgctaaaccccgaacataaaatcgcgccttcgaaaaaaaacccaacgaccccgctaaaccccgaacataaaatcgcgccttcgaaaaaaaacccaacgaccccgctaaaccccgaacataaaatcgcgccttcgaaaaaaaacccaacgaccccgctaaaccccgaacataaaatcgcgccttcgaaaaaaaacccaacgaccccgctaaaccccgaacataaaatcgcgccttcgaaaaaaaacccaacgaccccgctaaaccccgaacataaaatcgcgccttcgaaaaaaaacccaacgaccccgctaaaccccgaacataaaatcgcgccttcgaaaaaaaacccaacgaccccgctaaaccccgaacataaaatcgcgccttcgaaaaaaaacccaacgaccccgctaaaccccgaacataaaatcgcgccttcgaaaaaaaacccaacgaccccgctaaaccccgaacataaaatcgcgccttcgaaaaaaaacccaacgaccccgctaaaccccgaacataaaatcgcgccttcgaaaaaaaacccaacgaccccgctaaaccccgaacataaaatcgcgccttcgaaaaaaaatccaataaccccgctaaaccccgaacataaaatcgcgccttcaaaaaaaaacctaataaccccgctaatcctcgaacgaatctaatccttactcttataaataaaactaataaacgatacccgcaactcacttc

SEQ ID NO: 21505 - DNA, 536 bp, Artificial Sequence
  chemically treated genomic DNA (Homo sapiens) CpG-island No: 21505
tcgttaggcgcggattcgttgcggttagagaatttagtttgcgttagttcggttcgttcgcgaagttacgggttttattgacgcgattttttaagacgtgggggttattatgggtagaggatatcggttcggagttagattacgggttttataagtattagattataagtagcgtcgttattgagagtcgttcggaattcgtttagtatgtcgggttttttagttagggtttggtgtacgtggtcgagggttttggaagtttcgatggtttaggaggagtaggcgggcggggcggcgggtgtcgttggtcggtagagagtttcggtttgatttagcgtaggtttggtgcgcgtagagaataattttaagcgtatcgacgttcgcgagttttttttaaatatcgaacgggatttagagttcgagtttataggcggcggtcgggggagggagtagggtgttggtcgtcgttcgggagtgttcgcgttttgggtgatttttggaaggacgtggggtttaaatttcggttggggttggga

SEQ ID NO: 21506 - DNA, 536 bp, Artificial Sequence
  chemically treated genomic DNA (Homo sapiens) CpG-island No: 21506
tcccaaccccaaccgaaatttaaaccccacgtccttccaaaaatcacccaaaacgcgaacactcccgaacgacgaccaacaccctactccctcccccgaccgccgcctataaactcgaactctaaatcccgttcgatatttaaaaaaaactcgcgaacgtcgatacgcttaaaattattctctacgcgcaccaaacctacgctaaatcaaaccgaaactctctaccgaccaacgacacccgccgccccgcccgcctactcctcctaaaccatcgaaacttccaaaaccctcgaccacgtacaccaaaccctaactaaaaaacccgacatactaaacgaattccgaacgactctcaataacgacgctacttataatctaatacttataaaacccgtaatctaactccgaaccgatatcctctacccataataacccccacgtcttaaaaaatcgcgtcaataaaacccgtaacttcgcgaacgaaccgaactaacgcaaactaaattctctaaccgcaacgaatccgcgcctaacga

SEQ ID NO: 21507 - DNA, 536 bp, Artificial Sequence
  chemically treated genomic DNA (Homo sapiens) CpG-island No: 21507
ttttaattttagtcggagtttgggttttacgtttttttaggggttatttaggacgcgaatattttcgggcggcggttagtattttgttttttttttcggtcgtcgtttgtgggttcgggttttggatttcgttcggtgtttggaaggagttcgcgggcgtcggtgcgtttggagttgttttttgcgcgtattagatttgcgttaggttaggtcgaagttttttatcggttagcgatattcgtcgtttcgttcgtttgttttttttaggttatcggggtttttagggttttcgattacgtatattaggttttggttaggggattcgatatgttgggcgagtttcgagcggtttttagtggcggcgttgtttatggtttgatgtttatggggttcgtgatttggtttcgaatcgatgttttttgtttatggtgatttttacgttttggaaagtcgcgttagtgaagttcgtggtttcgcgagcgagtcgggttggcgtagattgggttttttggtcgtagcgggttcgcgtttgacgg

SEQ ID NO: 21508 - DNA, 536 bp, Artificial Sequence
  chemically treated genomic DNA (Homo sapiens) CpG-island No: 21508
ccgtcaaacgcgaacccgctacgaccaaaaaacccaatctacgccaacccgactcgctcgcgaaaccacgaacttcactaacgcgactttccaaaacgtaaaaatcaccataaacaaaaaacatcgattcgaaaccaaatcacgaaccccataaacatcaaaccataaacaacgccgccactaaaaaccgctcgaaactcgcccaacatatcgaatcccctaaccaaaacctaatatacgtaatcgaaaaccctaaaaaccccgataacctaaaaaaaacaaacgaacgaaacgacgaatatcgctaaccgataaaaaacttcgacctaacctaacgcaaatctaatacgcgcaaaaaacaactccaaacgcaccgacgcccgcgaactccttccaaacaccgaacgaaatccaaaacccgaacccacaaacgacgaccgaaaaaaaaaacaaaatactaaccgccgcccgaaaatattcgcgtcctaaataacccctaaaaaaacgtaaaacccaaactccgactaaaattaaaa

SEQ ID NO: 21509 - DNA, 932 bp, Artificial Sequence
  chemically treated genomic DNA (Homo sapiens) CpG-island No: 21509
tttcgcgcgtcgaggagtttagcgttagtggcggcggttaggagagattcgggtgttaggaaagatgggtcgtttgggggatagtagggagttcgggggaaacgtaggcgtcgggtatagagtcggtatcggcgtttttagttttgtcgaagatcgcggtcgggtttggttcgcgggaggggttttggcgtcggatttgtttcggttttgcgtgggcggtttcgtcgggttttgtaggagcgacgcgcgttaaaaggcggcgggaaggaggcggggtagagcgcgttcgggatttcgatttggacgcggttagttggagaggcggagcgtcgggaggagattttggtttcgtcgcgattcggtggttcgcgttgttttttcgcgcgtcgggttaaaaaggcgttaacgttcgcggtcgtttatttttcgcggcgtttttttttttcgcgtttatataattcgtttaggggtcgggtagttcgttttgttttttcgttcgcgtattcgttcggaggttcgcgcgttcgcgaaggggacgtagcgaaatcggggttcgcgttaggttagtcgggacggacgtcgatgttcggggttgcgacggttgtaggtaggaggtttagggtcggggggcggttcggtttcgcgggcgggggttggagcgtagcgttgggtaggtatttgggttcgtagtttcgaagttgggaggtgaggggagagcgatcggggacgagttgggataaggcgatataggggttttttcggagttggatcggtttttgggatttggcgttcgcgagaggttggagcggttagagtttagtttgcgaggagacgcgggttttgtttttagcgtcggtcgtttttggcgttaaagatagtttcgtaggggtttcgggagggttttttttttgttgttttttttttatttcggg

SEQ ID NO: 21510 - DNA, 932 bp, Artificial Sequence
  chemically treated genomic DNA (Homo sapiens) CpG-island No: 21510
cccgaaataaaaaaaaaacaacaaaaaaaaaaccctcccgaaacccctacgaaactatctttaacgccaaaaacgaccgacgctaaaaacaaaacccgcgtctcctcgcaaactaaactctaaccgctccaacctctcgcgaacgccaaatcccaaaaaccgatccaactccgaaaaaacccctatatcgccttatcccaactcgtccccgatcgctctcccctcacctcccaacttcgaaactacgaacccaaatacctacccaacgctacgctccaacccccgcccgcgaaaccgaaccgccccccgaccctaaacctcctacctacaaccgtcgcaaccccgaacatcgacgtccgtcccgactaacctaacgcgaaccccgatttcgctacgtccccttcgcgaacgcgcgaacctccgaacgaatacgcgaacgaaaaaacaaaacgaactacccgacccctaaacgaattatataaacgcgaaaaaaaaaaacgccgcgaaaaataaacgaccgcgaacgttaacgcctttttaacccgacgcgcgaaaaaacaacgcgaaccaccgaatcgcgacgaaaccaaaatctcctcccgacgctccgcctctccaactaaccgcgtccaaatcgaaatcccgaacgcgctctaccccgcctccttcccgccgccttttaacgcgcgtcgctcctacaaaacccgacgaaaccgcccacgcaaaaccgaaacaaatccgacgccaaaacccctcccgcgaaccaaacccgaccgcgatcttcgacaaaactaaaaacgccgataccgactctatacccgacgcctacgtttcccccgaactccctactatcccccaaacgacccatctttcctaacacccgaatctctcctaaccgccgccactaacgctaaactcctcgacgcgcgaaa

SEQ ID NO: 21511 - DNA, 932 bp, Artificial Sequence
  chemically treated genomic DNA (Homo sapiens) CpG-island No: 21511
ttcggggtggagaggggatagtaggaggagggttttttcggaatttttgcggggttgtttttggcgttaaaggcggtcggcgttgagggtaggattcgcgttttttcgtaggttagattttggtcgttttagtttttcgcgagcgttaagttttaggggtcgatttaatttcgagggagtttttgtgtcgttttgttttagttcgttttcgatcgttttttttttattttttagtttcggagttgcgagtttaggtgtttgtttagcgttgcgttttagttttcgttcgcggagtcgaatcgtttttcggttttgggttttttatttgtagtcgtcgtagtttcgggtatcggcgttcgtttcggttggtttggcgcgggtttcggtttcgttgcgtttttttcgcgggcgcgcgagttttcgggcgggtgcgcgggcggggaggtagggcgggttgttcggtttttaggcgggttatatgggcgcggggaggggaggcgtcgcggggagtaggcggtcgcgggcgttagcgtttttttagttcggcgcgcgggaaggtagcgcgggttatcgagtcgcggcggggttaaggttttttttcggcgtttcgtttttttagttggtcgcgtttaagtcggggtttcgggcgcgttttgtttcgtttttttttcgtcgttttttggcgcgcgtcgtttttgtagagttcggcgaggtcgtttacgtagggtcgaagtaggttcggcgttagggtttttttcgcgggttagattcgatcgcgattttcggtagagttggggacgtcggtgtcgattttgtgttcgacgtttgcgtttttttcggattttttgttgttttttagacggtttattttttttgatattcgggttttttttggtcgtcgttattagcgttgggtttttcggcgcgcgggg

SEQ ID NO: 21512 - DNA, 932 bp, Artificial Sequence
  chemically treated genomic DNA (Homo sapiens) CpG-island No: 21512
ccccgcgcgccgaaaaacccaacgctaataacgacgaccaaaaaaaacccgaatatcaaaaaaaataaaccgtctaaaaaacaacaaaaaatccgaaaaaaacgcaaacgtcgaacacaaaatcgacaccgacgtccccaactctaccgaaaatcgcgatcgaatctaacccgcgaaaaaaaccctaacgccgaacctacttcgaccctacgtaaacgacctcgccgaactctacaaaaacgacgcgcgccaaaaaacgacgaaaaaaaaacgaaacaaaacgcgcccgaaaccccgacttaaacgcgaccaactaaaaaaacgaaacgccgaaaaaaaaccttaaccccgccgcgactcgataacccgcgctaccttcccgcgcgccgaactaaaaaaacgctaacgcccgcgaccgcctactccccgcgacgcctcccctccccgcgcccatataacccgcctaaaaaccgaacaacccgccctacctccccgcccgcgcacccgcccgaaaactcgcgcgcccgcgaaaaaaacgcaacgaaaccgaaacccgcgccaaaccaaccgaaacgaacgccgatacccgaaactacgacgactacaaataaaaaacccaaaaccgaaaaacgattcgactccgcgaacgaaaactaaaacgcaacgctaaacaaacacctaaactcgcaactccgaaactaaaaaataaaaaaaaaacgatcgaaaacgaactaaaacaaaacgacacaaaaactccctcgaaattaaatcgacccctaaaacttaacgctcgcgaaaaactaaaacgaccaaaatctaacctacgaaaaaacgcgaatcctaccctcaacgccgaccgcctttaacgccaaaaacaaccccgcaaaaattccgaaaaaaccctcctcctactatcccctctccaccccgaa

SEQ ID NO: 21513 - DNA, 565 bp, Artificial Sequence
  chemically treated genomic DNA (Homo sapiens) CpG-island No: 21513
ggcgtcgtttttttgaagcgggcgtaaagttaggttttcggggcggtcgtgttcgcgtcgtttcgcgttttcgtttttcgaaagtacgcggtttagtggtttttagcgagcggggatatttcggtttttttgttttcgtcgttttcgtcggggtaatacggaaggtcgggggatatacgtttcgggagtttttggagttaataggtgggcgcggtcggtcggttcgtttcgggattggtattcgtagtttagatcgcgcgcgtttattggttttcggcgtcggggggttttcgcggtagggtagtaggggtcgtgtttaggggcggggtcgggtaggaggcggtgattggtaggttcgtacgtttcgtttttttcgtttttgtggtttgatttttttgcggttgaatcgttcggttgagtcgatattgtcggcgttttggcgattcggttcgacgagtttcgttttcgttatagtatggtggtttattggagataggttggatttaggtaggtttaggtttttagagggaagggtttcgcgagtcggttcgcgcgtatttcggtg

SEQ ID NO: 21514 - DNA, 565 bp, Artificial Sequence
  chemically treated genomic DNA (Homo sapiens) CpG-island No: 21514
caccgaaatacgcgcgaaccgactcgcgaaacccttccctctaaaaacctaaacctacctaaatccaacctatctccaataaaccaccatactataacgaaaacgaaactcgtcgaaccgaatcgccaaaacgccgacaatatcgactcaaccgaacgattcaaccgcaaaaaaatcaaaccacaaaaacgaaaaaaacgaaacgtacgaacctaccaatcaccgcctcctacccgaccccgcccctaaacacgacccctactaccctaccgcgaaaaccccccgacgccgaaaaccaataaacgcgcgcgatctaaactacgaataccaatcccgaaacgaaccgaccgaccgcgcccacctattaactccaaaaactcccgaaacgtatatcccccgaccttccgtattaccccgacgaaaacgacgaaaacaaaaaaaccgaaatatccccgctcgctaaaaaccactaaaccgcgtactttcgaaaaacgaaaacgcgaaacgacgcgaacacgaccgccccgaaaacctaactttacgcccgcttcaaaaaaacgacgcc

SEQ ID NO: 21515 - DNA, 565 bp, Artificial Sequence
  chemically treated genomic DNA (Homo sapiens) CpG-island No: 21515
tatcgggatgcgcgcgggtcggttcgcgaagtttttttttttggaggtttgggtttatttgagtttagtttgtttttagtaggttattatgttgtagcgaaagcggagttcgtcgggtcgaatcgttaagacgtcggtaatgtcggtttagtcgggcggtttagtcgtaggaagattagattatagaagcggaagaggcggggcgtgcggatttgttaattatcgttttttattcggtttcgtttttgagtacggtttttgttgttttgtcgcggaagtttttcggcgtcgggagttaatgggcgcgcgcggtttggattgcgggtgttaatttcggggcgggtcggtcggtcgcgtttatttattggttttaagagttttcggggcgtgtgtttttcgatttttcgtattatttcggcggggacgacgggggtaagaaggtcggggtgttttcgttcgttaaggattattgagtcgcgtgttttcgggaagcgaggacgcgaggcggcgcgggtacggtcgtttcgagggtttggttttgcgttcgttttagggaaacggcgtt

SEQ ID NO: 21516 - DNA, 565 bp, Artificial Sequence
  chemically treated genomic DNA (Homo sapiens) CpG-island No: 21516
aacgccgtttccctaaaacgaacgcaaaaccaaaccctcgaaacgaccgtacccgcgccgcctcgcgtcctcgcttcccgaaaacacgcgactcaataatccttaacgaacgaaaacaccccgaccttcttacccccgtcgtccccgccgaaataatacgaaaaatcgaaaaacacacgccccgaaaactcttaaaaccaataaataaacgcgaccgaccgacccgccccgaaattaacacccgcaatccaaaccgcgcgcgcccattaactcccgacgccgaaaaacttccgcgacaaaacaacaaaaaccgtactcaaaaacgaaaccgaataaaaaacgataattaacaaatccgcacgccccgcctcttccgcttctataatctaatcttcctacgactaaaccgcccgactaaaccgacattaccgacgtcttaacgattcgacccgacgaactccgctttcgctacaacataataacctactaaaaacaaactaaactcaaataaacccaaacctccaaaaaaaaaaacttcgcgaaccgacccgcgcgcatcccgata

SEQ ID NO: 21517 - DNA, 776 bp, Artificial Sequence
  chemically treated genomic DNA (Homo sapiens) CpG-island No: 21517
gagtcgggcgggggttttcgggtttcgcggtttcgtcgtcgttcgttttcgcgcgtttttttttttttttcgggtcgagtcggcgttattgcgttaggatggagcgagttcggcgcgggaggagatgacgtaaaagttagcgttttttttaaaaaagtgtttttttaggacgaagatggcggtaatttagttcgcggattgaagatgattgtggttttcgggaggtttagtttaggcgattcggttcggagtttcgcgggaggcggcgttagtagtcggagtttcggcggcggcgttcgcgggcggttttgcggtagcggcggcggcggcggcggcggcggtagtatttagagcgcggggtggggggtgggggggagggagcgtttcgtcggaggtagtttaggtttcggattttgggagagttagcgcggagtaggagcgggaggcggaggagaagaagaaggagaaggaaaggaaggaggaggaagaggaggagaagaagaggaggaggaggaggaggaggggaggcgtttcgggcgtcgttagtgggtagcggaggcgcggtatgtttttggtaggggagagcgggttgggtttcgcggggttatggggattcgcgcgttgataatgtttgggtgatcggagtcgcgttagttattttgttatttttattatcgttttttgtatttagtttcgtcgtcggttattagtattagtttttttcgtttttttttttttttttttttttattattgttttttattttatagaggatg

SEQ ID NO: 21518 - DNA, 776 bp, Artificial Sequence
  chemically treated genomic DNA (Homo sapiens) CpG-island No: 21518
catcctctataaaataaaaaacaataataaaaaaaaaaaaaaaaaaaaaaacgaaaaaaactaatactaataaccgacgacgaaactaaatacaaaaaacgataataaaaataacaaaataactaacgcgactccgatcacccaaacattatcaacgcgcgaatccccataaccccgcgaaacccaacccgctctcccctaccaaaaacataccgcgcctccgctacccactaacgacgcccgaaacgcctcccctcctcctcctcctcctcctcttcttctcctcctcttcctcctccttcctttccttctccttcttcttctcctccgcctcccgctcctactccgcgctaactctcccaaaatccgaaacctaaactacctccgacgaaacgctccctcccccccaccccccaccccgcgctctaaatactaccgccgccgccgccgccgccgccgctaccgcaaaaccgcccgcgaacgccgccgccgaaactccgactactaacgccgcctcccgcgaaactccgaaccgaatcgcctaaactaaacctcccgaaaaccacaatcatcttcaatccgcgaactaaattaccgccatcttcgtcctaaaaaaacacttttttaaaaaaaacgctaacttttacgtcatctcctcccgcgccgaactcgctccatcctaacgcaataacgccgactcgacccgaaaaaaaaaaaaaaacgcgcgaaaacgaacgacgacgaaaccgcgaaacccgaaaacccccgcccgactc

SEQ ID NO: 21519 - DNA, 776 bp, Artificial Sequence
  chemically treated genomic DNA (Homo sapiens) CpG-island No: 21519
tattttttgtagagtgggaaataataatggagagagagagagagagagagacggaggaggttggtgttggtggtcggcggcgaggttgggtgtagggggcgatggtggaggtgatagggtggttggcgcggtttcggttatttaggtattgttagcgcgcgggtttttatggtttcgcggagtttagttcgtttttttttgttaggggtatgtcgcgttttcgttgtttattgacggcgttcggagcgttttttttttttttttttttttttttttttttttttttttttttttttttttttttttttttttttttttttttttttttcgtttttcgtttttgtttcgcgttggtttttttagagttcggagtttgggttgttttcggcggggcgtttttttttttttattttttatttcgcgttttaagtgttgtcgtcgtcgtcgtcgtcgtcgtcgttgtcgtagggtcgttcgcgggcgtcgtcgtcggggtttcgattgttgacgtcgtttttcgcggagtttcgggtcgaatcgtttgggttgggtttttcgagagttatagttatttttagttcgcgggttaagttgtcgttattttcgttttggagaaatatttttttggggggagcgttggtttttgcgttattttttttcgcgtcgagttcgttttattttggcgtagtggcgtcggttcggttcgggaggagggagaaggcgcgcgggggcgggcggcggcggggtcgcggggttcgggggttttcgttcggttt

SEQ ID NO: 21520 - DNA, 776 bp, Artificial Sequence
  chemically treated genomic DNA (Homo sapiens) CpG-island No: 21520
aaaccgaacgaaaacccccgaaccccgcgaccccgccgccgcccgcccccgcgcgccttctccctcctcccgaaccgaaccgacgccactacgccaaaataaaacgaactcgacgcgaaaaaaaataacgcaaaaaccaacgctccccccaaaaaaatatttctccaaaacgaaaataacgacaacttaacccgcgaactaaaaataactataactctcgaaaaacccaacccaaacgattcgacccgaaactccgcgaaaaacgacgtcaacaatcgaaaccccgacgacgacgcccgcgaacgaccctacgacaacgacgacgacgacgacgacgacgacaacacttaaaacgcgaaataaaaaataaaaaaaaaaaaacgccccgccgaaaacaacccaaactccgaactctaaaaaaaccaacgcgaaacaaaaacgaaaaacgaaaaaaaaaaaaaaaaaaaaaaaaaaaaaaaaaaaaaaaaaaaaaaaaaaaaaaaaaaaaaaaaaaaaaaaaaaaaaaaacgctccgaacgccgtcaataaacaacgaaaacgcgacatacccctaacaaaaaaaaacgaactaaactccgcgaaaccataaaaacccgcgcgctaacaatacctaaataaccgaaaccgcgccaaccaccctatcacctccaccatcgccccctacacccaacctcgccgccgaccaccaacaccaacctcctccgtctctctctctctctctctctccattattatttcccactctacaaaaaata

SEQ ID NO: 21521 - DNA, 673 bp, Artificial Sequence
  chemically treated genomic DNA (Homo sapiens) CpG-island No: 21521
gtgttgagtgattttagcgcgcggtcgtcgtagggaagcgttgttcgtaggagttcggtggtttcgagggcgtaggagggttggggattttagggtggcggttcgggatggggtcgagatcgttggggggagggggtaggaagggcgtcgaggatcgttggcggaggtttcggttcggtggggggcgttggggatggcgggcgtaggtttagcgcgtcgattgcggggttaggggcgaaggggtaggcggagggtagcgcgcggggagtcggcgcggcggttcgggttatcgcggttcgattttgttattcgtagtttcggcgcgggggttggggcggatttcggtcgtatttcgttgtttgtatttttttggtaggcggcggagtttgggttgaaaggaatcgtttttatttggaacgttgtttattttttttaattagttagcgtcgacggacgatttcgcgagtacggaggtcggattcggtcgatttagcgttagaaaggggttaggattgggggcggttaggcgaggtggtgttgcgagcgttcgtattgggaatgtgtttcggtgttttagcggtcgggatgggggaagggtcgtggcgggtttaaggattttttattacgtaggaaaatagatttttttttgttagagttattatattttagtttt

SEQ ID NO: 21522 - DNA, 673 bp, Artificial Sequence
  chemically treated genomic DNA (Homo sapiens) CpG-island No: 21522
aaaactaaaatataataactctaacaaaaaaaaatctattttcctacgtaataaaaaatccttaaacccgccacgacccttcccccatcccgaccgctaaaacaccgaaacacattcccaatacgaacgctcgcaacaccacctcgcctaaccgcccccaatcctaacccctttctaacgctaaatcgaccgaatccgacctccgtactcgcgaaatcgtccgtcgacgctaactaattaaaaaaaataaacaacgttccaaataaaaacgattcctttcaacccaaactccgccgcctaccaaaaaaatacaaacaacgaaatacgaccgaaatccgccccaacccccgcgccgaaactacgaataacaaaatcgaaccgcgataacccgaaccgccgcgccgactccccgcgcgctaccctccgcctaccccttcgcccctaaccccgcaatcgacgcgctaaacctacgcccgccatccccaacgccccccaccgaaccgaaacctccgccaacgatcctcgacgcccttcctaccccctccccccaacgatctcgaccccatcccgaaccgccaccctaaaatccccaaccctcctacgccctcgaaaccaccgaactcctacgaacaacgcttccctacgacgaccgcgcgctaaaatcactcaacac

SEQ ID NO: 21523 - DNA, 673 bp, Artificial Sequence
  chemically treated genomic DNA (Homo sapiens) CpG-island No: 21523
aaagttaaggtatgataattttggtaggagaaagtttgtttttttacgtggtagaaagtttttgggttcgttacgattttttttttatttcggtcgttggggtatcggggtatatttttagtgcgggcgttcgtagtattatttcgtttggtcgtttttagttttgatttttttttagcgttggatcggtcgggttcggttttcgtgttcgcggggtcgttcgtcggcgttggttagttaagaaaaataaataacgttttaaatgaaggcgattttttttaatttaagtttcgtcgtttgttagagaaatgtaaatagcggggtacggtcggagttcgttttagttttcgcgtcggagttgcgggtggtagggtcgggtcgcggtaattcgagtcgtcgcgtcggtttttcgcgcgttgtttttcgtttgttttttcgtttttgatttcgtagtcggcgcgttgggtttgcgttcgttatttttagcgttttttatcgggtcgggattttcgttagcggttttcggcgttttttttgttttttttttttagcggtttcggttttatttcgaatcgttattttgggatttttagtttttttgcgttttcgaggttatcgggtttttgcgagtaacgtttttttgcggcgatcgcgcgttgggattatttaatat

SEQ ID NO: 21524 - DNA, 673 bp, Artificial Sequence
  chemically treated genomic DNA (Homo sapiens) CpG-island No: 21524
atattaaataatcccaacgcgcgatcgccgcaaaaaaacgttactcgcaaaaacccgataacctcgaaaacgcaaaaaaactaaaaatcccaaaataacgattcgaaataaaaccgaaaccgctaaaaaaaaaaaacaaaaaaaacgccgaaaaccgctaacgaaaatcccgacccgataaaaaacgctaaaaataacgaacgcaaacccaacgcgccgactacgaaatcaaaaacgaaaaaacaaacgaaaaacaacgcgcgaaaaaccgacgcgacgactcgaattaccgcgacccgaccctaccacccgcaactccgacgcgaaaactaaaacgaactccgaccgtaccccgctatttacatttctctaacaaacgacgaaacttaaattaaaaaaaatcgccttcatttaaaacgttatttatttttcttaactaaccaacgccgacgaacgaccccgcgaacacgaaaaccgaacccgaccgatccaacgctaaaaaaaaatcaaaactaaaaacgaccaaacgaaataatactacgaacgcccgcactaaaaatataccccgataccccaacgaccgaaataaaaaaaaaatcgtaacgaacccaaaaactttctaccacgtaaaaaaacaaactttctcctaccaaaattatcataccttaacttt

SEQ ID NO: 21525 - DNA, 1264 bp, Artificial Sequence
  chemically treated genomic DNA (Homo sapiens) CpG-island No: 21525
acggtcgcggatggtcggtaggatttgatatttaaaatcgttttgtttatttgggtttcggagtttttgataggcgggcgtgttagcgatagtgtggggaaggggttgggtttcgttaggtagcgcgcgacgacgtttttgttttggtttttatagagtagaattcgagaagtttattcgttcgttttggttaacgtttttaacgtttagggtttttttcgtagtcggcgggtaggtgtgcgtggtgcgcgagtttagtgcgtgtcgggtgcggcgttagtagcggaggggcggttcggcgtttagcggagagtcgttggttgggtgggtgtcggttttttcgtttttttttttttttcgttcgtttgtcggggatgtttgcgcgaggcgttttttcgtttttaagttttcggtttcggggggcggtgtgtgtgagtagttgggagggggtcgcgaggcgtttcgtcgagggttcgttcgggtttgttcgtcgtcgttatttgattcgtcggaggagttatagttgaggtgggggcggggatggggacgtagttcggagcgttagagagacgcggcggcgttggtagaagaggcggcggcgggcgggtattggtttttggggttaggggttaggggcggtgggcgtcgggatcgcggagttgaggagcggggttcggttagggttggagattttgcgttcgggggtatcggggttgcgcgcggtcgtatatatttatcggcgcggtttttttcggcggttcgggtttcgtttattttgcggcgggcggcgtcgtttaggggcggggtgagtattcgcggcggtattcggtttttttttcgcgttagggtttcgcggggattcgtagaggataattttagggtgcggagaagggtagcggtcgagtgatagtttcgcggagcgttttagggcgggcgggggattgggtttcgttgttagttcggtttttttttaaagttaggaagggtgaggcgttttaagatttcggcgttttcgtagagttttcgggcggtttttgcggtagggatttggaatcggggggaaggggttcgggcgatgggtttcggcgaggttttggagtcggcggcgaggaaggaaggggaggcgagggtataatatggcgtaacgttaggataatttttttcgcgattgagggaggacgagttttttgttgtagtagcgcgaggaggaggagggaggtagttagggtttgggtattcgatgtatttttcgaagtttgcgggt

SEQ ID NO: 21526 - DNA, 1264 bp, Artificial Sequence
  chemically treated genomic DNA (Homo sapiens) CpG-island No: 21526
acccgcaaacttcgaaaaatacatcgaatacccaaaccctaactacctccctcctcctcctcgcgctactacaacaaaaaactcgtcctccctcaatcgcgaaaaaaattatcctaacgttacgccatattataccctcgcctccccttccttcctcgccgccgactccaaaacctcgccgaaacccatcgcccgaaccccttccccccgattccaaatccctaccgcaaaaaccgcccgaaaactctacgaaaacgccgaaatcttaaaacgcctcacccttcctaactttaaaaaaaaaccgaactaacaacgaaacccaatcccccgcccgccctaaaacgctccgcgaaactatcactcgaccgctacccttctccgcaccctaaaattatcctctacgaatccccgcgaaaccctaacgcgaaaaaaaaaccgaataccgccgcgaatactcaccccgcccctaaacgacgccgcccgccgcaaaataaacgaaacccgaaccgccgaaaaaaaccgcgccgataaatatatacgaccgcgcgcaaccccgatacccccgaacgcaaaatctccaaccctaaccgaaccccgctcctcaactccgcgatcccgacgcccaccgcccctaacccctaaccccaaaaaccaatacccgcccgccgccgcctcttctaccaacgccgccgcgtctctctaacgctccgaactacgtccccatccccgcccccacctcaactataactcctccgacgaatcaaataacgacgacgaacaaacccgaacgaaccctcgacgaaacgcctcgcgaccccctcccaactactcacacacaccgccccccgaaaccgaaaacttaaaaacgaaaaaacgcctcgcgcaaacatccccgacaaacgaacgaaaaaaaaaaaaaaacgaaaaaaccgacacccacccaaccaacgactctccgctaaacgccgaaccgcccctccgctactaacgccgcacccgacacgcactaaactcgcgcaccacgcacacctacccgccgactacgaaaaaaaccctaaacgttaaaaacgttaaccaaaacgaacgaataaacttctcgaattctactctataaaaaccaaaacaaaaacgtcgtcgcgcgctacctaacgaaacccaaccccttccccacactatcgctaacacgcccgcctatcaaaaactccgaaacccaaataaacaaaacgattttaaatatcaaatcctaccgaccatccgcgaccgt

SEQ ID NO: 21527 - DNA, 1264 bp, Artificial Sequence
  chemically treated genomic DNA (Homo sapiens) CpG-island No: 21527
gttcgtaggtttcggggaatgtatcggatatttaagttttggttgttttttttttttttttcgcgttgttgtagtaaagggttcgtttttttttagtcgcgaaggagattattttagcgttgcgttatgttatgttttcgttttttttttttttttcgtcgtcggttttaaagtttcgtcgaggtttatcgttcgggtttttttttttcggttttaaatttttgtcgtaggggtcgttcgggagttttgcggaggcgtcggagttttggggcgttttattttttttggttttggagaggagtcgggttgatagcgaagtttagtttttcgttcgttttggagcgtttcgcggagttgttattcggtcgttgttttttttcgtattttgggattattttttgcggattttcgcgagattttggcgcggggagggggtcgagtatcgtcgcgggtatttatttcgtttttgagcggcgtcgttcgtcgtaggatgagcggagttcgggtcgtcgagggaagtcgcgtcggtggatgtgtgcgatcgcgcgtagtttcggtgttttcgggcgtaaagtttttagttttggtcgggtttcgttttttagtttcgcggtttcggcgtttatcgtttttggtttttggttttagaagttagtattcgttcgtcgtcgttttttttgttagcgtcgtcgcgtttttttagcgtttcgagttgcgtttttattttcgtttttattttagttgtggttttttcgacgagttaggtgacggcggcggataaattcggacgagttttcggcggagcgtttcgcggtttttttttagttatttatatatatcgtttttcggggtcgggagtttaaaggcgagggggcgtttcgcgtaagtattttcggtaagcgggcggggagaagaaggaggcggggaggtcgatatttatttagttagcggtttttcgttgggcgtcgggtcgttttttcgttgttggcgtcgtattcggtacgtattgggttcgcgtattacgtatatttgttcgtcgattgcggggggagttttgggcgttgggggcgttggttaagacgggcgagtgggtttttcgggttttattttgtgaaggttaaggtaagggcgtcgtcgcgcgttgtttggcggagtttagttttttttttatattgtcgttgatacgttcgtttgttaaaggtttcgaggtttagatgagtagggcgattttaaatgttagattttgtcggttattcgcgatcgt

SEQ ID NO: 21528 - DNA, 1264 bp, Artificial Sequence
  chemically treated genomic DNA (Homo sapiens) CpG-island No: 21528
acgatcgcgaataaccgacaaaatctaacatttaaaatcgccctactcatctaaacctcgaaacctttaacaaacgaacgtatcaacgacaatataaaaaaaaaactaaactccgccaaacaacgcgcgacgacgcccttaccttaaccttcacaaaataaaacccgaaaaacccactcgcccgtcttaaccaacgcccccaacgcccaaaactccccccgcaatcgacgaacaaatatacgtaatacgcgaacccaatacgtaccgaatacgacgccaacaacgaaaaaacgacccgacgcccaacgaaaaaccgctaactaaataaatatcgacctccccgcctccttcttctccccgcccgcttaccgaaaatacttacgcgaaacgccccctcgcctttaaactcccgaccccgaaaaacgatatatataaataactaaaaaaaaaccgcgaaacgctccgccgaaaactcgtccgaatttatccgccgccgtcacctaactcgtcgaaaaaaccacaactaaaataaaaacgaaaataaaaacgcaactcgaaacgctaaaaaaacgcgacgacgctaacaaaaaaaacgacgacgaacgaatactaacttctaaaaccaaaaaccaaaaacgataaacgccgaaaccgcgaaactaaaaaacgaaacccgaccaaaactaaaaactttacgcccgaaaacaccgaaactacgcgcgatcgcacacatccaccgacgcgacttccctcgacgacccgaactccgctcatcctacgacgaacgacgccgctcaaaaacgaaataaatacccgcgacgatactcgaccccctccccgcgccaaaatctcgcgaaaatccgcaaaaaataatcccaaaatacgaaaaaaaacaacgaccgaataacaactccgcgaaacgctccaaaacgaacgaaaaactaaacttcgctatcaacccgactcctctccaaaaccaaaaaaaataaaacgccccaaaactccgacgcctccgcaaaactcccgaacgacccctacgacaaaaatttaaaaccgaaaaaaaaaaacccgaacgataaacctcgacgaaactttaaaaccgacgacgaaaaaaaaaaaaaaaacgaaaacataacataacgcaacgctaaaataatctccttcgcgactaaaaaaaaacgaaccctttactacaacaacgcgaaaaaaaaaaaaaaaacaaccaaaacttaaatatccgatacattccccgaaacctacgaac

SEQ ID NO: 21529 - DNA, 848 bp, Artificial Sequence
  chemically treated genomic DNA (Homo sapiens) CpG-island No: 21529
  unsure (541)
gcgcgtcgagatcgttcgcgtatgcgcgttattgacgtttcgtcggcgcgcgttgtcgttagcgaggttcgggaagatcgcggcggaggcggaggttcggcgttttgggcggcgttttgttttcgaagttcgtttttttcgttaggtggcgagcgttcgaggggaggggatagtcgggtaagtaggaagttgcggtttaaaagggtaattcgcgcgggattttttttttttagtcgcggggagtttgagaaagcgcgtttgtttcgcgattattacgtatttttttttcgtttgtggttatgtatcgttatttgggcgaagcgttgttgttgtttcgggtcgggttcgttgttttgggttcggcgttcgtcgattcggtcgcgttgttgggttgggttcggggatagttcgtcgtcgtttcgtagtcggggttggtattggtcgttcggcgttattatagcgaggcggtggtcgatcgcgaggacgattttaatttttttaagatggtggagggttttttcgatcgcggcgttagtatcgnggaggataagttggtggaggatttgaggattcgggagagcgaggagtagaagcggaatcgggtgcgcggtattttgcggattattaagttttgtaattatgtgttgagtttttttttttttattcggcgcgacgacggtttttgggaggttatcgaaggttatcgggtttagtatagttagtatcgtacgttttgtaagggaggtgagcgtcggtcgggtttcgtttcgttttttttgttttttttgcggttttttttttcggtttattgtcggtgcggggtcgttgtttagtttagtttagtttag

SEQ ID NO: 21530 - DNA, 848 bp, Artificial Sequence
  chemically treated genomic DNA (Homo sapiens) CpG-island No: 21530
  unsure (308)
ctaaactaaactaaactaaacaacgaccccgcaccgacaataaaccgaaaaaaaaaaccgcaaaaaaaacaaaaaaaacgaaacgaaacccgaccgacgctcacctcccttacaaaacgtacgatactaactatactaaacccgataaccttcgataacctcccaaaaaccgtcgtcgcgccgaataaaaaaaaaaaaactcaacacataattacaaaacttaataatccgcaaaataccgcgcacccgattccgcttctactcctcgctctcccgaatcctcaaatcctccaccaacttatcctccncgatactaacgccgcgatcgaaaaaaccctccaccatcttaaaaaaattaaaatcgtcctcgcgatcgaccaccgcctcgctataataacgccgaacgaccaataccaaccccgactacgaaacgacgacgaactatccccgaacccaacccaacaacgcgaccgaatcgacgaacgccgaacccaaaacaacgaacccgacccgaaacaacaacaacgcttcgcccaaataacgatacataaccacaaacgaaaaaaaaatacgtaataatcgcgaaacaaacgcgctttctcaaactccccgcgactaaaaaaaaaaaatcccgcgcgaattacccttttaaaccgcaacttcctacttacccgactatcccctcccctcgaacgctcgccacctaacgaaaaaaacgaacttcgaaaacaaaacgccgcccaaaacgccgaacctccgcctccgccgcgatcttcccgaacctcgctaacgacaacgcgcgccgacgaaacgtcaataacgcgcatacgcgaacgatctcgacgcgc

SEQ ID NO: 21531 - DNA, 848 bp, Artificial Sequence
  chemically treated genomic DNA (Homo sapiens) CpG-island No: 21531
  unsure (308)
ttgggttgggttgggttgagtagcggtttcgtatcggtagtaggtcggaggggagggtcgtaggggaggtagggagggcgggacggggttcggtcgacgtttattttttttgtagggcgtgcggtgttggttgtgttgggttcggtagttttcgatgattttttaggagtcgtcgtcgcgtcggatggggaaggagagatttagtatatggttgtagggtttgatgattcgtaggatgtcgcgtattcggtttcgtttttgtttttcgttttttcgggtttttaggttttttattagtttgttttttncgatgttggcgtcgcgatcgaagaagttttttattattttgaagaagttggggtcgttttcgcggtcggttatcgtttcgttgtagtggcgtcgggcggttaatgttagtttcggttgcggggcggcggcgggttgttttcgggtttagtttagtaacgcggtcgagtcggcggacgtcgagtttagggtagcgggttcggttcgggatagtaatagcgtttcgtttaggtagcggtatatggttataagcggaggggaggtgcgtgatggtcgcgaaataggcgcgtttttttagatttttcgcgattagggaggaagggtttcgcgcgggttgtttttttaagtcgtagttttttgtttgttcggttgtttttttttttcgggcgttcgttatttaacggggaggacggatttcggggatagggcgtcgtttagggcgtcgggttttcgttttcgtcgcggttttttcgggtttcgttggcggtagcgcgcgtcggcggggcgttagtggcgcgtatgcgcgggcggtttcggcgcgt

SEQ ID NO: 21532 - DNA, 848 bp, Artificial Sequence
  chemically treated genomic DNA (Homo sapiens) CpG-island No: 21532
  unsure (541)
acgcgccgaaaccgcccgcgcatacgcgccactaacgccccgccgacgcgcgctaccgccaacgaaacccgaaaaaaccgcgacgaaaacgaaaacccgacgccctaaacgacgccctatccccgaaatccgtcctccccgttaaataacgaacgcccgaaaaaaaaaaacaaccgaacaaacaaaaaactacgacttaaaaaaacaacccgcgcgaaacccttcctccctaatcgcgaaaaatctaaaaaaacgcgcctatttcgcgaccatcacgcacctcccctccgcttataaccatataccgctacctaaacgaaacgctattactatcccgaaccgaacccgctaccctaaactcgacgtccgccgactcgaccgcgttactaaactaaacccgaaaacaacccgccgccgccccgcaaccgaaactaacattaaccgcccgacgccactacaacgaaacgataaccgaccgcgaaaacgaccccaacttcttcaaaataataaaaaacttcttcgatcgcgacgccaacatcgnaaaaaacaaactaataaaaaacctaaaaacccgaaaaaacgaaaaacaaaaacgaaaccgaatacgcgacatcctacgaatcatcaaaccctacaaccatatactaaatctctccttccccatccgacgcgacgacgactcctaaaaaatcatcgaaaactaccgaacccaacacaaccaacaccgcacgccctacaaaaaaaataaacgtcgaccgaaccccgtcccgccctccctacctcccctacgaccctcccctccgacctactaccgatacgaaaccgctactcaacccaacccaacccaa

SEQ ID NO: 21533 - DNA, 709 bp, Artificial Sequence
  chemically treated genomic DNA (Homo sapiens) CpG-island No: 21533
cgaggcgttgagggtatcgttatagaaggtcgtttttatttttgtagttatagaatagttcgttattttacgtgaggttagtttgggttgcgcgtataagtttcggggtcgtaatagggttgtggtaagcgggggatattcgcgtttttcggagtttttgatagggaaagtttttttaagagcgtacgtattcgttggttgtcgttttcgttgcgttttttttattagttcgttttagggagcgtagggttaattaagatgtttttcgtatttttatttgtcgattcgcgcgcgttattcggttttgaaaagtcgcggttatttattgagcgtttttcgtgcgtagcggtttttcggagttcgtaggcgaatttattttttagagtagcggtttttttcgcggagcggattagtgcggattttgtagtggtcggtcggcggcgggttttggtcgttcggatttcgacgatttgttttttttttcgttgttagggggagggggcgttcggtagtcgcggttcgcgttcgtttaagtttaataatcggtgcgagcgaagttgagcgtacgtttttttttttttgcgtggtttttcgtcgttttttggtttttatcgtcgtggagaagtttaagacgtaggaaaggtttgtaaaagttggtttcgggattttgttatttgttttcggtttttttagtcgggaaagttttttg

SEQ ID NO: 21534 - DNA, 709 bp, Artificial Sequence
  chemically treated genomic DNA (Homo sapiens) CpG-island No: 21534
caaaaaactttcccgactaaaaaaaccgaaaacaaataacaaaatcccgaaaccaacttttacaaacctttcctacgtcttaaacttctccacgacgataaaaaccaaaaaacgacgaaaaaccacgcaaaaaaaaaaaaacgtacgctcaacttcgctcgcaccgattattaaacttaaacgaacgcgaaccgcgactaccgaacgccccctccccctaacaacgaaaaaaaaaacaaatcgtcgaaatccgaacgaccaaaacccgccgccgaccgaccactacaaaatccgcactaatccgctccgcgaaaaaaaccgctactctaaaaaataaattcgcctacgaactccgaaaaaccgctacgcacgaaaaacgctcaataaataaccgcgacttttcaaaaccgaataacgcgcgcgaatcgacaaataaaaatacgaaaaacatcttaattaaccctacgctccctaaaacgaactaataaaaaaaacgcaacgaaaacgacaaccaacgaatacgtacgctcttaaaaaaactttccctatcaaaaactccgaaaaacgcgaatatcccccgcttaccacaaccctattacgaccccgaaacttatacgcgcaacccaaactaacctcacgtaaaataacgaactattctataactacaaaaataaaaacgaccttctataacgataccctcaacgcctcg

SEQ ID NO: 21535 - DNA, 709 bp, Artificial Sequence
  chemically treated genomic DNA (Homo sapiens) CpG-island No: 21535
taaagaattttttcggttgggaggatcggagataagtggtagagtttcggagttaatttttgtaagttttttttgcgttttaggtttttttacggcggtaaagattagaaggcggcggagagttacgtaagagaagaaggacgtgcgtttagtttcgttcgtatcggttgttgaatttgggcgagcgcgagtcgcggttgtcgggcgttttttttttttagtagcggaggaggggataagtcgtcggagttcgggcggttaagattcgtcgtcggtcggttattgtagggttcgtattgattcgtttcgcggggagagtcgttgttttgggaagtgagttcgtttgcggatttcgaggaatcgttgcgtacgaagagcgtttagtgagtgatcgcgattttttaaagtcgggtagcgcgcgcgagtcgataagtaagagtgcgggaggtattttaattaattttgcgttttttggagcgagttggtgaggagggcgtagcggggacgatagttagcgggtgcgtgcgtttttagagaaattttttttgttaaaggtttcggggggcgcgggtgtttttcgtttgttatagttttgttgcggtttcgaaatttgtgcgcgtagtttaaattaattttacgtgaagtgacggattgttttatgattgtaaagatggaaacgattttttatgacgatgtttttaacgtttcg

SEQ ID NO: 21536 - DNA, 709 bp, Artificial Sequence
  chemically treated genomic DNA (Homo sapiens) CpG-island No: 21536
cgaaacgttaaaaacatcgtcataaaaaatcgtttccatctttacaatcataaaacaatccgtcacttcacgtaaaattaatttaaactacgcgcacaaatttcgaaaccgcaacaaaactataacaaacgaaaaacacccgcgccccccgaaacctttaacaaaaaaaatttctctaaaaacgcacgcacccgctaactatcgtccccgctacgccctcctcaccaactcgctccaaaaaacgcaaaattaattaaaatacctcccgcactcttacttatcgactcgcgcgcgctacccgactttaaaaaatcgcgatcactcactaaacgctcttcgtacgcaacgattcctcgaaatccgcaaacgaactcacttcccaaaacaacgactctccccgcgaaacgaatcaatacgaaccctacaataaccgaccgacgacgaatcttaaccgcccgaactccgacgacttatcccctcctccgctactaaaaaaaaaaaacgcccgacaaccgcgactcgcgctcgcccaaattcaacaaccgatacgaacgaaactaaacgcacgtccttcttctcttacgtaactctccgccgccttctaatctttaccgccgtaaaaaaacctaaaacgcaaaaaaaacttacaaaaattaactccgaaactctaccacttatctccgatcctcccaaccgaaaaaattcttta

SEQ ID NO: 21537 - DNA, 542 bp, Artificial Sequence
  chemically treated genomic DNA (Homo sapiens) CpG-island No: 21537
tttcgaagtttgtatttcggttaagtttaggagcgacggttcgcggggtcgtttggttgttcgtagaagtcgagagatttgtattgttcgaaattggacgtttagttgagttttcgttgtattttattttatttttcgggatcgtgggggaaagggcgcgggggtttatagttttgtttcggaggggtagtttttatagtgggcgtaattggtgggtaatagggtttagatgggaataagcgtgtaggcgattcgaaattcggggaatttcggtgttagtttattttttttttcgttttcggataatacgtatacgtttaatataatacgtataatataacgcgcgcgcgcgcgtatatatatattttattcgcgtcgagttgttttcgggaaaataagtttagaaggcggcggatattcgtataaagttacgtagtagtattcggagttcggggtagaatttggattttaaatttttgtattttcggtcgggtggtgggcgtatattttgggtagtttttaggaagcgttagatatatgta

SEQ ID NO: 21538 - DNA, 542 bp, Artificial Sequence
  chemically treated genomic DNA (Homo sapiens) CpG-island No: 21538
tacatatatctaacgcttcctaaaaactacccaaaatatacgcccaccacccgaccgaaaatacaaaaatttaaaatccaaattctaccccgaactccgaatactactacgtaactttatacgaatatccgccgccttctaaacttattttcccgaaaacaactcgacgcgaataaaatatatatatacgcgcgcgcgcgcgttatattatacgtattatattaaacgtatacgtattatccgaaaacgaaaaaaaaaataaactaacaccgaaattccccgaatttcgaatcgcctacacgcttattcccatctaaaccctattacccaccaattacgcccactataaaaactacccctccgaaacaaaactataaacccccgcgccctttcccccacgatcccgaaaaataaaataaaatacaacgaaaactcaactaaacgtccaatttcgaacaatacaaatctctcgacttctacgaacaaccaaacgaccccgcgaaccgtcgctcctaaacttaaccgaaatacaaacttcgaaa

SEQ ID NO: 21539 - DNA, 542 bp, Artificial Sequence
  chemically treated genomic DNA (Homo sapiens) CpG-island No: 21539
tatatgtgtttagcgttttttagaggttatttaggatatgcgtttattattcggtcgggagtgtagagatttgaagtttaggttttatttcgggtttcgagtattattgcgtgattttatgcgagtgttcgtcgttttttgggtttgttttttcggaagtaattcggcgcggatggagtgtgtgtgtgcgcgcgcgcgcgcgttatgttgtgcgtgttgtgttaagcgtgtgcgtgttgttcgggggcgggagggggagtagattaatatcggggtttttcgagtttcggatcgtttatacgtttgtttttatttggattttgttatttattaattgcgtttattataaaaattgttttttcgaggtaaagttgtgaattttcgcgtttttttttttacggtttcggaggatgaagtggggtgtaacggagatttagttgagcgtttagtttcgggtaatataaatttttcggtttttacgagtagttagacgatttcgcggatcgtcgtttttgaatttgatcgagatgtaaatttcggag

SEQ ID NO: 21540 - DNA, 542 bp, Artificial Sequence
  chemically treated genomic DNA (Homo sapiens) CpG-island No: 21540
ctccgaaatttacatctcgatcaaattcaaaaacgacgatccgcgaaatcgtctaactactcgtaaaaaccgaaaaatttatattacccgaaactaaacgctcaactaaatctccgttacaccccacttcatcctccgaaaccgtaaaaaaaaaaacgcgaaaattcacaactttacctcgaaaaaacaatttttataataaacgcaattaataaataacaaaatccaaataaaaacaaacgtataaacgatccgaaactcgaaaaaccccgatattaatctactccccctcccgcccccgaacaacacgcacacgcttaacacaacacgcacaacataacgcgcgcgcgcgcgcacacacacactccatccgcgccgaattacttccgaaaaaacaaacccaaaaaacgacgaacactcgcataaaatcacgcaataatactcgaaacccgaaataaaacctaaacttcaaatctctacactcccgaccgaataataaacgcatatcctaaataacctctaaaaaacgctaaacacatata

SEQ ID NO: 21541 - DNA, 821 bp, Artificial Sequence
  chemically treated genomic DNA (Homo sapiens) CpG-island No: 21541
tcggcgcgtttgtatttttcggtttgttagtgtatttgtcggcgtttcggtcgatcgttttcgttttttttttcgttgcgttcgtatttttgtttttggttttgacgtttttttttcgttcggaaagttgtttagttattagtaattttttaggtaattcgggtttttcgtagtgttcggtcggttgatattttttcgcgtcgggttttttagaggggcgtgtgtggggacggtggagattgggtcgtaggcgggcggcgtttcggggttaggtttcgttaggtcgtggttagttcgtgggtcggcggtgagcgtcgcggcgtcggtttgataggatttttgggcgggggcggaggtgttttttgcgcggtttcggtttgagttttttgttttttttaatcggcggggcgtttcgaggcgtgtagggaagggtgtgtttcggtttcgtttttttcgttttttcggcgcggttgggtaggatcgtatttttcgcgggtttttttttcgtcgttgtttttcgcggtcgtagttcgttttcgtagggtgtatttacgcgtgtcgcgtcgttttgtagttcgtaagttttagacgtggcggtttcgtttcgtaggtcgcgtttggttttgagtataaaggtagtttttcgtagtttttttggcgtttcggggtagtttcggtgtttttgtcgatgtggggagttcggttttgtagtcgggtcgggtcggggtcggggtttgggtttgtgcgtttgtgtttgcgatgttttggttttggtgcgtttttgtgaggttcgtggatagtttttacggttttgaatttat

SEQ ID NO: 21542 - DNA, 821 bp, Artificial Sequence
  chemically treated genomic DNA (Homo sapiens) CpG-island No: 21542
ataaattcaaaaccgtaaaaactatccacgaacctcacaaaaacgcaccaaaaccaaaacatcgcaaacacaaacgcacaaacccaaaccccgaccccgacccgacccgactacaaaaccgaactccccacatcgacaaaaacaccgaaactaccccgaaacgccaaaaaaactacgaaaaactacctttatactcaaaaccaaacgcgacctacgaaacgaaaccgccacgtctaaaacttacgaactacaaaacgacgcgacacgcgtaaatacaccctacgaaaacgaactacgaccgcgaaaaacaacgacgaaaaaaaaacccgcgaaaaatacgatcctacccaaccgcgccgaaaaaacgaaaaaaacgaaaccgaaacacacccttccctacacgcctcgaaacgccccgccgattaaaaaaaacaaaaaactcaaaccgaaaccgcgcaaaaaacacctccgcccccgcccaaaaatcctatcaaaccgacgccgcgacgctcaccgccgacccacgaactaaccacgacctaacgaaacctaaccccgaaacgccgcccgcctacgacccaatctccaccgtccccacacacgcccctctaaaaaacccgacgcgaaaaaatatcaaccgaccgaacactacgaaaaacccgaattacctaaaaaattactaataactaaacaactttccgaacgaaaaaaaaacgtcaaaaccaaaaacaaaaatacgaacgcaacgaaaaaaaaaacgaaaacgatcgaccgaaacgccgacaaatacactaacaaaccgaaaaatacaaacgcgccga

SEQ ID NO: 21543 - DNA, 821 bp, Artificial Sequence
  chemically treated genomic DNA (Homo sapiens) CpG-island No: 21543
gtaggtttagggtcgtagaggttgtttacgggttttataggaacgtattaaaattaggatatcgtaagtataggcgtatagatttagatttcggtttcggttcggttcggttgtagggtcgggttttttatatcgataaggatatcggagttgtttcgagacgttaagagggttgcgaagagttgtttttgtatttagagttagacgcggtttacgggacgggatcgttacgtttggggtttgcgggttgtagggcggcgcggtacgcgtgggtatattttgcgggggcgggttgcggtcgcggggaatagcggcgagaggggggttcgcgggagatgcggttttgtttagtcgcgtcgagaaggcggggaaggcgaggtcggaatatatttttttttgtacgtttcggagcgtttcgtcggttggggagggtaggaggtttaggtcggagtcgcgtaggggatattttcgttttcgtttaggagttttgttaggtcggcgtcgcggcgtttatcgtcgatttacgggttagttacggtttgacggggtttggtttcggggcgtcgttcgtttgcggtttagtttttatcgtttttatatacgtttttttgaagaattcggcgcgaggaggtattagtcggtcggatattacggaaggttcgggttatttggggggttgttggtggttgggtagtttttcgggcgggaggggggcgttaggattaggaataggagtgcggacgtagcgggagagggggcgggggcggtcgatcgaggcgtcggtaggtatattggtaggtcgagaggtgtagacgcgtcgg

SEQ ID NO: 21544 - DNA, 821 bp, Artificial Sequence
  chemically treated genomic DNA (Homo sapiens) CpG-island No: 21544
ccgacgcgtctacacctctcgacctaccaatatacctaccgacgcctcgatcgaccgcccccgccccctctcccgctacgtccgcactcctattcctaatcctaacgcccccctcccgcccgaaaaactacccaaccaccaacaaccccccaaataacccgaaccttccgtaatatccgaccgactaatacctcctcgcgccgaattcttcaaaaaaacgtatataaaaacgataaaaactaaaccgcaaacgaacgacgccccgaaaccaaaccccgtcaaaccgtaactaacccgtaaatcgacgataaacgccgcgacgccgacctaacaaaactcctaaacgaaaacgaaaatatcccctacgcgactccgacctaaacctcctaccctccccaaccgacgaaacgctccgaaacgtacaaaaaaaaatatattccgacctcgccttccccgccttctcgacgcgactaaacaaaaccgcatctcccgcgaacccccctctcgccgctattccccgcgaccgcaacccgcccccgcaaaatatacccacgcgtaccgcgccgccctacaacccgcaaaccccaaacgtaacgatcccgtcccgtaaaccgcgtctaactctaaatacaaaaacaactcttcgcaaccctcttaacgtctcgaaacaactccgatatccttatcgatataaaaaacccgaccctacaaccgaaccgaaccgaaaccgaaatctaaatctatacgcctatacttacgatatcctaattttaatacgttcctataaaacccgtaaacaacctctacgaccctaaacctac

SEQ ID NO: 21545 - DNA, 910 bp, Artificial Sequence
  chemically treated genomic DNA (Homo sapiens) CpG-island No: 21545
tcgtttttatttttttttatttaaattttttttttttatttatcgttttacgttcgtttcgggtttttttttttttttcgtttaattttaatttttagatacgcgttttcgtttcgaatttattttaagtcggtttatattacgttcggttcgggttttttcgtttttgtcgtcggtttttattgttcgggtcggatgtcggggaacgggttcggttaggtttgacgtttatcgtttagaagtcgagtcgagtagtttcgtaggttgaggtagagcgggagaagttcgggttttttttttaggggtttagcggcgcggtagttattttgttgtgttgtgtcggttgtcgaggggtcgcgcgcgcgtggtcggggttagttttagttacgttttttttttttttcggtattgttggaagggacgcggaggcgtttttcgttttttttgtagttagcgcgttaggatgtcggggagttttgggcgcgaggttttcggtcgcgcggggtcgacgggatgcggtgttttcgttttcggattgcgttgtaggtgaagtgtcgggtgtagagttagggggagtcgaggttttatgcggtagttgttcgtagtgttgtggttttcgttgagataaagttgtcgtcgttattttttgaaatacggatacgttttttagggtttgtgttcgaggacggtttgaggtatcggcgtagcgttttttcggttttttttatttttgatgtttgcgcgttatgagcgagtgtttttattagtatatttttttttgatagtcgtatttaaagcgaattttttttagggatcgaattgtttaggttcggatgaattttaaagcggacgtagtttgggttttagttgtcgcgtgaggtttagggagtttgggaattttaggtagagg

SEQ ID NO: 21546 - DNA, 910 bp, Artificial Sequence
  chemically treated genomic DNA (Homo sapiens) CpG-island No: 21546
cctctacctaaaattcccaaactccctaaacctcacgcgacaactaaaacccaaactacgtccgctttaaaattcatccgaacctaaacaattcgatccctaaaaaaaattcgctttaaatacgactatcaaaaaaaaatatactaataaaaacactcgctcataacgcgcaaacatcaaaaataaaaaaaaccgaaaaaacgctacgccgatacctcaaaccgtcctcgaacacaaaccctaaaaaacgtatccgtatttcaaaaaataacgacgacaactttatctcaacgaaaaccacaacactacgaacaactaccgcataaaacctcgactccccctaactctacacccgacacttcacctacaacgcaatccgaaaacgaaaacaccgcatcccgtcgaccccgcgcgaccgaaaacctcgcgcccaaaactccccgacatcctaacgcgctaactacaaaaaaaacgaaaaacgcctccgcgtcccttccaacaataccgaaaaaaaaaaaaaacgtaactaaaactaaccccgaccacgcgcgcgcgacccctcgacaaccgacacaacacaacaaaataactaccgcgccgctaaacccctaaaaaaaaaacccgaacttctcccgctctacctcaacctacgaaactactcgactcgacttctaaacgataaacgtcaaacctaaccgaacccgttccccgacatccgacccgaacaataaaaaccgacgacaaaaacgaaaaaacccgaaccgaacgtaatataaaccgacttaaaataaattcgaaacgaaaacgcgtatctaaaaattaaaattaaacgaaaaaaaaaaaaaaacccgaaacgaacgtaaaacgataaataaaaaaaaaaaatttaaataaaaaaaaataaaaacga

SEQ ID NO: 21547 - DNA, 910 bp, Artificial Sequence
  chemically treated genomic DNA (Homo sapiens) CpG-island No: 21547
tttttgtttaggatttttaagttttttgaattttacgcgatagttggagtttaggttgcgttcgttttgaggtttattcgagtttgggtagttcggtttttggagggaattcgttttagatacgattgttagagagaagtgtgttgataagaatattcgtttatagcgcgtaagtattagaagtgggggaggtcggggaggcgttgcgtcggtgttttaggtcgttttcggatataggttttgagaagcgtgttcgtgttttagagggtggcggcggtagttttgttttagcgaaggttatagtattgcgggtagttgtcgtatgaaatttcggttttttttgattttgtattcgatattttatttgtaacgtaattcgaaggcgaaggtatcgtatttcgtcggtttcgcgcggtcggaagtttcgcgtttaagatttttcggtattttagcgcgttggttgtaaaagaggcgggaaacgttttcgcgttttttttaatagtatcggagagggagaggggcgtggttgagattagtttcgattacgcgcgcgcggtttttcggtaatcggtataatataataaaatggttgtcgcgtcgttgggtttttgaggaaagagttcgaatttttttcgttttattttagtttgcgggattgttcggttcggtttttaggcggtgagcgttagatttggtcgagttcgtttttcggtattcggttcgagtagtgggggtcggcggtaaaggcgggaaggttcggatcgggcgtggtgtgggtcggtttgggatggattcggggcgggggcgcgtgtttgggaattgggattggacgggaaagaggggagggttcggaacgggcgtggggcggtggatgaaggagggaggtttggatgggaagaggtggggacgg

SEQ ID NO: 21548 - DNA, 910 bp, Artificial Sequence
  chemically treated genomic DNA (Homo sapiens) CpG-island No: 21548
ccgtccccacctcttcccatccaaacctccctccttcatccaccgccccacgcccgttccgaaccctcccctctttcccgtccaatcccaattcccaaacacgcgcccccgccccgaatccatcccaaaccgacccacaccacgcccgatccgaaccttcccgcctttaccgccgacccccactactcgaaccgaataccgaaaaacgaactcgaccaaatctaacgctcaccgcctaaaaaccgaaccgaacaatcccgcaaactaaaataaaacgaaaaaaattcgaactctttcctcaaaaacccaacgacgcgacaaccattttattatattataccgattaccgaaaaaccgcgcgcgcgtaatcgaaactaatctcaaccacgcccctctccctctccgatactattaaaaaaaacgcgaaaacgtttcccgcctcttttacaaccaacgcgctaaaataccgaaaaatcttaaacgcgaaacttccgaccgcgcgaaaccgacgaaatacgataccttcgccttcgaattacgttacaaataaaatatcgaatacaaaatcaaaaaaaaccgaaatttcatacgacaactacccgcaatactataaccttcgctaaaacaaaactaccgccgccaccctctaaaacacgaacacgcttctcaaaacctatatccgaaaacgacctaaaacaccgacgcaacgcctccccgacctcccccacttctaatacttacgcgctataaacgaatattcttatcaacacacttctctctaacaatcgtatctaaaacgaattccctccaaaaaccgaactacccaaactcgaataaacctcaaaacgaacgcaacctaaactccaactatcgcgtaaaattcaaaaaacttaaaaatcctaaacaaaaa

SEQ ID NO: 21549 - DNA, 642 bp, Artificial Sequence
  chemically treated genomic DNA (Homo sapiens) CpG-island No: 21549
cgtcggtttttttcgttagttatatattcggcgtcgaggtcggaagtttttttttcggtttttaagatcgcgtttcggaaatgagtcgttttattagtatttaagatggtcgtcggtttatttatcgtcgcgatcggtgtgaggaaagtgttacgaattcggaattgttcgatttcgttatggtaggcgtcgggggcgtggttttcggcggttatagtttgttagtcgtcgcggcggggtcgagcgggggcggtagttgataggcgtttttttttcgatcgtagcggttggtttttagcgaggcgggcggtttttagttcgcgttttcgagttttagttcgcgaggcgttagggttgcgtttgggtatggaagaggggaagatggacgagaatgaatgggggtattacggagagggtaataagagtttggtggtggtttacgcgtaggtgagcggtggacgtgcggcgtaggttcggtattttatttcgacggtcggtattatttcgtttttattattcgtttttttaatagggtcggttttacgtttttttagtatttttttttttttcggtcggttttcggaatttttttattttttagtatttttttttatcgtttgggttttttattattttagtatt

SEQ ID NO: 21550 - DNA, 642 bp, Artificial Sequence
  chemically treated genomic DNA (Homo sapiens) CpG-island No: 21550
aatactaaaataataaaaaacccaaacgataaaaaaaaatactaaaaaataaaaaaattccgaaaaccgaccgaaaaaaaaaaaaatactaaaaaaacgtaaaaccgaccctattaaaaaaacgaataataaaaacgaaataataccgaccgtcgaaataaaataccgaacctacgccgcacgtccaccgctcacctacgcgtaaaccaccaccaaactcttattaccctctccgtaatacccccattcattctcgtccatcttcccctcttccatacccaaacgcaaccctaacgcctcgcgaactaaaactcgaaaacgcgaactaaaaaccgcccgcctcgctaaaaaccaaccgctacgatcgaaaaaaaaacgcctatcaactaccgcccccgctcgaccccgccgcgacgactaacaaactataaccgccgaaaaccacgcccccgacgcctaccataacgaaatcgaacaattccgaattcgtaacactttcctcacaccgatcgcgacgataaataaaccgacgaccatcttaaatactaataaaacgactcatttccgaaacgcgatcttaaaaaccgaaaaaaaaacttccgacctcgacgccgaatatataactaacgaaaaaaaccgacg

SEQ ID NO: 21551 - DNA, 642 bp, Artificial Sequence
  chemically treated genomic DNA (Homo sapiens) CpG-island No: 21551
gatattggggtgatgaggaatttaagcggtagggggggatgttggagggtgggggaatttcggagatcggtcggggaggaggaaggtattggggggacgtggaatcgattttgttgaggaaacggataatgggggcggggtgatatcggtcgtcggagtgaggtatcggatttgcgtcgtacgtttatcgtttatttgcgcgtgggttattattaggtttttattgtttttttcgtggtatttttatttattttcgtttattttttttttttttatgtttaggcgtagttttggcgtttcgcgggttaggattcggggacgcgagttgggggtcgttcgtttcgttgggaattagtcgttgcggtcgggggaggagcgtttgttagttgtcgttttcgttcgatttcgtcgcggcgattagtaagttgtggtcgtcggaagttacgttttcggcgtttgttatgacggagtcgggtaatttcgggttcgtgatattttttttatatcgatcgcgacggtggatgggtcggcggttattttaggtattggtagagcgatttattttcggaacgcggttttgggagtcggaagagaagttttcggtttcggcgtcggatgtgtagttggcggaaggagtcggcg

SEQ ID NO: 21552 - DNA, 642 bp, Artificial Sequence
  chemically treated genomic DNA (Homo sapiens) CpG-island No: 21552
cgccgactccttccgccaactacacatccgacgccgaaaccgaaaacttctcttccgactcccaaaaccgcgttccgaaaataaatcgctctaccaatacctaaaataaccgccgacccatccaccgtcgcgatcgatataaaaaaaatatcacgaacccgaaattacccgactccgtcataacaaacgccgaaaacgtaacttccgacgaccacaacttactaatcgccgcgacgaaatcgaacgaaaacgacaactaacaaacgctcctcccccgaccgcaacgactaattcccaacgaaacgaacgacccccaactcgcgtccccgaatcctaacccgcgaaacgccaaaactacgcctaaacataaaaaaaaaaaaaataaacgaaaataaataaaaataccacgaaaaaaacaataaaaacctaataataacccacgcgcaaataaacgataaacgtacgacgcaaatccgatacctcactccgacgaccgatatcaccccgcccccattatccgtttcctcaacaaaatcgattccacgtccccccaataccttcctcctccccgaccgatctccgaaattcccccaccctccaacatccccccctaccgcttaaattcctcatcaccccaatatc

SEQ ID NO: 21553 - DNA, 817 bp, Artificial Sequence
  chemically treated genomic DNA (Homo sapiens) CpG-island No: 21553
cggacgttttgttttttgtaaagtatttaacgcgatgtttttgttttaagggtagtcgcgagaaaggtaggtataggaggcgggagtcggggtcgggcgatggggcggaaggagtttcgtatcgggaggggtcgtggagtggggtggaaggatttggtagtcgttaaagattgggtgggtaggttttacgggcggtgggagggatttcggggaggtttttgtcggttgttattcgagtataaacggtagttttttggtttttgttcggtcgttttcgtcgtattgtgaatttttatttttagcgcgcgacggcggtagattacgtgattagggttaatatggtcgtcgtcgtcgtttggagttgaagtgtcgtcgtcggcgggtagttacggggaattcgttcgtatcgtcgttttcgtcggtcgggcggtcgtggggtttagagcgtcggaggttagggttggggcggtatcgcgtagcggttacggggtttcgttagagtagcgttcggcgggttatgtcgagagttcggagcggtcggaggagtagaggggtcggcgggagggaggaagtaggtttgtttacgggttgtttggggcggagtagttttggtcgggggttcggtgttggggcggagattagaattataggtcgcgtttgacgttttttttttttatttggtatcggttcgcgatttttttttagatttttttgcgagtacgagttaatcggtagattcgattgaatggtgagttttgttcggttttttttttcgttttattttcggtttttttttttttttttttattgtttgtcg

SEQ ID NO: 21554 - DNA, 817 bp, Artificial Sequence
  chemically treated genomic DNA (Homo sapiens) CpG-island No: 21554
cgacaaacaataaaaaaaaaaaaaaaaaaaccgaaaataaaacgaaaaaaaaaaccgaacaaaactcaccattcaatcgaatctaccgattaactcgtactcgcaaaaaaatctaaaaaaaaatcgcgaaccgataccaaataaaaaaaaaaaacgtcaaacgcgacctataattctaatctccgccccaacaccgaacccccgaccaaaactactccgccccaaacaacccgtaaacaaacctacttcctccctcccgccgacccctctactcctccgaccgctccgaactctcgacataacccgccgaacgctactctaacgaaaccccgtaaccgctacgcgataccgccccaaccctaacctccgacgctctaaaccccacgaccgcccgaccgacgaaaacgacgatacgaacgaattccccgtaactacccgccgacgacgacacttcaactccaaacgacgacgacgaccatattaaccctaatcacgtaatctaccgccgtcgcgcgctaaaaataaaaattcacaatacgacgaaaacgaccgaacaaaaaccaaaaaactaccgtttatactcgaataacaaccgacaaaaacctccccgaaatccctcccaccgcccgtaaaacctacccacccaatctttaacgactaccaaatccttccaccccactccacgacccctcccgatacgaaactccttccgccccatcgcccgaccccgactcccgcctcctatacctacctttctcgcgactacccttaaaacaaaaacatcgcgttaaatactttacaaaaaacaaaacgtccg

SEQ ID NO: 21555 - DNA, 817 bp, Artificial Sequence
  chemically treated genomic DNA (Homo sapiens) CpG-island No: 21555
cggtaggtagtgagggagggagggaggaggtcgggggtggggcggagggaggggtcgggtaggatttattatttagtcgggtttgtcggttggttcgtattcgtagaaaggtttgggagaagatcgcgggtcgatgttagataagaaaagagagcgttaggcgcggtttgtagttttggttttcgttttagtatcggattttcgattaaagttgtttcgttttaaatagttcgtaaataaatttattttttttttttcgtcggtttttttgttttttcggtcgtttcgggttttcggtatagttcgtcgggcgttgttttaacgggatttcgtggtcgttgcgcggtgtcgttttagttttggttttcggcgttttgggttttacggtcgttcggtcggcgagggcggcgatgcgggcggatttttcgtggttgttcgtcggcggcggtattttagttttaagcggcggcggcggttatgttggttttaattacgtgatttgtcgtcgtcgcgcgttgggggtgaaagtttataatgcggcgggggcggtcggatagagattaggaagttgtcgtttgtattcgggtagtaatcggtagaagttttttcggggttttttttatcgttcgtgaagtttatttatttaatttttagcggttgttaagtttttttattttattttacgatttttttcggtgcggggtttttttcgttttatcgttcggtttcggttttcgttttttgtgtttgtttttttcgcggttgtttttagggtagaggtatcgcgttgggtgttttataggggataaggcgttcg

SEQ ID NO: 21556 - DNA, 817 bp, Artificial Sequence
  chemically treated genomic DNA (Homo sapiens) CpG-island No: 21556
cgaacgccttatcccctataaaacacccaacgcgatacctctaccctaaaaacaaccgcgaaaaaaacaaacacaaaaaacgaaaaccgaaaccgaacgataaaacgaaaaaaaccccgcaccgaaaaaaatcgtaaaataaaataaaaaaacttaacaaccgctaaaaattaaataaataaacttcacgaacgataaaaaaaaccccgaaaaaacttctaccgattactacccgaatacaaacgacaacttcctaatctctatccgaccgcccccgccgcattataaactttcacccccaacgcgcgacgacgacaaatcacgtaattaaaaccaacataaccgccgccgccgcttaaaactaaaataccgccgccgacgaacaaccacgaaaaatccgcccgcatcgccgccctcgccgaccgaacgaccgtaaaacccaaaacgccgaaaaccaaaactaaaacgacaccgcgcaacgaccacgaaatcccgttaaaacaacgcccgacgaactataccgaaaacccgaaacgaccgaaaaaacaaaaaaaccgacgaaaaaaaaaaaataaatttatttacgaactatttaaaacgaaacaactttaatcgaaaatccgatactaaaacgaaaaccaaaactacaaaccgcgcctaacgctctcttttcttatctaacatcgacccgcgatcttctcccaaacctttctacgaatacgaaccaaccgacaaacccgactaaataataaatcctacccgacccctccctccgccccacccccgacctcctccctccctccctcactacctaccg

SEQ ID NO: 21557 - DNA, 798 bp, Artificial Sequence
  chemically treated genomic DNA (Homo sapiens) CpG-island No: 21557
gcgcgtgtttggagtttttcggtatagtgaggcgcgcgtttgtttggttagggtttttgtgaaggaatgggatttcgaggtgtttgttaggatcgtagtaggcggaagttgttggtagcgcgaacgggcggttttcgtcggcgtgggtgggggaagggcggtagttatattcggaagtcggttcgggagggagggggaaatttgagggaacgaggttttcggtggcgtaaagggtgtcgggagcggttttttgtaaattttttttggtatttggagggattatcgttgtcgcgttttcggtttttacgatttgcgttcgggttacgcggttacggcggtagttattgcgatttttattgtgtttggttttgtttatattagtttttaggcggtcgtcgtcgttttagtagcggtagcggtagcggtagcggcggatatgttgtgaggcggcggcgcgggtgtttgaaggatggtttggtcgaggcggcggtaacggttgttggcggcggcggtagcggtagcggggtttcgggttttatagagtcgagttcgttgggtattcgttcggtatcgcggcgaggttagtgtttttggattttgtttttgtttcgacgtcgttggggattagttaggcgatagcgttcgtttttttgaggagatacgaaggtggttttttagtcgtttaaattttcggattatcgcgtttttttttttttagtttgggttgtgttttttttagaattttcgggtttttattttttttttaaatttattttaaattttttatatacgcgagtg

SEQ ID NO: 21558 - DNA, 798 bp, Artificial Sequence
  chemically treated genomic DNA (Homo sapiens) CpG-island No: 21558
cactcgcgtatataaaaaatttaaaataaatttaaaaaaaaaataaaaacccgaaaattctaaaaaaaacacaacccaaactaaaaaaaaaaaaacgcgataatccgaaaatttaaacgactaaaaaaccaccttcgtatctcctcaaaaaaacgaacgctatcgcctaactaatccccaacgacgtcgaaacaaaaacaaaatccaaaaacactaacctcgccgcgataccgaacgaatacccaacgaactcgactctataaaacccgaaaccccgctaccgctaccgccgccgccaacaaccgttaccgccgcctcgaccaaaccatccttcaaacacccgcgccgccgcctcacaacatatccgccgctaccgctaccgctaccgctactaaaacgacgacgaccgcctaaaaactaatataaacaaaaccaaacacaataaaaatcgcaataactaccgccgtaaccgcgtaacccgaacgcaaatcgtaaaaaccgaaaacgcgacaacgataatccctccaaataccaaaaaaaatttacaaaaaaccgctcccgacaccctttacgccaccgaaaacctcgttccctcaaatttccccctccctcccgaaccgacttccgaatataactaccgcccttcccccacccacgccgacgaaaaccgcccgttcgcgctaccaacaacttccgcctactacgatcctaacaaacacctcgaaatcccattccttcacaaaaaccctaaccaaacaaacgcgcgcctcactataccgaaaaactccaaacacgcgc

SEQ ID NO: 21559 - DNA, 798 bp, Artificial Sequence
  chemically treated genomic DNA (Homo sapiens) CpG-island No: 21559
tattcgcgtgtgtgagagatttaggatgagtttgggaagaaagtgggggttcgaggattttagagagagtatagtttaggttgaggaggggaaagcgcggtggttcggaaatttgagcggttggggaattattttcgtgtttttttagaggggcgggcgttgtcgtttaattggtttttaacggcgtcggagtagaggtaagatttaggggtattggtttcgtcgcggtatcgggcgggtatttagcgggttcggttttatagagttcgaggtttcgttgtcgttgtcgtcgtcgttagtagtcgttgtcgtcgtttcggttaaattattttttagatattcgcgtcgtcgttttataatatgttcgtcgttgtcgttgtcgttgtcgttgttggaacggcgacggtcgtttgggaattaatatggatagagttaggtatagtgggagtcgtagtggttgtcgtcgtggtcgcgtagttcgaacgtagatcgtggaagtcgaagacgcggtaacggtggtttttttagatgttagggaaggtttgtaggaagtcgttttcgatattttttgcgttatcggaagtttcgtttttttagatttttttttttttttcggatcgattttcgggtgtggttgtcgttttttttttatttacgtcggcgggagtcgttcgttcgcgttgttagtagttttcgtttgttacggttttggtaagtatttcgggattttatttttttatagggattttagttaggtaagcgcgcgttttattgtatcggagagttttaagtacgcgt

SEQ ID NO: 21560 - DNA, 798 bp, Artificial Sequence
  chemically treated genomic DNA (Homo sapiens) CpG-island No: 21560
acgcgtacttaaaactctccgatacaataaaacgcgcgcttacctaactaaaatccctataaaaaaataaaatcccgaaatacttaccaaaaccgtaacaaacgaaaactactaacaacgcgaacgaacgactcccgccgacgtaaataaaaaaaaaacgacaaccacacccgaaaatcgatccgaaaaaaaaaaaaaaatctaaaaaaacgaaacttccgataacgcaaaaaatatcgaaaacgacttcctacaaaccttccctaacatctaaaaaaaccaccgttaccgcgtcttcgacttccacgatctacgttcgaactacgcgaccacgacgacaaccactacgactcccactatacctaactctatccatattaattcccaaacgaccgtcgccgttccaacaacgacaacgacaacgacaacgacgaacatattataaaacgacgacgcgaatatctaaaaaataatttaaccgaaacgacgacaacgactactaacgacgacgacaacgacaacgaaacctcgaactctataaaaccgaacccgctaaatacccgcccgataccgcgacgaaaccaatacccctaaatcttacctctactccgacgccgttaaaaaccaattaaacgacaacgcccgcccctctaaaaaaacacgaaaataattccccaaccgctcaaatttccgaaccaccgcgctttcccctcctcaacctaaactatactctctctaaaatcctcgaacccccactttcttcccaaactcatcctaaatctctcacacacgcgaata

SEQ ID NO: 21561 - DNA, 687 bp, Artificial Sequence
  chemically treated genomic DNA (Homo sapiens) CpG-island No: 21561
  unsure (56)
gttttcggcgtttcggtttttatcgggtatcgtcggttacggttcgggcgtttganggagggggcgtcgagcggcgcgattggttcgttcgttttgtcgcgttcggggcgggttttagggagtcgcggttttattcgcgtaggggtcgggttcgtatggaatcgcggcgggtgcgggtcggggtttttacggtgtttgtcgtcgcgcgtcggcgcgattggggcggcgagggtgggacgggcgtcgttcggggttttttttttcgggtcggtttttgtagaattagggggcgaggttgtcgggaacgggggtggcggtcgcggggcgcgttcgggtttttttttttcgtcgtcgttgtagtttcggcgtttcgttgttttggtttttcgtttttcgtttttcgttgggtttcgggttttagtttcggtttcggttcgggttttcgggtcgcgagtgttatcgtagtttagagcggcgttttattgataaagaaagtacgtagttttcggaacgggcgaggaggcgaggaggcgaggtcggcgcgcgcgcgtagtttcgcgcggagttatcgcgcgtttttcgttttcgcgcgttcggtcgggttcgagatttaggagggggatttttttcggcggttttcgcgtagcggaggtttttaaggggagggtttttttttttttttgtttt

SEQ ID NO: 21562 - DNA, 687 bp, Artificial Sequence
  chemically treated genomic DNA (Homo sapiens) CpG-island No: 21562
  unsure (632)
aaaacaaaaaaaaaaaaaaaccctccccttaaaaacctccgctacgcgaaaaccgccgaaaaaaatccccctcctaaatctcgaacccgaccgaacgcgcgaaaacgaaaaacgcgcgataactccgcgcgaaactacgcgcgcgcgccgacctcgcctcctcgcctcctcgcccgttccgaaaactacgtactttctttatcaataaaacgccgctctaaactacgataacactcgcgacccgaaaacccgaaccgaaaccgaaactaaaacccgaaacccaacgaaaaacgaaaaacgaaaaaccaaaacaacgaaacgccgaaactacaacgacgacgaaaaaaaaaaacccgaacgcgccccgcgaccgccacccccgttcccgacaacctcgccccctaattctacaaaaaccgacccgaaaaaaaaaaccccgaacgacgcccgtcccaccctcgccgccccaatcgcgccgacgcgcgacgacaaacaccgtaaaaaccccgacccgcacccgccgcgattccatacgaacccgacccctacgcgaataaaaccgcgactccctaaaacccgccccgaacgcgacaaaacgaacgaaccaatcgcgccgctcgacgccccctccntcaaacgcccgaaccgtaaccgacgatacccgataaaaaccgaaacgccgaaaac

SEQ ID NO: 21563 - DNA, 687 bp, Artificial Sequence
  chemically treated genomic DNA (Homo sapiens) CpG-island No: 21563
  unsure (632)
gggataggaggggagggaagttttttttttaaggattttcgttgcgcgggagtcgtcgggaggggttttttttttgggtttcgagttcggtcgggcgcgcgggagcggggagcgcgcggtggtttcgcgcggggttgcgcgcgcgcgtcggtttcgttttttcgttttttcgttcgtttcggaggttacgtgttttttttgttaatgaggcgtcgttttgagttgcggtagtattcgcggttcgggaattcgagtcggagtcggggttggaattcgaagtttagcgaggagcgaggagcgaggagttaggatagcggggcgtcgaggttgtagcggcggcgggagggagggattcgagcgcgtttcgcggtcgttattttcgttttcggtagtttcgttttttagttttgtaggagtcggttcgggggagggggtttcgggcggcgttcgttttattttcgtcgttttaatcgcgtcggcgcgcggcgataggtatcgtgggaatttcggttcgtattcgtcgcggttttatgcgggttcggtttttgcgcgggtgaagtcgcggttttttggagttcgtttcgggcgcggtaggacgagcgagttagtcgcgtcgttcggcgttttttttnttaggcgttcgggtcgtggtcggcgatgttcggtgaggatcggggcgtcgagggt

SEQ ID NO: 21564 - DNA, 687 bp, Artificial Sequence
  chemically treated genomic DNA (Homo sapiens) CpG-island No: 21564
  unsure (56)
accctcgacgccccgatcctcaccgaacatcgccgaccacgacccgaacgcctaanaaaaaaaacgccgaacgacgcgactaactcgctcgtcctaccgcgcccgaaacgaactccaaaaaaccgcgacttcacccgcgcaaaaaccgaacccgcataaaaccgcgacgaatacgaaccgaaattcccacgatacctatcgccgcgcgccgacgcgattaaaacgacgaaaataaaacgaacgccgcccgaaaccccctcccccgaaccgactcctacaaaactaaaaaacgaaactaccgaaaacgaaaataacgaccgcgaaacgcgctcgaatccctccctcccgccgccgctacaacctcgacgccccgctatcctaactcctcgctcctcgctcctcgctaaacttcgaattccaaccccgactccgactcgaattcccgaaccgcgaatactaccgcaactcaaaacgacgcctcattaacaaaaaaaacacgtaacctccgaaacgaacgaaaaaacgaaaaaacgaaaccgacgcgcgcgcgcaaccccgcgcgaaaccaccgcgcgctccccgctcccgcgcgcccgaccgaactcgaaacccaaaaaaaaaacccctcccgacgactcccgcgcaacgaaaatccttaaaaaaaaaacttccctcccctcctatccc

SEQ ID NO: 21565 - DNA, 1480 bp, Artificial Sequence
  chemically treated genomic DNA (Homo sapiens) CpG-island No: 21565
  unsure (778)
aagcgtgttttcgtagtagcgcgttttcgtttcggtcgtcgcgttttcgcggtcgtcgtcgtcgtcgtcgttcgggattgagtttttcgtttgttttttttttattttttaaattttaagaggttgcggtagttacggcggcggcggcggcggcggcggcggtagcggcggcgttttttcgtttttttttcggtcggttcgtttcgtttttttttttttatttttcggtcggtcgtttcgtttcgttcgtttttcgtttaattttcgcgttcggtttcgtttcgttgtatttaatagcgttttgttattggtcgacgcgtttttacgtattttaacgtttttcgttttttttatttttttcgcgcgattcgtttacgttttcgtttttcgtttcgagtcgttgcgagtcggttttaggtaggtcgcggttttttggcgcggggttgatcgttgagtagagttgagtcgatttaggggagggagtatgtggttgcgattgcggtgatagggtcgtggttcgttgtggaggcgtaagatagagcgtgagacgtaggaaatgtatatttgaaatgtatggtaataatttttgtagtcggcgaaacgcgaatcgtggttttttggttttgtttttttatcgtcgcggttttcgttgtagtaagagtgtttggtacgttttgtattgaggcgtacggggaggttcgggaatcgagcgagcggtagtttcgcgggatatcgttggtttcgtttttttttttttttttttttttttttttttttntttttttttatttttttttttttcgtttttttttttcgattatttcgttttttgttttttttttttttcgattagttcgttttttgtttttttttttttttttttcgattagttcgtttttttttttttttttttttcggttagttttttttttcggttagttttttttttcgattaattttttttttcgatcggttttttttttcgatcggtttttttttttggtcgggttttttttttgatcggttttttttttcgatcggttttttttttcggtcggttttttttttcggttagttttttttttcgattagttttttttttcgattagtttttttttttattagtttagtttttcgtagtttttttcgcgaggtttcgtttattcgatagttcgtttttttttggttggtttcgtttttcgtagtttttttcgtaaggtttcgtttattcgatagtttcgtttttttttggttggtttcgtttttcgtagtttttgtcgcgaggttttatttattcgatagtttcgtttttttttagtcggtttcgtttttcgtagtttttttcgcgaggttacgtttatatgcgtagtttttttttttcggcgtcggtttcgtttatcgaggcgaggttttaaagatttggtggtcgttgcgttaataggattttatttttattttttaatttggtttgattataaat

SEQ ID NO: 21566 - DNA, 1480 bp, Artificial Sequence
  chemically treated genomic DNA (Homo sapiens) CpG-island No: 21566
  unsure (703)
atttataatcaaaccaaattaaaaaataaaaataaaatcctattaacgcaacgaccaccaaatctttaaaacctcgcctcgataaacgaaaccgacgccgaaaaaaaaaaactacgcatataaacgtaacctcgcgaaaaaaactacgaaaaacgaaaccgactaaaaaaaaacgaaactatcgaataaataaaacctcgcgacaaaaactacgaaaaacgaaaccaaccaaaaaaaaacgaaactatcgaataaacgaaaccttacgaaaaaaactacgaaaaacgaaaccaaccaaaaaaaaacgaactatcgaataaacgaaacctcgcgaaaaaaactacgaaaaactaaactaataaaaaaaaaaactaatcgaaaaaaaaaactaatcgaaaaaaaaaactaaccgaaaaaaaaaaccgaccgaaaaaaaaaaccgatcgaaaaaaaaaaccgatcaaaaaaaaaacccgaccaaaaaaaaaaaccgatcgaaaaaaaaaaccgatcgaaaaaaaaaattaatcgaaaaaaaaaactaaccgaaaaaaaaaactaaccgaaaaaaaaaaaaaaaaaaaaacgaactaatcgaaaaaaaaaaaaaaaaaaacaaaaaacgaactaatcgaaaaaaaaaaaaaacaaaaaacgaaataatcgaaaaaaaaaaacgaaaaaaaaaaaaataaaaaaaaanaaaaaaaaaaaaaaaaaaaaaaaaaaaaaaaaacgaaaccaacgatatcccgcgaaactaccgctcgctcgattcccgaacctccccgtacgcctcaatacaaaacgtaccaaacactcttactacaacgaaaaccgcgacgataaaaaaacaaaaccaaaaaaccacgattcgcgtttcgccgactacaaaaattattaccatacatttcaaatatacatttcctacgtctcacgctctatcttacgcctccacaacgaaccacgaccctatcaccgcaatcgcaaccacatactccctcccctaaatcgactcaactctactcaacgatcaaccccgcgccaaaaaaccgcgacctacctaaaaccgactcgcaacgactcgaaacgaaaaacgaaaacgtaaacgaatcgcgcgaaaaaaataaaaaaaacgaaaaacgttaaaatacgtaaaaacgcgtcgaccaataacaaaacgctattaaatacaacgaaacgaaaccgaacgcgaaaattaaacgaaaaacgaacgaaacgaaacgaccgaccgaaaaataaaaaaaaaaaaacgaaacgaaccgaccgaaaaaaaaacgaaaaaacgccgccgctaccgccgccgccgccgccgccgccgccgtaactaccgcaacctcttaaaatttaaaaaataaaaaaaaaacaaacgaaaaactcaatcccgaacgacgacgacgacgacgaccgcgaaaacgcgacgaccgaaacgaaaacgcgctactacgaaaacacgctt

SEQ ID NO: 21567 - DNA, 1480 bp, Artificial Sequence
  chemically treated genomic DNA (Homo sapiens) CpG-island No: 21567
  unsure (703)
atttatgattaagttaaattaaagaataaaaataaaattttattggcgtagcggttattaagtttttgaggtttcgtttcggtgggcggggtcgacgtcggaggagaggggttgcgtatgtgggcgtgatttcgcggaaggagttgcggagggcggggtcgattggagaggggcggggttgtcgggtgggtgggatttcgcggtaaaagttgcggagggcgggattaattaggaaaggacgggattgtcgggtaggcgggattttgcgggagaaattgcggagggcgggattaattagggaggggcgggttgtcggatgggcgggatttcgcgggaggagttgcggaaagttgagttggtgaggggaggggttggtcgaggggaggggttggtcgaggggaggggttggtcgagggaaggggtcggtcgaggggaggggtcggtcgaggggaggggtcggttaaggggagggttcggttaaggggaggggtcggtcgaggggaggggtcggtcgaggagaggggttggtcgaggggaagggttggtcgaggggaggggttggtcgagggaagaagaggggaggggacgggttggtcgaggggaggggaggggagggtaggggacgggttggtcgagagaaggggagggtaggggacggggtggtcgaggggaggggacggaggggaggggagtagagggagangagggaaggggaggggagggaagggaggggaggcggggttagcggtgtttcgcgaaattgtcgttcgttcggttttcgggttttttcgtgcgttttagtgtaaagcgtgttaggtatttttattgtaacgagagtcgcggcggtgagggggtaaggttaagaggttacggttcgcgtttcgtcggttgtagaagttgttgttatatattttaaatgtgtattttttacgttttacgttttgttttgcgtttttatagcgggttacggttttgttatcgtagtcgtagttatatgtttttttttttgagtcggtttagttttgtttagcggttagtttcgcgttaggaggtcgcggtttgtttgaggtcggttcgtagcgattcgggacggagggcgggggcgtgaacgggtcgcgcggagagggtggggggagcggggagcgttagggtacgtgggggcgcgtcgattaatggtagggcgttgttgagtgtagcggggcggggtcgggcgcgggggttgggcgagaagcgggcggggcggggcggtcggtcggggggtgggaggagaggggcggggcgggtcggtcgggggaggggcggagagacgtcgtcgttgtcgtcgtcgtcgtcgtcgtcgtcgtcgtggttgtcgtagttttttggagtttggaaaatgggaaggagataagcgaaagatttagtttcgggcggcggcggcggcggcggtcgcgggggcgcgacggtcggggcgggggcgcgttgttgcgggggtacgttt

SEQ ID NO: 21568 - DNA, 1480 bp, Artificial Sequence
  chemically treated genomic DNA (Homo sapiens) CpG-island No: 21568
  unsure (778)
aaacgtacccccgcaacaacgcgcccccgccccgaccgtcgcgcccccgcgaccgccgccgccgccgccgcccgaaactaaatctttcgcttatctccttcccattttccaaactccaaaaaactacgacaaccacgacgacgacgacgacgacgacgacgacaacgacgacgtctctccgcccctcccccgaccgacccgccccgcccctctcctcccaccccccgaccgaccgccccgccccgcccgcttctcgcccaacccccgcgcccgaccccgccccgctacactcaacaacgccctaccattaatcgacgcgcccccacgtaccctaacgctccccgctccccccaccctctccgcgcgacccgttcacgcccccgccctccgtcccgaatcgctacgaaccgacctcaaacaaaccgcgacctcctaacgcgaaactaaccgctaaacaaaactaaaccgactcaaaaaaaaaaacatataactacgactacgataacaaaaccgtaacccgctataaaaacgcaaaacaaaacgtaaaacgtaaaaaatacacatttaaaatatataacaacaacttctacaaccgacgaaacgcgaaccgtaacctcttaaccttaccccctcaccgccgcgactctcgttacaataaaaatacctaacacgctttacactaaaacgcacgaaaaaacccgaaaaccgaacgaacgacaatttcgcgaaacaccgctaaccccgcctcccctcccttccctcccctccccttccctcntctccctctactcccctcccctccgtcccctcccctcgaccaccccgtcccctaccctccccttctctcgaccaacccgtcccctaccctcccctcccctcccctcgaccaacccgtcccctcccctcttcttccctcgaccaacccctcccctcgaccaacccttcccctcgaccaacccctctcctcgaccgacccctcccctcgaccgacccctccccttaaccgaaccctccccttaaccgacccctcccctcgaccgacccctcccctcgaccgaccccttccctcgaccaacccctcccctcgaccaacccctcccctcgaccaacccctcccctcaccaactcaactttccgcaactcctcccgcgaaatcccgcccatccgacaacccgcccctccctaattaatcccgccctccgcaatttctcccgcaaaatcccgcctacccgacaatcccgtcctttcctaattaatcccgccctccgcaacttttaccgcgaaatcccacccacccgacaaccccgcccctctccaatcgaccccgccctccgcaactccttccgcgaaatcacgcccacatacgcaacccctctcctccgacgtcgaccccgcccaccgaaacgaaacctcaaaaacttaataaccgctacgccaataaaattttatttttattctttaatttaacttaatcataaat

SEQ ID NO: 21569 - DNA, 567 bp, Artificial Sequence
  chemically treated genomic DNA (Homo sapiens) CpG-island No: 21569
  unsure (517, 562, 564, 566)
attttttcggcggtcgtatttgttcgtttaagtttacggcgcgttgtcggaaacgggcgttttttcgatttttttttcgggtcgcgttttttttttacgtttagtttcggtttattacgaaggttttagcggttcgggtttgcgtttcgcggtttcggcgcgattttcgggtttttcgtttttatcgggtatgaggtcgagagaagttcggggatgtttggttcggtcgttttcggggacgcgaagttcgcggcgttaggcggggaattgagtcggggttcgggcgtaggatttcggtgtcgtcgcgttttttttcggtagtttttttttgtttttttcgtttcgcggtcgggttcggatttatttttttttttttgtttttattcggtatggttggagcgggtcgtcgtcgtcgtcgtcgtttttgtcgtcgtttgtatttcgtagtagtagcgttttcgtttcgaacgtggtttttcgcggcgtcgtttcgtcgtattttaagattgattttttntttaatttttttttttttacgatttataagtgtagattatagtananana

SEQ ID NO: 21570 - DNA, 567 bp, Artificial Sequence
  chemically treated genomic DNA (Homo sapiens) CpG-island No: 21570
  unsure (2, 4, 6, 51)
tntntntactataatctacacttataaatcgtaaaaaaaaaaaaattaaanaaaaaatcaatcttaaaatacgacgaaacgacgccgcgaaaaaccacgttcgaaacgaaaacgctactactacgaaatacaaacgacgacaaaaacgacgacgacgacgacgacccgctccaaccataccgaataaaaacaaaaaaaaaaaaataaatccgaacccgaccgcgaaacgaaaaaaacaaaaaaaaactaccgaaaaaaaacgcgacgacaccgaaatcctacgcccgaaccccgactcaattccccgcctaacgccgcgaacttcgcgtccccgaaaacgaccgaaccaaacatccccgaacttctctcgacctcatacccgataaaaacgaaaaacccgaaaatcgcgccgaaaccgcgaaacgcaaacccgaaccgctaaaaccttcgtaataaaccgaaactaaacgtaaaaaaaaaacgcgacccgaaaaaaaaatcgaaaaaacgcccgtttccgacaacgcgccgtaaacttaaacgaacaaatacgaccgccgaaaaaat

SEQ ID NO: 21571 - DNA, 567 bp, Artificial Sequence
  chemically treated genomic DNA (Homo sapiens) CpG-island No: 21571
  unsure (2, 4, 6, 51)
tntntntgttgtagtttgtatttgtggatcgtaaaagagaaggagttaagnaaaaaattagttttggggtgcggcggggcggcgtcgcggggggttacgttcggggcgggggcgttgttgttgcggggtgtaggcggcggtaggggcggcggcggcggcggcggttcgttttagttatgtcgaataaaaataagaaggagaaagtgagttcgggttcggtcgcgggacggagggagtagggagggattgtcgggggagggcgcgacggtatcggggttttgcgttcgggtttcggtttagtttttcgtttgacgtcgcgggtttcgcgttttcgagggcggtcgagttaggtattttcgggtttttttcggttttatgttcggtgggggcggggagttcggggatcgcgtcggagtcgcggggcgtaggttcgggtcgttgggattttcgtgatgggtcggggttgggcgtggagggagggcgcggttcggggagggggtcggaggggcgttcgttttcgatagcgcgtcgtgggtttgggcgggtaggtgcggtcgtcgagggggt

SEQ ID NO: 21572 - DNA, 567 bp, Artificial Sequence
  chemically treated genomic DNA (Homo sapiens) CpG-island No: 21572
  unsure (517, 562, 564, 566)
accccctcgacgaccgcacctacccgcccaaacccacgacgcgctatcgaaaacgaacgcccctccgaccccctccccgaaccgcgccctccctccacgcccaaccccgacccatcacgaaaatcccaacgacccgaacctacgccccgcgactccgacgcgatccccgaactccccgcccccaccgaacataaaaccgaaaaaaacccgaaaatacctaactcgaccgccctcgaaaacgcgaaacccgcgacgtcaaacgaaaaactaaaccgaaacccgaacgcaaaaccccgataccgtcgcgccctcccccgacaatccctccctactccctccgtcccgcgaccgaacccgaactcactttctccttcttatttttattcgacataactaaaacgaaccgccgccgccgccgccgcccctaccgccgcctacaccccgcaacaacaacgcccccgccccgaacgtaaccccccgcgacgccgccccgccgcaccccaaaactaattttttncttaactccttctcttttacgatccacaaatacaaactacaacananana

SEQ ID NO: 21573 - DNA, 731 bp, Artificial Sequence
  chemically treated genomic DNA (Homo sapiens) CpG-island No: 21573
  unsure (10..11, 108..109, 111, 146..147, 185, 302..303, 718, 720)
cgagttattnnntgggttatggcggcggatagagtagaatcgaagagcggcgacgcgcggaggacgagtgagggaaagattcgtagcggttttttttagaaattgcgnnnntttacgttcggtttttcggcgtcggttaatcgaannnaagggggtggagttatgaagttatattattggttttnttcgacgtttgttagattattcgaggtaaacgtgttcgtttattttcgggggtcggattagtggagcgtcgagtatttagatgatattgtttcggcgaggtttcgggtttttcgttnnacgcgtagagtttttcgttcgttttagttgtatttcggttttgtaggtcgttcgtttggcgtagttgtagttatagtaatttacgtaggatcgcgttttatagtttattaggtattcggacgttttgggcgcgagcgttcgtcgttttttttttaggttattgcggtgtatcgtgcgggttcgcgtcgtgtttttcgtttcggagtagggatcgggcgtgttcgtttagttttgtgcgtattcggaatggggtcggggaaggttgagttttagggcgattttgatgtggagtcgtgcgatcgtttattgcggttgaagagatttaggcgtagatagcgtaggcggggtatgtattggttggagtatgatggggttaggatttgagttttttatttaggttcggagttaacggtantnaattttttttt

SEQ ID NO: 21574 - DNA, 731 bp, Artificial Sequence
  chemically treated genomic DNA (Homo sapiens) CpG-island No: 21574
  unsure (12, 14, 429..430, 547, 584..585, 621..622, 624, 720..)
aaaaaaaaattnantaccgttaactccgaacctaaataaaaaactcaaatcctaaccccatcatactccaaccaatacataccccgcctacgctatctacgcctaaatctcttcaaccgcaataaacgatcgcacgactccacatcaaaatcgccctaaaactcaaccttccccgaccccattccgaatacgcacaaaactaaacgaacacgcccgatccctactccgaaacgaaaaacacgacgcgaacccgcacgatacaccgcaataacctaaaaaaaaaacgacgaacgctcgcgcccaaaacgtccgaatacctaataaactataaaacgcgatcctacgtaaattactataactacaactacgccaaacgaacgacctacaaaaccgaaatacaactaaaacgaacgaaaaactctacgcgtnnaacgaaaaacccgaaacctcgccgaaacaatatcatctaaatactcgacgctccactaatccgacccccgaaaataaacgaacacgtttacctcgaataatctaacaaacgtcgaanaaaaccaataatataacttcataactccacccccttnnnttcgattaaccgacgccgaaaaaccgaacgtaaannnncgcaatttctaaaaaaaaccgctacgaatctttccctcactcgtcctccgcgcgtcgccgctcttcgattctactctatccgccgccataacccannnaataactcg

SEQ ID NO: 21575 - DNA, 731 bp, Artificial Sequence
  chemically treated genomic DNA (Homo sapiens) CpG-island No: 21575
  unsure (12, 14, 429..430, 547, 584..585, 621..622, 624, 720..)
gagaaggggttnantatcgttaatttcgggtttgggtaaaagatttaagttttgattttattatattttaattaatatatatttcgtttgcgttgtttgcgtttgggtttttttaatcgtagtgagcggtcgtacggttttatattagggtcgttttgaggtttagtttttttcggttttatttcgagtgcgtataggattgaacgagtacgttcggtttttgtttcggagcggaggatacgacgcggattcgtacggtgtatcgtagtgatttgaggaaggagcgacgggcgttcgcgtttaaggcgttcgagtgtttggtaaattgtaaagcgcggttttgcgtgagttgttatggttatagttgcgttaggcggacggtttgtaggatcgaggtgtagttgggacgagcggaaagttttgcgcgtnnggcggggagttcggagtttcgtcggggtaatgttatttaggtgttcggcgttttattgattcggttttcgggggtgggcgggtacgtttgtttcggatggtttaataggcgtcgggnagagttaatggtgtggttttatggttttatttttttnnnttcgattggtcggcgtcgaaaagtcgggcgtgagnnnncgtagtttttggagggagtcgttgcgggttttttttttattcgtttttcgcgcgtcgtcgtttttcggttttgttttgttcgtcgttatggtttannnagtgattcg

SEQ ID NO: 21576 - DNA, 731 bp, Artificial Sequence
  chemically treated genomic DNA (Homo sapiens) CpG-island No: 21576
  unsure (10..11, 108..109, 111, 146..147, 185, 302..303, 718, 720)
cgaatcactnnntaaaccataacgacgaacaaaacaaaaccgaaaaacgacgacgcgcgaaaaacgaataaaaaaaaaacccgcaacgactccctccaaaaactacgnnnnctcacgcccgacttttcgacgccgaccaatcgaannnaaaaaaataaaaccataaaaccacaccattaactctncccgacgcctattaaaccatccgaaacaaacgtacccgcccacccccgaaaaccgaatcaataaaacgccgaacacctaaataacattaccccgacgaaactccgaactccccgccnnacgcgcaaaactttccgctcgtcccaactacacctcgatcctacaaaccgtccgcctaacgcaactataaccataacaactcacgcaaaaccgcgctttacaatttaccaaacactcgaacgccttaaacgcgaacgcccgtcgctccttcctcaaatcactacgatacaccgtacgaatccgcgtcgtatcctccgctccgaaacaaaaaccgaacgtactcgttcaatcctatacgcactcgaaataaaaccgaaaaaaactaaacctcaaaacgaccctaatataaaaccgtacgaccgctcactacgattaaaaaaacccaaacgcaaacaacgcaaacgaaatatatattaattaaaatataataaaatcaaaacttaaatcttttacccaaacccgaaattaacgatantnaaccccttctc

SEQ ID NO: 21577 - DNA, 575 bp, Artificial Sequence
  chemically treated genomic DNA (Homo sapiens) CpG-island No: 21577
gcggacgtatttgtttttcgcgtggttagagtcgtttttgtttcggtcggacgcgggtgttttgattttaagagtgggtgggagggtgggttggggaagcgtgttcgtgattgtcgttgtttttttcgggttgggtcgacgtcgggtttcggggattcggtcgtatttcgggggtgtgttgtatttttagcgcgttgaaacgtacgcggggttcgaggggtcgggtgggggttgcgggtcgttgttttaggcgtttggggaggtagcggttttttcgagtgtcgggttagtgcgtattttcgcgtttttttttattcggagttaagagttcgggagtaggtcgtcgcggttttttagtggggcgggagtcgtagaggggtagtttcgcgttgttgtcggggtcgcggagttttgggggggacgtgttttcggggacgcgtcgggtcgtaggcgtttttttttttttcggttttacgttgcgttcgttcgcgatttgtttttattatttttgtttttagcgtttacggatagtcgcgtttacggataatttaattttagtattttgggaggttaag

SEQ ID NO: 21578 - DNA, 575 bp, Artificial Sequence
  chemically treated genomic DNA (Homo sapiens) CpG-island No: 21578
cttaacctcccaaaatactaaaattaaattatccgtaaacgcgactatccgtaaacgctaaaaacaaaaataataaaaacaaatcgcgaacgaacgcaacgtaaaaccgaaaaaaaaaaaaacgcctacgacccgacgcgtccccgaaaacacgtcccccccaaaactccgcgaccccgacaacaacgcgaaactacccctctacgactcccgccccactaaaaaaccgcgacgacctactcccgaactcttaactccgaataaaaaaaaacgcgaaaatacgcactaacccgacactcgaaaaaaccgctacctccccaaacgcctaaaacaacgacccgcaacccccacccgacccctcgaaccccgcgtacgtttcaacgcgctaaaaatacaacacacccccgaaatacgaccgaatccccgaaacccgacgtcgacccaacccgaaaaaaacaacgacaatcacgaacacgcttccccaacccaccctcccacccactcttaaaatcaaaacacccgcgtccgaccgaaacaaaaacgactctaaccacgcgaaaaacaaatacgtccgc

SEQ ID NO: 21579 - DNA, 575 bp, Artificial Sequence
  chemically treated genomic DNA (Homo sapiens) CpG-island No: 21579
tttggttttttaaagtgttgggattagattgttcgtgggcgcgattgttcgtgggcgttaggggtaggggtgataggagtaggtcgcgagcgggcgtagcgtgggatcgaaggggagaaggacgtttgcggttcggcgcgttttcggaggtacgttttttttagggtttcgcggtttcggtaatagcgcggggttatttttttacggttttcgttttattgggggatcgcgacggtttgttttcgggtttttggtttcgagtggagaagagcgcggaagtgcgtattagttcgatattcgggagggtcgttgtttttttaagcgtttgggatagcggttcgtagtttttattcggtttttcgggtttcgcgtgcgttttagcgcgttgaggatgtagtatattttcgaggtgcgatcgggttttcgaagttcggcgtcggtttaattcggaggaggtagcggtagttacgggtacgtttttttaatttatttttttatttatttttagggttaggatattcgcgttcggtcggggtaggggcggttttgattacgcgagaagtaggtgcgttcgt

SEQ ID NO: 21580 - DNA, 575 bp, Artificial Sequence
  chemically treated genomic DNA (Homo sapiens) CpG-island No: 21580
acgaacgcacctacttctcgcgtaatcaaaaccgcccctaccccgaccgaacgcgaatatcctaaccctaaaaataaataaaaaaataaattaaaaaaacgtacccgtaactaccgctacctcctccgaattaaaccgacgccgaacttcgaaaacccgatcgcacctcgaaaatatactacatcctcaacgcgctaaaacgcacgcgaaacccgaaaaaccgaataaaaactacgaaccgctatcccaaacgcttaaaaaaacaacgaccctcccgaatatcgaactaatacgcacttccgcgctcttctccactcgaaaccaaaaacccgaaaacaaaccgtcgcgatcccccaataaaacgaaaaccgtaaaaaaataaccccgcgctattaccgaaaccgcgaaaccctaaaaaaaacgtacctccgaaaacgcgccgaaccgcaaacgtccttctccccttcgatcccacgctacgcccgctcgcgacctactcctatcacccctacccctaacgcccacgaacaatcgcgcccacgaacaatctaatcccaacactttaaaaaaccaaa

SEQ ID NO: 21581 - DNA, 1141 bp, Artificial Sequence
  chemically treated genomic DNA (Homo sapiens) CpG-island No: 21581
gcgtttttcgattcgtatgtttagcgtagtttcgtcggcggcgcgttacgggtagagcgggtttagcgggggacggaagtttagcgttgcgatcgggatttcgtaggttcgtttcgtagggtcgcggttttttttcgtgtaggtgttgggttcgcgggggcggggcgtttatacggttcgcgtttagatttaagcggggaaaaagcgaagagcggatagcggggtaggtgttatagggagttttcgttttatcgcgcgagtagtaagtttgcggcgtttgatatttgtattgcgaatgttaggtcgtagttcgggtttttaagacgcgaatacgcgcgtttgttcgtgacgttattttttgcggttttttcgagagttagtagcgggcgtcgttatgatgttttacggaagtcgatagtttttgtttagcggtatttcgttttttcggttttcggttttgttataaagtttttcgaagacgcggtcgttattcggagacgcggtcgttatttagaagcgtttttcggggaagtttcgttcgtgggatcgcgttatttgcgtcgtttttgcggttcgtagttcgacgggcgtcgttatgttggggttttagcgagggacgcgtaggtgtttttataagatgtcggggtagcggcgcgcgtttttttttaagatggcgtttatgcgggagagcgatacgggtttgtggttgtataataagttgggggttacggacgagttgtgggcgtcgtttagtatcgcgtttttgtttacggtcgcggttatcgataatattcgtttttgtttttatggtttttcgtcggtagtgaagtttaagttgttattcgggacgttgtatttttcgcgtcgtacggtggacgaggtaaggtaggcgtggcgtttcgcggtttttagatttttaatttttttattttcgattcgtatatttaatttcggatttttttcgtttttttttttaatttttttatttttttttagattgttaattttttcggttcgtttttacgtttttttttcgttttttcgaatttttttttttagtttttatttttttttgggtttttatttttcgtttcgatttttattttttatttcggtttttatttttatcgtgggtttttag

SEQ ID NO: 21582 - DNA, 1141 bp, Artificial Sequence
  chemically treated genomic DNA (Homo sapiens) CpG-island No: 21582
ctaaaaacccacgataaaaataaaaaccgaaataaaaaataaaaatcgaaacgaaaaataaaaacccaaaaaaaaataaaaactaaaaaaaaaaattcgaaaaaacgaaaaaaaaacgtaaaaacgaaccgaaaaaattaacaatctaaaaaaaaataaaaaaattaaaaaaaaaaacgaaaaaaatccgaaattaaatatacgaatcgaaaataaaaaaattaaaaatctaaaaaccgcgaaacgccacgcctaccttacctcgtccaccgtacgacgcgaaaaatacaacgtcccgaataacaacttaaacttcactaccgacgaaaaaccataaaaacaaaaacgaatattatcgataaccgcgaccgtaaacaaaaacgcgatactaaacgacgcccacaactcgtccgtaacccccaacttattatacaaccacaaacccgtatcgctctcccgcataaacgccatcttaaaaaaaaacgcgcgccgctaccccgacatcttataaaaacacctacgcgtccctcgctaaaaccccaacataacgacgcccgtcgaactacgaaccgcaaaaacgacgcaaataacgcgatcccacgaacgaaacttccccgaaaaacgcttctaaataacgaccgcgtctccgaataacgaccgcgtcttcgaaaaactttataacaaaaccgaaaaccgaaaaaacgaaataccgctaaacaaaaactatcgacttccgtaaaacatcataacgacgcccgctactaactctcgaaaaaaccgcaaaaaataacgtcacgaacaaacgcgcgtattcgcgtcttaaaaacccgaactacgacctaacattcgcaatacaaatatcaaacgccgcaaacttactactcgcgcgataaaacgaaaactccctataacacctaccccgctatccgctcttcgctttttccccgcttaaatctaaacgcgaaccgtataaacgccccgcccccgcgaacccaacacctacacgaaaaaaaaccgcgaccctacgaaacgaacctacgaaatcccgatcgcaacgctaaacttccgtcccccgctaaacccgctctacccgtaacgcgccgccgacgaaactacgctaaacatacgaatcgaaaaacgc

SEQ ID NO: 21583 - DNA, 1141 bp, Artificial Sequence
  chemically treated genomic DNA (Homo sapiens) CpG-island No: 21583
ttgaagatttacggtggggatgagaatcgaggtgggagatgaggatcgaggcgggggatgaggatttagggggaggtgaggattggagggagggattcggaggagcgaggagggggcgtgagggcgggtcgggggggttaatagtttgaagggggatgggaaggttgggggagggagcgaggagggttcggagttgggtgtgcgggtcggaggtgggaaggttgggaatttgggggtcgcggggcgttacgtttgttttatttcgtttatcgtgcggcgcgggaggtgtagcgtttcgagtagtaatttgagttttattgtcgacgagaggttatggaagtagagacggatgttgtcgatgatcgcggtcgtgagtagggacgcgatgttgggcggcgtttatagttcgttcgtggtttttagtttgttgtgtagttataggttcgtgtcgttttttcgtatggacgttattttgggggaaagcgcgcgtcgttgtttcggtattttatgaagatatttacgcgtttttcgttaggattttaatatggcggcgttcgtcgggttgcgggtcgtagaggcggcgtaggtggcgcggttttacgagcggggttttttcggagagcgtttttgggtggcgatcgcgttttcgggtagcggtcgcgttttcgggaagttttgtggtaaagtcgagagtcggaaggacggggtgtcgttgagtaaggattatcggttttcgtaaaatattatggcggcgttcgttgttggttttcgggaagatcgtaaaaaatgacgttacgagtaggcgcgcgtattcgcgttttgggagttcgggttgcggtttggtattcgtagtgtaggtgttaagcgtcgtagatttgttgttcgcgcggtggggcggaggttttttgtggtatttgtttcgttgttcgtttttcgtttttttttcgtttgggtttgggcgcggatcgtgtggacgtttcgttttcgcgggtttagtatttgtacggagaggagtcgcggttttgcggagcgagtttgcgggatttcggtcgtagcgttgagttttcgtttttcgttgagttcgttttgttcgtggcgcgtcgtcgacggggttgcgttgagtatgcgggtcggagggcgt

SEQ ID NO: 21584 - DNA, 1141 bp, Artificial Sequence
  chemically treated genomic DNA (Homo sapiens) CpG-island No: 21584
acgccctccgacccgcatactcaacgcaaccccgtcgacgacgcgccacgaacaaaacgaactcaacgaaaaacgaaaactcaacgctacgaccgaaatcccgcaaactcgctccgcaaaaccgcgactcctctccgtacaaatactaaacccgcgaaaacgaaacgtccacacgatccgcgcccaaacccaaacgaaaaaaaaacgaaaaacgaacaacgaaacaaataccacaaaaaacctccgccccaccgcgcgaacaacaaatctacgacgcttaacacctacactacgaataccaaaccgcaacccgaactcccaaaacgcgaatacgcgcgcctactcgtaacgtcattttttacgatcttcccgaaaaccaacaacgaacgccgccataatattttacgaaaaccgataatccttactcaacgacaccccgtccttccgactctcgactttaccacaaaacttcccgaaaacgcgaccgctacccgaaaacgcgatcgccacccaaaaacgctctccgaaaaaaccccgctcgtaaaaccgcgccacctacgccgcctctacgacccgcaacccgacgaacgccgccatattaaaatcctaacgaaaaacgcgtaaatatcttcataaaataccgaaacaacgacgcgcgctttcccccaaaataacgtccatacgaaaaaacgacacgaacctataactacacaacaaactaaaaaccacgaacgaactataaacgccgcccaacatcgcgtccctactcacgaccgcgatcatcgacaacatccgtctctacttccataacctctcgtcgacaataaaactcaaattactactcgaaacgctacacctcccgcgccgcacgataaacgaaataaaacaaacgtaacgccccgcgacccccaaattcccaaccttcccacctccgacccgcacacccaactccgaaccctcctcgctccctcccccaaccttcccatcccccttcaaactattaacccccccgacccgccctcacgccccctcctcgctcctccgaatccctccctccaatcctcacctccccctaaatcctcatcccccgcctcgatcctcatctcccacctcgattctcatccccaccgtaaatcttcaa

SEQ ID NO: 21585 - DNA, 1125 bp, Artificial Sequence
  chemically treated genomic DNA (Homo sapiens) CpG-island No: 21585
tgcgttagcgttcgtttgaggtttcgtatataaattttaggtttatgggttcgtttcgcggggtaggcgtcgtgggtttaaggaggttaggttaggagtttcggtttcggggttacgcggcggcgggtagttttttcgtttcgtttagggtgttgttaatttatagtcgagtagcgattcgtaggatcggcgagaatttcgttattgttttcggtcggaagagaacgtgtagagatgtacgttattttcggggcgtggcgtggtcgggcgtggtcgtttcgtttttggcggcgtgtttggtgttttgtttcgcgtttgtgcgatcgttcgtttcgagcgcgtagtcgcggtaggtgcggggcgggacgggggcgttcggggtggggggcgtagggggcgttcgggttgggggtgggataggggacgcgcggggtgggggaggagacgggattcggggtacgcgggggtggggcgggtgagaggtgcgtagggtaggggagtagggggcgcgcggggtgtggggttggattaggggcgcgcggggtgggggcggtgggaggcgcgcggcgtgggggttagagggcgcgtagggtgggggacgggatcggggacgcgtagggtggggggcgggatcgggggcgcgcggggtgggggcggggatcgggacgtacgcgggatggcggagtgggaggcgcgcggggttgggggtgtttttgcgttcggtgtgtattttatggttttcgttagggagatcgagttcgggttaggggtcggaatcgcggggcgcgggtcggggttggggttggggttgggatcgggatcgggatcgggatcgggattcgggtttttcgcggttttaagttttttttcgttgttacgagggcgtgggaggcgcggtcgtggggtggggtggggttaggttcgcgatgtgtttattttggttttttaggatcgttgtttttgcggttattttttgtgtaattttcgaagtttgcgttttttgttgtttgggttcggggcgggggtatcgcgtaggttagaacggtttttgcgttcgtagttagagtttttgttattagtttttttagggtgttcgtcggttgtcgggtgtgggggtatgttagg

SEQ ID NO: 21586 - DNA, 1125 bp, Artificial Sequence
  chemically treated genomic DNA (Homo sapiens) CpG-island No: 21586
cctaacatacccccacacccgacaaccgacgaacaccctaaaaaaactaataacaaaaactctaactacgaacgcaaaaaccgttctaacctacgcgatacccccgccccgaacccaaacaacaaaaaacgcaaacttcgaaaattacacaaaaaataaccgcaaaaacaacgatcctaaaaaaccaaaataaacacatcgcgaacctaaccccaccccaccccacgaccgcgcctcccacgccctcgtaacaacgaaaaaaaacttaaaaccgcgaaaaacccgaatcccgatcccgatcccgatcccgatcccaaccccaaccccaaccccgacccgcgccccgcgattccgacccctaacccgaactcgatctccctaacgaaaaccataaaatacacaccgaacgcaaaaacacccccaaccccgcgcgcctcccactccgccatcccgcgtacgtcccgatccccgcccccaccccgcgcgcccccgatcccgccccccaccctacgcgtccccgatcccgtcccccaccctacgcgccctctaacccccacgccgcgcgcctcccaccgcccccaccccgcgcgcccctaatccaaccccacaccccgcgcgccccctactcccctaccctacgcacctctcacccgccccacccccgcgtaccccgaatcccgtctcctcccccaccccgcgcgtcccctatcccacccccaacccgaacgccccctacgccccccaccccgaacgcccccgtcccgccccgcacctaccgcgactacgcgctcgaaacgaacgatcgcacaaacgcgaaacaaaacaccaaacacgccgccaaaaacgaaacgaccacgcccgaccacgccacgccccgaaaataacgtacatctctacacgttctcttccgaccgaaaacaataacgaaattctcgccgatcctacgaatcgctactcgactataaattaacaacaccctaaacgaaacgaaaaaactacccgccgccgcgtaaccccgaaaccgaaactcctaacctaacctccttaaacccacgacgcctaccccgcgaaacgaacccataaacctaaaatttatatacgaaacctcaaacgaacgctaacgca

SEQ ID NO: 21587 - DNA, 1125 bp, Artificial Sequence
  chemically treated genomic DNA (Homo sapiens) CpG-island No: 21587
tttggtatatttttatattcgatagtcggcgagtattttaaaggggttgatggtaggggttttggttacggacgtaggggtcgttttggtttgcgcgatgttttcgtttcgaatttaggtagtaggaaacgtaggtttcggggattgtataaaaaatagtcgtaaaggtaacggttttgagagattagggtgagtatatcgcggatttggttttattttattttacggtcgcgttttttacgttttcgtaatagcgagagaaaatttgaagtcgcggggaattcggatttcgatttcgatttcgatttcgattttaattttaattttagtttcggttcgcgtttcgcgatttcggtttttggttcggattcggtttttttggcgggggttatggggtgtatatcggacgtaggagtatttttaatttcgcgcgttttttatttcgttatttcgcgtgcgtttcggttttcgtttttatttcgcgcgttttcggtttcgttttttattttgcgcgttttcggtttcgttttttattttgcgcgttttttaatttttacgtcgcgcgttttttatcgtttttatttcgcgcgtttttggtttagttttatatttcgcgcgttttttatttttttattttgcgtattttttattcgttttattttcgcgtatttcgggtttcgtttttttttttatttcgcgcgttttttgttttatttttaattcgagcgttttttacgttttttatttcgggcgttttcgtttcgtttcgtatttgtcgcggttgcgcgttcgggacggacggtcgtatagacgcggaatagggtattaggtacgtcgttaggggcgggacggttacgttcggttacgttacgtttcggaagtgacgtatatttttgtacgttttttttcggtcggaggtagtggcggggttttcgtcggttttgcgggtcgttgttcggttgtgggttagtagtattttgagcggagcggaagagttgttcgtcgtcgcgtaatttcgaggtcgagatttttggtttggtttttttgggtttacgacgtttgtttcgcggagcggatttatgggtttgaggtttgtgtgcggggttttaggcgagcgttggcgta

SEQ ID NO: 21588 - DNA, 1125 bp, Artificial Sequence
  chemically treated genomic DNA (Homo sapiens) CpG-island No: 21588
tacgccaacgctcgcctaaaaccccgcacacaaacctcaaacccataaatccgctccgcgaaacaaacgtcgtaaacccaaaaaaaccaaaccaaaaatctcgacctcgaaattacgcgacgacgaacaactcttccgctccgctcaaaatactactaacccacaaccgaacaacgacccgcaaaaccgacgaaaaccccgccactacctccgaccgaaaaaaaacgtacaaaaatatacgtcacttccgaaacgtaacgtaaccgaacgtaaccgtcccgcccctaacgacgtacctaataccctattccgcgtctatacgaccgtccgtcccgaacgcgcaaccgcgacaaatacgaaacgaaacgaaaacgcccgaaataaaaaacgtaaaaaacgctcgaattaaaaataaaacaaaaaacgcgcgaaataaaaaaaaaaacgaaacccgaaatacgcgaaaataaaacgaataaaaaatacgcaaaataaaaaaataaaaaacgcgcgaaatataaaactaaaccaaaaacgcgcgaaataaaaacgataaaaaacgcgcgacgtaaaaattaaaaaacgcgcaaaataaaaaacgaaaccgaaaacgcgcaaaataaaaaacgaaaccgaaaacgcgcgaaataaaaacgaaaaccgaaacgcacgcgaaataacgaaataaaaaacgcgcgaaattaaaaatactcctacgtccgatatacaccccataacccccgccaaaaaaaccgaatccgaaccaaaaaccgaaatcgcgaaacgcgaaccgaaactaaaattaaaattaaaatcgaaatcgaaatcgaaatcgaaatccgaattccccgcgacttcaaattttctctcgctattacgaaaacgtaaaaaacgcgaccgtaaaataaaataaaaccaaatccgcgatatactcaccctaatctctcaaaaccgttacctttacgactattttttatacaatccccgaaacctacgtttcctactacctaaattcgaaacgaaaacatcgcgcaaaccaaaacgacccctacgtccgtaaccaaaacccctaccatcaacccctttaaaatactcgccgactatcgaatataaaaatataccaaa

SEQ ID NO: 21589 - DNA, 693 bp, Artificial Sequence
  chemically treated genomic DNA (Homo sapiens) CpG-island No: 21589
gtgttcgtttatttcgacggcgttgggttgttaaggtgagtcgtcgaggagtttcgtgtttcgaggcgggtatagtcgttttgtatgggtgttttcggcgcgggattgacgtagagttttgttcggagttttagcgatttcgtttttgttttaggcggtcgtttcgaagtttgagtcgggtaacgcgtagttcgtttggttcggttttttttcgcgcgttttcgtcgcgagttgtcgtttgggagttttagacgttttcgtttagggcgattcggacgttttcgtttagggcgatttcggtttttgtagtttagttggcgatacgtttcgttaagagttcgtatttcggcgttttacggttatcggaggcggggatagggagttcggcgcgggtcgggtcgggggatttgtagcggcggcgcgaaggtaattttttcgttagagtcgggaaagagtttcgagtagaggaggaagggagcggggatttgtttttcgtttgtcggtttttggaagaagcgttttttgattcggtttcggaataagaaattcggattttgtttgtcgggtttcgcgatgtcgtaggtatagagcgcgttttttcggggaggatgttttagggatttcgcgttgtattggttgcggtcgtggggtgcggcggtttttgagtgaagaggggattttgttagggattta

SEQ ID NO: 21590 - DNA, 693 bp, Artificial Sequence
  chemically treated genomic DNA (Homo sapiens) CpG-island No: 21590
taaatccctaacaaaatcccctcttcactcaaaaaccgccgcaccccacgaccgcaaccaatacaacgcgaaatccctaaaacatcctccccgaaaaaacgcgctctatacctacgacatcgcgaaacccgacaaacaaaatccgaatttcttattccgaaaccgaatcaaaaaacgcttcttccaaaaaccgacaaacgaaaaacaaatccccgctcccttcctcctctactcgaaactctttcccgactctaacgaaaaaattaccttcgcgccgccgctacaaatcccccgacccgacccgcgccgaactccctatccccgcctccgataaccgtaaaacgccgaaatacgaactcttaacgaaacgtatcgccaactaaactacaaaaaccgaaatcgccctaaacgaaaacgtccgaatcgccctaaacgaaaacgtctaaaactcccaaacgacaactcgcgacgaaaacgcgcgaaaaaaaaccgaaccaaacgaactacgcgttacccgactcaaacttcgaaacgaccgcctaaaacaaaaacgaaatcgctaaaactccgaacaaaactctacgtcaatcccgcgccgaaaacacccatacaaaacgactatacccgcctcgaaacacgaaactcctcgacgactcaccttaacaacccaacgccgtcgaaataaacgaacac

SEQ ID NO: 21591 - DNA, 693 bp, Artificial Sequence
  chemically treated genomic DNA (Homo sapiens) CpG-island No: 21591
tgaatttttggtaaagttttttttttatttagaagtcgtcgtattttacggtcgtagttagtgtagcgcggggtttttggagtatttttttcgggagggcgcgttttgtatttgcggtatcgcggagttcggtaggtaaggttcgggttttttatttcggggtcggattaggagacgttttttttagaagtcggtaggcgaagggtaggttttcgtttttttttttttttgttcggggttttttttcggttttggcgggggagttattttcgcgtcgtcgttgtagatttttcgattcggttcgcgtcggattttttgttttcgttttcggtggtcgtgaggcgtcgaggtgcgggtttttggcgaggcgtgtcgttagttgggttgtagaggtcgggatcgttttgggcgggagcgttcggatcgttttgggcgggagcgtttggagtttttaggcggtagttcgcgacgaggacgcgcgggagggagtcgggttaggcgggttgcgcgttgttcggtttaggtttcggaacggtcgtttggggtaggaacggggtcgttggggtttcgggtagggttttgcgttaatttcgcgtcgggggtatttatgtagggcggttgtgttcgtttcggggtacggggtttttcggcggtttattttggtagtttagcgtcgtcggagtggacggatat

SEQ ID NO: 21592 - DNA, 693 bp, Artificial Sequence
  chemically treated genomic DNA (Homo sapiens) CpG-island No: 21592
atatccgtccactccgacgacgctaaactaccaaaataaaccgccgaaaaaccccgtaccccgaaacgaacacaaccgccctacataaatacccccgacgcgaaattaacgcaaaaccctacccgaaaccccaacgaccccgttcctaccccaaacgaccgttccgaaacctaaaccgaacaacgcgcaacccgcctaacccgactccctcccgcgcgtcctcgtcgcgaactaccgcctaaaaactccaaacgctcccgcccaaaacgatccgaacgctcccgcccaaaacgatcccgacctctacaacccaactaacgacacgcctcgccaaaaacccgcacctcgacgcctcacgaccaccgaaaacgaaaacaaaaaatccgacgcgaaccgaatcgaaaaatctacaacgacgacgcgaaaataactcccccgccaaaaccgaaaaaaaaccccgaacaaaaaaaaaaaaaaacgaaaacctacccttcgcctaccgacttctaaaaaaaacgtctcctaatccgaccccgaaataaaaaacccgaaccttacctaccgaactccgcgataccgcaaatacaaaacgcgccctcccgaaaaaaatactccaaaaaccccgcgctacactaactacgaccgtaaaatacgacgacttctaaataaaaaaaaaactttaccaaaaattca

SEQ ID NO: 21593 - DNA, 621 bp, Artificial Sequence
  chemically treated genomic DNA (Homo sapiens) CpG-island No: 21593
gtttacgtaattcgtaagtgaacgaatttgggcgtttatggcgaggttttgttagtgacggtcggtggtggcgtcgttagttagtttttcgttttcgtgtatttgtgcgttttcgtagttgttaaagtaaacgtaggtttttcgatttcgttagatttttaaagcgggttgttagtttcgggttattgttacggtcgtttcgggtttttattttcggatttttcgtttatgcgttcggattatagcgtttgttgacgtattgtagcggtcgtttgcgcgttagcggggttcggcggttttttttgtagtcgttatcgggttttttcgaaaaagagtttttttcgatttggggttggggaggttgggggcggtgaaggttgtttcggttcggttggttttaggcggggtacggcggcggggaaggggtcggggtcgttggggtttgcgcgaggcgtagtacgggaattcgtttttttcgggatagcgcggcgggaaataaataggacgagttttttttttttcgtgttcgcgtttttaggcgttaggggtggtaacggttttaggggtcgagggaggcggttcgggtttttcgcgttgttaggtttaggtttgggttggggt

SEQ ID NO: 21594 - DNA, 621 bp, Artificial Sequence
  chemically treated genomic DNA (Homo sapiens) CpG-island No: 21594
accccaacccaaacctaaacctaacaacgcgaaaaacccgaaccgcctccctcgacccctaaaaccgttaccacccctaacgcctaaaaacgcgaacacgaaaaaaaaaaaactcgtcctatttatttcccgccgcgctatcccgaaaaaaacgaattcccgtactacgcctcgcgcaaaccccaacgaccccgaccccttccccgccgccgtaccccgcctaaaaccaaccgaaccgaaacaaccttcaccgcccccaacctccccaaccccaaatcgaaaaaaactctttttcgaaaaaacccgataacgactacaaaaaaaaccgccgaaccccgctaacgcgcaaacgaccgctacaatacgtcaacaaacgctataatccgaacgcataaacgaaaaatccgaaaataaaaacccgaaacgaccgtaacaataacccgaaactaacaacccgctttaaaaatctaacgaaatcgaaaaacctacgtttactttaacaactacgaaaacgcacaaatacacgaaaacgaaaaactaactaacgacgccaccaccgaccgtcactaacaaaacctcgccataaacgcccaaattcgttcacttacgaattacgtaaac

SEQ ID NO: 21595 - DNA, 621 bp, Artificial Sequence
  chemically treated genomic DNA (Homo sapiens) CpG-island No: 21595
gttttagtttaagtttgagtttggtagcgcggggagttcgagtcgtttttttcgatttttgaggtcgttgttatttttggcgtttgagggcgcgggtacggagaggagggagttcgttttgtttgtttttcgtcgcgttgtttcgggggggacggattttcgtattgcgtttcgcgtaagttttagcggtttcggtttttttttcgtcgtcgtgtttcgtttggggttagtcgggtcgaagtagtttttatcgtttttagtttttttagttttaggtcgggagggattttttttcgggaaaattcggtggcgattgtagagaaaatcgtcgggtttcgttggcgcgtaggcggtcgttatagtgcgttaataggcgttgtaattcgagcgtataaacgaggggttcgggggtgggggttcggggcggtcgtggtagtggttcggggttggtagttcgttttgaaaatttggcgaagtcggggagtttgcgtttgttttggtagttgcgaaggcgtataggtgtacgggggcggggggttggttggcggcgttattatcgatcgttattgatagagtttcgttatgggcgtttaaattcgtttatttgcgaattgcgtaagt

SEQ ID NO: 21596 - DNA, 621 bp, Artificial Sequence
  chemically treated genomic DNA (Homo sapiens) CpG-island No: 21596
acttacgcaattcgcaaataaacgaatttaaacgcccataacgaaactctatcaataacgatcgataataacgccgccaaccaaccccccgcccccgtacacctatacgccttcgcaactaccaaaacaaacgcaaactccccgacttcgccaaattttcaaaacgaactaccaaccccgaaccactaccacgaccgccccgaacccccacccccgaacccctcgtttatacgctcgaattacaacgcctattaacgcactataacgaccgcctacgcgccaacgaaacccgacgattttctctacaatcgccaccgaattttcccgaaaaaaaatccctcccgacctaaaactaaaaaaactaaaaacgataaaaactacttcgacccgactaaccccaaacgaaacacgacgacgaaaaaaaaaccgaaaccgctaaaacttacgcgaaacgcaatacgaaaatccgtcccccccgaaacaacgcgacgaaaaacaaacaaaacgaactccctcctctccgtacccgcgccctcaaacgccaaaaataacaacgacctcaaaaatcgaaaaaaacgactcgaactccccgcgctaccaaactcaaacttaaactaaaac

SEQ ID NO: 21597 - DNA, 935 bp, Artificial Sequence
  chemically treated genomic DNA (Homo sapiens) CpG-island No: 21597
cgcgagtcgcgtatacgttatcgtttgcggtttttttaggtagttcgagttcgttcgtttttagagtgttcgagttcggttcgtagttcgttgttttttgttttaggtggattaggggttttcggggtatttcgttttattttcgtaacgttattttttttcgggtagtaggtggttcgatcggcggtttaggcgttcggtcgttgttttcgtttcgtatttattcgtttcggacgtcgcgttggcgttcgtttcggtcggttggagaagttggtcggtttaaattttcggtcgtagttttttaggcggcgcgtattatcgcgttatcgttagagggggattttgcgtcgttcgtcgttatttcgcgtttttttcgcgcggtcgtttcgcgttcggtatttgttaatttcgcgcgcggggttttcgggattcgcgggggtttgagggggacgtcgggtggcgcgggggtcgcgcgggtttgggttgggcggagcgggcgtatttttacggttcggttagtggaaggcgcgggtagtagcggtttcgagtggtcgcggcggtgggttgtgtcggagttttttttttttggttcgttgtaggttggtggcgggaggaggggatagttgcgggcgcggggagggggcgtcgcgtcgcgggggttatggcggagttaggaagtcgggagttcgagattcgggtaattgtcgcggcgtggcggtttgtttttttggagggggagggagtggttttttgggggtgttcggcgcggggttttcgcgcgggatttgggcggaagagggggtttagtttaggagagaaggcgcgtcgttacgttggtattaagggtgattgttcgtttggggcggtttgtcgggtggggtcgtggcgagtggcgggtggggagttttgggtggaagtgggtgatttggtggtat

SEQ ID NO: 21598 - DNA, 935 bp, Artificial Sequence
  chemically treated genomic DNA (Homo sapiens) CpG-island No: 21598
ataccaccaaatcacccacttccacccaaaactccccacccgccactcgccacgaccccacccgacaaaccgccccaaacgaacaatcacccttaataccaacgtaacgacgcgccttctctcctaaactaaaccccctcttccgcccaaatcccgcgcgaaaaccccgcgccgaacacccccaaaaaaccactccctccccctccaaaaaaacaaaccgccacgccgcgacaattacccgaatctcgaactcccgacttcctaactccgccataacccccgcgacgcgacgccccctccccgcgcccgcaactatcccctcctcccgccaccaacctacaacgaaccaaaaaaaaaaaactccgacacaacccaccgccgcgaccactcgaaaccgctactacccgcgccttccactaaccgaaccgtaaaaatacgcccgctccgcccaacccaaacccgcgcgacccccgcgccacccgacgtccccctcaaacccccgcgaatcccgaaaaccccgcgcgcgaaattaacaaataccgaacgcgaaacgaccgcgcgaaaaaaacgcgaaataacgacgaacgacgcaaaatccccctctaacgataacgcgataatacgcgccgcctaaaaaactacgaccgaaaatttaaaccgaccaacttctccaaccgaccgaaacgaacgccaacgcgacgtccgaaacgaataaatacgaaacgaaaacaacgaccgaacgcctaaaccgccgatcgaaccacctactacccgaaaaaaaataacgttacgaaaataaaacgaaataccccgaaaacccctaatccacctaaaacaaaaaacaacgaactacgaaccgaactcgaacactctaaaaacgaacgaactcgaactacctaaaaaaaccgcaaacgataacgtatacgcgactcgcg

SEQ ID NO: 21599 - DNA, 935 bp, Artificial Sequence
  chemically treated genomic DNA (Homo sapiens) CpG-island No: 21599
gtgttattaggttatttatttttatttaaggttttttattcgttattcgttacgattttattcggtaggtcgttttaagcggatagttatttttagtgttaacgtagcggcgcgtttttttttttagattaagttttttttttcgtttaggtttcgcgcgggagtttcgcgtcgagtatttttaaagagttattttttttttttttagaaaggtaagtcgttacgtcgcggtagttattcgggtttcggattttcggttttttggtttcgttatggttttcgcggcgcggcgtttttttttcgcgttcgtagttgtttttttttttcgttattaatttgtagcggattaaagggaggagatttcggtatagtttatcgtcgcggttattcggagtcgttgttgttcgcgttttttattggtcgggtcgtgggggtacgttcgtttcgtttagtttaggttcgcgcggttttcgcgttattcggcgttttttttagattttcgcgggtttcggaggtttcgcgcgcgaggttggtaggtgtcgggcgcgaagcggtcgcgcgggggaggcgcgggatggcggcgggcggcgtagggtttttttttggcggtggcgcgatggtgcgcgtcgtttggggagttgcggtcgggggtttgaatcggttaatttttttagtcggtcggggcgagcgttagcgcggcgttcggggcgagtgagtgcggggcgggggtagcggtcgggcgtttgggtcgtcggtcgggttatttgttgttcggggaaggatagcgttgcgagagtgggacggggtgtttcgggaatttttgatttatttagggtagagggtagcgagttacgggtcggattcgggtattttggaggcgggcgagttcgggttgtttggggaggtcgtaggcgatggcgtgtgcgcggttcgcg

SEQ ID NO: 21600 - DNA, 935 bp, Artificial Sequence
  chemically treated genomic DNA (Homo sapiens) CpG-island No: 21600
cgcgaaccgcgcacacgccatcgcctacgacctccccaaacaacccgaactcgcccgcctccaaaatacccgaatccgacccgtaactcgctaccctctaccctaaataaatcaaaaattcccgaaacaccccgtcccactctcgcaacgctatccttccccgaacaacaaataacccgaccgacgacccaaacgcccgaccgctacccccgccccgcactcactcgccccgaacgccgcgctaacgctcgccccgaccgactaaaaaaattaaccgattcaaacccccgaccgcaactccccaaacgacgcgcaccatcgcgccaccgccaaaaaaaaaccctacgccgcccgccgccatcccgcgcctcccccgcgcgaccgcttcgcgcccgacacctaccaacctcgcgcgcgaaacctccgaaacccgcgaaaatctaaaaaaaacgccgaataacgcgaaaaccgcgcgaacctaaactaaacgaaacgaacgtacccccacgacccgaccaataaaaaacgcgaacaacaacgactccgaataaccgcgacgataaactataccgaaatctcctccctttaatccgctacaaattaataacgaaaaaaaaaaacaactacgaacgcgaaaaaaaaacgccgcgccgcgaaaaccataacgaaaccaaaaaaccgaaaatccgaaacccgaataactaccgcgacgtaacgacttacctttctaaaaaaaaaaaaaataactctttaaaaatactcgacgcgaaactcccgcgcgaaacctaaacgaaaaaaaaaacttaatctaaaaaaaaaaacgcgccgctacgttaacactaaaaataactatccgcttaaaacgacctaccgaataaaatcgtaacgaataacgaataaaaaaccttaaataaaaataaataacctaataacac

SEQ ID NO: 21601 - DNA, 708 bp, Artificial Sequence
  chemically treated genomic DNA (Homo sapiens) CpG-island No: 21601
atggtttcgtcgtagttttgtcgcgcgttggtgtcggcgtaatgggtggcggaggcgttgcgggtttcgcgcgttgggtagtttttgtagttgttggacgttttttggtatttgtcgaagttggggcgcgacgcgcgacgcgagttcgaggagcgttatatttcgggcgtcgtttttttcgatatcgattagtgtagcgatcgtatttcgttttacgattatatgttgttcggggtcgagtatttcgcggagtacgtaggtcgtttgggcgtgggcgcggttatttacgtcgtgatttacgacgttagcgattagggtttttatttcgtttcgcgcgtttggtggatgtttcgcgttttcggttattacgtcgtgttattgtttgatggcggttttcgttattggttgcgttagaatttttcgtttagtttcggtaagagttaatttgttttcgtcgagtttcgcgtttagttcgatttcgtttttattaagatttacgaggatattaaggagaatttggaatttcggcgtttttaggtggtggattttcgagttattggtaggtttcgcggtatcgagttcgagtttcgagacggtaacgcgggggaagggggtaggaggtcgtcgggggcgcggtttttacgttttgagtagtgttttggatttgattttttttttatttttttaatttattttgtttttattttt

SEQ ID NO: 21602 - DNA, 708 bp, Artificial Sequence
  chemically treated genomic DNA (Homo sapiens) CpG-island No: 21602
aaaaataaaaacaaaataaattaaaaaaataaaaaaaaaatcaaatccaaaacactactcaaaacgtaaaaaccgcgcccccgacgacctcctacccccttcccccgcgttaccgtctcgaaactcgaactcgataccgcgaaacctaccaataactcgaaaatccaccacctaaaaacgccgaaattccaaattctccttaatatcctcgtaaatcttaataaaaacgaaatcgaactaaacgcgaaactcgacgaaaacaaattaactcttaccgaaactaaacgaaaaattctaacgcaaccaataacgaaaaccgccatcaaacaataacacgacgtaataaccgaaaacgcgaaacatccaccaaacgcgcgaaacgaaataaaaaccctaatcgctaacgtcgtaaatcacgacgtaaataaccgcgcccacgcccaaacgacctacgtactccgcgaaatactcgaccccgaacaacatataatcgtaaaacgaaatacgatcgctacactaatcgatatcgaaaaaaacgacgcccgaaatataacgctcctcgaactcgcgtcgcgcgtcgcgccccaacttcgacaaataccaaaaaacgtccaacaactacaaaaactacccaacgcgcgaaacccgcaacgcctccgccacccattacgccgacaccaacgcgcgacaaaactacgacgaaaccat

SEQ ID NO: 21603 - DNA, 708 bp, Artificial Sequence
  chemically treated genomic DNA (Homo sapiens) CpG-island No: 21603
ggaaatgaaagtaagataaattaaaaaaataaaagaaaggttaagtttagggtattgtttagggcgtagaggtcgcgttttcgacgattttttgtttttttttttcgcgttatcgtttcggggttcgggttcggtgtcgcggaatttgttagtggttcgggagtttattatttggaagcgtcgggattttaggttttttttgatgttttcgtaggttttgatgaaggcggggtcgagttgagcgcggaattcggcgggagtaggttggtttttgtcggagttgagcgggaggttttggcgtagttagtggcggaggtcgttattaagtagtgatacggcgtggtggtcgaaggcgcggaatatttattagacgcgcggggcggagtagaggttttggtcgttggcgtcgtagattacgacgtgggtggtcgcgtttacgtttaggcggtttgcgtatttcgcgaaatgttcggtttcgggtagtatgtggtcgtagggcgaggtgcggtcgttgtattggtcgatgtcgaagaaagcggcgttcgggatgtggcgtttttcgaattcgcgtcgcgcgtcgcgttttagtttcggtaggtattaggaggcgtttagtagttgtagaggttgtttagcgcgcggggttcgtagcgttttcgttatttattgcgtcgatattagcgcgcggtagagttgcggcgaagttat

SEQ ID NO: 21604 - DNA, 708 bp, Artificial Sequence
  chemically treated genomic DNA (Homo sapiens) CpG-island No: 21604
ataacttcgccgcaactctaccgcgcgctaatatcgacgcaataaataacgaaaacgctacgaaccccgcgcgctaaacaacctctacaactactaaacgcctcctaatacctaccgaaactaaaacgcgacgcgcgacgcgaattcgaaaaacgccacatcccgaacgccgctttcttcgacatcgaccaatacaacgaccgcacctcgccctacgaccacatactacccgaaaccgaacatttcgcgaaatacgcaaaccgcctaaacgtaaacgcgaccacccacgtcgtaatctacgacgccaacgaccaaaacctctactccgccccgcgcgtctaataaatattccgcgccttcgaccaccacgccgtatcactacttaataacgacctccgccactaactacgccaaaacctcccgctcaactccgacaaaaaccaacctactcccgccgaattccgcgctcaactcgaccccgccttcatcaaaacctacgaaaacatcaaaaaaaacctaaaatcccgacgcttccaaataataaactcccgaaccactaacaaattccgcgacaccgaacccgaaccccgaaacgataacgcgaaaaaaaaaaacaaaaaatcgtcgaaaacgcgacctctacgccctaaacaataccctaaacttaacctttcttttatttttttaatttatcttactttcatttcc

SEQ ID NO: 21605 - DNA, 616 bp, Artificial Sequence
  chemically treated genomic DNA (Homo sapiens) CpG-island No: 21605
gcggcgtggagggttcgcgcgtgggtggcgaggttgtataaagtttcgcggcgttcgtttcgcgttcgttcgggggagaataaagggggttgttttttggcggtcgcgggtttgggggttattatagtggcggggttcggtcgggtagggggtcgggggtacgcgtatttggggtttcgcggttttttcgcggttttgttcgtcgtcggtcgtgattaagatggttcgcgcgggggacgcggttaggtcgatgaattatcgcgcggatcgtcgagaattgtttttcggttagcgtagttaagcgacggcgttggcgatggcggcgggcggttttcggtaggtgtagggatcgggttaggtcggggtcggggtaggggcggggtcggggtcgcggtagagggcgggttatcgcgcggtttttgtgcgggcggggtcggcgcggtggcggtggcgggcgggttttaggttggtttcgttggttgttatggatatcgatcgttttcgcgcgtgcggagacgatcgttgtttcgttttcggaagtgatgtataaagttttatttttttttattttttaattcgggttgttgttaatcggggaagattgtagttgttgcgg

SEQ ID NO: 21606 - DNA, 616 bp, Artificial Sequence
  chemically treated genomic DNA (Homo sapiens) CpG-island No: 21606
ccgcaacaactacaatcttccccgattaacaacaacccgaattaaaaaataaaaaaaaataaaactttatacatcacttccgaaaacgaaacaacgatcgtctccgcacgcgcgaaaacgatcgatatccataacaaccaacgaaaccaacctaaaacccgcccgccaccgccaccgcgccgaccccgcccgcacaaaaaccgcgcgataacccgccctctaccgcgaccccgaccccgcccctaccccgaccccgacctaacccgatccctacacctaccgaaaaccgcccgccgccatcgccaacgccgtcgcttaactacgctaaccgaaaaacaattctcgacgatccgcgcgataattcatcgacctaaccgcgtcccccgcgcgaaccatcttaatcacgaccgacgacgaacaaaaccgcgaaaaaaccgcgaaaccccaaatacgcgtacccccgaccccctacccgaccgaaccccgccactataataacccccaaacccgcgaccgccaaaaaacaaccccctttattctcccccgaacgaacgcgaaacgaacgccgcgaaactttatacaacctcgccacccacgcgcgaaccctccacgccgc

SEQ ID NO: 21607 - DNA, 616 bp, Artificial Sequence
  chemically treated genomic DNA (Homo sapiens) CpG-island No: 21607
tcgtagtaattatagtttttttcgattggtagtagttcgagttggggggtgggggggggtgggattttgtgtattattttcgggggcggggtagcggtcgttttcgtacgcgcgggagcggtcggtatttatggtaattagcggggttagtttaaggttcgttcgttatcgttatcgcgtcggtttcgttcgtataaaggtcgcgcggtgattcgttttttgtcgcgatttcggtttcgtttttgtttcggtttcggtttggttcggtttttgtatttgtcggaggtcgttcgtcgttatcgttagcgtcgtcgtttggttgcgttgatcgggaagtagttttcggcggttcgcgcggtgatttatcggtttggtcgcgtttttcgcgcgggttattttggttacggtcggcggcggatagagtcgcggaggaatcgcgagattttaggtacgcgtgttttcggttttttgttcggtcgggtttcgttattgtggtggtttttaggttcgcggtcgttaaggagtagttttttttgttttttttcgggcgggcgcggggcgggcgtcgcggggttttgtgtagtttcgttatttacgcgcgggttttttacgtcgt

SEQ ID NO: 21608 - DNA, 616 bp, Artificial Sequence
  chemically treated genomic DNA (Homo sapiens) CpG-island No: 21608
acgacgtaaaaaacccgcgcgtaaataacgaaactacacaaaaccccgcgacgcccgccccgcgcccgcccgaaaaaaaacaaaaaaaactactccttaacgaccgcgaacctaaaaaccaccacaataacgaaacccgaccgaacaaaaaaccgaaaacacgcgtacctaaaatctcgcgattcctccgcgactctatccgccgccgaccgtaaccaaaataacccgcgcgaaaaacgcgaccaaaccgataaatcaccgcgcgaaccgccgaaaactacttcccgatcaacgcaaccaaacgacgacgctaacgataacgacgaacgacctccgacaaatacaaaaaccgaaccaaaccgaaaccgaaacaaaaacgaaaccgaaatcgcgacaaaaaacgaatcaccgcgcgacctttatacgaacgaaaccgacgcgataacgataacgaacgaaccttaaactaaccccgctaattaccataaataccgaccgctcccgcgcgtacgaaaacgaccgctaccccgcccccgaaaataatacacaaaatcccacccccccccaccccccaactcgaactactaccaatcgaaaaaaactataattactacga

SEQ ID NO: 21609 - DNA, 522 bp, Artificial Sequence
  chemically treated genomic DNA (Homo sapiens) CpG-island No: 21609
gtcgagcgggtcggatttgggagagtgtttagggcggtaagtttcgattacgagtttttttcggtgtggttcggggcggaattcgtttttttttatcgttgtcgtcgtcgtcgttgtttacgagagagtggggaggaaaggaaaggggtgaaggaggagtcgtcgtcgtcgtcgtcgtcgtcgcgatttcgagcggtcggtcgcgggaggagtcgttcgtcgcgtttaagaagtgaagagataaagcggcgcggcgtttttttcgcgtttcgcgtttttagtttttgttcgtttgcggagagttacgttcgtaattttcggggcggtcgagaggagcggtcgggatttttcggttttattgtcggtttttttgggtttcgcgcgggtcgttcgttgggagttgtttgggtgggttgttcgcgtattggtaggttgttttttttcgttttttttaattcgttgcgggtcgttaattcgattaaaataaaatttcgaggaaggttttttaaaaaattaaaataa

SEQ ID NO: 21610 - DNA, 522 bp, Artificial Sequence
  chemically treated genomic DNA (Homo sapiens) CpG-island No: 21610
ttattttaattttttaaaaaaccttcctcgaaattttattttaatcgaattaacgacccgcaacgaattaaaaaaaacgaaaaaaaacaacctaccaatacgcgaacaacccacccaaacaactcccaacgaacgacccgcgcgaaacccaaaaaaaccgacaataaaaccgaaaaatcccgaccgctcctctcgaccgccccgaaaattacgaacgtaactctccgcaaacgaacaaaaactaaaaacgcgaaacgcgaaaaaaacgccgcgccgctttatctcttcacttcttaaacgcgacgaacgactcctcccgcgaccgaccgctcgaaatcgcgacgacgacgacgacgacgacgactcctccttcacccctttcctttcctccccactctctcgtaaacaacgacgacgacgacaacgataaaaaaaaacgaattccgccccgaaccacaccgaaaaaaactcgtaatcgaaacttaccgccctaaacactctcccaaatccgacccgctcgac

SEQ ID NO: 21611 - DNA, 522 bp, Artificial Sequence
  chemically treated genomic DNA (Homo sapiens) CpG-island No: 21611
ttgttttgattttttaaaaagtttttttcggggttttattttgatcgagttggcggttcgtagcggattgggagaggcgggggaaagtagtttgttagtgcgcgggtagtttatttaggtaatttttagcgagcggttcgcgcggagtttagggaggtcggtagtgaagtcggggagtttcggtcgtttttttcggtcgtttcgggggttgcgagcgtggtttttcgtaggcgggtagaagttgagggcgcggggcgcggaggaagcgtcgcgtcgttttgtttttttattttttgagcgcggcgagcggtttttttcgcggtcggtcgttcgggatcgcggcggcggcggcggcgacggcggttttttttttatttttttttttttttttttattttttcgtaggtagcggcggcggcggtagcggtggggaaaagcggatttcgtttcgaattatatcgaggggagttcgtggtcgagatttgtcgttttaagtatttttttaagttcgattcgttcggt

SEQ ID NO: 21612 - DNA, 522 bp, Artificial Sequence
  chemically treated genomic DNA (Homo sapiens) CpG-island No: 21612
accgaacgaatcgaacttaaaaaaatacttaaaacgacaaatctcgaccacgaactcccctcgatataattcgaaacgaaatccgcttttccccaccgctaccgccgccgccgctacctacgaaaaaataaaaaaaaaaaaaaaaaaataaaaaaaaaaccgccgtcgccgccgccgccgccgcgatcccgaacgaccgaccgcgaaaaaaaccgctcgccgcgctcaaaaaataaaaaaacaaaacgacgcgacgcttcctccgcgccccgcgccctcaacttctacccgcctacgaaaaaccacgctcgcaacccccgaaacgaccgaaaaaaacgaccgaaactccccgacttcactaccgacctccctaaactccgcgcgaaccgctcgctaaaaattacctaaataaactacccgcgcactaacaaactactttcccccgcctctcccaatccgctacgaaccgccaactcgatcaaaataaaaccccgaaaaaaactttttaaaaaatcaaaacaa

SEQ ID NO: 21613 - DNA, 574 bp, Artificial Sequence
  chemically treated genomic DNA (Homo sapiens) CpG-island No: 21613
aagtcggcgggtagaggaaaacgtttgtagtcggcgagtgaagacgaattatcgattgtcgtgttttttttttttttggaggttggagttttttgggcgtttttatacggttagacgtttcggttggttcgcgacgtagtttttcggtcgtggatgtttattcgggttcgggattcgtttaggtagcggtttcggatttaggttttgcgtttaggtttttttttgttttttagcgacggagtcggggtcgggggcggcggcgttcgggggttatgcgggtgagtcgcggttgtagaggtttgagcgtttgatcgtcgcggattcgagtcgagtttatttttttttttagttttttattttggtcgcgggggcggcgcgttcgatttacgcgttcggggtttcgcggggtcgggttcggagtcggtatgaatcgttgttgggcgttttttttgtttttttgttgttatttgcgtttggttagcgtcgaggtgagttgttacggcggttggggttggttttttatttattattttcgttttttttttttgatcgtttttttttttttttgtagtga

SEQ ID NO: 21614 - DNA, 574 bp, Artificial Sequence
  chemically treated genomic DNA (Homo sapiens) CpG-island No: 21614
tcactacaaaaaaaaaaaaaaacgatcaaaaaaaaaaaacgaaaataataaataaaaaaccaaccccaaccgccgtaacaactcacctcgacgctaaccaaacgcaaataacaacaaaaaaacaaaaaaaacgcccaacaacgattcataccgactccgaacccgaccccgcgaaaccccgaacgcgtaaatcgaacgcgccgcccccgcgaccaaaataaaaaactaaaaaaaaaaataaactcgactcgaatccgcgacgatcaaacgctcaaacctctacaaccgcgactcacccgcataacccccgaacgccgccgcccccgaccccgactccgtcgctaaaaaacaaaaaaaaacctaaacgcaaaacctaaatccgaaaccgctacctaaacgaatcccgaacccgaataaacatccacgaccgaaaaactacgtcgcgaaccaaccgaaacgtctaaccgtataaaaacgcccaaaaaactccaacctccaaaaaaaaaaaaaacacgacaatcgataattcgtcttcactcgccgactacaaacgttttcctctacccgccgactt

SEQ ID NO: 21615 - DNA, 574 bp, Artificial Sequence
  chemically treated genomic DNA (Homo sapiens) CpG-island No: 21615
ttattgtagggagaggagggggcggttagaaggggggggcgaaggtaatgaatgaagaattagttttagtcgtcgtggtaatttatttcggcgttgattagacgtaggtagtagtagagagataggaagagcgtttagtagcgatttatgtcgatttcgggttcggtttcgcggggtttcggacgcgtagatcgagcgcgtcgttttcgcggttagggtggggggttggggaggggggtgggttcggttcgggttcgcggcgattaggcgtttaggtttttgtagtcgcggtttattcgtatggttttcgggcgtcgtcgttttcggtttcggtttcgtcgttggggggtaggggaggatttgggcgtaggatttgggttcgaggtcgttatttgggcggatttcgagttcgagtgagtatttacggtcggggggttgcgtcgcgaattagtcgaggcgtttagtcgtgtgggggcgtttaggggattttaatttttaagaggaaaaggaatacggtagtcgatggttcgtttttattcgtcggttataggcgtttttttttgttcgtcggttt

SEQ ID NO: 21616 - DNA, 574 bp, Artificial Sequence
  chemically treated genomic DNA (Homo sapiens) CpG-island No: 21616
aaaccgacgaacaaaaaaaaacgcctataaccgacgaataaaaacgaaccatcgactaccgtattccttttcctcttaaaaattaaaatcccctaaacgcccccacacgactaaacgcctcgactaattcgcgacgcaaccccccgaccgtaaatactcactcgaactcgaaatccgcccaaataacgacctcgaacccaaatcctacgcccaaatcctcccctaccccccaacgacgaaaccgaaaccgaaaacgacgacgcccgaaaaccatacgaataaaccgcgactacaaaaacctaaacgcctaatcgccgcgaacccgaaccgaacccacccccctccccaaccccccaccctaaccgcgaaaacgacgcgctcgatctacgcgtccgaaaccccgcgaaaccgaacccgaaatcgacataaatcgctactaaacgctcttcctatctctctactactacctacgtctaatcaacgccgaaataaattaccacgacgactaaaactaattcttcattcattaccttcgccccccccttctaaccgccccctcctctccctacaataa

SEQ ID NO: 21617 - DNA, 526 bp, Artificial Sequence
  chemically treated genomic DNA (Homo sapiens) CpG-island No: 21617
gggtaggacgacgcgcgcggtggaggggaggagagggtagtcgggagcgcggcgtgattgggtatcgttttattttcgttcggttgcggtcgggagttcgtatttcgttcgtatttcgtcggttttcggggagggtcggtttttgcggtttttagttaggcgtaggaaggaggtagcggcggcgaaggggttaaggcggagggttcggaggtcgcggttcggttttgggttgtcgttagcgtaggttgttttgattacggaggagtcgtcgtcgtttttttttgttttcggggtttttcgagggtcgtaggtcgttcgttcgggggtttcgttttttcgcggtcgtttttcgcggttcgtattcgggagggaggacgcggggttcggtcgggtcgtttttaggtttttttcgacgtttttttttcgtttttttcgtagtttttcgggtcgcggttagttgttggggagggggtggtcggtcggttttagttgtcgtttcgtttcgtcgtgggatttgggggttggg

SEQ ID NO: 21618 - DNA, 526 bp, Artificial Sequence
  chemically treated genomic DNA (Homo sapiens) CpG-island No: 21618
cccaacccccaaatcccacgacgaaacgaaacgacaactaaaaccgaccgaccaccccctccccaacaactaaccgcgacccgaaaaactacgaaaaaaacgaaaaaaaaacgtcgaaaaaaacctaaaaacgacccgaccgaaccccgcgtcctccctcccgaatacgaaccgcgaaaaacgaccgcgaaaaaacgaaacccccgaacgaacgacctacgaccctcgaaaaaccccgaaaacaaaaaaaaacgacgacgactcctccgtaatcaaaacaacctacgctaacgacaacccaaaaccgaaccgcgacctccgaaccctccgccttaaccccttcgccgccgctacctccttcctacgcctaactaaaaaccgcaaaaaccgaccctccccgaaaaccgacgaaatacgaacgaaatacgaactcccgaccgcaaccgaacgaaaataaaacgatacccaatcacgccgcgctcccgactaccctctcctcccctccaccgcgcgcgtcgtcctaccc

SEQ ID NO: 21619 - DNA, 526 bp, Artificial Sequence
  chemically treated genomic DNA (Homo sapiens) CpG-island No: 21619
tttagtttttaggttttacggcgaggcgaggcggtagttggggtcggtcggttattttttttttaatagttggtcgcggttcggggggttgcgggagaggcggagagggggcgtcgggaggggtttgaaggcggttcggtcgagtttcgcgttttttttttcgggtgcgggtcgcggggggcggtcgcggaagggcggggttttcgggcgggcggtttgcggttttcgaggagtttcgagaataaaaggagacggcgacggttttttcgtggttaaaataatttgcgttggcggtagtttaaggtcgggtcgcggttttcgagtttttcgttttaattttttcgtcgtcgttgttttttttttgcgtttggttggaggtcgtaggggtcgatttttttcgggagtcggcgaggtgcgggcgaggtgcggattttcggtcgtagtcgggcggaggtgggacggtatttagttacgtcgcgttttcggttgttttttttttttttttatcgcgcgcgtcgttttgttt

SEQ ID NO: 21620 - DNA, 526 bp, Artificial Sequence
  chemically treated genomic DNA (Homo sapiens) CpG-island No: 21620
aaacaaaacgacgcgcgcgataaaaaaaaaaaaaaaacaaccgaaaacgcgacgtaactaaataccgtcccacctccgcccgactacgaccgaaaatccgcacctcgcccgcacctcgccgactcccgaaaaaaatcgacccctacgacctccaaccaaacgcaaaaaaaaaacaacgacgacgaaaaaattaaaacgaaaaactcgaaaaccgcgacccgaccttaaactaccgccaacgcaaattattttaaccacgaaaaaaccgtcgccgtctccttttattctcgaaactcctcgaaaaccgcaaaccgcccgcccgaaaaccccgcccttccgcgaccgccccccgcgacccgcacccgaaaaaaaaaacgcgaaactcgaccgaaccgccttcaaacccctcccgacgccccctctccgcctctcccgcaaccccccgaaccgcgaccaactattaaaaaaaaaataaccgaccgaccccaactaccgcctcgcctcgccgtaaaacctaaaaactaaa

SEQ ID NO: 21621 - DNA, 943 bp, Artificial Sequence
  chemically treated genomic DNA (Homo sapiens) CpG-island No: 21621
gtgcgggcgtcgaaaggaggaagagagcgttgaaaggagatttcggaattcgggtgtagagtagaagaaagtagggatttagagacgttgtacggagagcgcggttttttagggttttttagtgcggagattgagtacgatgtttcgttttagcggtttcgtttcggtcgttcggtcgtttttttcgtacgttttgttaattattacgtaggttattttgcggatagatagacggttagttcggggtcggagcggaaagtttttttgtggtcgttatagcgcggcgaacgtgcgttattgggcgtttagtatttgtttagtcggggtgtaaacgttcgggcgttagggtgcgcgttaggttttcggtttgggttagtcgcgttttttagtttttcgttcgtttaggttcgggtttcgttcgattatcggcgcgtatttatttggacggttttagtttggcgtcgcgtttgtcgtttattacggagggtatatagttggtgagttcggtttagtcggcgtgtaattcgtagttttagttcgtggagaatttggagaagagttaggtttttcgtttattcggtcggtggtaagtgtattttttttgatttacgcggtattcgtacggttgttttagttggatgttacgtattaagtggcggtcgaaagtggtgttttcggttttttggatgtgtaggaatacgattaggttatcgtttttgatgtcgaagtttattttgcgtaggaggtcgtcgcgggtgaaattgtagcggggtacgaatttggcggagtttttatttttcgagcggtacgggttcggtatcggggagttgaacgtttgtaggcggaggagttggtattttgtgtcggggtatacgtattggaggacgattacggtaaataggaagagtattattaaagttagtagtagtttgttggatttttt

SEQ ID NO: 21622 - DNA, 943 bp, Artificial Sequence
  chemically treated genomic DNA (Homo sapiens) CpG-island No: 21622
aaaaaatccaacaaactactactaactttaataatactcttcctatttaccgtaatcgtcctccaatacgtataccccgacacaaaataccaactcctccgcctacaaacgttcaactccccgataccgaacccgtaccgctcgaaaaataaaaactccgccaaattcgtaccccgctacaatttcacccgcgacgacctcctacgcaaaataaacttcgacatcaaaaacgataacctaatcgtattcctacacatccaaaaaaccgaaaacaccactttcgaccgccacttaatacgtaacatccaactaaaacaaccgtacgaataccgcgtaaatcaaaaaaaatacacttaccaccgaccgaataaacgaaaaacctaactcttctccaaattctccacgaactaaaactacgaattacacgccgactaaaccgaactcaccaactatataccctccgtaataaacgacaaacgcgacgccaaactaaaaccgtccaaataaatacgcgccgataatcgaacgaaacccgaacctaaacgaacgaaaaactaaaaaacgcgactaacccaaaccgaaaacctaacgcgcaccctaacgcccgaacgtttacaccccgactaaacaaatactaaacgcccaataacgcacgttcgccgcgctataacgaccacaaaaaaactttccgctccgaccccgaactaaccgtctatctatccgcaaaataacctacgtaataattaacaaaacgtacgaaaaaaacgaccgaacgaccgaaacgaaaccgctaaaacgaaacatcgtactcaatctccgcactaaaaaaccctaaaaaaccgcgctctccgtacaacgtctctaaatccctactttcttctactctacacccgaattccgaaatctcctttcaacgctctcttcctcctttcgacgcccgcac

SEQ ID NO: 21623 - DNA, 943 bp, Artificial Sequence
  chemically treated genomic DNA (Homo sapiens) CpG-island No: 21623
gagaaatttaataagttgttgttagttttggtgatgttttttttatttgtcgtgatcgttttttaatacgtgtgtttcggtatagaatgttagttttttcgtttgtaggcgtttagtttttcggtgtcggattcgtatcgttcggaggatgagagtttcgttaggttcgtgtttcgttataattttattcgcggcgattttttgcgtaaggtagatttcgatattaagggcgatgatttgatcgtgtttttgtatatttagaagatcgggggtattattttcggtcgttatttggtgcgtaatatttagttggagtagtcgtgcgagtgtcgcgtgggttagaagaaatgtatttgttatcggtcgggtaagcgggaaatttggtttttttttaggttttttacgggttggagttgcgggttgtacgtcgattggatcgagtttattagttgtgtgtttttcgtggtggacggtaagcgcgacgttaggttgagatcgtttaggtgagtgcgcgtcggtagtcgagcgggattcgggtttaggcgggcggagggttgggaggcgcggttggtttaagtcggggatttagcgcgtattttgacgttcgggcgtttgtatttcggttgggtaggtgttgggcgtttagtagcgtacgttcgtcgcgttgtggcggttatagaaaggtttttcgtttcggtttcggattgatcgtttgtttgttcgtagggtggtttgcgtgatggttggtagagcgtgcgggggaggcggtcgagcggtcggaacggggtcgttgggacggggtatcgtatttagttttcgtattggagagttttaaagagtcgcgtttttcgtgtagcgtttttggatttttgtttttttttattttgtattcgggtttcgaagtttttttttagcgtttttttttttttttcggcgttcgtat

SEQ ID NO: 21624 - DNA, 943 bp, Artificial Sequence
  chemically treated genomic DNA (Homo sapiens) CpG-island No: 21624
atacgaacgccgaaaaaaaaaaaaaaacgctaaaaaaaaacttcgaaacccgaatacaaaataaaaaaaaacaaaaatccaaaaacgctacacgaaaaacgcgactctttaaaactctccaatacgaaaactaaatacgataccccgtcccaacgaccccgttccgaccgctcgaccgcctcccccgcacgctctaccaaccatcacgcaaaccaccctacgaacaaacaaacgatcaatccgaaaccgaaacgaaaaacctttctataaccgccacaacgcgacgaacgtacgctactaaacgcccaacacctacccaaccgaaatacaaacgcccgaacgtcaaaatacgcgctaaatccccgacttaaaccaaccgcgcctcccaaccctccgcccgcctaaacccgaatcccgctcgactaccgacgcgcactcacctaaacgatctcaacctaacgtcgcgcttaccgtccaccacgaaaaacacacaactaataaactcgatccaatcgacgtacaacccgcaactccaacccgtaaaaaacctaaaaaaaaaccaaatttcccgcttacccgaccgataacaaatacatttcttctaacccacgcgacactcgcacgactactccaactaaatattacgcaccaaataacgaccgaaaataatacccccgatcttctaaatatacaaaaacacgatcaaatcatcgcccttaatatcgaaatctaccttacgcaaaaaatcgccgcgaataaaattataacgaaacacgaacctaacgaaactctcatcctccgaacgatacgaatccgacaccgaaaaactaaacgcctacaaacgaaaaaactaacattctataccgaaacacacgtattaaaaaacgatcacgacaaataaaaaaaacatcaccaaaactaacaacaacttattaaatttctc

SEQ ID NO: 21625 - DNA, 982 bp, Artificial Sequence
  chemically treated genomic DNA (Homo sapiens) CpG-island No: 21625
ttcgcgtgtttcgttttattttcggtggttttcgtttttatttttatttcgtttcgttcgtcggatttttcgggtttttttgtttttattttttttggagcgtatatttttgttcgggttttttttcgtatgtttcgaaattttttttttgtcggcgttcgcgttcgtttggttattcggtatgcggtttttaaggaagttcggaattcggggtttatattattttggggatatagtcggcggtatttaatttgttatcggagaatttgttttgtcggttgtcgcggaatatttataacggattcgcggcgttggtaaattgcgtcgtattttttcggaaattttagttcgggttattaatggtagttgaaatttacgtttttttttatttcgcgggtgtttttttttttcgtaatagtattttgcgtttgtttggaggcgcgattcggtttttatttagaacgtatttggttatggggtcgaaattttttggagaagatcgtacggagtacgtggtttagcgagtggtttagggcggttaggtttcgagtgagtagggttcggtagagggagtttagttttagcgtcgtttgagaacgtgtattcgtttgcggcgttttcgggatagtagcgcgaaaagcggggcgtacgcggttttcgttagggaagaagacgtttttcggggtttgtttaggagcggtcgggtgtggaattcgtgagatatatttttaggagggttcgcgcgaattgaggcggcgatcgattcgggtcggttcgttgttaattcggtttttattttggaatgtcggcggggataggtggtgcggacgggcgtttttcgtttcggttgtcgcggcggttcgaattttcggattgtatacgtaggtagtgttatttttttttttaggtaatttagggtattaaggattacgagcgagtttgaatttatataataatgttttacgtttaagagttcgagtta

SEQ ID NO: 21626 - DNA, 982 bp, Artificial Sequence
  chemically treated genomic DNA (Homo sapiens) CpG-island No: 21626
taactcgaactcttaaacgtaaaacattattatataaattcaaactcgctcgtaatccttaataccctaaattacctaaaaaaaaaaataacactacctacgtatacaatccgaaaattcgaaccgccgcgacaaccgaaacgaaaaacgcccgtccgcaccacctatccccgccgacattccaaaataaaaaccgaattaacaacgaaccgacccgaatcgatcgccgcctcaattcgcgcgaaccctcctaaaaatatatctcacgaattccacacccgaccgctcctaaacaaaccccgaaaaacgtcttcttccctaacgaaaaccgcgtacgccccgcttttcgcgctactatcccgaaaacgccgcaaacgaatacacgttctcaaacgacgctaaaactaaactccctctaccgaaccctactcactcgaaacctaaccgccctaaaccactcgctaaaccacgtactccgtacgatcttctccaaaaaatttcgaccccataaccaaatacgttctaaataaaaaccgaatcgcgcctccaaacaaacgcaaaatactattacgaaaaaaaaaaacacccgcgaaataaaaaaaaacgtaaatttcaactaccattaataacccgaactaaaatttccgaaaaaatacgacgcaatttaccaacgccgcgaatccgttataaatattccgcgacaaccgacaaaacaaattctccgataacaaattaaataccgccgactatatccccaaaataatataaaccccgaattccgaacttccttaaaaaccgcataccgaataaccaaacgaacgcgaacgccgacaaaaaaaaaatttcgaaacatacgaaaaaaaacccgaacaaaaatatacgctccaaaaaaaataaaaacaaaaaaacccgaaaaatccgacgaacgaaacgaaataaaaataaaaacgaaaaccaccgaaaataaaacgaaacacgcgaa

SEQ ID NO: 21627 - DNA, 982 bp, Artificial Sequence
  chemically treated genomic DNA (Homo sapiens) CpG-island No: 21627
tggttcgagtttttaggcgtgaggtattattatataaatttaagttcgttcgtgatttttagtattttgagttgtttgaaggggggaatggtattgtttgcgtgtgtagttcgggagttcgagtcgtcgcggtaatcggagcgaggagcgttcgttcgtattatttgttttcgtcggtattttagagtagaggtcgaattggtagcgagtcggttcgggtcggtcgtcgttttagttcgcgcgggtttttttaggggtgtgttttacggattttatattcggtcgtttttggataagtttcgaaaggcgtttttttttttggcgggagtcgcgtgcgtttcgtttttcgcgttgttgtttcgggggcgtcgtaggcggatgtacgtttttaggcgacgttgggattgggttttttttgtcgggttttgtttattcggggtttggtcgttttgggttattcgttgaattacgtgtttcgtgcgattttttttaaagaatttcggttttatggttaggtacgttttaggtgaaaatcgggtcgcgtttttaggtaggcgtaaggtgttgttacggggagggaaggtattcgcggggtagagaagggcgtaagttttagttgttattggtggttcgggttagggttttcggaagggtgcggcgtaatttgttaacgtcgcggattcgttgtaaatgtttcgcggtaatcggtagggtaggtttttcgatagtaagttgggtgtcgtcggttatatttttagggtaatatgagtttcgggtttcgagtttttttggaggtcgtatatcggatgattaagcgggcgcgggcgtcggtaaaaggagggtttcggggtatgcggggagaaattcggatagaggtgtgcgttttaaagaggataggggtagaagagttcggagagttcggcggacgaagcgggatggggatgggagcgggagttatcgagagtggagcgagatacgcggg

SEQ ID NO: 21628 - DNA, 982 bp, Artificial Sequence
  chemically treated genomic DNA (Homo sapiens) CpG-island No: 21628
cccgcgtatctcgctccactctcgataactcccgctcccatccccatcccgcttcgtccgccgaactctccgaactcttctacccctatcctctttaaaacgcacacctctatccgaatttctccccgcataccccgaaaccctccttttaccgacgcccgcgcccgcttaatcatccgatatacgacctccaaaaaaactcgaaacccgaaactcatattaccctaaaaatataaccgacgacacccaacttactatcgaaaaacctaccctaccgattaccgcgaaacatttacaacgaatccgcgacgttaacaaattacgccgcacccttccgaaaaccctaacccgaaccaccaataacaactaaaacttacgcccttctctaccccgcgaataccttccctccccgtaacaacaccttacgcctacctaaaaacgcgacccgattttcacctaaaacgtacctaaccataaaaccgaaattctttaaaaaaaatcgcacgaaacacgtaattcaacgaataacccaaaacgaccaaaccccgaataaacaaaacccgacaaaaaaaacccaatcccaacgtcgcctaaaaacgtacatccgcctacgacgcccccgaaacaacaacgcgaaaaacgaaacgcacgcgactcccgccaaaaaaaaaaacgcctttcgaaacttatccaaaaacgaccgaatataaaatccgtaaaacacacccctaaaaaaacccgcgcgaactaaaacgacgaccgacccgaaccgactcgctaccaattcgacctctactctaaaataccgacgaaaacaaataatacgaacgaacgctcctcgctccgattaccgcgacgactcgaactcccgaactacacacgcaaacaataccattccccccttcaaacaactcaaaatactaaaaatcacgaacgaacttaaatttatataataatacctcacgcctaaaaactcgaacca

SEQ ID NO: 21629 - DNA, 912 bp, Artificial Sequence
  chemically treated genomic DNA (Homo sapiens) CpG-island No: 21629
ggacgttttgaggttgtatttacgtggtaatggtgtttgtcgcgttgtcgtttggattcggtattattagcggagtcgagtagagtttagggttttaacgcgtagggaaaaggttgcgtcgttttcggggtggttttacgttttttttttgagtttgagcggcggcgcgggacggggacggttttggtcgggattagtaggtttcgggtattcgggacgtcggggtcgcgttttaggttaggggcgggggcgggatcggggcgggggtcggcggcggggtcgcgttttcggttttttttcggggcgatcgggcggttttatacgcgttgcgttcgtcgtcggttttacgcgcggtttatgtttttcgcgtcgcgttcgtttatttcgcggtttcgtaggatgaagaaggacgagtcgtttttgggtaagttgggcggtattttggttaggaagcggagggcgcgcgagggtgagtgcgcgttcgcgttcgtcgattttcggggatttgttcggcggtgttcgttttcggttttagagttttacgaggtcgttttcgtttttttttacgtatttcgttcggtttacgcggttgcgcgattttcgggataggttaggtttttgatttaggattcgtaaataacggtcgggatttggcgcgtggggtcgcggtggttttcggagtttgttaaacgcgcgtgcgggcgtttgcgcggcggggatttcgggttatcgtgcggggttcgcgtttgttttgtttgtcgggtgtttagtttttttttgggttagcggtatagttagtcgcgcggggtgatcgtttattttatgagtagtgacgtttacgtgtgtagggtattttgggtagatacggtttgggggatttattattgggtgttgcgcgggcgttttgtaggg

SEQ ID NO: 21630 - DNA, 912 bp, Artificial Sequence
  chemically treated genomic DNA (Homo sapiens) CpG-island No: 21630
ccctacaaaacgcccgcgcaacacccaataataaatcccccaaaccgtatctacccaaaataccctacacacgtaaacgtcactactcataaaataaacgatcaccccgcgcgactaactataccgctaacccaaaaaaaaactaaacacccgacaaacaaaacaaacgcgaaccccgcacgataacccgaaatccccgccgcgcaaacgcccgcacgcgcgtttaacaaactccgaaaaccaccgcgaccccacgcgccaaatcccgaccgttatttacgaatcctaaatcaaaaacctaacctatcccgaaaatcgcgcaaccgcgtaaaccgaacgaaatacgtaaaaaaaaacgaaaacgacctcgtaaaactctaaaaccgaaaacgaacaccgccgaacaaatccccgaaaatcgacgaacgcgaacgcgcactcaccctcgcgcgccctccgcttcctaaccaaaataccgcccaacttacccaaaaacgactcgtccttcttcatcctacgaaaccgcgaaataaacgaacgcgacgcgaaaaacataaaccgcgcgtaaaaccgacgacgaacgcaacgcgtataaaaccgcccgatcgccccgaaaaaaaaccgaaaacgcgaccccgccgccgacccccgccccgatcccgcccccgcccctaacctaaaacgcgaccccgacgtcccgaatacccgaaacctactaatcccgaccaaaaccgtccccgtcccgcgccgccgctcaaactcaaaaaaaaaacgtaaaaccaccccgaaaacgacgcaaccttttccctacgcgttaaaaccctaaactctactcgactccgctaataataccgaatccaaacgacaacgcgacaaacaccattaccacgtaaatacaacctcaaaacgtcc

SEQ ID NO: 21631 - DNA, 912 bp, Artificial Sequence
  chemically treated genomic DNA (Homo sapiens) CpG-island No: 21631
ttttgtagggcgttcgcgtaatatttagtagtgggttttttaggtcgtgtttgtttagagtgttttgtatacgtgagcgttattgtttatggaatgaacggttatttcgcgcggttggttatgtcgttggtttagggaagagttgaatattcggtaggtagagtaggcgcgggtttcgtacggtggttcgaggttttcgtcgcgtaggcgttcgtacgcgcgtttggtagatttcggaggttatcgcggttttacgcgttaggtttcggtcgttgtttacgggttttgggttaaaggtttggtttgtttcgaaggtcgcgtagtcgcgtgggtcgggcggggtgcgtgggggagggcgggggcggtttcgtggggttttagggtcgagggcgggtatcgtcgggtaggttttcgggggtcggcgggcgcgggcgcgtatttattttcgcgcgtttttcgttttttggttagggtgtcgtttagtttgtttaggaacgattcgtttttttttattttgcggggtcgcggggtgggcgagcgcggcgcggaggatatgggtcgcgcgtggggtcggcggcgggcgtagcgcgtgtggagtcgttcggtcgtttcggggagaggtcgagggcgcggtttcgtcgtcggttttcgtttcggtttcgttttcgtttttggtttggagcgcggtttcggcgtttcggatgttcgaggtttgttggtttcggttagagtcgttttcgtttcgcgtcgtcgtttaagtttagagaaggggcgtggggttatttcgggagcggcgtagttttttttttacgcgttggagttttgggttttgttcggtttcgttagtggtgtcggatttaggcgatagcgcgatagatattattgttacgtgggtgtagttttaggacgttt

SEQ ID NO: 21632 - DNA, 912 bp, Artificial Sequence
  chemically treated genomic DNA (Homo sapiens) CpG-island No: 21632
aaacgtcctaaaactacacccacgtaacaataatatctatcgcgctatcgcctaaatccgacaccactaacgaaaccgaacaaaacccaaaactccaacgcgtaaaaaaaaaactacgccgctcccgaaataaccccacgccccttctctaaacttaaacgacgacgcgaaacgaaaacgactctaaccgaaaccaacaaacctcgaacatccgaaacgccgaaaccgcgctccaaaccaaaaacgaaaacgaaaccgaaacgaaaaccgacgacgaaaccgcgccctcgacctctccccgaaacgaccgaacgactccacacgcgctacgcccgccgccgaccccacgcgcgacccatatcctccgcgccgcgctcgcccaccccgcgaccccgcaaaataaaaaaaaacgaatcgttcctaaacaaactaaacgacaccctaaccaaaaaacgaaaaacgcgcgaaaataaatacgcgcccgcgcccgccgacccccgaaaacctacccgacgatacccgccctcgaccctaaaaccccacgaaaccgcccccgccctcccccacgcaccccgcccgacccacgcgactacgcgaccttcgaaacaaaccaaacctttaacccaaaacccgtaaacaacgaccgaaacctaacgcgtaaaaccgcgataacctccgaaatctaccaaacgcgcgtacgaacgcctacgcgacgaaaacctcgaaccaccgtacgaaacccgcgcctactctacctaccgaatattcaactcttccctaaaccaacgacataaccaaccgcgcgaaataaccgttcattccataaacaataacgctcacgtatacaaaacactctaaacaaacacgacctaaaaaacccactactaaatattacgcgaacgccctacaaaa

SEQ ID NO: 21633 - DNA, 611 bp, Artificial Sequence
  chemically treated genomic DNA (Homo sapiens) CpG-island No: 21633
gtcgggcggatttaagatcgcggttacgtttagtaggacgcggattgagggagtcggggttgcgtcgttattttcgtgacgttattatgtcggttagtgataaatatttttttttcgtcgttttaggagtcgtcggtattgcgcgagtgggagggttgggtttttcgtgtattttttaaattttcgcgaggtttcgggcggtttttttttcgagggcggtacgagggttgggcggtggggtgcgggtgttcgggtgaggggcggagttgggggtatggcgttcggagcggttcgttggttagtattggtattcgttaggttcggggtttttcggagcgggtttagtttgaggaaagatggcgatgttttcgtcgtatggagcggtttaggtcggagtttggtatcgtcgaggttagttatcgttattcgtagcggcgttattttgtttaaatcggtgaaagtgagtgtttttttggagacggggcgaaggggttgaggttaattattgtggggagtgcgtgagggcggcgttgattgataggagttaaggttaattataacgattatcgtagattggaaggcggattaagaatacgttaatgagttgttaa

SEQ ID NO: 21634 - DNA, 611 bp, Artificial Sequence
  chemically treated genomic DNA (Homo sapiens) CpG-island No: 21634
ttaacaactcattaacgtattcttaatccgccttccaatctacgataatcgttataattaaccttaactcctatcaatcaacgccgccctcacgcactccccacaataattaacctcaaccccttcgccccgtctccaaaaaaacactcactttcaccgatttaaacaaaataacgccgctacgaataacgataactaacctcgacgataccaaactccgacctaaaccgctccatacgacgaaaacatcgccatctttcctcaaactaaacccgctccgaaaaaccccgaacctaacgaataccaatactaaccaacgaaccgctccgaacgccatacccccaactccgcccctcacccgaacacccgcaccccaccgcccaaccctcgtaccgccctcgaaaaaaaaaccgcccgaaacctcgcgaaaatttaaaaaatacacgaaaaacccaaccctcccactcgcgcaataccgacgactcctaaaacgacgaaaaaaaaatatttatcactaaccgacataataacgtcacgaaaataacgacgcaaccccgactccctcaatccgcgtcctactaaacgtaaccgcgatcttaaatccgcccgac

SEQ ID NO: 21635 - DNA, 611 bp, Artificial Sequence
  chemically treated genomic DNA (Homo sapiens) CpG-island No: 21635
ttagtaatttattagcgtatttttggttcgttttttagtttacggtaatcgttatgattggttttggtttttattaattagcgtcgtttttacgtattttttataatgattggttttagttttttcgtttcgtttttaggaggatatttatttttatcggtttgggtaaaatggcgtcgttgcgggtaacgatgattgatttcgacggtattaggtttcggtttgagtcgttttatgcggcggagatatcgttatttttttttaagttaggttcgtttcggagagtttcggatttgacgggtgttaatattagttagcgagtcgtttcggacgttatgtttttagtttcgttttttattcgggtattcgtattttatcgtttagttttcgtgtcgttttcgggaagaaagtcgttcgaagtttcgcgagagtttgaggagtatacgagaagtttagtttttttattcgcgtagtgtcggcggtttttggggcggcgggagggaggtgtttgttattggtcggtatggtggcgttacgagagtggcggcgtagtttcggtttttttagttcgcgttttgttgggcgtggtcgcggttttgggttcgttcggt

SEQ ID NO: 21636 - DNA, 611 bp, Artificial Sequence
  chemically treated genomic DNA (Homo sapiens) CpG-island No: 21636
accgaacgaacccaaaaccgcgaccacgcccaacaaaacgcgaactaaaaaaaccgaaactacgccgccactctcgtaacgccaccataccgaccaataacaaacacctccctcccgccgccccaaaaaccgccgacactacgcgaataaaaaaactaaacttctcgtatactcctcaaactctcgcgaaacttcgaacgactttcttcccgaaaacgacacgaaaactaaacgataaaatacgaatacccgaataaaaaacgaaactaaaaacataacgtccgaaacgactcgctaactaatattaacacccgtcaaatccgaaactctccgaaacgaacctaacttaaaaaaaaataacgatatctccgccgcataaaacgactcaaaccgaaacctaataccgtcgaaatcaatcatcgttacccgcaacgacgccattttacccaaaccgataaaaataaatatcctcctaaaaacgaaacgaaaaaactaaaaccaatcattataaaaaatacgtaaaaacgacgctaattaataaaaaccaaaaccaatcataacgattaccgtaaactaaaaaacgaaccaaaaatacgctaataaattactaa

SEQ ID NO: 21637 - DNA, 1007 bp, Artificial Sequence
  chemically treated genomic DNA (Homo sapiens) CpG-island No: 21637
cgttggatttttcgcgttcgcgggtttgttttttttgacggatgagcgagttggcgatagtcgtcgttatggttacgacgtttattattatcgttttttttgttgtttttttttgggttcgtttttttttttttttttttcgttgtttgttcgttgtttcgcgatttcgtcgttttggtttttttagtttgcgtttgttcgggttttttcgtattcgggttttagttaaggagggggtttagtatgtcgttcgagttttttcggcggcggttcggttttcgcgcgggttgttggttgtttgggtcggagtcgacgttatagtttcgggttcgggatcgcgggcgagattggtacgcggatgttgaattgcgcgattgcgtgtggtcggtttttgcgttcggcggatatcgtgtatgtttagttgtttcggttcgaatttcgtcggattttttcgttttgttgtttttttgatgggggttagaggagggaggcgggcggagggagtgagcgcgggcgggagagaggtcgggagttcgggcggtcggacggaggagggacgaggtagcgcgcgggggagcgcgttttcgttttggttttttcgagttttcgattagtttttgtaattttttggcgtgataatcgggaaaagttggttcgtgttaggttttcgatagggattaaataggtaatggtttcgtattttcgttgttgttgttgttttgggcgcggtatagtcgtagtataggaatttagtcgtcgtaggtatttttcggaatagcgcgatagtttttttgtagttttttttcgcgacggtttttttttttcggggttgagttcgtaggttcggagtcgtaggtcgttttttttatttttatttttatttttatttttttaagttttcggtcgttcgtttcggttaatatttgtaggggttttcgtattgttttagtcgtttaaattttttttttttttttttttcgaaaggagtttcgggaggaaatagtgat

SEQ ID NO: 21638 - DNA, 1007 bp, Artificial Sequence
  chemically treated genomic DNA (Homo sapiens) CpG-island No: 21638
atcactatttcctcccgaaactcctttcgaaaaaaaaaaaaaaaaaaaatttaaacgactaaaacaatacgaaaacccctacaaatattaaccgaaacgaacgaccgaaaacttaaaaaaataaaaataaaaataaaaataaaaaaaacgacctacgactccgaacctacgaactcaaccccgaaaaaaaaaaaccgtcgcgaaaaaaaactacaaaaaaactatcgcgctattccgaaaaatacctacgacgactaaattcctatactacgactataccgcgcccaaaacaacaacaacaacgaaaatacgaaaccattacctatttaatccctatcgaaaacctaacacgaaccaacttttcccgattatcacgccaaaaaattacaaaaactaatcgaaaactcgaaaaaaccaaaacgaaaacgcgctcccccgcgcgctacctcgtccctcctccgtccgaccgcccgaactcccgacctctctcccgcccgcgctcactccctccgcccgcctccctcctctaacccccatcaaaaaaacaacaaaacgaaaaaatccgacgaaattcgaaccgaaacaactaaacatacacgatatccgccgaacgcaaaaaccgaccacacgcaatcgcgcaattcaacatccgcgtaccaatctcgcccgcgatcccgaacccgaaactataacgtcgactccgacccaaacaaccaacaacccgcgcgaaaaccgaaccgccgccgaaaaaactcgaacgacatactaaaccccctccttaactaaaacccgaatacgaaaaaacccgaacaaacgcaaactaaaaaaaccaaaacgacgaaatcgcgaaacaacgaacaaacaacgaaaaaaaaaaaaaaaaaaacgaacccaaaaaaaaacaacaaaaaaaacgataataataaacgtcgtaaccataacgacgactatcgccaactcgctcatccgtcaaaaaaaacaaacccgcgaacgcgaaaaatccaacg

SEQ ID NO: 21639 - DNA, 1007 bp, Artificial Sequence
  chemically treated genomic DNA (Homo sapiens) CpG-island No: 21639
attattgttttttttcgaagtttttttcgggaaaaggaggggagaaggatttggacgattggggtagtgcggaagtttttataggtgttagtcggaacgggcggtcggggatttgggggggtgggggtgggggtgggggtgggaggggcggtttgcggtttcgagtttacgggtttagtttcgggagggaggggtcgtcgcgggagggggttgtaaggaggttgtcgcgttgtttcggagggtgtttgcggcggttgaatttttgtgttgcgattgtgtcgcgtttagagtagtagtaatagcgaagatgcgaggttattatttgtttgatttttgtcggaaatttggtacgggttaatttttttcgattattacgttaagaagttgtaaggattagtcgaagattcggaggggttagggcgagggcgcgttttttcgcgcgttgtttcgtttttttttcgttcggtcgttcgagttttcggtttttttttcgttcgcgtttatttttttcgttcgttttttttttttggtttttattagaagggtaatagggcgagggggttcggcgaaattcggatcggagtagttggatatgtacggtgttcgtcgggcgtaggggtcgattatacgtagtcgcgtagtttagtattcgcgtgttagtttcgttcgcgatttcgggttcggggttgtggcgtcgatttcgatttaggtagttagtagttcgcgcgggagtcggatcgtcgtcggaggagttcggacggtatgttgagttttttttttggttgaagttcgagtgcggagaagttcgggtaaacgtaggttaaggagattaaagcggcgaagtcgcgagatagcggataagtagcggaggagaaggaggaggaggcgaatttagagaggggtagtaaaagaagcggtggtggtgggcgtcgtggttatggcggcggttatcgttagttcgtttattcgttagaagaggtaagttcgcgagcgcgagaaatttaacg

SEQ ID NO: 21640 - DNA, 1007 bp, Artificial Sequence
  chemically treated genomic DNA (Homo sapiens) CpG-island No: 21640
cgttaaatttctcgcgctcgcgaacttacctcttctaacgaataaacgaactaacgataaccgccgccataaccacgacgcccaccaccaccgcttcttttactacccctctctaaattcgcctcctcctccttctcctccgctacttatccgctatctcgcgacttcgccgctttaatctccttaacctacgtttacccgaacttctccgcactcgaacttcaaccaaaaaaaaaactcaacataccgtccgaactcctccgacgacgatccgactcccgcgcgaactactaactacctaaatcgaaatcgacgccacaaccccgaacccgaaatcgcgaacgaaactaacacgcgaatactaaactacgcgactacgtataatcgacccctacgcccgacgaacaccgtacatatccaactactccgatccgaatttcgccgaaccccctcgccctattacccttctaataaaaaccaaaaaaaaaaaacgaacgaaaaaaataaacgcgaacgaaaaaaaaaccgaaaactcgaacgaccgaacgaaaaaaaaacgaaacaacgcgcgaaaaaacgcgccctcgccctaacccctccgaatcttcgactaatccttacaacttcttaacgtaataatcgaaaaaaattaacccgtaccaaatttccgacaaaaatcaaacaaataataacctcgcatcttcgctattactactactctaaacgcgacacaatcgcaacacaaaaattcaaccgccgcaaacaccctccgaaacaacgcgacaacctccttacaaccccctcccgcgacgacccctccctcccgaaactaaacccgtaaactcgaaaccgcaaaccgcccctcccacccccacccccacccccacccccccaaatccccgaccgcccgttccgactaacacctataaaaacttccgcactaccccaatcgtccaaatccttctcccctccttttcccgaaaaaaacttcgaaaaaaaacaataat

SEQ ID NO: 21641 - DNA, 930 bp, Artificial Sequence
  chemically treated genomic DNA (Homo sapiens) CpG-island No: 21641
ttacgtgcgcggaaaatgaattcgtattcgcgacgcggtcggcgggggcggatggtagcgagggtcggatagcgaatttttatttcgcggaggagtcggggtcggagttcgtacgtgggtttgcgacggtttcgttttttgggggcgtttttttagggattttagtttcggttggtgggttttgtaggttcgggttcgatcgcgttcgttaggtcgttcggaggtttcggcgagttcggcggaggcggcggttttttttcgttcgacggttacgttcgcgcggattggtcgtttttcgacggcggggcggggcgggacgggtcggggtagagttcgcggttaggtgaggcgtttcgtttttcggcggttttaggtgcggttgtgggatttcggatcgcggcggggtcggggttagggtcggggtcggggtcggggcgttatggtcgagttttagttgaattgtttggacgaggcgtacgtgaacgagaaggtgatcgaggcgtaggtcgttttttattattgcgagcggcggcgggtcgcgttggaggcgttgttgggcggcggcgagtaggtttatcgcgagcggtttaaggaggagtagttgcgggattttttttttagttcggagcgttaggttttgcgggtcgtttggagtttttacgaggacgtcgttttcgtcgttaacgttcggggtaagagtaaggttaaggttaaggttttcgcgtcggcgtcggttgagttcggcgagtttttggtttattggttcgatcgtttcgatatcgaggtgttttttttggatttgggttggacggatattggtttttatcgcggcgtgagtcgggttacgttttttatttattcgtttaaggacgagaaggcgtcgtattttaagtaggtggttaggtagatgatttaataggtttagaaggt

SEQ ID NO: 21642 - DNA, 930 bp, Artificial Sequence
  chemically treated genomic DNA (Homo sapiens) CpG-island No: 21642
accttctaaacctattaaatcatctacctaaccacctacttaaaatacgacgccttctcgtccttaaacgaataaataaaaaacgtaacccgactcacgccgcgataaaaaccaatatccgtccaacccaaatccaaaaaaaacacctcgatatcgaaacgatcgaaccaataaaccaaaaactcgccgaactcaaccgacgccgacgcgaaaaccttaaccttaaccttactcttaccccgaacgttaacgacgaaaacgacgtcctcgtaaaaactccaaacgacccgcaaaacctaacgctccgaactaaaaaaaaaatcccgcaactactcctccttaaaccgctcgcgataaacctactcgccgccgcccaacaacgcctccaacgcgacccgccgccgctcgcaataataaaaaacgacctacgcctcgatcaccttctcgttcacgtacgcctcgtccaaacaattcaactaaaactcgaccataacgccccgaccccgaccccgaccctaaccccgaccccgccgcgatccgaaatcccacaaccgcacctaaaaccgccgaaaaacgaaacgcctcacctaaccgcgaactctaccccgacccgtcccgccccgccccgccgtcgaaaaacgaccaatccgcgcgaacgtaaccgtcgaacgaaaaaaaaccgccgcctccgccgaactcgccgaaacctccgaacgacctaacgaacgcgatcgaacccgaacctacaaaacccaccaaccgaaactaaaatccctaaaaaaacgcccccaaaaaacgaaaccgtcgcaaacccacgtacgaactccgaccccgactcctccgcgaaataaaaattcgctatccgaccctcgctaccatccgcccccgccgaccgcgtcgcgaatacgaattcattttccgcgcacgtaa

SEQ ID NO: 21643 - DNA, 930 bp, Artificial Sequence
  chemically treated genomic DNA (Homo sapiens) CpG-island No: 21643
attttttgggtttgttggattatttgtttgattatttgtttgaggtgcggcgttttttcgtttttgggcgggtgggtgaagagcgtgattcggtttacgtcgcggtagaaattagtgttcgtttagtttaggtttagaggaggtatttcggtgtcggaacggtcgggttagtaggttagggattcgtcggatttagtcggcgtcggcgcgggggttttggttttggttttgtttttgtttcgggcgttggcggcggggacggcgttttcgtaggggttttaggcggttcgtagggtttggcgtttcgggttggagaggaagtttcgtagttgtttttttttgagtcgttcgcggtaggtttgttcgtcgtcgtttagtagcgtttttagcgcggttcgtcgtcgttcgtagtagtagaaggcggtttgcgtttcggttattttttcgtttacgtgcgtttcgtttaggtagtttagttgggattcggttatggcgtttcggtttcggtttcggttttggtttcggtttcgtcgcggttcgaggttttatagtcgtatttggagtcgtcgaggggcggggcgttttatttggtcgcgagttttgtttcggttcgtttcgtttcgtttcgtcgtcggggagcggttaattcgcgcgggcgtggtcgtcgggcggggaggggtcgtcgttttcgtcgggttcgtcgggattttcgggcggtttggcggacgcggtcgggttcgggtttgtagggtttattagtcggggttagagtttttgaggggacgtttttagggggcggggtcgtcgtagatttacgtgcgggtttcggtttcgattttttcgcggggtaaaggttcgttgttcggttttcgttgttattcgttttcgtcggtcgcgtcgcgggtacgagtttatttttcgcgtacgtgg

SEQ ID NO: 21644 - DNA, 930 bp, Artificial Sequence
  chemically treated genomic DNA (Homo sapiens) CpG-island No: 21644
ccacgtacgcgaaaaataaactcgtacccgcgacgcgaccgacgaaaacgaataacaacgaaaaccgaacaacgaacctttaccccgcgaaaaaatcgaaaccgaaacccgcacgtaaatctacgacgaccccgccccctaaaaacgtcccctcaaaaactctaaccccgactaataaaccctacaaacccgaacccgaccgcgtccgccaaaccgcccgaaaatcccgacgaacccgacgaaaacgacgacccctccccgcccgacgaccacgcccgcgcgaattaaccgctccccgacgacgaaacgaaacgaaacgaaccgaaacaaaactcgcgaccaaataaaacgccccgcccctcgacgactccaaatacgactataaaacctcgaaccgcgacgaaaccgaaaccaaaaccgaaaccgaaaccgaaacgccataaccgaatcccaactaaactacctaaacgaaacgcacgtaaacgaaaaaataaccgaaacgcaaaccgccttctactactacgaacgacgacgaaccgcgctaaaaacgctactaaacgacgacgaacaaacctaccgcgaacgactcaaaaaaaaacaactacgaaacttcctctccaacccgaaacgccaaaccctacgaaccgcctaaaacccctacgaaaacgccgtccccgccgccaacgcccgaaacaaaaacaaaaccaaaaccaaaacccccgcgccgacgccgactaaatccgacgaatccctaacctactaacccgaccgttccgacaccgaaatacctcctctaaacctaaactaaacgaacactaatttctaccgcgacgtaaaccgaatcacgctcttcacccacccgcccaaaaacgaaaaaacgccgcacctcaaacaaataatcaaacaaataatccaacaaacccaaaaaat

SEQ ID NO: 21645 - DNA, 673 bp, Artificial Sequence
  chemically treated genomic DNA (Homo sapiens) CpG-island No: 21645
tcggaggagagtcgaggtgtaaggggatagggagaagggaagagatgggttagtagtaaatttacggatgaaagggaaatgggtttagttcgtgcgttcgagttgttgacgtcgtgtcgtttttcgcgtttgtttgtcgtagttttcgttcgtcggttcgtcggttagtcggttcgttttttttttttgttagtagtagtttcggggtcggaggttgtgcggcgaggtcgttttttcgtttcgttgattggtcgcgtcgttcggttcgttacgtttttttgttttagtcgttagagattgaaagtaatcgcggttgttcggagggtcgaattggagggtgggcgtagttttggttgttttgggaatcgtgttgtttcgattcggttatttttcgttgggcggtcgtgcgtattcgttaggtcgggtagtttcgggtcgtttagcggtcgaggaggcggtagagatttcgtttttttgtagagttacggggatcggaaggcgaaatagagttgtggacgcgggagtatatgttgtttattagtggagtataagtaaagaaagaacgcgcgattgttcggcgcggagaggggtgggggaagtttcgttaggattgggcggcgttcggtttggagaattagtaattgcgaggtaggggatggagtatttttttggt

SEQ ID NO: 21646 - DNA, 673 bp, Artificial Sequence
  chemically treated genomic DNA (Homo sapiens) CpG-island No: 21646
accaaaaaaatactccatcccctacctcgcaattactaattctccaaaccgaacgccgcccaatcctaacgaaacttcccccacccctctccgcgccgaacaatcgcgcgttctttctttacttatactccactaataaacaacatatactcccgcgtccacaactctatttcgccttccgatccccgtaactctacaaaaaaacgaaatctctaccgcctcctcgaccgctaaacgacccgaaactacccgacctaacgaatacgcacgaccgcccaacgaaaaataaccgaatcgaaacaacacgattcccaaaacaaccaaaactacgcccaccctccaattcgaccctccgaacaaccgcgattactttcaatctctaacgactaaaacaaaaaaacgtaacgaaccgaacgacgcgaccaatcaacgaaacgaaaaaacgacctcgccgcacaacctccgaccccgaaactactactaacaaaaaaaaaaaacgaaccgactaaccgacgaaccgacgaacgaaaactacgacaaacaaacgcgaaaaacgacacgacgtcaacaactcgaacgcacgaactaaacccatttccctttcatccgtaaatttactactaacccatctcttcccttctccctatccccttacacctcgactctcctccga

SEQ ID NO: 21647 - DNA, 673 bp, Artificial Sequence
  chemically treated genomic DNA (Homo sapiens) CpG-island No: 21647
gttaagggagtgttttattttttgtttcgtagttattgattttttaagtcgggcgtcgtttagttttggcggggttttttttattttttttcgcgtcgggtaatcgcgcgttttttttttatttgtgttttattggtgggtagtatgtgttttcgcgtttatagttttgtttcgtttttcggttttcgtagttttgtaggggaacgggatttttgtcgttttttcggtcgttaagcgattcggggttgttcgatttagcgagtgcgtacgatcgtttagcgaggggtagtcgagtcgaggtagtacggtttttaaggtagttaaggttgcgtttattttttagttcggtttttcgggtagtcgcggttgtttttagtttttggcgattgagataaaagagcgtgacgggtcgggcgacgcggttaattagcggggcgagggggcggtttcgtcgtatagttttcggtttcgaagttattgttagtaagaagggggagcgggtcggttggtcggcgggtcggcgggcgggggttgcggtagataggcgcgggaggcggtacggcgttagtagttcggacgtacggattgggtttattttttttttattcgtgagtttgttgttaatttatttttttttttttttttatttttttatatttcggttttttttcgg

SEQ ID NO: 21648 - DNA, 673 bp, Artificial Sequence
  chemically treated genomic DNA (Homo sapiens) CpG-island No: 21648
ccgaaaaaaaaccgaaatataaaaaaataaaaaaaaaaaaaaaaataaattaacaacaaactcacgaataaaaaaaaaataaacccaatccgtacgtccgaactactaacgccgtaccgcctcccgcgcctatctaccgcaacccccgcccgccgacccgccgaccaaccgacccgctcccccttcttactaacaataacttcgaaaccgaaaactatacgacgaaaccgccccctcgccccgctaattaaccgcgtcgcccgacccgtcacgctcttttatctcaatcgccaaaaactaaaaacaaccgcgactacccgaaaaaccgaactaaaaaataaacgcaaccttaactaccttaaaaaccgtactacctcgactcgactacccctcgctaaacgatcgtacgcactcgctaaatcgaacaaccccgaatcgcttaacgaccgaaaaaacgacaaaaatcccgttcccctacaaaactacgaaaaccgaaaaacgaaacaaaactataaacgcgaaaacacatactacccaccaataaaacacaaataaaaaaaaaacgcgcgattacccgacgcgaaaaaaaataaaaaaaaccccgccaaaactaaacgacgcccgacttaaaaaatcaataactacgaaacaaaaaataaaacactcccttaac

SEQ ID NO: 21649 - DNA, 503 bp, Artificial Sequence
  chemically treated genomic DNA (Homo sapiens) CpG-island No: 21649
gtcgttttcggtgtatttatcgaagagttgtttcgcgagtcgtattttcggggtaatcgaatttcgtcgggtaggtatcgagaggttttcgagtttgtttttgttcgggtaggagcgagttatatattagttggttagattttggggtcgggcgtcgcgggcggcggagttatcgttagttatatacgggataggaaaggatttttttcgtttttttttcgtcgtttattcgtatttcggcgtcgcggagtttcgttgttaattatagagttaagtttcggttgtgcggatgggttattttttggcggggggtttttagttacgtaatttttatattttttcgaagttagaggaagtgggtgacgggacggtgggggatttttatttcggtaatatcggttttttcggaaagtagttgcgattgttttttcgtttttttgttagcgtttttaggttgtattgtttgttgggatatcggaggatttaaatgttattttttttcg

SEQ ID NO: 21650 - DNA, 503 bp, Artificial Sequence
  chemically treated genomic DNA (Homo sapiens) CpG-island No: 21650
cgaaaaaaaataacatttaaatcctccgatatcccaacaaacaatacaacctaaaaacgctaacaaaaaaacgaaaaaacaatcgcaactactttccgaaaaaaccgatattaccgaaataaaaatcccccaccgtcccgtcacccacttcctctaacttcgaaaaaatataaaaattacgtaactaaaaaccccccgccaaaaaataacccatccgcacaaccgaaacttaactctataattaacaacgaaactccgcgacgccgaaatacgaataaacgacgaaaaaaaaacgaaaaaaatcctttcctatcccgtatataactaacgataactccgccgcccgcgacgcccgaccccaaaatctaaccaactaatatataactcgctcctacccgaacaaaaacaaactcgaaaacctctcgatacctacccgacgaaattcgattaccccgaaaatacgactcgcgaaacaactcttcgataaatacaccgaaaacgac

SEQ ID NO: 21651 - DNA, 503 bp, Artificial Sequence
  chemically treated genomic DNA (Homo sapiens) CpG-island No: 21651
cggagagaggtggtatttgagtttttcggtattttagtaggtagtgtagtttagagacgttgataaaggagcggaggagtagtcgtagttgtttttcgaggaagtcggtgttgtcgaggtgagagttttttatcgtttcgttatttattttttttgatttcgggaaaatgtggaagttacgtggttgagagtttttcgttaaagaatgatttattcgtatagtcggagtttggttttgtgattgatagcggggtttcgcggcgtcgggatgcgggtgggcggcggggaggagacggaggggatttttttttgtttcgtgtgtgattggcggtggtttcgtcgttcgcggcgttcggttttagggtttggttagttggtgtgtagttcgtttttgttcgggtaaaggtaggttcgggagtttttcggtgtttgttcgacggagttcggttgtttcggggatgcggttcgcgggataatttttcggtggatgtatcgaggacggt

SEQ ID NO: 21652 - DNA, 503 bp, Artificial Sequence
  chemically treated genomic DNA (Homo sapiens) CpG-island No: 21652
accgtcctcgatacatccaccgaaaaattatcccgcgaaccgcatccccgaaacaaccgaactccgtcgaacaaacaccgaaaaactcccgaacctacctttacccgaacaaaaacgaactacacaccaactaaccaaaccctaaaaccgaacgccgcgaacgacgaaaccaccgccaatcacacacgaaacaaaaaaaaatcccctccgtctcctccccgccgcccacccgcatcccgacgccgcgaaaccccgctatcaatcacaaaaccaaactccgactatacgaataaatcattctttaacgaaaaactctcaaccacgtaacttccacattttcccgaaatcaaaaaaaataaataacgaaacgataaaaaactctcacctcgacaacaccgacttcctcgaaaaacaactacgactactcctccgctcctttatcaacgtctctaaactacactacctactaaaataccgaaaaactcaaataccacctctctccg

SEQ ID NO: 21653 - DNA, 776 bp, Artificial Sequence
  chemically treated genomic DNA (Homo sapiens) CpG-island No: 21653
tgtcgaagggggcggggttttcgttgatgggttggttttcgttagggatataggtagaagttggttggggagtgtgcgtgttagtttgacgcgatatagtgcgtatatgcgtgatgacgtagagggcgttgattgggatcgagtatagggttcgcgtatgcgtggattgtcgttttttgtttaagttggtcgtttttttgcgttaaaggtaagcgggtcgttatttatttgtgttgttcgttagttaggtttggtttcgtttcgtttcgttcggtcggtttcgcgcgtttttatagttttgttagagggttagcgttagttttaagtgtgcgaattcgaggagtagcgatagattcgagattacgtttttttttcgggaaggaggcggtatttcgcgtttgaggttcgtttgcgtttgaggttcgtttgcgtttgcggttcgtttgcgtttgaggtttgtttgcgtttgagattttattgggcgtgattgaggaatttggggaggtttttgggcggtattgaggacgagggggttcgttagttagtatagaattttggagcgggaattttttatcgtttaaatggcgtcgggggcgggattttcgggatttggttttcgcgggtcgtcgtcggttttgaaacgtgagggatagttgagatgaggtagttattgggatggtttttatgcgtatttatatgtagttcgattgtcgagttttcgaggtagtaggatttatcgtttatattttttattattaattaagtttttagaatag

SEQ ID NO: 21654 - DNA, 776 bp, Artificial Sequence
  chemically treated genomic DNA (Homo sapiens) CpG-island No: 21654
ctattctaaaaacttaattaataataaaaaatataaacgataaatcctactacctcgaaaactcgacaatcgaactacatataaatacgcataaaaaccatcccaataactacctcatctcaactatccctcacgtttcaaaaccgacgacgacccgcgaaaaccaaatcccgaaaatcccgcccccgacgccatttaaacgataaaaaattcccgctccaaaattctatactaactaacgaaccccctcgtcctcaataccgcccaaaaacctccccaaattcctcaatcacgcccaataaaatctcaaacgcaaacaaacctcaaacgcaaacgaaccgcaaacgcaaacgaacctcaaacgcaaacgaacctcaaacgcgaaataccgcctccttcccgaaaaaaaaacgtaatctcgaatctatcgctactcctcgaattcgcacacttaaaactaacgctaaccctctaacaaaactataaaaacgcgcgaaaccgaccgaacgaaacgaaacgaaaccaaacctaactaacgaacaacacaaataaataacgacccgcttacctttaacgcaaaaaaacgaccaacttaaacaaaaaacgacaatccacgcatacgcgaaccctatactcgatcccaatcaacgccctctacgtcatcacgcatatacgcactatatcgcgtcaaactaacacgcacactccccaaccaacttctacctatatccctaacgaaaaccaacccatcaacgaaaaccccgcccccttcgaca

SEQ ID NO: 21655 - DNA, 776 bp, Artificial Sequence
  chemically treated genomic DNA (Homo sapiens) CpG-island No: 21655
ttgttttaaaagtttggttagtagtgaggaatgtggacggtaaattttgttgtttcgaaagttcggtagtcggattgtatgtaaatgcgtatgggggttattttagtagttgttttattttagttattttttacgttttagggtcggcggcggttcgcggaagttagatttcggaggtttcgttttcgacgttatttagacggtgagggattttcgttttaggattttatgttgattaacggattttttcgtttttaatatcgtttaaaaatttttttaaattttttaattacgtttaatgagattttaaacgtagataggttttaagcgtaggcgggtcgtaagcgtaggcgggttttaaacgtaggcgggttttaaacgcgaggtgtcgtttttttttcgaggaaggagcgtggtttcgagtttgtcgttgtttttcggattcgtatatttaaggttaacgttaattttttagtaaggttatgggggcgcgcgagatcgatcgagcgaagcgggacgaggttaggtttagttggcgaataatataaatggataacggttcgtttatttttggcgtagggaagcgattaatttggatagaagacgataatttacgtatgcgcgggttttgtattcggttttaattaacgttttttacgttattacgtatgtgcgtattatatcgcgttaggttggtacgtatattttttaattagtttttatttatgtttttgacgaaagttaatttattagcgagagtttcgtttttttcggta

SEQ ID NO: 21656 - DNA, 776 bp, Artificial Sequence
  chemically treated genomic DNA (Homo sapiens) CpG-island No: 21656
taccgaaaaaaacgaaactctcgctaataaattaactttcgtcaaaaacataaataaaaactaattaaaaaatatacgtaccaacctaacgcgatataatacgcacatacgtaataacgtaaaaaacgttaattaaaaccgaatacaaaacccgcgcatacgtaaattatcgtcttctatccaaattaatcgcttccctacgccaaaaataaacgaaccgttatccatttatattattcgccaactaaacctaacctcgtcccgcttcgctcgatcgatctcgcgcgcccccataaccttactaaaaaattaacgttaaccttaaatatacgaatccgaaaaacaacgacaaactcgaaaccacgctccttcctcgaaaaaaaaacgacacctcgcgtttaaaacccgcctacgtttaaaacccgcctacgcttacgacccgcctacgcttaaaacctatctacgtttaaaatctcattaaacgtaattaaaaaatttaaaaaaatttttaaacgatattaaaaacgaaaaaatccgttaatcaacataaaatcctaaaacgaaaatccctcaccgtctaaataacgtcgaaaacgaaacctccgaaatctaacttccgcgaaccgccgccgaccctaaaacgtaaaaaataactaaaataaaacaactactaaaataacccccatacgcatttacatacaatccgactaccgaactttcgaaacaacaaaatttaccgtccacattcctcactactaaccaaacttttaaaacaa

SEQ ID NO: 21657 - DNA, 617 bp, Artificial Sequence
  chemically treated genomic DNA (Homo sapiens) CpG-island No: 21657
agcgttttgggttcgcgtaggcgtattttatatcgacgtaggttcgttttttaagtgcgtatgcgtgtagtttgcgcgggaaagagtgtcgttttagttgagggtaagcgaggagatggttgtgaggtaggcggcgacggcgggtattttcgggtttaggagagaggaagaggcggcgtttttattcgagagggtttattatcggtacgattcgcgttggttgttgttcgtgatttttcgtttgtgtttggtttgcgcgttggagttgttgtcggatttcggcgtgtcggtgcgggcggaattttttttttagaagatttgggtttggttattttttttagtaaacgcggttaggtttttgttagattcgtttcggtgaattcgacgcgaaatcgggttttcgcgttgtgtttatttttttttttgttagttcgtttcggattcggtcgtagcggtttttcgggttttttagttttaggtcggtttgcgggttttcgtggagttcggtttattggttttgcgtttgaaaggacggaaattcggatttttcgggattttatttagttttagggatatattttttcgtttttcgttttttggttttttttttttgttgt

SEQ ID NO: 21658 - DNA, 617 bp, Artificial Sequence
  chemically treated genomic DNA (Homo sapiens) CpG-island No: 21658
acaacaaaaaaaaaaaaccaaaaaacgaaaaacgaaaaaatatatccctaaaactaaataaaatcccgaaaaatccgaatttccgtcctttcaaacgcaaaaccaataaaccgaactccacgaaaacccgcaaaccgacctaaaactaaaaaacccgaaaaaccgctacgaccgaatccgaaacgaactaacaaaaaaaaaaataaacacaacgcgaaaacccgatttcgcgtcgaattcaccgaaacgaatctaacaaaaacctaaccgcgtttactaaaaaaaataaccaaacccaaatcttctaaaaaaaaaattccgcccgcaccgacacgccgaaatccgacaacaactccaacgcgcaaaccaaacacaaacgaaaaatcacgaacaacaaccaacgcgaatcgtaccgataataaaccctctcgaataaaaacgccgcctcttcctctctcctaaacccgaaaatacccgccgtcgccgcctacctcacaaccatctcctcgcttaccctcaactaaaacgacactctttcccgcgcaaactacacgcatacgcacttaaaaaacgaacctacgtcgatataaaatacgcctacgcgaacccaaaacgct

SEQ ID NO: 21659 - DNA, 617 bp, Artificial Sequence
  chemically treated genomic DNA (Homo sapiens) CpG-island No: 21659
gtagtaaagggaaggagttagaaggcggaaggcgggaaggtgtgtttttgagattgggtgaggtttcgggggattcggattttcgtttttttaggcgtagagttagtggatcgggttttacggaggttcgtaggtcggtttggggttgaggggttcgagaggtcgttgcggtcgggttcgggacgggttgatagggaggagagtgaatatagcgcgggggttcggtttcgcgtcgggtttatcggagcgggtttggtaagggtttggtcgcgtttgttgagggaaatggttaaatttaggttttttgaagaaaaggtttcgttcgtatcgatacgtcggggttcggtagtagttttagcgcgtaggttaggtataggcggggggttacgggtagtagttagcgcgggtcgtgtcggtaatgggttttttcgaatagaagcgtcgttttttttttttttttgggttcgggagtgttcgtcgtcgtcgtttgttttatagttattttttcgtttgtttttagttgaggcggtattttttttcgcgtagattgtacgtatgcgtatttggaggacggatttgcgtcggtgtggaatgcgtttgcgcggatttagggcgtt

SEQ ID NO: 21660 - DNA, 617 bp, Artificial Sequence
  chemically treated genomic DNA (Homo sapiens) CpG-island No: 21660
aacgccctaaatccgcgcaaacgcattccacaccgacgcaaatccgtcctccaaatacgcatacgtacaatctacgcgaaaaaaaataccgcctcaactaaaaacaaacgaaaaaataactataaaacaaacgacgacgacgaacactcccgaacccaaaaaaaaaaaaaaaacgacgcttctattcgaaaaaacccattaccgacacgacccgcgctaactactacccgtaaccccccgcctatacctaacctacgcgctaaaactactaccgaaccccgacgtatcgatacgaacgaaaccttttcttcaaaaaacctaaatttaaccatttccctcaacaaacgcgaccaaacccttaccaaacccgctccgataaacccgacgcgaaaccgaacccccgcgctatattcactctcctccctatcaacccgtcccgaacccgaccgcaacgacctctcgaacccctcaaccccaaaccgacctacgaacctccgtaaaacccgatccactaactctacgcctaaaaaaacgaaaatccgaatcccccgaaacctcacccaatctcaaaaacacaccttcccgccttccgccttctaactccttccctttactac

SEQ ID NO: 21661 - DNA, 733 bp, Artificial Sequence
  chemically treated genomic DNA (Homo sapiens) CpG-island No: 21661
tattgatttagaataaggaaatcggggagtgaatcgcgtttttatatatttttcgtagttggtaaggaaaggttattggatattttagcgggggttaagacggaatttcggtattattcggtcgggtttcgtttattaaagggttttcggttttgcgtaggcgtattattattagtagcgggcgaaattattattcgtagttttgttcgtttatttttgttatttattttattttcgttgtcgacgatggtttcgtttcgggttaaattattttttcggtttcgggtagggaacgtcggggtttaagcgtagttattttggagttgagttttcggttcgggttttttgttcgtgttcggtagtcgttttagaaatcgagttttttcgggttcgtttttatttgttacgtcgttatagtcgtcgtcgtttttattttgggtttttttttttgtttttttatagagttcgttttcgtcgtttttcggattttcgttattggttttgcgggatttagttttttatttttattgggttagggttacgtttgttaaggtaagattaacggaatgtgagtcgtgtttcggattaggaggggtcgtttgaaacgttaagatttggggtaagcgttcgttttgattcgcgtaggcgtagttgaggtaagatttgcgtgtttagggttttaattttaatagtggtatagacgtataaagtagaatataggttatttggggtt

SEQ ID NO: 21662 - DNA, 733 bp, Artificial Sequence
  chemically treated genomic DNA (Homo sapiens) CpG-island No: 21662
aaccccaaataacctatattctactttatacgtctataccactattaaaattaaaaccctaaacacgcaaatcttacctcaactacgcctacgcgaatcaaaacgaacgcttaccccaaatcttaacgtttcaaacgacccctcctaatccgaaacacgactcacattccgttaatcttaccttaacaaacgtaaccctaacccaataaaaataaaaaactaaatcccgcaaaaccaataacgaaaatccgaaaaacgacgaaaacgaactctataaaaaaacaaaaaaaaaaacccaaaataaaaacgacgacgactataacgacgtaacaaataaaaacgaacccgaaaaaactcgatttctaaaacgactaccgaacacgaacaaaaaacccgaaccgaaaactcaactccaaaataactacgcttaaaccccgacgttccctacccgaaaccgaaaaaataatttaacccgaaacgaaaccatcgtcgacaacgaaaataaaataaataacaaaaataaacgaacaaaactacgaataataatttcgcccgctactaataataatacgcctacgcaaaaccgaaaaccctttaataaacgaaacccgaccgaataataccgaaattccgtcttaacccccgctaaaatatccaataacctttccttaccaactacgaaaaatatataaaaacgcgattcactccccgatttccttattctaaatcaata

SEQ ID NO: 21663 - DNA, 733 bp, Artificial Sequence
  chemically treated genomic DNA (Homo sapiens) CpG-island No: 21663
agttttaaatgatttgtgttttgttttatacgtttatgttattgttggggttaaagttttaggtacgtaggttttgttttaattgcgtttgcgcgagttaggacgagcgtttgttttagattttgacgttttaggcggttttttttaattcggaatacgatttatatttcgttggttttgttttgatagacgtgattttgatttaataagggtggaaggttgagtttcgtagagttaataacgagagttcgagaggcgacggaggcggattttgtgaggaaataagaagagaggtttaagatggagacggcggcggttgtagcggcgtgataggtgagggcgggttcgggagggttcggtttttggagcggttgtcgggtacgggtagggagttcggatcgaaagtttagttttaggatggttgcgtttgggtttcggcgttttttgttcggaatcggaggagtggtttgattcggggcgagattatcgtcgatagcgggggtggggtgggtaataggaataggcgggtaaggttgcgggtgatggtttcgttcgttgttagtggtggtgcgtttgcgtagagtcggaagttttttggtaggcgggattcgatcgagtggtgtcgggatttcgttttaattttcgttaaggtgtttaatgatttttttttattaattgcggggagtgtgtggaaacgcggtttatttttcggtttttttattttggattagtg

SEQ ID NO: 21664 - DNA, 733 bp, Artificial Sequence
  chemically treated genomic DNA (Homo sapiens) CpG-island No: 21664
cactaatccaaaataaaaaaaccgaaaaataaaccgcgtttccacacactccccgcaattaataaaaaaaaatcattaaacaccttaacgaaaattaaaacgaaatcccgacaccactcgatcgaatcccgcctaccaaaaaacttccgactctacgcaaacgcaccaccactaacaacgaacgaaaccatcacccgcaaccttacccgcctattcctattacccaccccacccccgctatcgacgataatctcgccccgaatcaaaccactcctccgattccgaacaaaaaacgccgaaacccaaacgcaaccatcctaaaactaaactttcgatccgaactccctacccgtacccgacaaccgctccaaaaaccgaaccctcccgaacccgccctcacctatcacgccgctacaaccgccgccgtctccatcttaaacctctcttcttatttcctcacaaaatccgcctccgtcgcctctcgaactctcgttattaactctacgaaactcaaccttccacccttattaaatcaaaatcacgtctatcaaaacaaaaccaacgaaatataaatcgtattccgaattaaaaaaaaccgcctaaaacgtcaaaatctaaaacaaacgctcgtcctaactcgcgcaaacgcaattaaaacaaaacctacgtacctaaaactttaaccccaacaataacataaacgtataaaacaaaacacaaatcatttaaaact

SEQ ID NO: 21665 - DNA, 553 bp, Artificial Sequence
  chemically treated genomic DNA (Homo sapiens) CpG-island No: 21665
cgggttcggggggcggggggacgcggagcgatggttcgcgcggtcgtaggggcggataaaaagtcgtcgcgttgcgggagtgggcgggagggagaggggttgttcgagggttataagagtatgacggggttgtacgagttggtgtggcgggtgttgtacgcgttgttttgtttgtatcgtacgtttattttttggtttcgcgttcggttcggtatttggaattggatttggcggcgttgttgtcgagtcgtttttgtcgcggttttagcgtcgttcggttttacgtttcgtaagttttcggtagtcggtaggaatcgtcgttattatcggtattcgcgcggggggtcgtgtttggtagtcgtatattatcggatgcgttggcgcgcggacggtcgttttttggagaagttgtttgtgtatatgggtttggtgattatcgaggtggagtaggaatttagtttttcggatatcgcgagtttcgtggtgtggtgtatggtcgtgggtattttttatattagcgtttacgattattaaggtatttttaaaagaaata

SEQ ID NO: 21666 - DNA, 553 bp, Artificial Sequence
  chemically treated genomic DNA (Homo sapiens) CpG-island No: 21666
tatttcttttaaaaataccttaataatcgtaaacgctaatataaaaaatacccacgaccatacaccacaccacgaaactcgcgatatccgaaaaactaaattcctactccacctcgataatcaccaaacccatatacacaaacaacttctccaaaaaacgaccgtccgcgcgccaacgcatccgataatatacgactaccaaacacgaccccccgcgcgaataccgataataacgacgattcctaccgactaccgaaaacttacgaaacgtaaaaccgaacgacgctaaaaccgcgacaaaaacgactcgacaacaacgccgccaaatccaattccaaataccgaaccgaacgcgaaaccaaaaaataaacgtacgatacaaacaaaacaacgcgtacaacacccgccacaccaactcgtacaaccccgtcatactcttataaccctcgaacaacccctctccctcccgcccactcccgcaacgcgacgactttttatccgcccctacgaccgcgcgaaccatcgctccgcgtccccccgccccccgaacccg

SEQ ID NO: 21667 - DNA, 553 bp, Artificial Sequence
  chemically treated genomic DNA (Homo sapiens) CpG-island No: 21667
tattttttttgaaaatattttggtggtcgtagacgttaatgtaggagatgtttacggttatatattatattacgaggttcgcgatgttcgagaagttgggtttttgttttatttcggtgattattaggtttatatgtataggtagtttttttaaggaacgatcgttcgcgcgttagcgtattcggtggtgtgcggttgttaggtacgatttttcgcgcgggtgtcggtggtgacggcggtttttgtcgattgtcgggggtttgcggagcgtgaagtcgagcggcgttaggatcgcggtagaggcggttcggtagtagcgtcgttagatttagttttaggtgtcgaatcgaacgcggagttaggaggtgagcgtgcggtgtagatagagtagcgcgtgtagtattcgttatattagttcgtatagtttcgttatatttttgtggttttcggataatttttttttttttcgtttattttcgtagcgcgacggttttttattcgtttttgcggtcgcgcgggttatcgtttcgcgttttttcgtttttcgagttcg

SEQ ID NO: 21668 - DNA, 553 bp, Artificial Sequence
  chemically treated genomic DNA (Homo sapiens) CpG-island No: 21668
cgaactcgaaaaacgaaaaaacgcgaaacgataacccgcgcgaccgcaaaaacgaataaaaaaccgtcgcgctacgaaaataaacgaaaaaaaaaaaaattatccgaaaaccacaaaaatataacgaaactatacgaactaatataacgaatactacacgcgctactctatctacaccgcacgctcacctcctaactccgcgttcgattcgacacctaaaactaaatctaacgacgctactaccgaaccgcctctaccgcgatcctaacgccgctcgacttcacgctccgcaaacccccgacaatcgacaaaaaccgccgtcaccaccgacacccgcgcgaaaaatcgtacctaacaaccgcacaccaccgaatacgctaacgcgcgaacgatcgttccttaaaaaaactacctatacatataaacctaataatcaccgaaataaaacaaaaacccaacttctcgaacatcgcgaacctcgtaatataatatataaccgtaaacatctcctacattaacgtctacgaccaccaaaatattttcaaaaaaaata

SEQ ID NO: 21669 - DNA, 503 bp, Artificial Sequence
  chemically treated genomic DNA (Homo sapiens) CpG-island No: 21669
ttgaattttcgtaattttttgcgtttatagaggttaaattttcgttgttggcgattttcgttttttggtttaaatttgatacgtacgatttttttcgcggtaattgtataggttcggtgatagtcgagacgtcgagtgtttttcgtagtcggtcggggtttaggtcggaaatgtagttagtggggtcgttaggtgggttttagacgcggtgggcgcggggtttcggtcgtcgcgggagaggggtcgtcgcgttttatagagtagtgcggcggtaggggcgggggcgggtgcgtttcgcgatttgtttttgggggtgggggttgggcgatatttaaagaggcggaggtttttcggtagggacggtttgaggtcgagggtattttgagggcggaagaggtaaagcgtttcgttcgtcggggtttcggaggtgattaatttttagaggttgcggcggaggggagaagtttggtggtatattttatggtttagtgtttcggttattg

SEQ ID NO: 21670 - DNA, 503 bp, Artificial Sequence
  chemically treated genomic DNA (Homo sapiens) CpG-island No: 21670
caataaccgaaacactaaaccataaaatataccaccaaacttctcccctccgccgcaacctctaaaaattaatcacctccgaaaccccgacgaacgaaacgctttacctcttccgccctcaaaataccctcgacctcaaaccgtccctaccgaaaaacctccgcctctttaaatatcgcccaacccccacccccaaaaacaaatcgcgaaacgcacccgcccccgcccctaccgccgcactactctataaaacgcgacgacccctctcccgcgacgaccgaaaccccgcgcccaccgcgtctaaaacccacctaacgaccccactaactacatttccgacctaaaccccgaccgactacgaaaaacactcgacgtctcgactatcaccgaacctatacaattaccgcgaaaaaaatcgtacgtatcaaatttaaaccaaaaaacgaaaatcgccaacaacgaaaatttaacctctataaacgcaaaaaattacgaaaattcaa

SEQ ID NO: 21671 - DNA, 503 bp, Artificial Sequence
  chemically treated genomic DNA (Homo sapiens) CpG-island No: 21671
tagtggtcgaggtattgggttatggaatgtattattaggtttttttttttcgtcgtagtttttaggagttagttattttcgaggtttcggcgggcgaggcgttttgtttttttcgtttttagggtgttttcggttttaggtcgtttttatcggggagttttcgtttttttaaatatcgtttagtttttatttttaggagtaggtcgcgagacgtattcgttttcgtttttgtcgtcgtattgttttgtgggacgcggcgatttttttttcgcggcggtcgggatttcgcgtttatcgcgtttggagtttatttggcggttttattggttatattttcgatttggatttcggtcggttgcgggaaatattcggcgtttcggttgttatcgaatttgtgtagttgtcgcggggggagtcgtgcgtgttagatttaggttaggaagcggaagtcgttagtagcgagagtttaatttttgtgggcgtagagggttgcggggatttag

SEQ ID NO: 21672 - DNA, 503 bp, Artificial Sequence
  chemically treated genomic DNA (Homo sapiens) CpG-island No: 21672
ctaaatccccgcaaccctctacgcccacaaaaattaaactctcgctactaacgacttccgcttcctaacctaaatctaacacgcacgactccccccgcgacaactacacaaattcgataacaaccgaaacgccgaatatttcccgcaaccgaccgaaatccaaatcgaaaatataaccaataaaaccgccaaataaactccaaacgcgataaacgcgaaatcccgaccgccgcgaaaaaaaaatcgccgcgtcccacaaaacaatacgacgacaaaaacgaaaacgaatacgtctcgcgacctactcctaaaaataaaaactaaacgatatttaaaaaaacgaaaactccccgataaaaacgacctaaaaccgaaaacaccctaaaaacgaaaaaaacaaaacgcctcgcccgccgaaacctcgaaaataactaactcctaaaaactacgacgaaaaaaaaaaacctaataatacattccataacccaatacctcgaccacta

SEQ ID NO: 21673 - DNA, 1144 bp, Artificial Sequence
  chemically treated genomic DNA (Homo sapiens) CpG-island No: 21673
ttcgcgggtttcgcggcggcgtgttcgtgtggttgcgtgcgcgcggacggggcggggttgaggagggacgtgcgcgcgcgcggacggggcggggtggagttcggagggcggacgcgttcggggtcgtttggtcggtagggggcgttgcgtatttatgtcgcgttttgtttgttttcgggtgttgttcgcggcggttcgattggagtagtcgtcgaagagcgtttggcgttattttgaagcggagaggaggaggaacggtagggttggttgcggaaggggagggggggggagaaggcgattggatgcggcggcggcggcggatttcggagagtttcggagtgagcggagtagcgagtcggtaattcggaggtaggaaataatttagttaacggaaagaaaatgttttttttttttggttgcggcgttttattttttagcggtcgttattgtcgttgtgtgcgtgtgtgtggtagggttgaagcgtcgttcgtttgggtgttaggcgcgattcgtttttcggtatcgggggttgtagcgggtggttgtttggcggtggttcggggcgggggtcgcggggcgcgggtcggttgcgcggtgggggtggggagggtttcgcggtcggcgcgcgtttttacgtcgcgggttttgtcgtagtttttggaaaattaaatttgtcgttttgatttcggtcggggcggcggcggcggcgggcggtgattttgcgcgcgggcgggggtttcggggtcgttcggtcgttcgcgttttttcgtcgtcgtcgtcgtcgtcgtcgcgttttttttttcgcgtttcggtcggtcggcggttgtttttcgggcggtaggcgggcggcgcggtgtttttgttgaattttttcgcgggcgggtttttttttttttcgggcgaggggcgggcggggatcgcgggtcggggtcgcgggcgttttcgttttcgtcgtcgggttttcgcgcgtcgtttggttttcgtttcgggttaggggacgggttgagcgtgatatttttgtattgtttttcgtcgttcgtcggagggaaatcgcgtttatcgcgttatttcgagtggttttcgagtagttagttgaggaagagtttagtattggcgtggagggattttttttaggttataattg

SEQ ID NO: 21674 - DNA, 1144 bp, Artificial Sequence
  chemically treated genomic DNA (Homo sapiens) CpG-island No: 21674
caattataacctaaaaaaaatccctccacgccaatactaaactcttcctcaactaactactcgaaaaccactcgaaataacgcgataaacgcgatttccctccgacgaacgacgaaaaacaatacaaaaatatcacgctcaacccgtcccctaacccgaaacgaaaaccaaacgacgcgcgaaaacccgacgacgaaaacgaaaacgcccgcgaccccgacccgcgatccccgcccgcccctcgcccgaaaaaaaaaaaaacccgcccgcgaaaaaattcaacaaaaacaccgcgccgcccgcctaccgcccgaaaaacaaccgccgaccgaccgaaacgcgaaaaaaaaaacgcgacgacgacgacgacgacgacgaaaaaacgcgaacgaccgaacgaccccgaaacccccgcccgcgcgcaaaatcaccgcccgccgccgccgccgccccgaccgaaatcaaaacgacaaatttaattttccaaaaactacgacaaaacccgcgacgtaaaaacgcgcgccgaccgcgaaaccctccccacccccaccgcgcaaccgacccgcgccccgcgacccccgccccgaaccaccgccaaacaaccacccgctacaacccccgataccgaaaaacgaatcgcgcctaacacccaaacgaacgacgcttcaaccctaccacacacacgcacacaacgacaataacgaccgctaaaaaataaaacgccgcaaccaaaaaaaaaaaacattttctttccgttaactaaattatttcctacctccgaattaccgactcgctactccgctcactccgaaactctccgaaatccgccgccgccgccgcatccaatcgccttctccccccccctccccttccgcaaccaaccctaccgttcctcctcctctccgcttcaaaataacgccaaacgctcttcgacgactactccaatcgaaccgccgcgaacaacacccgaaaacaaacaaaacgcgacataaatacgcaacgccccctaccgaccaaacgaccccgaacgcgtccgccctccgaactccaccccgccccgtccgcgcgcgcgcacgtccctcctcaaccccgccccgtccgcgcgcacgcaaccacacgaacacgccgccgcgaaacccgcgaa

SEQ ID NO: 21675 - DNA, 1144 bp, Artificial Sequence
  chemically treated genomic DNA (Homo sapiens) CpG-island No: 21675
tagttgtggtttgggaggagtttttttacgttagtgttgggtttttttttaattggttgttcggggattattcggggtggcgcggtgagcgcgattttttttcggcgagcggcgagggatagtgtaaaaatgttacgtttagttcgttttttggttcgaagcggaggttaggcggcgcgcggggattcggcggcgggggcgagagcgttcgcggtttcgattcgcggttttcgttcgtttttcgttcggaagggggagaagttcgttcgcgggaggatttaataggagtatcgcgtcgttcgtttgtcgttcgggaaatagtcgtcggtcggtcggggcgcggggggaggggcgcggcggcggcgacggcggcggcgggagggcgcgggcggtcgggcggtttcgagattttcgttcgcgcgtaaggttatcgttcgtcgtcgtcgtcgtttcggtcgggattagagcggtaagtttaattttttagaggttgcggtagaattcgcggcgtggaggcgcgcgtcggtcgcggggttttttttatttttatcgcgtagtcggttcgcgtttcgcgattttcgtttcgggttatcgttaggtagttattcgttgtagttttcgatgtcgggaggcgagtcgcgtttggtatttaggcgggcggcgttttagttttgttatatatacgtatatagcggtagtggcggtcgttgaaaaatggagcgtcgtagttagagaagagagatatttttttttcgttaattgaattgttttttattttcgggttgtcgattcgttatttcgtttatttcggggtttttcgggattcgtcgtcgtcgtcgtatttaatcgtttttttttttttttttttttttcgtagttagttttgtcgttttttttttttttcgttttaaaatggcgttaagcgtttttcggcggttgttttaatcgaatcgtcgcggatagtattcgggggtaggtagagcgcggtatgggtgcgtagcgttttttgtcgattagacggtttcgagcgcgttcgtttttcgagttttatttcgtttcgttcgcgcgcgcgtacgtttttttttagtttcgtttcgttcgcgcgtacgtaattatacgggtacgtcgtcgcggggttcgcgag

SEQ ID NO: 21676 - DNA, 1144 bp, Artificial Sequence
  chemically treated genomic DNA (Homo sapiens) CpG-island No: 21676
ctcgcgaaccccgcgacgacgtacccgtataattacgtacgcgcgaacgaaacgaaactaaaaaaaaacgtacgcgcgcgcgaacgaaacgaaataaaactcgaaaaacgaacgcgctcgaaaccgtctaatcgacaaaaaacgctacgcacccataccgcgctctacctacccccgaatactatccgcgacgattcgattaaaacaaccgccgaaaaacgcttaacgccattttaaaacgaaaaaaaaaaaaaacgacaaaactaactacgaaaaaaaaaaaaaaaaaaaaaaacgattaaatacgacgacgacgacgaatcccgaaaaaccccgaaataaacgaaataacgaatcgacaacccgaaaataaaaaacaattcaattaacgaaaaaaaaatatctctcttctctaactacgacgctccatttttcaacgaccgccactaccgctatatacgtatatataacaaaactaaaacgccgcccgcctaaataccaaacgcgactcgcctcccgacatcgaaaactacaacgaataactacctaacgataacccgaaacgaaaatcgcgaaacgcgaaccgactacgcgataaaaataaaaaaaaccccgcgaccgacgcgcgcctccacgccgcgaattctaccgcaacctctaaaaaattaaacttaccgctctaatcccgaccgaaacgacgacgacgacgaacgataaccttacgcgcgaacgaaaatctcgaaaccgcccgaccgcccgcgccctcccgccgccgccgtcgccgccgccgcgcccctccccccgcgccccgaccgaccgacgactatttcccgaacgacaaacgaacgacgcgatactcctattaaatcctcccgcgaacgaacttctcccccttccgaacgaaaaacgaacgaaaaccgcgaatcgaaaccgcgaacgctctcgcccccgccgccgaatccccgcgcgccgcctaacctccgcttcgaaccaaaaaacgaactaaacgtaacatttttacactatccctcgccgctcgccgaaaaaaaatcgcgctcaccgcgccaccccgaataatccccgaacaaccaattaaaaaaaaacccaacactaacgtaaaaaaactcctcccaaaccacaacta

SEQ ID NO: 21677 - DNA, 686 bp, Artificial Sequence
  chemically treated genomic DNA (Homo sapiens) CpG-island No: 21677
gcgttttattggtcgttatatatttaattcgtttggtagtcgttatagagtcgcggtagcgtcgagtcggcgtttattagtattcgggtttcgggtagttgagggggcggcggcggcggtagcggagggtgtagttcgggttgcgtttggttatgatggtggaagtggtgagcggggtgatggtgtcgaatcggtttcgcgttttcggagtaggtatttaaggtagcgggcggaagcggcggttgtagaggtacggagtttttggcggcgcgtggagtttcgggcgttagggttgtagtcggcggtagttggcggtgtaagtgttgttgttgttgttggcgcgagatcgtgcgcgcgagttttaggaggtttacgggtattacggtttcgggatagcgtttttttaggaatttttggaagttttggatatttatgtttcgtcggtgggtagacgcgatagcggttgcgtaagtaggataggcgacgatttgggcgcgaagttgggggcgggcgcgtgcgtatttcgcggggggcgagggggggcgggaaaaggattttcgaggggaggggtgaggaagcgagggaatgagggcggggaggggaggagattataaattggatttgggtagagagaaggggaggggtagatcggattcgggagaggttgggaggataaaagcgaggat

SEQ ID NO: 21678 - DNA, 686 bp, Artificial Sequence
  chemically treated genomic DNA (Homo sapiens) CpG-island No: 21678
atcctcgcttttatcctcccaacctctcccgaatccgatctacccctccccttctctctacccaaatccaatttataatctcctcccctccccgccctcattccctcgcttcctcacccctcccctcgaaaatccttttcccgccccccctcgccccccgcgaaatacgcacgcgcccgcccccaacttcgcgcccaaatcgtcgcctatcctacttacgcaaccgctatcgcgtctacccaccgacgaaacataaatatccaaaacttccaaaaattcctaaaaaaacgctatcccgaaaccgtaatacccgtaaacctcctaaaactcgcgcgcacgatctcgcgccaacaacaacaacaacacttacaccgccaactaccgccgactacaaccctaacgcccgaaactccacgcgccgccaaaaactccgtacctctacaaccgccgcttccgcccgctaccttaaatacctactccgaaaacgcgaaaccgattcgacaccatcaccccgctcaccacttccaccatcataaccaaacgcaacccgaactacaccctccgctaccgccgccgccgccccctcaactacccgaaacccgaatactaataaacgccgactcgacgctaccgcgactctataacgactaccaaacgaattaaatatataacgaccaataaaacgc

SEQ ID NO: 21679 - DNA, 686 bp, Artificial Sequence
  chemically treated genomic DNA (Homo sapiens) CpG-island No: 21679
attttcgtttttatttttttagtttttttcgggttcggtttgtttttttttttttttttatttaaatttaatttgtggttttttttttttttcgtttttattttttcgtttttttattttttttttcgggaatttttttttcgttttttttcgtttttcgcggagtgcgtacgcgttcgtttttagtttcgcgtttagatcgtcgtttattttgtttgcgtagtcgttatcgcgtttgtttatcgacgaagtatgggtgtttagggtttttaagagtttttggagaagcgttgtttcggggtcgtggtgttcgtggattttttaaaattcgcgcgtacggtttcgcgttagtagtagtagtagtatttgtatcgttagttgtcgtcgattgtagttttagcgttcggggttttacgcgtcgttaggggtttcgtgtttttgtaatcgtcgttttcgttcgttgttttgggtgtttatttcgggggcgcggggtcgattcggtattattatttcgtttattatttttattattatggttaagcgtagttcgggttgtatttttcgttgtcgtcgtcgtcgtttttttagttgttcggggttcgggtgttggtggacgtcggttcggcgttgtcgcggttttatggcggttattagacggattgggtgtgtggcggttaatggaacgt

SEQ ID NO: 21680 - DNA, 686 bp, Artificial Sequence
  chemically treated genomic DNA (Homo sapiens) CpG-island No: 21680
acgttccattaaccgccacacacccaatccgtctaataaccgccataaaaccgcgacaacgccgaaccgacgtccaccaacacccgaaccccgaacaactaaaaaaacgacgacgacgacaacgaaaaatacaacccgaactacgcttaaccataataataaaaataataaacgaaataataataccgaatcgaccccgcgcccccgaaataaacacccaaaacaacgaacgaaaacgacgattacaaaaacacgaaacccctaacgacgcgtaaaaccccgaacgctaaaactacaatcgacgacaactaacgatacaaatactactactactactaacgcgaaaccgtacgcgcgaattttaaaaaatccacgaacaccacgaccccgaaacaacgcttctccaaaaactcttaaaaaccctaaacacccatacttcgtcgataaacaaacgcgataacgactacgcaaacaaaataaacgacgatctaaacgcgaaactaaaaacgaacgcgtacgcactccgcgaaaaacgaaaaaaaacgaaaaaaaaattcccgaaaaaaaaaataaaaaaacgaaaaaataaaaacgaaaaaaaaaaaaaaccacaaattaaatttaaataaaaaaaaaaaaaaaaacaaaccgaacccgaaaaaaactaaaaaaataaaaacgaaaat

SEQ ID NO: 21681 - DNA, 906 bp, Artificial Sequence
  chemically treated genomic DNA (Homo sapiens) CpG-island No: 21681
ggcgggggtgcgggtggagttcgggtcgggtggcgtggaaggtcgagtatagttgcgagcggcgagtttcgggagaggaggagcgggagaaagcggggcgggtttgcggtcggggttcggtcgggggagggggttttcgtttttttttttttattttcgttttttttggttttggtgacgttgcggtttttttttttttttagcggagttttagcgttcgtcgcgttttttttttcgtttttttcgtttatatttattcgttttcgtcggttcggtttttagtagcgtcgttcgaggttgtagtagcgtatttcggggtatggcgcggcgggggcgcggagggttcggttcggagggggtcgggagttcgggcgttttggagtgaggaggatcgggagttggttttggaggttgcggaggcgacgtcggagagaacgaagtttcggttgggagcggtaagtggaggggcgcgtaagggacgagttggggcgcgcggcgtaatttttttcgggagtttcgggcgggtagttttcggggttgtttcggcgcgggcgggagacggagagttacgttttcggttgagagcggagcgtcgcgggttgcgcgttcgggttcggttcggttggatttcgagagagcgtttgacgcgtgaagtttgagttacgggttttttcggcggcggagtagtttcgaggggtagtttttcgattttttttatttttttgaacgtcgagtatcgagtcgggaatacgatgagaatttggagatcgtatttcgtgcgtcggatttggtcggtttagtcgcgattttttcgacggtttttggggtttcggttttattttgcggggttgggtggtatattttcgcgttttttttttttttcgtattttagttatttgggggtag

SEQ ID NO: 21682 - DNA, 906 bp, Artificial Sequence
  chemically treated genomic DNA (Homo sapiens) CpG-island No: 21682
ctacccccaaataactaaaatacgaaaaaaaaaaaaaacgcgaaaatataccacccaaccccgcaaaataaaaccgaaaccccaaaaaccgtcgaaaaaatcgcgactaaaccgaccaaatccgacgcacgaaatacgatctccaaattctcatcgtattcccgactcgatactcgacgttcaaaaaaataaaaaaaatcgaaaaactacccctcgaaactactccgccgccgaaaaaacccgtaactcaaacttcacgcgtcaaacgctctctcgaaatccaaccgaaccgaacccgaacgcgcaacccgcgacgctccgctctcaaccgaaaacgtaactctccgtctcccgcccgcgccgaaacaaccccgaaaactacccgcccgaaactcccgaaaaaaattacgccgcgcgccccaactcgtcccttacgcgcccctccacttaccgctcccaaccgaaacttcgttctctccgacgtcgcctccgcaacctccaaaaccaactcccgatcctcctcactccaaaacgcccgaactcccgaccccctccgaaccgaaccctccgcgcccccgccgcgccataccccgaaatacgctactacaacctcgaacgacgctactaaaaaccgaaccgacgaaaacgaataaatataaacgaaaaaaacgaaaaaaaaaacgcgacgaacgctaaaactccgctaaaaaaaaaaaaaaaccgcaacgtcaccaaaaccaaaaaaaacgaaaataaaaaaaaaaaaacgaaaaccccctcccccgaccgaaccccgaccgcaaacccgccccgctttctcccgctcctcctctcccgaaactcgccgctcgcaactatactcgaccttccacgccacccgacccgaactccacccgcacccccgcc

SEQ ID NO: 21683 - DNA, 906 bp, Artificial Sequence
  chemically treated genomic DNA (Homo sapiens) CpG-island No: 21683
ttgtttttaaatggttggggtacggagggaaaggaggacgcgagggtgtgttatttaatttcgtagagtgaagtcgaggttttaaggatcgtcgaggaaatcgcggttgggtcggttagattcgacgtacggaatgcgatttttaggtttttatcgtgttttcggttcggtgttcggcgtttaagggggtggggaggatcgaaaagttgtttttcgaggttgtttcgtcgtcggggaagttcgtggtttaggttttacgcgttaggcgttttttcggagtttagtcgagtcgggttcgggcgcgtaattcgcggcgtttcgtttttagtcggggacgtggtttttcgtttttcgttcgcgtcgggatagtttcgaaggttattcgttcgaaattttcgaagaaagttgcgtcgcgcgttttagttcgttttttgcgcgtttttttatttatcgtttttagtcgaggtttcgtttttttcggcgtcgttttcgtagtttttagagttagttttcggttttttttattttagggcgttcgggttttcggtttttttcgaatcgagtttttcgcgttttcgtcgcgttatgtttcgggatgcgttgttgtagtttcgggcgacgttattgagagtcgggtcggcgggggcgggtaggtgtgggcgaaaggggcggagggagggacgcggcgggcgttgaggtttcgttggaggggggaggaaatcgtaacgttattagagttagaggagacgaggatgaggagagggaaacggggattttttttttcggtcgaatttcgatcgtaggttcgtttcgttttttttcgttttttttttttcgggattcgtcgttcgtagttgtgttcggttttttacgttattcggttcggattttattcgtattttcgtt

SEQ ID NO: 21684 - DNA, 906 bp, Artificial Sequence
  chemically treated genomic DNA (Homo sapiens) CpG-island No: 21684
aacgaaaatacgaataaaatccgaaccgaataacgtaaaaaaccgaacacaactacgaacgacgaatcccgaaaaaaaaaaaacgaaaaaaaacgaaacgaacctacgatcgaaattcgaccgaaaaaaaaaatccccgtttccctctcctcatcctcgtctcctctaactctaataacgttacgatttcctcccccctccaacgaaacctcaacgcccgccgcgtccctccctccgcccctttcgcccacacctacccgcccccgccgacccgactctcaataacgtcgcccgaaactacaacaacgcatcccgaaacataacgcgacgaaaacgcgaaaaactcgattcgaaaaaaaccgaaaacccgaacgccctaaaataaaaaaaaccgaaaactaactctaaaaactacgaaaacgacgccgaaaaaaacgaaacctcgactaaaaacgataaataaaaaaacgcgcaaaaaacgaactaaaacgcgcgacgcaactttcttcgaaaatttcgaacgaataaccttcgaaactatcccgacgcgaacgaaaaacgaaaaaccacgtccccgactaaaaacgaaacgccgcgaattacgcgcccgaacccgactcgactaaactccgaaaaaacgcctaacgcgtaaaacctaaaccacgaacttccccgacgacgaaacaacctcgaaaaacaacttttcgatcctccccacccccttaaacgccgaacaccgaaccgaaaacacgataaaaacctaaaaatcgcattccgtacgtcgaatctaaccgacccaaccgcgatttcctcgacgatccttaaaacctcgacttcactctacgaaattaaataacacaccctcgcgtcctcctttccctccgtaccccaaccatttaaaaacaa

SEQ ID NO: 21685 - DNA, 677 bp, Artificial Sequence
  chemically treated genomic DNA (Homo sapiens) CpG-island No: 21685
gcgacgtttcgggggacgaggtttatggagaagtttcgggcggtgttggatttgtacgttaagtattatagcgttttgggttacggtttggtgattttgttgacggcgggcggggagcgtatttttttcgtcgtggtattttagtgttcgtgtagcgtcgtttggaatttgttttacggtttggtttttttgttggtgtcggcgttcgcgtttttttttttgggttacgtgttgagcgtacgtacgtggcgtttgtttatcggatgttgttttagcgttcgcgcgagttgcggatcggcgttgcgcggttttttggtgtgtacgtaaattagcgcggtcgtcgcgttcgcgttttttatttgggtggtcgtggcgttgttcgggggcgttttttacgagtgcgcggttatcgggagcgcggttttcgcgtagcgtttgtgtttcggtcgtaatcgtagttgcgtcgcggagttgtcgttggtgtcgtgtaattaggttaaggcgtcggacgtgtaggattttttgaaggatttgaaggtttagtcgtaggtttgtcgttggcgttgggggcgtttgggaggagtcgagaggtcgagtttttttagggtcgttggggtgagggaaaaatcggtgatttttttttagatatatagtattttaagaaaatttagaatggt

SEQ ID NO: 21686 - DNA, 677 bp, Artificial Sequence
  chemically treated genomic DNA (Homo sapiens) CpG-island No: 21686
accattctaaattttcttaaaatactatatatctaaaaaaaaatcaccgatttttccctcaccccaacgaccctaaaaaaactcgacctctcgactcctcccaaacgcccccaacgccaacgacaaacctacgactaaaccttcaaatccttcaaaaaatcctacacgtccgacgccttaacctaattacacgacaccaacgacaactccgcgacgcaactacgattacgaccgaaacacaaacgctacgcgaaaaccgcgctcccgataaccgcgcactcgtaaaaaacgcccccgaacaacgccacgaccacccaaataaaaaacgcgaacgcgacgaccgcgctaatttacgtacacaccaaaaaaccgcgcaacgccgatccgcaactcgcgcgaacgctaaaacaacatccgataaacaaacgccacgtacgtacgctcaacacgtaacccaaaaaaaaaaacgcgaacgccgacaccaacaaaaaaaccaaaccgtaaaacaaattccaaacgacgctacacgaacactaaaataccacgacgaaaaaaatacgctccccgcccgccgtcaacaaaatcaccaaaccgtaacccaaaacgctataatacttaacgtacaaatccaacaccgcccgaaacttctccataaacctcgtcccccgaaacgtcgc

SEQ ID NO: 21687 - DNA, 677 bp, Artificial Sequence
  chemically treated genomic DNA (Homo sapiens) CpG-island No: 21687
gttattttagatttttttagggtattgtatatttggagaaaagttatcgattttttttttattttagcggttttgagaaagttcggtttttcggttttttttaaacgtttttagcgttagcggtagatttgcgattgagtttttagattttttaggaggttttgtacgttcgacgttttggtttggttgtacggtattagcggtagtttcgcggcgtagttgcggttgcggtcgaggtataggcgttgcgcgaaggtcgcgttttcggtggtcgcgtattcgtaaaaggcgttttcgagtagcgttacggttatttaggtgaggggcgcgagcgcggcggtcgcgttgatttgcgtgtatattagggagtcgcgtagcgtcgattcgtaattcgcgcgggcgttggagtagtattcggtgagtaggcgttacgtgcgtgcgtttagtacgtagtttaggaggaagagcgcgagcgtcggtattagtaagaagattaggtcgtagggtaggttttaggcggcgttgtacgggtattggaatgttacggcggagaagatgcgtttttcgttcgtcgttagtagggttattaggtcgtagtttaaggcgttgtggtgtttgacgtgtaggtttagtatcgttcgaaatttttttatgagtttcgtttttcggggcgtcgt

SEQ ID NO: 21688 - DNA, 677 bp, Artificial Sequence
  chemically treated genomic DNA (Homo sapiens) CpG-island No: 21688
acgacgccccgaaaaacgaaactcataaaaaaatttcgaacgatactaaacctacacgtcaaacaccacaacgccttaaactacgacctaataaccctactaacgacgaacgaaaaacgcatcttctccgccgtaacattccaatacccgtacaacgccgcctaaaacctaccctacgacctaatcttcttactaataccgacgctcgcgctcttcctcctaaactacgtactaaacgcacgcacgtaacgcctactcaccgaatactactccaacgcccgcgcgaattacgaatcgacgctacgcgactccctaatatacacgcaaatcaacgcgaccgccgcgctcgcgcccctcacctaaataaccgtaacgctactcgaaaacgccttttacgaatacgcgaccaccgaaaacgcgaccttcgcgcaacgcctatacctcgaccgcaaccgcaactacgccgcgaaactaccgctaataccgtacaaccaaaccaaaacgtcgaacgtacaaaacctcctaaaaaatctaaaaactcaatcgcaaatctaccgctaacgctaaaaacgtttaaaaaaaaccgaaaaaccgaactttctcaaaaccgctaaaataaaaaaaaaatcgataacttttctccaaatatacaataccctaaaaaaatctaaaataac

SEQ ID NO: 21689 - DNA, 505 bp, Artificial Sequence
  chemically treated genomic DNA (Homo sapiens) CpG-island No: 21689
tttttcgtcgttcgttttttttttgtttcgcgcgtttttttcgtgtcgtcgtcgtcgttcgtttttttgattttttatttatgtttagcggacggttcggagtagtgtgagttagtgtagagatcgcgatatcggagaggttcgtatatttgtttcgattataacgcgatagtgaggagagggggcggtggattcgaaatttcgcggttttgcgttcgtttaggtcgattagttttttgttttttttcgtaggaagatattttagattgtggtcgcggggtttttttttcgtcgtcgttgggcgttttggtttttttgtaattgttgttttttttgggtttgtcgtttcggtcgtagttttaagttttcgtttacgtttttcgtcgtttttgagtattttgttttattttatttttatttttattttattcggttttttcgttttttttatttttttgttttatatttttcgttttagagtttcgttttttttttattgaaggat

SEQ ID NO: 21690 - DNA, 505 bp, Artificial Sequence
  chemically treated genomic DNA (Homo sapiens) CpG-island No: 21690
atccttcaataaaaaaaaaacgaaactctaaaacgaaaaatataaaacaaaaaaataaaaaaaacgaaaaaaccgaataaaataaaaataaaaataaaataaaacaaaatactcaaaaacgacgaaaaacgtaaacgaaaacttaaaactacgaccgaaacgacaaacccaaaaaaaacaacaattacaaaaaaaccaaaacgcccaacgacgacgaaaaaaaaaccccgcgaccacaatctaaaatatcttcctacgaaaaaaaacaaaaaactaatcgacctaaacgaacgcaaaaccgcgaaatttcgaatccaccgccccctctcctcactatcgcgttataatcgaaacaaatatacgaacctctccgatatcgcgatctctacactaactcacactactccgaaccgtccgctaaacataaataaaaaatcaaaaaaacgaacgacgacgacgacacgaaaaaaacgcgcgaaacaaaaaaaaaacgaacgacgaaaaa

SEQ ID NO: 21691 - DNA, 505 bp, Artificial Sequence
  chemically treated genomic DNA (Homo sapiens) CpG-island No: 21691
gttttttagtgagggagggacgaggttttaaggcggggagtgtggggtaggagggtgggaaaggcgaagaggtcgggtgaggtgggagtggaggtggggtggggtagggtgtttagaggcggcgagaggcgtggacgaggatttgaggttgcggtcggggcggtaggtttaggaggagtagtagttgtagggagattaggacgtttagcgacggcgggaaggaggtttcgcggttatagtttgaggtatttttttgcggggagagataaggagttggtcggtttgggcgggcgtaaggtcgcgggatttcgggtttatcgttttttttttttattgtcgcgttgtagtcgaagtagatgtgcgggttttttcggtatcgcggtttttgtattagtttatattgtttcgggtcgttcgttgggtatgggtggggagttaaggaggcggacggcggcggcggtacggagggggcgcgcggggtagagggggagcgggcggcggggag

SEQ ID NO: 21692 - DNA, 505 bp, Artificial Sequence
  chemically treated genomic DNA (Homo sapiens) CpG-island No: 21692
ctccccgccgcccgctccccctctaccccgcgcgccccctccgtaccgccgccgccgtccgcctccttaactccccacccatacccaacgaacgacccgaaacaatataaactaatacaaaaaccgcgataccgaaaaaacccgcacatctacttcgactacaacgcgacaataaaaaaaaaaaacgataaacccgaaatcccgcgaccttacgcccgcccaaaccgaccaactccttatctctccccgcaaaaaaatacctcaaactataaccgcgaaacctccttcccgccgtcgctaaacgtcctaatctccctacaactactactcctcctaaacctaccgccccgaccgcaacctcaaatcctcgtccacgcctctcgccgcctctaaacaccctaccccaccccacctccactcccacctcacccgacctcttcgcctttcccaccctcctaccccacactccccgccttaaaacctcgtccctccctcactaaaaaac

SEQ ID NO: 21693 - DNA, 738 bp, Artificial Sequence
  chemically treated genomic DNA (Homo sapiens) CpG-island No: 21693
gggcggtttcgggcggcgcggtgggtcgagcgcgggtttcgtttttttgaggcgggttcgggcggggcggttgtatattagggtcgcgttgagttgcgttagttgaggtgtgagtagttgtcgaagttagttttttgtggagtcggagttgggcgcggattcgtcgaggtatcgaggtatttagaggaggtgagagagcggcggtagataataggggatttcgggtcggcggtttagagtcgagttaagcgtgttcgcgtgtgtttttgcgtgttcgcgaggatgcgtgttcgcgggtgtgtgttgcgtttataggtgtttttgcggtaggtgaatgacgggcgtgggtcggtgcgcgttcggtttgcgtatacggtgtttttaagtgcgcgggtgacgagagtcgggatgtgtcggagatttcggggcggagagcgggattataagtataggaatttttggttacgtttttcgtttttggaaatttagttggggcgagggagggcgtggacgggatcgttttgggagttcgtttttggttgcggttggttttaggttttaggcgtagtttgttcgcggcgtggggatgaagttcgtgtttttggaggggtttaggaagggcgaggaaagcggagtggagtaagttcgtttaggatcggtttcgggtggttttgggatttaatttgcgtcgttttggtttaggttttaggtttaggttttttacgttattgtgtttat

SEQ ID NO: 21694 - DNA, 738 bp, Artificial Sequence
  chemically treated genomic DNA (Homo sapiens) CpG-island No: 21694
ataaacacaataacgtaaaaaacctaaacctaaaacctaaaccaaaacgacgcaaattaaatcccaaaaccacccgaaaccgatcctaaacgaacttactccactccgctttcctcgcccttcctaaacccctccaaaaacacgaacttcatccccacgccgcgaacaaactacgcctaaaacctaaaaccaaccgcaaccaaaaacgaactcccaaaacgatcccgtccacgccctccctcgccccaactaaatttccaaaaacgaaaaacgtaaccaaaaattcctatacttataatcccgctctccgccccgaaatctccgacacatcccgactctcgtcacccgcgcacttaaaaacaccgtatacgcaaaccgaacgcgcaccgacccacgcccgtcattcacctaccgcaaaaacacctataaacgcaacacacacccgcgaacacgcatcctcgcgaacacgcaaaaacacacgcgaacacgcttaactcgactctaaaccgccgacccgaaatcccctattatctaccgccgctctctcacctcctctaaatacctcgatacctcgacgaatccgcgcccaactccgactccacaaaaaactaacttcgacaactactcacacctcaactaacgcaactcaacgcgaccctaatatacaaccgccccgcccgaacccgcctcaaaaaaacgaaacccgcgctcgacccaccgcgccgcccgaaaccgccc

SEQ ID NO: 21695 - DNA, 738 bp, Artificial Sequence
  chemically treated genomic DNA (Homo sapiens) CpG-island No: 21695
gtggatatagtggcgtaaaggatttgaatttgggatttgggttagggcggcgtagattggattttagagttattcgggatcgattttagacgaatttattttatttcgtttttttcgttttttttgggtttttttagggatacggattttatttttacgtcgcgagtaaattgcgtttggggtttggagttaatcgtagttaaaggcgagtttttagaacggtttcgtttacgttttttttcgttttagttgggtttttaggggcggggagcgtgattagggatttttgtatttgtaatttcgtttttcgtttcggggttttcggtatatttcgattttcgttattcgcgtatttagagatatcgtgtgcgtaagtcgagcgcgtatcgatttacgttcgttatttatttgtcgtagaaatatttgtgaacgtagtatatattcgcgaatacgtattttcgcggatacgtagggatatacgcgggtacgtttggttcggttttgggtcgtcggttcggggttttttgttgtttgtcgtcgtttttttattttttttgagtgtttcggtgtttcggcgaattcgcgtttagtttcggttttataaggaattgatttcggtagttgtttatattttagttggcgtagtttagcgcggttttgatatataatcgtttcgttcgggttcgttttaaggaggcgggattcgcgttcggtttatcgcgtcgttcgggatcgttt

SEQ ID NO: 21696 - DNA, 738 bp, Artificial Sequence
  chemically treated genomic DNA (Homo sapiens) CpG-island No: 21696
aaacgatcccgaacgacgcgataaaccgaacgcgaatcccgcctccttaaaacgaacccgaacgaaacgattatatatcaaaaccgcgctaaactacgccaactaaaatataaacaactaccgaaatcaattccttataaaaccgaaactaaacgcgaattcgccgaaacaccgaaacactcaaaaaaaataaaaaaacgacgacaaacaacaaaaaaccccgaaccgacgacccaaaaccgaaccaaacgtacccgcgtatatccctacgtatccgcgaaaatacgtattcgcgaatatatactacgttcacaaatatttctacgacaaataaataacgaacgtaaatcgatacgcgctcgacttacgcacacgatatctctaaatacgcgaataacgaaaatcgaaatataccgaaaaccccgaaacgaaaaacgaaattacaaatacaaaaatccctaatcacgctccccgcccctaaaaacccaactaaaacgaaaaaaaacgtaaacgaaaccgttctaaaaactcgcctttaactacgattaactccaaaccccaaacgcaatttactcgcgacgtaaaaataaaatccgtatccctaaaaaaacccaaaaaaaacgaaaaaaacgaaataaaataaattcgtctaaaatcgatcccgaataactctaaaatccaatctacgccgccctaacccaaatcccaaattcaaatcctttacgccactatatccac

SEQ ID NO: 21697 - DNA, 564 bp, Artificial Sequence
  chemically treated genomic DNA (Homo sapiens) CpG-island No: 21697
gggaaacgcggagtcgtggagaggggtattaggagagggacgcgcgtttgtgggtagaggtagaggggatgtagaagatagggagaggggcgtgaggagcgggaggcgtcggatggggcgttggcggcgggggtggcggggcgtcggtagcgcggagttcgagcgttcgggttgcgtcgtttttttttgggttttggcgtcggcggcgacggggttgagacgcggttgcgagcgttattttttcggttcgggtttcggtttcggggcgttcgggttgcgggaaaattaaatttgttcgaagtcgtagtttttcgtcgttcgggaacgttagagggggcgttcgtaggggtcggggcggggtcgcgggcggggtttgcgcgtagggtgagtgtgagcgtgtgtgtgtgcgcgtgtgtgtgtgtgtgcgcgcgtggcgggtcgggggacgcggtttagatgttggggacgtggcgggtgatagtaagaggtggttttggtcgcgcgtatttttatttgcgttcgtttttttttattatttttattttttattaggggtttttattt

SEQ ID NO: 21698 - DNA, 564 bp, Artificial Sequence
  chemically treated genomic DNA (Homo sapiens) CpG-island No: 21698
aaataaaaacccctaataaaaaataaaaataataaaaaaaaacgaacgcaaataaaaatacgcgcgaccaaaaccacctcttactatcacccgccacgtccccaacatctaaaccgcgtcccccgacccgccacgcgcgcacacacacacacacgcgcacacacacacgctcacactcaccctacgcgcaaaccccgcccgcgaccccgccccgacccctacgaacgccccctctaacgttcccgaacgacgaaaaactacgacttcgaacaaatttaattttcccgcaacccgaacgccccgaaaccgaaacccgaaccgaaaaaataacgctcgcaaccgcgtctcaaccccgtcgccgccgacgccaaaacccaaaaaaaaacgacgcaacccgaacgctcgaactccgcgctaccgacgccccgccacccccgccgccaacgccccatccgacgcctcccgctcctcacgcccctctccctatcttctacatcccctctacctctacccacaaacgcgcgtccctctcctaatacccctctccacgactccgcgtttccc

SEQ ID NO: 21699 - DNA, 564 bp, Artificial Sequence
  chemically treated genomic DNA (Homo sapiens) CpG-island No: 21699
ggatggagatttttgatgggagataggggtggtgagagggggcgggcgtaaatgaagatgcgcgcgattaggattattttttgttgttattcgttacgtttttagtatttggatcgcgtttttcggttcgttacgcgcgtatatatatatatacgcgtatatatatacgtttatatttattttgcgcgtagatttcgttcgcggtttcgtttcggtttttgcgggcgttttttttggcgttttcgggcggcgggaggttgcggtttcgggtagatttgattttttcgtagttcgggcgtttcggagtcgaagttcgagtcgaggaggtggcgttcgtagtcgcgttttagtttcgtcgtcgtcggcgttaagatttagggagaggcggcgtagttcgggcgttcgggtttcgcgttgtcggcgtttcgttattttcgtcgttagcgttttattcggcgtttttcgttttttacgtttttttttttgttttttgtattttttttatttttgtttatagacgcgcgttttttttttggtgtttttttttacgatttcgcgtttttt

SEQ ID NO: 21700 - DNA, 564 bp, Artificial Sequence
  chemically treated genomic DNA (Homo sapiens) CpG-island No: 21700
aaaaaacgcgaaatcgtaaaaaaaaacaccaaaaaaaaaacgcgcgtctataaacaaaaataaaaaaaatacaaaaaacaaaaaaaaaaacgtaaaaaacgaaaaacgccgaataaaacgctaacgacgaaaataacgaaacgccgacaacgcgaaacccgaacgcccgaactacgccgcctctccctaaatcttaacgccgacgacgacgaaactaaaacgcgactacgaacgccacctcctcgactcgaacttcgactccgaaacgcccgaactacgaaaaaatcaaatctacccgaaaccgcaacctcccgccgcccgaaaacgccaaaaaaaacgcccgcaaaaaccgaaacgaaaccgcgaacgaaatctacgcgcaaaataaatataaacgtatatatatacgcgtatatatatatatacgcgcgtaacgaaccgaaaaacgcgatccaaatactaaaaacgtaacgaataacaacaaaaaataatcctaatcgcgcgcatcttcatttacgcccgccccctctcaccacccctatctcccatcaaaaatctccatcc

SEQ ID NO: 21701 - DNA, 529 bp, Artificial Sequence
  chemically treated genomic DNA (Homo sapiens) CpG-island No: 21701
gatattttttttacgtcgtacgcgttttgtttttcgttttttttgattttattcggagcggattttttagttacgtattttgtagtcgttataggtgaggtcggcgttacgtttggttaagacgtattttatttttaggaagaaggagcgttcgattttatattttgggagagaggaacgaagggaagtttaggtcgtgtgatatcggcggcgtgggatagtacgcgtttttgttacgattaattggggaaaaattataagcggattgcgatgggtttgagcgtcgtaggtatgtgtttattttattttgtacgaagtgagagtggtagggttgatgggcggtgagtatcgtcgttatttcgtcgtggtttgtcgggtgaatgtatttataaatgttgttttcggttagttttatttgtaaagaggaggatgtcgtcgtcgtcgtggcggtggaatgttcggtgaagggattgaaagattaggttaggggatttgtaggattatgaggatagtagttagaattttggaa

SEQ ID NO: 21702 - DNA, 529 bp, Artificial Sequence
  chemically treated genomic DNA (Homo sapiens) CpG-island No: 21702
ttccaaaattctaactactatcctcataatcctacaaatcccctaacctaatctttcaatcccttcaccgaacattccaccgccacgacgacgacgacatcctcctctttacaaataaaactaaccgaaaacaacatttataaatacattcacccgacaaaccacgacgaaataacgacgatactcaccgcccatcaaccctaccactctcacttcgtacaaaataaaataaacacatacctacgacgctcaaacccatcgcaatccgcttataatttttccccaattaatcgtaacaaaaacgcgtactatcccacgccgccgatatcacacgacctaaacttcccttcgttcctctctcccaaaatataaaatcgaacgctccttcttcctaaaaataaaatacgtcttaaccaaacgtaacgccgacctcacctataacgactacaaaatacgtaactaaaaaatccgctccgaataaaatcaaaaaaaacgaaaaacaaaacgcgtacgacgtaaaaaaaatatc

SEQ ID NO: 21703 - DNA, 529 bp, Artificial Sequence
  chemically treated genomic DNA (Homo sapiens) CpG-island No: 21703
ttttagaattttggttgttgtttttatggttttgtagattttttggtttaattttttagtttttttatcgggtattttatcgttacggcgacggcgatatttttttttttataggtagagttgatcggaaatagtatttatgaatatatttattcggtagattacgacgagatgacggcggtgtttatcgtttattaattttattatttttatttcgtgtagggtaaggtagatatatgtttgcgacgtttaggtttatcgtagttcgtttgtggtttttttttaattagtcgtggtagagacgcgtgttgttttacgtcgtcggtgttatacgatttgagttttttttcgttttttttttttagagtatgagatcgagcgttttttttttttgaggatgaagtgcgttttggttaagcgtaacgtcggttttatttgtggcggttataaggtgcgtagttggaagattcgtttcgggtggagttagaggaggcgggaagtaaggcgcgtgcggcgtgggaggaatgtt

SEQ ID NO: 21704 - DNA, 529 bp, Artificial Sequence
  chemically treated genomic DNA (Homo sapiens) CpG-island No: 21704
aacattcctcccacgccgcacgcgccttacttcccgcctcctctaactccacccgaaacgaatcttccaactacgcaccttataaccgccacaaataaaaccgacgttacgcttaaccaaaacgcacttcatcctcaaaaaaaaaaaacgctcgatctcatactctaaaaaaaaaaaacgaaaaaaaactcaaatcgtataacaccgacgacgtaaaacaacacgcgtctctaccacgactaattaaaaaaaaaccacaaacgaactacgataaacctaaacgtcgcaaacatatatctaccttaccctacacgaaataaaaataataaaattaataaacgataaacaccgccgtcatctcgtcgtaatctaccgaataaatatattcataaatactatttccgatcaactctacctataaaaaaaaaaatatcgccgtcgccgtaacgataaaatacccgataaaaaaactaaaaaattaaaccaaaaaatctacaaaaccataaaaacaacaaccaaaattctaaaa

SEQ ID NO: 21705 - DNA, 1046 bp, Artificial Sequence
  chemically treated genomic DNA (Homo sapiens) CpG-island No: 21705
gtcgcgtgtagaatttcgtttggttttgtgttcgagacgggcggaggttggaatttgagattttaataaaggaagtagagtcgttgtcggtattgcgtgttattttatagcgcggcgggttcgtcgtaggttcgcggggtagttggcgggcgggggttttcggcggggttgtcgttatggtaatcggcggcgtttatagtcgttttcggggcggtttttttagtgtttttcgtagaggtttttttcggggcgggttaaaggaggttattttcggggttcgtttcggttttcggtcgttgttacgacgacgaagttgtcggttaatggttggcggatgggtttaaggttttcggcgtgtagcgcggttgtttgagggcggtaggtttatggcgtcggcgtcgcggttgttcgcgttttgggcgttggcggttgtggttttattcggtttcggggcggagggcgacggcgggtggtgagcggttcgggaggggtcgggcggtggggttacgtgcggcgggcggggcgcgggttgatttagttgtgttcgtaggcgttcgggcgggtcgggggtcgtggcggaggaggagcgttgtacggtggagcgtcgggtcgattttatttacgcggagttcgtgtagtagtacgtgcgtttttgatcgcggaggtcgcgttttgtttatcggttcgtttgtttcgatcgtttaaggtcgtttttttttgatttcgcgcgtacgcgtggggttggggcggcgaggttggcggttcggtttggtcgcgattttgtttttttttttaggtacgttttcgttaggttcgttattttgtagggatttacggataattcggtgagcgcgtgttcgttcgttttcggttattttcgttcgtgttgggttcggttattaagtttttttttcgttttcgtagaggtttcgggttttgtgttttcgcgataggttgttggtttcgtttggggatagagtggttcggttgagtatcgttaatatttatttttattataaaggtacgcggttttatttttggggttt

SEQ ID NO: 21706 - DNA, 1046 bp, Artificial Sequence
  chemically treated genomic DNA (Homo sapiens) CpG-island No: 21706
aaaccccaaaaataaaaccgcgtacctttataataaaaataaatattaacgatactcaaccgaaccactctatccccaaacgaaaccaacaacctatcgcgaaaacacaaaacccgaaacctctacgaaaacgaaaaaaaaacttaataaccgaacccaacacgaacgaaaataaccgaaaacgaacgaacacgcgctcaccgaattatccgtaaatccctacaaaataacgaacctaacgaaaacgtacctaaaaaaaaaaacaaaatcgcgaccaaaccgaaccgccaacctcgccgccccaaccccacgcgtacgcgcgaaatcaaaaaaaaacgaccttaaacgatcgaaacaaacgaaccgataaacaaaacgcgacctccgcgatcaaaaacgcacgtactactacacgaactccgcgtaaataaaatcgacccgacgctccaccgtacaacgctcctcctccgccacgacccccgacccgcccgaacgcctacgaacacaactaaatcaacccgcgccccgcccgccgcacgtaaccccaccgcccgacccctcccgaaccgctcaccacccgccgtcgccctccgccccgaaaccgaataaaaccacaaccgccaacgcccaaaacgcgaacaaccgcgacgccgacgccataaacctaccgccctcaaacaaccgcgctacacgccgaaaaccttaaacccatccgccaaccattaaccgacaacttcgtcgtcgtaacaacgaccgaaaaccgaaacgaaccccgaaaataacctcctttaacccgccccgaaaaaaacctctacgaaaaacactaaaaaaaccgccccgaaaacgactataaacgccgccgattaccataacgacaaccccgccgaaaacccccgcccgccaactaccccgcgaacctacgacgaacccgccgcgctataaaataacacgcaataccgacaacgactctacttcctttattaaaatctcaaattccaacctccgcccgtctcgaacacaaaaccaaacgaaattctacacgcgac

SEQ ID NO: 21707 - DNA, 1046 bp, Artificial Sequence
  chemically treated genomic DNA (Homo sapiens) CpG-island No: 21707
gggttttaggggtgaggtcgcgtatttttgtggtaggagtaggtgttggcggtgtttagtcggattattttgtttttaaacgaagttagtaatttgtcgcgggagtatagggttcggaatttttgcgggggcggggaggggatttagtggtcgggtttagtacgggcgagagtggtcggggacggacgggtacgcgtttatcgagttgttcgtgagtttttgtaggatgacgggtttgacgaaggcgtatttggaaagaagggtagagtcgcggttaggtcggatcgttagtttcgtcgttttagttttacgcgtgcgcgcgaggttaggggaaggcggttttgggcggtcggggtagacgggtcggtgaataggacgcgattttcgcgattaggggcgtacgtattgttgtacgaatttcgcgtaggtgaggtcggttcgacgttttatcgtgtagcgtttttttttcgttacggttttcggttcgttcgggcgtttgcgggtatagttgggttagttcgcgtttcgttcgtcgtacgtgattttatcgttcggtttttttcgggtcgtttattattcgtcgtcgtttttcgtttcggagtcgggtagagttatagtcgttagcgtttagagcgcgagtaatcgcgacgtcggcgttatgagtttgtcgtttttaggtagtcgcgttgtacgtcgggaattttgggtttattcgttagttattggtcggtagtttcgtcgtcgtggtaacggtcgggaatcgggacggatttcggaagtgattttttttggttcgtttcggaagaggtttttacgggaggtattgggaaggtcgtttcgagagcgattatgggcgtcgtcggttattatggcgataatttcgtcgaaagttttcgttcgttagttgtttcgcgggtttacggcgagttcgtcgcgttatggggtgatacgtagtgtcgatagcggttttattttttttattgaggttttaagttttagttttcgttcgtttcgggtataagattaggcggggttttgtacgcggt

SEQ ID NO: 21708 - DNA, 1046 bp, Artificial Sequence
  chemically treated genomic DNA (Homo sapiens) CpG-island No: 21708
accgcgtacaaaaccccgcctaatcttatacccgaaacgaacgaaaactaaaacttaaaacctcaataaaaaaaataaaaccgctatcgacactacgtatcaccccataacgcgacgaactcgccgtaaacccgcgaaacaactaacgaacgaaaactttcgacgaaattatcgccataataaccgacgacgcccataatcgctctcgaaacgaccttcccaatacctcccgtaaaaacctcttccgaaacgaaccaaaaaaaatcacttccgaaatccgtcccgattcccgaccgttaccacgacgacgaaactaccgaccaataactaacgaataaacccaaaattcccgacgtacaacgcgactacctaaaaacgacaaactcataacgccgacgtcgcgattactcgcgctctaaacgctaacgactataactctacccgactccgaaacgaaaaacgacgacgaataataaacgacccgaaaaaaaccgaacgataaaatcacgtacgacgaacgaaacgcgaactaacccaactatacccgcaaacgcccgaacgaaccgaaaaccgtaacgaaaaaaaaacgctacacgataaaacgtcgaaccgacctcacctacgcgaaattcgtacaacaatacgtacgcccctaatcgcgaaaatcgcgtcctattcaccgacccgtctaccccgaccgcccaaaaccgccttcccctaacctcgcgcgcacgcgtaaaactaaaacgacgaaactaacgatccgacctaaccgcgactctacccttctttccaaatacgccttcgtcaaacccgtcatcctacaaaaactcacgaacaactcgataaacgcgtacccgtccgtccccgaccactctcgcccgtactaaacccgaccactaaatcccctccccgcccccgcaaaaattccgaaccctatactcccgcgacaaattactaacttcgtttaaaaacaaaataatccgactaaacaccgccaacacctactcctaccacaaaaatacgcgacctcacccctaaaaccc

SEQ ID NO: 21709 - DNA, 812 bp, Artificial Sequence
  chemically treated genomic DNA (Homo sapiens) CpG-island No: 21709
attcggcgttgggttcgagaattacggttgggttttgggagtcgaggatacgtttcgaagaggagttagattttcggtggggtcggtcgggttcgggttcggtttttttcggtgttatcgtcgtcgtttttttcgcgcgggcgtatttacgatcgcgcggtcgtagtaggtcgtcgttttcgggtattttcggtttacgaatagacgattgttttgttttttgagtttttgcgcgttcgggtttttttcggggttttcgtcgttagcgtttagtcgtgcgtcgtttttttttttttttttgttttttatggcgtcgcgcggtacggtttgggtttcgtttttaagtttcgcgtttcgcggtttagcgttcgtagtcggagtttcgtagttcgagttcgcgattcgttcgggttcggtttagtttcgtcgtcggaattttcggtcgggggcgggattagcggggacgtacgcgtgggggcgagtggggtcgcgcgtgcgtttaattagtttggacggggatattgggttcgcgacgtcgggggttgggaggaacgttttagttttttgttttcgcgtttttaagggtgggcgttcgcgtaggttttggtttgttttgttgaggttttttcggaattcgtttcggcggcggtcgttatatatattcgatttttttagtgagatgttttatttgtttcgttgagggcgcgttttcgtaatagtttgtttcgattatttggggtttcgtttttgttttaacgcgtagagatttttttttcggtagtcggttttatttagaggtttcgtttttagta

SEQ ID NO: 21710 - DNA, 812 bp, Artificial Sequence
  chemically treated genomic DNA (Homo sapiens) CpG-island No: 21710
tactaaaaacgaaacctctaaataaaaccgactaccgaaaaaaaaatctctacgcgttaaaacaaaaacgaaaccccaaataatcgaaacaaactattacgaaaacgcgccctcaacgaaacaaataaaacatctcactaaaaaaatcgaatatatataacgaccgccgccgaaacgaattccgaaaaaacctcaacaaaacaaaccaaaacctacgcgaacgcccacccttaaaaacgcgaaaacaaaaaactaaaacgttcctcccaacccccgacgtcgcgaacccaatatccccgtccaaactaattaaacgcacgcgcgaccccactcgcccccacgcgtacgtccccgctaatcccgcccccgaccgaaaattccgacgacgaaactaaaccgaacccgaacgaatcgcgaactcgaactacgaaactccgactacgaacgctaaaccgcgaaacgcgaaacttaaaaacgaaacccaaaccgtaccgcgcgacgccataaaaaacaaaaaaaaaaaaaaaaacgacgcacgactaaacgctaacgacgaaaaccccgaaaaaaacccgaacgcgcaaaaactcaaaaaacaaaacaatcgtctattcgtaaaccgaaaatacccgaaaacgacgacctactacgaccgcgcgatcgtaaatacgcccgcgcgaaaaaaacgacgacgataacaccgaaaaaaaccgaacccgaacccgaccgaccccaccgaaaatctaactcctcttcgaaacgtatcctcgactcccaaaacccaaccgtaattctcgaacccaacgccgaat

SEQ ID NO: 21711 - DNA, 812 bp, Artificial Sequence
  chemically treated genomic DNA (Homo sapiens) CpG-island No: 21711
tgttgggggcggggtttttggatggggtcggttgtcgggggaggggtttttgcgcgttgggataggggcggaattttaggtggtcgggataggttgttgcgggagcgcgtttttagcgaagtaagtgaggtattttattgggaaagtcgaatgtgtgtggcggtcgtcgtcgaggcgggtttcgaagagattttagtagggtaggttagggtttacgcgaacgtttatttttaagagcgcggggatagggaattggagcgttttttttagttttcgacgtcgcgggtttagtgttttcgtttaggttggttgggcgtacgcgcggttttattcgtttttacgcgtgcgttttcgttggtttcgttttcggtcggaagtttcggcggcggagttgggtcgggttcgagcggatcgcgggttcgggttgcggggtttcggttgcgggcgttgggtcgcgaggcgcggagtttgggagcggagtttaggtcgtgtcgcgcggcgttatgaagggtaaggaggagaaggagggcggcgtacggttgggcgttggcggcggaagtttcgagaagagttcgagcgcgtaggagtttaaggagtagggtaatcgtttgttcgtgggtcgaaagtattcggaggcggcggtttgttacggtcgcgcgatcgtgagtgcgttcgcgcggggagggcggcggcggtggtatcggggagggtcgggttcgggttcggtcggttttatcgagggtttggttttttttcggggcgtgttttcggtttttaaagtttagtcgtggttttcgagtttagcgtcgggt

SEQ ID NO: 21712 - DNA, 812 bp, Artificial Sequence
  chemically treated genomic DNA (Homo sapiens) CpG-island No: 21712
acccgacgctaaactcgaaaaccacgactaaactttaaaaaccgaaaacacgccccgaaaaaaaaccaaaccctcgataaaaccgaccgaacccgaacccgaccctccccgataccaccgccgccgccctccccgcgcgaacgcactcacgatcgcgcgaccgtaacaaaccgccgcctccgaatactttcgacccacgaacaaacgattaccctactccttaaactcctacgcgctcgaactcttctcgaaacttccgccgccaacgcccaaccgtacgccgccctccttctcctccttacccttcataacgccgcgcgacacgacctaaactccgctcccaaactccgcgcctcgcgacccaacgcccgcaaccgaaaccccgcaacccgaacccgcgatccgctcgaacccgacccaactccgccgccgaaacttccgaccgaaaacgaaaccaacgaaaacgcacgcgtaaaaacgaataaaaccgcgcgtacgcccaaccaacctaaacgaaaacactaaacccgcgacgtcgaaaactaaaaaaaacgctccaattccctatccccgcgctcttaaaaataaacgttcgcgtaaaccctaacctaccctactaaaatctcttcgaaacccgcctcgacgacgaccgccacacacattcgactttcccaataaaatacctcacttacttcgctaaaaacgcgctcccgcaacaacctatcccgaccacctaaaattccgcccctatcccaacgcgcaaaaacccctcccccgacaaccgaccccatccaaaaaccccgcccccaaca

SEQ ID NO: 21713 - DNA, 875 bp, Artificial Sequence
  chemically treated genomic DNA (Homo sapiens) CpG-island No: 21713
aagcggattaggtcgagttcgcgtttagtttttttttcgtttcgcgtattacgggtattttgtggattttttttcgtagtttttcgttcgtttgttcggtttttagggggataaagagattttattgcggatttagtaggttcgtcggatcgttgcgggtcgggttttcgggaggttacggtcgttatttgagtagtttacgatgtgggtgggtatttttttcggggtgacgttcgcggggatggtgatttttttcgcgcggggagggatttgtaagggattcgcgcgtttattagggattttcggttgggttcgtttttattttcgcggcgggcgtgttttttattttttcggggaatttttcgtttattagggataggattagcgacgttttttttatttgggttgcgcggggcgaggcggttagcgcgagggttaaggttacggcgtttttcgattttcgagatttttatttcgttttacggtcgtcgtagtttcgagattttcgggtcggcgtttattttcgtttagtaataggatgcgtacgtttcgttttatagttgtcgttcggagtcgtttttcgattcggaattcggtttcgatttggtttttaagtttttcgttttgttttcgcgttcgtttcgtattttcggttttcggtttcgcgttgtttttatattttcggtttcgttcgtatagtcgtattagcgagtcgggcgggttagagcggataggttgtgcggcgcgttatcgtgtggacgcgtcggttacggcggatagcgtagggttttggcgttttggtaggtcgagcggttattgttttacggtattataggggttttgataaatagtcgattaagggacgggtagaggtt

SEQ ID NO: 21714 - DNA, 875 bp, Artificial Sequence
  chemically treated genomic DNA (Homo sapiens) CpG-island No: 21714
aacctctacccgtcccttaatcgactatttatcaaaacccctataataccgtaaaacaataaccgctcgacctaccaaaacgccaaaaccctacgctatccgccgtaaccgacgcgtccacacgataacgcgccgcacaacctatccgctctaacccgcccgactcgctaatacgactatacgaacgaaaccgaaaatataaaaacaacgcgaaaccgaaaaccgaaaatacgaaacgaacgcgaaaacaaaacgaaaaacttaaaaaccaaatcgaaaccgaattccgaatcgaaaaacgactccgaacgacaactataaaacgaaacgtacgcatcctattactaaacgaaaataaacgccgacccgaaaatctcgaaactacgacgaccgtaaaacgaaataaaaatctcgaaaatcgaaaaacgccgtaaccttaaccctcgcgctaaccgcctcgccccgcgcaacccaaataaaaaaaacgtcgctaatcctatccctaataaacgaaaaattccccgaaaaaataaaaaacacgcccgccgcgaaaataaaaacgaacccaaccgaaaatccctaataaacgcgcgaatcccttacaaatccctccccgcgcgaaaaaaatcaccatccccgcgaacgtcaccccgaaaaaaatacccacccacatcgtaaactactcaaataacgaccgtaacctcccgaaaacccgacccgcaacgatccgacgaacctactaaatccgcaataaaatctctttatccccctaaaaaccgaacaaacgaacgaaaaactacgaaaaaaaatccacaaaatacccgtaatacgcgaaacgaaaaaaaaactaaacgcgaactcgacctaatccgctt

SEQ ID NO: 21715 - DNA, 875 bp, Artificial Sequence
  chemically treated genomic DNA (Homo sapiens) CpG-island No: 21715
agtttttgttcgttttttaatcggttgtttgttaaggtttttgtggtgtcgtgaagtaatggtcgttcggtttgttagggcgttaggattttgcgttgttcgtcgtggtcggcgcgtttatacggtggcgcgtcgtatagtttgttcgttttggttcgttcggttcgttggtgcggttgtgcgggcggggtcggaagtgtggggatagcgcggggtcgagaatcggaagtgcggggcgggcgcgggggtagagcgaaaggtttgaggattaggtcggggtcgggtttcgggtcggggagcggtttcgggcggtagttatgaggcgggacgtgcgtattttgttattgggcgagggtaggcgtcggttcgggggtttcggagttgcggcggtcgtgaggcggggtgagggtttcgggggtcggggggcgtcgtgattttggttttcgcgttgatcgtttcgtttcgcgtagtttaggtggggaagacgtcgttgattttgtttttggtgggcgaggagtttttcgaggaggtaaggggtacgttcgtcgcgggggtgggagcgggtttagtcgggggtttttggtgagcgcgcgggttttttgtaggttttttttcgcgcggaggagattattattttcgcggacgttatttcggagaaggtgtttatttatatcgtggattatttaggtagcggtcgtagtttttcgggggttcggttcgtagcggttcggcgggtttgttgggttcgtagtggagtttttttgtttttttagaagtcgagtagacggacgaggagttgcgggaggagatttataaggtattcgtggtgcgcgggacgagggaggggttgggcgcgggttcggtttaattcgttt

SEQ ID NO: 21716 - DNA, 875 bp, Artificial Sequence
  chemically treated genomic DNA (Homo sapiens) CpG-island No: 21716
aaacgaattaaaccgaacccgcgcccaacccctccctcgtcccgcgcaccacgaataccttataaatctcctcccgcaactcctcgtccgtctactcgacttctaaaaaaacaaaaaaactccactacgaacccaacaaacccgccgaaccgctacgaaccgaacccccgaaaaactacgaccgctacctaaataatccacgatataaataaacaccttctccgaaataacgtccgcgaaaataataatctcctccgcgcgaaaaaaaacctacaaaaaacccgcgcgctcaccaaaaacccccgactaaacccgctcccacccccgcgacgaacgtaccccttacctcctcgaaaaactcctcgcccaccaaaaacaaaatcaacgacgtcttccccacctaaactacgcgaaacgaaacgatcaacgcgaaaaccaaaatcacgacgccccccgacccccgaaaccctcaccccgcctcacgaccgccgcaactccgaaacccccgaaccgacgcctaccctcgcccaataacaaaatacgcacgtcccgcctcataactaccgcccgaaaccgctccccgacccgaaacccgaccccgacctaatcctcaaacctttcgctctacccccgcgcccgccccgcacttccgattctcgaccccgcgctatccccacacttccgaccccgcccgcacaaccgcaccaacgaaccgaacgaaccaaaacgaacaaactatacgacgcgccaccgtataaacgcgccgaccacgacgaacaacgcaaaatcctaacgccctaacaaaccgaacgaccattacttcacgacaccacaaaaaccttaacaaacaaccgattaaaaaacgaacaaaaact

SEQ ID NO: 21717 - DNA, 827 bp, Artificial Sequence
  chemically treated genomic DNA (Homo sapiens) CpG-island No: 21717
tcgtatagtatttatttatagttagcgaagtatcgcgttcggacgcgttgtttattcggtcgggcggttagtttattatttttaagagcggtacggtatagtttttcgtcggcgtttttcgtcgtaaagttgttttggcgggcggttttcgttttcgcgtagcgtacgtttttacgagttagtttttagttcggggtttggtagggttggatgcgttggcgcgtgtgcgggttttattagcgtttgtcgttttcgcgcgtcgtcgtttaagtcggtttggtcgtttatttgacgttgaatcgggtgttagttcgttttgggtatgggggcgtagtatttcgtcgtcggtcgatttttttcgcgggggcgtcggggaaattatagtttacgggttttttgttgcgtttggtgcgtcgaggcggggggcggtcgttagagtttattaggggacgattgagtaaaagcgttagtaaagtggagatttagacgggtagcggaggcgaagcggttgcgtagttttagtttcggttttagtttcggttttagtttcggttttcgttttcgttaagtttttattcgtcggtttcgtcgtggtatttgtgtagtggagttagggcgagcgtcgggttatggtcgcggaggttcgttcgttttttcgttcgcggcgggtcggggcggggtaggcgcggtcggacggggcgtcggtattttattggaagcgggtttaggagcgtaattgatttttgtcggttaatttttttcggttttttggattggtcgttggtggcgggttgtggatcgttgtcgggtaaagtgggtgtagtttt

SEQ ID NO: 21718 - DNA, 827 bp, Artificial Sequence
  chemically treated genomic DNA (Homo sapiens) CpG-island No: 21718
aaaactacacccactttacccgacaacgatccacaacccgccaccaacgaccaatccaaaaaaccgaaaaaaattaaccgacaaaaatcaattacgctcctaaacccgcttccaataaaataccgacgccccgtccgaccgcgcctaccccgccccgacccgccgcgaacgaaaaaacgaacgaacctccgcgaccataacccgacgctcgccctaactccactacacaaataccacgacgaaaccgacgaataaaaacttaacgaaaacgaaaaccgaaactaaaaccgaaactaaaaccgaaactaaaactacgcaaccgcttcgcctccgctacccgtctaaatctccactttactaacgcttttactcaatcgtcccctaataaactctaacgaccgccccccgcctcgacgcaccaaacgcaacaaaaaacccgtaaactataatttccccgacgcccccgcgaaaaaaatcgaccgacgacgaaatactacgcccccatacccaaaacgaactaacacccgattcaacgtcaaataaacgaccaaaccgacttaaacgacgacgcgcgaaaacgacaaacgctaataaaacccgcacacgcgccaacgcatccaaccctaccaaaccccgaactaaaaactaactcgtaaaaacgtacgctacgcgaaaacgaaaaccgcccgccaaaacaactttacgacgaaaaacgccgacgaaaaactataccgtaccgctcttaaaaataataaactaaccgcccgaccgaataaacaacgcgtccgaacgcgatacttcgctaactataaataaatactatacga

SEQ ID NO: 21719 - DNA, 827 bp, Artificial Sequence
  chemically treated genomic DNA (Homo sapiens) CpG-island No: 21719
agagttgtatttattttgttcggtagcggtttatagttcgttattagcggttagtttagggaatcggagaggattggtcggtaaaagttagttgcgtttttgggttcgtttttagtagagtgtcggcgtttcgttcggtcgcgtttgtttcgtttcggttcgtcgcgagcgagagagcgaacgagttttcgcggttatggttcggcgttcgttttagttttattgtatagatgttacggcggagtcggcgggtaggaatttggcgggggcgggggtcgggattggggtcgggattggggtcggggttggggttgcgtaatcgtttcgttttcgttgttcgtttgggtttttattttgttggcgtttttgtttaatcgttttttggtgggttttggcggtcgtttttcgtttcggcgtattaggcgtagtaggaagttcgtgggttgtggttttttcggcgttttcgcggaggaaatcggtcggcggcggggtgttgcgtttttatgtttagggcgggttggtattcggtttagcgttaggtgggcggttaagtcggtttgggcggcggcgcgcgggggcggtaggcgttggtgaagttcgtatacgcgttagcgtatttagttttattaagtttcgggttgggagttggttcgtgggggcgtgcgttgcgcgaaagcgaaagtcgttcgttagagtaattttgcggcggaaggcgtcgacgaggagttgtgtcgtgtcgtttttggggatggtgagttggtcgttcggtcgggtgggtagcgcgttcgggcgcggtgtttcgttagttataaataggtgttgtgcgg

SEQ ID NO: 21720 - DNA, 827 bp, Artificial Sequence
  chemically treated genomic DNA (Homo sapiens) CpG-island No: 21720
ccgcacaacacctatttataactaacgaaacaccgcgcccgaacgcgctacccacccgaccgaacgaccaactcaccatccccaaaaacgacacgacacaactcctcgtcgacgccttccgccgcaaaattactctaacgaacgactttcgctttcgcgcaacgcacgcccccacgaaccaactcccaacccgaaacttaataaaactaaatacgctaacgcgtatacgaacttcaccaacgcctaccgcccccgcgcgccgccgcccaaaccgacttaaccgcccacctaacgctaaaccgaataccaacccgccctaaacataaaaacgcaacaccccgccgccgaccgatttcctccgcgaaaacgccgaaaaaaccacaacccacgaacttcctactacgcctaatacgccgaaacgaaaaacgaccgccaaaacccaccaaaaaacgattaaacaaaaacgccaacaaaataaaaacccaaacgaacaacgaaaacgaaacgattacgcaaccccaaccccgaccccaatcccgaccccaatcccgacccccgcccccgccaaattcctacccgccgactccgccgtaacatctatacaataaaactaaaacgaacgccgaaccataaccgcgaaaactcgttcgctctctcgctcgcgacgaaccgaaacgaaacaaacgcgaccgaacgaaacgccgacactctactaaaaacgaacccaaaaacgcaactaacttttaccgaccaatcctctccgattccctaaactaaccgctaataacgaactataaaccgctaccgaacaaaataaatacaactct

SEQ ID NO: 21721 - DNA, 1163 bp, Artificial Sequence
  chemically treated genomic DNA (Homo sapiens) CpG-island No: 21721
tagtacgggattacgatttagatatagatttacggtgatagtacgggattacgatttagatatagatttacggtgatagtacgggattacgatttagatagatttacggtgatagtacgggattacgatttagatatagatttacggtgatagtacgggattacgatttagatatagatttacggtgatagtacgggattacgatttagatagatttacggtgatagtacgggattacgatttagatagatttacggtgatagtacgggattacgatttagatatagatttacggtgatagtacgggattacgatttagatatagatttacggtgatagtacgggattacgatttagatatagatttacggtgatagtacgggattacgatttagatagatttacggtgatagtacgggattacgatttagatatagatttacggtgatagtacgggattacgatttagatatagatttacggtgatagtacgggattacgatttagatatagatttacggtgatagtacgggattacgatttagatatagatttacggtgatagtacgggattacgatttagatatagatttacggtgatagtacgggattacgatttagatatagatttacggtgatagtacgggattacgatttagatagatttacggtgatagtacgggattacgatttagatatagatttacggtgatagtacgggattacgatttagatatagatttacggtgatagtacgggattacgatttagatatagatttacggtgatagtacgggattacgatttagatatagatttacggtgatagtacgggattattatttagatagatttacggtgatagtacgggattacgatttagatatagatttacggtgatagtacgggattacgatttagatatagatttacggtgatagtacgggattacgatttagatatagatttacggtgatagtacgggattacgatttagatatagatttacggtgatagtacgggattacgatttagatatagatttacggtgatagtatgggattacgatttagatatagatttacggtgatagaacgggattacgatttagagggaaaataaatgggcgtgggtttatagtgataaaattagtgattataaat

SEQ ID NO: 21722 - DNA, 1163 bp, Artificial Sequence
  chemically treated genomic DNA (Homo sapiens) CpG-island No: 21722
atttataatcactaattttatcactataaacccacgcccatttattttccctctaaatcgtaatcccgttctatcaccgtaaatctatatctaaatcgtaatcccatactatcaccgtaaatctatatctaaatcgtaatcccgtactatcaccgtaaatctatatctaaatcgtaatcccgtactatcaccgtaaatctatatctaaatcgtaatcccgtactatcaccgtaaatctatatctaaatcgtaatcccgtactatcaccgtaaatctatatctaaatcgtaatcccgtactatcaccgtaaatctatctaaataataatcccgtactatcaccgtaaatctatatctaaatcgtaatcccgtactatcaccgtaaatctatatctaaatcgtaatcccgtactatcaccgtaaatctatatctaaatcgtaatcccgtactatcaccgtaaatctatatctaaatcgtaatcccgtactatcaccgtaaatctatctaaatcgtaatcccgtactatcaccgtaaatctatatctaaatcgtaatcccgtactatcaccgtaaatctatatctaaatcgtaatcccgtactatcaccgtaaatctatatctaaatcgtaatcccgtactatcaccgtaaatctatatctaaatcgtaatcccgtactatcaccgtaaatctatatctaaatcgtaatcccgtactatcaccgtaaatctatatctaaatcgtaatcccgtactatcaccgtaaatctatctaaatcgtaatcccgtactatcaccgtaaatctatatctaaatcgtaatcccgtactatcaccgtaaatctatatctaaatcgtaatcccgtactatcaccgtaaatctatatctaaatcgtaatcccgtactatcaccgtaaatctatctaaatcgtaatcccgtactatcaccgtaaatctatctaaatcgtaatcccgtactatcaccgtaaatctatatctaaatcgtaatcccgtactatcaccgtaaatctatatctaaatcgtaatcccgtactatcaccgtaaatctatctaaatcgtaatcccgtactatcaccgtaaatctatatctaaatcgtaatcccgtactatcaccgtaaatctatatctaaatcgtaatcccgtacta

SEQ ID NO: 21723 - DNA, 1163 bp, Artificial Sequence
  chemically treated genomic DNA (Homo sapiens) CpG-island No: 21723
gtttgtggttattgattttgttattatggatttacgtttatttattttttttttgggtcgtgatttcgttttgttatcgtgagtttgtgtttgggtcgtgattttatgttgttatcgtgagtttgtgtttgggtcgtgatttcgtgttgttatcgtgagtttgtgtttgggtcgtgatttcgtgttgttatcgtgagtttgtgtttgggtcgtgatttcgtgttgttatcgtgagtttgtgtttgggtcgtgatttcgtgttgttatcgtgagtttgtgtttgggtcgtgatttcgtgttgttatcgtgagtttgtttgggtggtgatttcgtgttgttatcgtgagtttgtgtttgggtcgtgatttcgtgttgttatcgtgagtttgtgtttgggtcgtgatttcgtgttgttatcgtgagtttgtgtttgggtcgtgatttcgtgttgttatcgtgagtttgtgtttgggtcgtgatttcgtgttgttatcgtgagtttgtttgggtcgtgatttcgtgttgttatcgtgagtttgtgtttgggtcgtgatttcgtgttgttatcgtgagtttgtgtttgggtcgtgatttcgtgttgttatcgtgagtttgtgtttgggtcgtgatttcgtgttgttatcgtgagtttgtgtttgggtcgtgatttcgtgttgttatcgtgagtttgtgtttgggtcgtgatttcgtgttgttatcgtgagtttgtgtttgggtcgtgatttcgtgttgttatcgtgagtttgtttgggtcgtgatttcgtgttgttatcgtgagtttgtgtttgggtcgtgatttcgtgttgttatcgtgagtttgtgtttgggtcgtgatttcgtgttgttatcgtgagtttgtgtttgggtcgtgatttcgtgttgttatcgtgagtttgtttgggtcgtgatttcgtgttgttatcgtgagtttgtttgggtcgtgatttcgtgttgttatcgtgagtttgtgtttgggtcgtgatttcgtgttgttatcgtgagtttgtgtttgggtcgtgatttcgtgttgttatcgtgagtttgtttgggtcgtgatttcgtgttgttatcgtgagtttgtgtttgggtcgtgatttcgtgttgttatcgtgagtttgtgtttgggtcgtgatttcgtgttg

SEQ ID NO: 21724 - DNA, 1163 bp, Artificial Sequence
  chemically treated genomic DNA (Homo sapiens) CpG-island No: 21724
caacacgaaatcacgacccaaacacaaactcacgataacaacacgaaatcacgacccaaacacaaactcacgataacaacacgaaatcacgacccaaacaaactcacgataacaacacgaaatcacgacccaaacacaaactcacgataacaacacgaaatcacgacccaaacacaaactcacgataacaacacgaaatcacgacccaaacaaactcacgataacaacacgaaatcacgacccaaacaaactcacgataacaacacgaaatcacgacccaaacacaaactcacgataacaacacgaaatcacgacccaaacacaaactcacgataacaacacgaaatcacgacccaaacacaaactcacgataacaacacgaaatcacgacccaaacaaactcacgataacaacacgaaatcacgacccaaacacaaactcacgataacaacacgaaatcacgacccaaacacaaactcacgataacaacacgaaatcacgacccaaacacaaactcacgataacaacacgaaatcacgacccaaacacaaactcacgataacaacacgaaatcacgacccaaacacaaactcacgataacaacacgaaatcacgacccaaacacaaactcacgataacaacacgaaatcacgacccaaacaaactcacgataacaacacgaaatcacgacccaaacacaaactcacgataacaacacgaaatcacgacccaaacacaaactcacgataacaacacgaaatcacgacccaaacacaaactcacgataacaacacgaaatcacgacccaaacacaaactcacgataacaacacgaaatcaccacccaaacaaactcacgataacaacacgaaatcacgacccaaacacaaactcacgataacaacacgaaatcacgacccaaacacaaactcacgataacaacacgaaatcacgacccaaacacaaactcacgataacaacacgaaatcacgacccaaacacaaactcacgataacaacacgaaatcacgacccaaacacaaactcacgataacaacataaaatcacgacccaaacacaaactcacgataacaaaacgaaatcacgacccaaaaaaaaaataaataaacgtaaatccataataacaaaatcaataaccacaaac

SEQ ID NO: 21725 - DNA, 886 bp, Artificial Sequence
  chemically treated genomic DNA (Homo sapiens) CpG-island No: 21725
gagttttcgggtttcgatatcgggattcgttggcggcgaagcgacgaggcgttgcgcgtgaacgtgggtggcgtgcggcggtagttgagcgcgcgcgttttggcgcgtttttcgggtacgcggttgggtcgtttgtaggtcgcggcgtcggaggagtaggcgcggcgtttgtgcgacgattacgacgaggcggcgcgcgaattttatttcgatcggtattcgggtttttttttgagtttgttgtatttttatcgtattggttatttgtacgtgttcgacgagttgtgcgttttcgtttttggttaggaggtcgattattggggtttaggcgagaacgcgtttgtcgcgtgttgtcgcgcgcgttatttggagaggcggttgatttagtcgtacgtttgggacgaggatagcgatacgtcgagtagcgtggattcgtgtttcgacgagattttcgacgtgtagcgagaattggcgcgttatggcgcggcgcgttgtggtcgtttgcgtcgtcgtttttggttgattatggagaattcgggttattcgttgtcgagtaagttttttagttgcgtttttattagcgtggtgttcgtttttatcgtcgttatgtgtatttatagtttgttcgagtattaggttcgcgaggcggcggtcgtcgtggttgcggtggtcgcgggtcgtagttcggaaggcgtgcgcgacgattcggtgttgcgacgtttcgagtatttttgtatcgtttggtttagtttcgaggtgtcgtcgcgttttttgttggcgtttagtacgcgtaattttttttgttattcgtttaattttatcgatattgtgtttgtgttgtttttttattttacgttgttggttggtgtggtattgggcgattagg

SEQ ID NO: 21726 - DNA, 886 bp, Artificial Sequence
  chemically treated genomic DNA (Homo sapiens) CpG-island No: 21726
cctaatcgcccaataccacaccaaccaacaacgtaaaataaaaaaacaacacaaacacaatatcgataaaattaaacgaataacaaaaaaaattacgcgtactaaacgccaacaaaaaacgcgacgacacctcgaaactaaaccaaacgatacaaaaatactcgaaacgtcgcaacaccgaatcgtcgcgcacgccttccgaactacgacccgcgaccaccgcaaccacgacgaccgccgcctcgcgaacctaatactcgaacaaactataaatacacataacgacgataaaaacgaacaccacgctaataaaaacgcaactaaaaaacttactcgacaacgaataacccgaattctccataatcaaccaaaaacgacgacgcaaacgaccacaacgcgccgcgccataacgcgccaattctcgctacacgtcgaaaatctcgtcgaaacacgaatccacgctactcgacgtatcgctatcctcgtcccaaacgtacgactaaatcaaccgcctctccaaataacgcgcgcgacaacacgcgacaaacgcgttctcgcctaaaccccaataatcgacctcctaaccaaaaacgaaaacgcacaactcgtcgaacacgtacaaataaccaatacgataaaaatacaacaaactcaaaaaaaaacccgaataccgatcgaaataaaattcgcgcgccgcctcgtcgtaatcgtcgcacaaacgccgcgcctactcctccgacgccgcgacctacaaacgacccaaccgcgtacccgaaaaacgcgccaaaacgcgcgcgctcaactaccgccgcacgccacccacgttcacgcgcaacgcctcgtcgcttcgccgccaacgaatcccgatatcgaaacccgaaaactc

SEQ ID NO: 21727 - DNA, 886 bp, Artificial Sequence
  chemically treated genomic DNA (Homo sapiens) CpG-island No: 21727
tttggtcgtttagtgttatattagttagtagcgtgagatagaagggtagtatagatataatgtcgatgaggttgagcgggtggtagaagaagttgcgcgtattgggcgttagtaggaggcgcgacgatatttcgaagttgaattaggcgatgtagaagtattcgaggcgtcgtagtatcgggtcgtcgcgtacgtttttcgggttgcggttcgcggttatcgtagttacggcggtcgtcgtttcgcgggtttggtattcgggtaggttgtggatgtatatggcggcgatggaggcgagtattacgttgatggagacgtagttgaagagtttgttcggtagcgagtagttcgggttttttatggttagttagaggcggcggcgtaggcggttatagcgcgtcgcgttatagcgcgttagttttcgttgtacgtcggagatttcgtcggggtacgggtttacgttgttcggcgtgtcgttgttttcgttttaggcgtgcggttgggttagtcgtttttttaggtagcgcgcgcggtagtacgcggtaagcgcgttttcgtttaggttttagtagtcggttttttggttaaaggcgaagacgtatagttcgtcgagtacgtgtaggtggttagtgcggtagaagtgtagtaggtttaggaagaagttcgggtgtcggtcgaagtagaattcgcgcgtcgtttcgtcgtagtcgtcgtataggcgtcgcgtttgttttttcgacgtcgcggtttgtaggcggtttagtcgcgtgttcgggaagcgcgttagggcgcgcgcgtttagttgtcgtcgtacgttatttacgtttacgcgtagcgtttcgtcgtttcgtcgttagcggatttcggtgtcggggttcgggaattt

SEQ ID NO: 21728 - DNA, 886 bp, Artificial Sequence
  chemically treated genomic DNA (Homo sapiens) CpG-island No: 21728
aaattcccgaaccccgacaccgaaatccgctaacgacgaaacgacgaaacgctacgcgtaaacgtaaataacgtacgacgacaactaaacgcgcgcgccctaacgcgcttcccgaacacgcgactaaaccgcctacaaaccgcgacgtcgaaaaaacaaacgcgacgcctatacgacgactacgacgaaacgacgcgcgaattctacttcgaccgacacccgaacttcttcctaaacctactacacttctaccgcactaaccacctacacgtactcgacgaactatacgtcttcgcctttaaccaaaaaaccgactactaaaacctaaacgaaaacgcgcttaccgcgtactaccgcgcgcgctacctaaaaaaacgactaacccaaccgcacgcctaaaacgaaaacaacgacacgccgaacaacgtaaacccgtaccccgacgaaatctccgacgtacaacgaaaactaacgcgctataacgcgacgcgctataaccgcctacgccgccgcctctaactaaccataaaaaacccgaactactcgctaccgaacaaactcttcaactacgtctccatcaacgtaatactcgcctccatcgccgccatatacatccacaacctacccgaataccaaacccgcgaaacgacgaccgccgtaactacgataaccgcgaaccgcaacccgaaaaacgtacgcgacgacccgatactacgacgcctcgaatacttctacatcgcctaattcaacttcgaaatatcgtcgcgcctcctactaacgcccaatacgcgcaacttcttctaccacccgctcaacctcatcgacattatatctatactacccttctatctcacgctactaactaatataacactaaacgaccaaa

SEQ ID NO: 21729 - DNA, 1401 bp, Artificial Sequence
  chemically treated genomic DNA (Homo sapiens) CpG-island No: 21729
gggattgaggcgagagttagtagtattgcgcggggagtttgagtcgtttcgtacgtttcgggtcgacgggttttagagcgtttcggggtttgggttcgcggcggttttagcggggttcgattattttcgtttggacgagaagcggcgtttcggtttcgaggagttttacggtggggaggtggggcgacgataataaaaagaagttaagtgggaggggattcgtcggcgaggggggcgacggcggtcgttaagggagaggaggcggatattttcgaagggatttgcggcgtcgggagtttagcgattttgtttacgagcgattggcgggttcgggaggacgtttcgcggcgtatagtcgggagtttcgcggttcgttttttcgtatcgttcgcgtttttttcgcgttttcgtttcgttttttcgtttagcgtcgttcgcgcgtagcgtttcgcgtcggttcggttcgttcgtcgggaaatagtcgcgagagtagcggtcgcggcggtcgttagcgcgtttttttttttcgcgttttcgcgtcgttttcgttttcggcgtttcgttttcgggtcgcgcgttcgcgtttcggttaacgttttttttcggtttttcgggttcgtcgtttattttcgcgttttcgagttttttaatcgtcgcggtttttttgggcgcgcggttcgtcgtttgttttcggggcgggcggattgggcgtttggtgtcggcggtcgtagcgatagcgttttcgggaagtagaggaggaaggagagaagaggtggaggtggtcgtaggttgagtcgcggtcgggatgttcgggtagtcgtcgtcgtcgtcgtcgtagtagtagtaatagtagtagtagttgtcgtcgttatcgtcggcggttttggttttagttttcggagtcgttttgtcggcgttttcggtcgttagcgtcggttttttttcggtcggttcgttcggcggcggtgcgggcggcgaaggtttaggggtcgcggcggtcgttttgtttttttatttttcgtcgtcgtcgttttcggttatcgcggtttcgtcgttttcgtcgtcgttttcgtttttttttgttttagcggttgttttcgttagcgggtcgttcgttttttcgggttttgtagcgggtttcggttcggttggaggagtttcgattttagttttggtggcgggtagtagcgtcgcggttttttttttttacggggattcggttttgaacgagtaggagaaggagttgtagcggcggttgaagcgtttttattcggtcgtggacgaataagagacgtcgttgtttcggttttggagttcgaaggataagtttagttatatcggttttttttagaataatttgcgggtgtattataaaggtattgggcgtgtgttttgcggtgg

SEQ ID NO: 21730 - DNA, 1401 bp, Artificial Sequence
  chemically treated genomic DNA (Homo sapiens) CpG-island No: 21730
ccaccgcaaaacacacgcccaatacctttataatacacccgcaaattattctaaaaaaaaccgatataactaaacttatccttcgaactccaaaaccgaaacaacgacgtctcttattcgtccacgaccgaataaaaacgcttcaaccgccgctacaactccttctcctactcgttcaaaaccgaatccccgtaaaaaaaaaaaaccgcgacgctactacccgccaccaaaactaaaatcgaaactcctccaaccgaaccgaaacccgctacaaaacccgaaaaaacgaacgacccgctaacgaaaacaaccgctaaaacaaaaaaaaacgaaaacgacgacgaaaacgacgaaaccgcgataaccgaaaacgacgacgacgaaaaataaaaaaacaaaacgaccgccgcgacccctaaaccttcgccgcccgcaccgccgccgaacgaaccgaccgaaaaaaaaccgacgctaacgaccgaaaacgccgacaaaacgactccgaaaactaaaaccaaaaccgccgacgataacgacgacaactactactactattactactactacgacgacgacgacgacgactacccgaacatcccgaccgcgactcaacctacgaccacctccacctcttctctccttcctcctctacttcccgaaaacgctatcgctacgaccgccgacaccaaacgcccaatccgcccgccccgaaaacaaacgacgaaccgcgcgcccaaaaaaaccgcgacgattaaaaaactcgaaaacgcgaaaataaacgacgaacccgaaaaaccgaaaaaaaacgttaaccgaaacgcgaacgcgcgacccgaaaacgaaacgccgaaaacgaaaacgacgcgaaaacgcgaaaaaaaaaaacgcgctaacgaccgccgcgaccgctactctcgcgactatttcccgacgaacgaaccgaaccgacgcgaaacgctacgcgcgaacgacgctaaacgaaaaaacgaaacgaaaacgcgaaaaaaacgcgaacgatacgaaaaaacgaaccgcgaaactcccgactatacgccgcgaaacgtcctcccgaacccgccaatcgctcgtaaacaaaatcgctaaactcccgacgccgcaaatcccttcgaaaatatccgcctcctctcccttaacgaccgccgtcgcccccctcgccgacgaatcccctcccacttaacttctttttattatcgtcgccccacctccccaccgtaaaactcctcgaaaccgaaacgccgcttctcgtccaaacgaaaataatcgaaccccgctaaaaccgccgcgaacccaaaccccgaaacgctctaaaacccgtcgacccgaaacgtacgaaacgactcaaactccccgcgcaatactactaactctcgcctcaatccc

SEQ ID NO: 21731 - DNA, 1401 bp, Artificial Sequence
  chemically treated genomic DNA (Homo sapiens) CpG-island No: 21731
ttatcgtaggatatacgtttagtatttttgtagtgtattcgtaggttgttttgagagaggtcgatgtagttgaatttgtttttcgggttttaggatcgaggtagcggcgttttttgttcgtttacggtcgggtagagacgttttagtcgtcgttgtaatttttttttttgttcgtttagggtcgagttttcgtgagggaagggggtcgcggcgttgttgttcgttattagagttggggtcggggtttttttagtcgggtcggggttcgttgtaaggttcgggggagcgggcggttcgttggcgggggtagtcgttgaggtagggggaggcgggggcggcggcgggggcggcggggtcgcggtggtcgggggcggcggcggcggagggtggaggagtagggcggtcgtcgcggtttttaagttttcgtcgttcgtatcgtcgtcgggcgagtcggtcggagaagagtcggcgttgacggtcgggggcgtcggtaggacgatttcggagattggggttaaggtcgtcggcggtggcggcgatagttgttgttgttgttgttgttgttgcggcggcggcggcggcggttgttcggatatttcggtcgcgatttagtttgcggttatttttattttttttttttttttttttttgtttttcgggggcgttgtcgttgcggtcgtcggtattaggcgtttagttcgttcgtttcggaagtaggcggcgggtcgcgcgtttagggagatcgcggcggttgaggagttcggagacgcgggagtaggcggcgggttcgggaggtcgggagagaacgttggtcggagcgcgggcgcgcggttcggggacgaggcgtcgagggcgggggcgacgcgggagcgcgggaggggaaggcgcgttggcggtcgtcgcggtcgttgttttcgcggttgtttttcggcgggcgggtcgggtcggcgcgagacgttgcgcgcgggcggcgttaggcgagggggcgggacggaggcgcgagagaggcgcgagcggtgcgagggggcgggtcgcggggttttcggttgtgcgtcgcgaggcgttttttcgggttcgttagtcgttcgtgggtaggatcgttgggttttcggcgtcgtaggttttttcggaggtgttcgtttttttttttttggcggtcgtcgtcgtttttttcgtcggcgaatttttttttatttgatttttttttgttgtcgtcgttttatttttttatcgtagggtttttcggagtcgaggcgtcgtttttcgtttaggcgagagtaatcgagtttcgttggggtcgtcgcgagtttaggtttcggggcgttttaggattcgtcggttcggggcgtgcggagcggtttaggtttttcgcgtagtgttgttagttttcgttttagtttt

SEQ ID NO: 21732 - DNA, 1401 bp, Artificial Sequence
  chemically treated genomic DNA (Homo sapiens) CpG-island No: 21732
aaaactaaaacgaaaactaacaacactacgcgaaaaacctaaaccgctccgcacgccccgaaccgacgaatcctaaaacgccccgaaacctaaactcgcgacgaccccaacgaaactcgattactctcgcctaaacgaaaaacgacgcctcgactccgaaaaaccctacgataaaaaaataaaacgacgacaacaaaaaaaaatcaaataaaaaaaaattcgccgacgaaaaaaacgacgacgaccgccaaaaaaaaaaaaacgaacacctccgaaaaaacctacgacgccgaaaacccaacgatcctacccacgaacgactaacgaacccgaaaaaacgcctcgcgacgcacaaccgaaaaccccgcgacccgccccctcgcaccgctcgcgcctctctcgcgcctccgtcccgccccctcgcctaacgccgcccgcgcgcaacgtctcgcgccgacccgacccgcccgccgaaaaacaaccgcgaaaacaacgaccgcgacgaccgccaacgcgccttcccctcccgcgctcccgcgtcgcccccgccctcgacgcctcgtccccgaaccgcgcgcccgcgctccgaccaacgttctctcccgacctcccgaacccgccgcctactcccgcgtctccgaactcctcaaccgccgcgatctccctaaacgcgcgacccgccgcctacttccgaaacgaacgaactaaacgcctaataccgacgaccgcaacgacaacgcccccgaaaaacaaaaaaaaaaaaaaaaaaaaaataaaaataaccgcaaactaaatcgcgaccgaaatatccgaacaaccgccgccgccgccgccgcaacaacaacaacaacaacaacaactatcgccgccaccgccgacgaccttaaccccaatctccgaaatcgtcctaccgacgcccccgaccgtcaacgccgactcttctccgaccgactcgcccgacgacgatacgaacgacgaaaacttaaaaaccgcgacgaccgccctactcctccaccctccgccgccgccgcccccgaccaccgcgaccccgccgcccccgccgccgcccccgcctccccctacctcaacgactacccccgccaacgaaccgcccgctcccccgaaccttacaacgaaccccgacccgactaaaaaaaccccgaccccaactctaataacgaacaacaacgccgcgacccccttccctcacgaaaactcgaccctaaacgaacaaaaaaaaaaattacaacgacgactaaaacgtctctacccgaccgtaaacgaacaaaaaacgccgctacctcgatcctaaaacccgaaaaacaaattcaactacatcgacctctctcaaaacaacctacgaatacactacaaaaatactaaacgtatatcctacgataa

SEQ ID NO: 21733 - DNA, 964 bp, Artificial Sequence
  chemically treated genomic DNA (Homo sapiens) CpG-island No: 21733
gcgatttcggtggcggttgggcgcgtttcgcggttttttttagttttttttgggtcggcgttatgaggtttgggttcgtttttttttttttgggcgtgggtttgagtttgagcgtcggtcgtttttcgttgtcgtcggtttttcgcggggtataagtcgtcgttttcggggcgttcggtggtttttttaggggcgtttcgggtttcggggtgcgcggcggtcgcgttttttttagtttgcggtttagcgcggtgcgggcgggcggcgttgttttgagcggtcgcggtagtttttgttttttttatggcgggatcgggcggcgttggtattgtttcgatttgcgcgttttgtttagcgtttaacgtttgttttggtcggtcgcgttcgcgttcgcgttcgtcgatttgtagtttttcgcgcgcggcggtcgtttttttttgacgtggttcgtgcggttgtcgcgttcgttcgggcgtttggtttgggtttttcgtttgcggttgttcggattcggcgtcgttcgttcggtttttttcgcggttcgcgttttttcgcgtttcgtcgcgttaggttcgcggttttagtagggtttcgtggttcgtatcgagtgttttatagacggtttcgcgcgcgtgatgttgtaggtcgttaattcgtttagttatagagtcgtcgagtcgttcgtgttttgttagataaacgtttgcgttatttagcgcgtgaggattaatacggattagaagggcgttttcgtgcgtttgagtatgtaggcggaggttattattaacgtttcggtgtagttggattgttcggtcgcgcgcgttatcgtttagtattggtaggtgtttttcgtgttcgtcgtgggttaggcgttcgattggacgtagtttttggatttgttttagttcgagattaggaatagttttttgtttatttatatttttaataattcgttatagtgggg

SEQ ID NO: 21734 - DNA, 964 bp, Artificial Sequence
  chemically treated genomic DNA (Homo sapiens) CpG-island No: 21734
ccccactataacgaattattaaaaatataaataaacaaaaaactattcctaatctcgaactaaaacaaatccaaaaactacgtccaatcgaacgcctaacccacgacgaacacgaaaaacacctaccaatactaaacgataacgcgcgcgaccgaacaatccaactacaccgaaacgttaataataacctccgcctacatactcaaacgcacgaaaacgcccttctaatccgtattaatcctcacgcgctaaataacgcaaacgtttatctaacaaaacacgaacgactcgacgactctataactaaacgaattaacgacctacaacatcacgcgcgcgaaaccgtctataaaacactcgatacgaaccacgaaaccctactaaaaccgcgaacctaacgcgacgaaacgcgaaaaaacgcgaaccgcgaaaaaaaccgaacgaacgacgccgaatccgaacaaccgcaaacgaaaaacccaaaccaaacgcccgaacgaacgcgacaaccgcacgaaccacgtcaaaaaaaaacgaccgccgcgcgcgaaaaactacaaatcgacgaacgcgaacgcgaacgcgaccgaccaaaacaaacgttaaacgctaaacaaaacgcgcaaatcgaaacaataccaacgccgcccgatcccgccataaaaaaaacaaaaactaccgcgaccgctcaaaacaacgccgcccgcccgcaccgcgctaaaccgcaaactaaaaaaaacgcgaccgccgcgcaccccgaaacccgaaacgcccctaaaaaaaccaccgaacgccccgaaaacgacgacttataccccgcgaaaaaccgacgacaacgaaaaacgaccgacgctcaaactcaaacccacgcccaaaaaaaaaaaaacgaacccaaacctcataacgccgacccaaaaaaaactaaaaaaaaccgcgaaacgcgcccaaccgccaccgaaatcgc

SEQ ID NO: 21735 - DNA, 964 bp, Artificial Sequence
  chemically treated genomic DNA (Homo sapiens) CpG-island No: 21735
ttttattgtaacgaattattggggatgtgaatgaataaggggttgtttttgatttcgagttggggtagatttaagggttgcgtttagtcgggcgtttgatttacggcgggtacggagaatatttgttagtattgggcgatggcgcgcgcggtcgggtagtttagttgtatcgaggcgttgatggtggttttcgtttgtatgtttaggcgtacgggggcgtttttttggttcgtgttgatttttacgcgttggatgacgtaggcgtttatttgataggatacggacgattcgacggttttgtggttggacgagttgacggtttgtaatattacgcgcgcggggtcgtttgtggggtattcggtgcgggttacgaagttttgttggggtcgcgggtttggcgcggcggagcgcggggagacgcgggtcgcgggggaggtcgggcgggcggcgtcgggttcgagtagtcgtaggcggaaggtttaggttaggcgttcgggcgagcgcggtagtcgtacggattacgttagggagaggcggtcgtcgcgcgcggagagttgtaggtcgacgagcgcgagcgcgggcgcggtcggttagggtaggcgttgggcgttgagtaggacgcgtaagtcgaggtagtattagcgtcgttcggtttcgttatgggggaagtagaggttgtcgcggtcgtttaggatagcgtcgttcgttcgtatcgcgttgggtcgtagattgaggagggcgcggtcgtcgcgtatttcgaggttcggggcgtttttgaggaggttatcgggcgtttcggagacggcggtttgtgtttcgcgaggaatcggcggtagcgggaggcggtcgacgtttaggtttaggtttacgtttagaaggaggagagcgggtttaggttttatggcgtcggtttaggagaagttgggagaggtcgcgaggcgcgtttaatcgttatcggggtcgt

SEQ ID NO: 21736 - DNA, 964 bp, Artificial Sequence
  chemically treated genomic DNA (Homo sapiens) CpG-island No: 21736
acgaccccgataacgattaaacgcgcctcgcgacctctcccaacttctcctaaaccgacgccataaaacctaaacccgctctcctccttctaaacgtaaacctaaacctaaacgtcgaccgcctcccgctaccgccgattcctcgcgaaacacaaaccgccgtctccgaaacgcccgataacctcctcaaaaacgccccgaacctcgaaatacgcgacgaccgcgccctcctcaatctacgacccaacgcgatacgaacgaacgacgctatcctaaacgaccgcgacaacctctacttcccccataacgaaaccgaacgacgctaatactacctcgacttacgcgtcctactcaacgcccaacgcctaccctaaccgaccgcgcccgcgctcgcgctcgtcgacctacaactctccgcgcgcgacgaccgcctctccctaacgtaatccgtacgactaccgcgctcgcccgaacgcctaacctaaaccttccgcctacgactactcgaacccgacgccgcccgcccgacctcccccgcgacccgcgtctccccgcgctccgccgcgccaaacccgcgaccccaacaaaacttcgtaacccgcaccgaataccccacaaacgaccccgcgcgcgtaatattacaaaccgtcaactcgtccaaccacaaaaccgtcgaatcgtccgtatcctatcaaataaacgcctacgtcatccaacgcgtaaaaatcaacacgaaccaaaaaaacgcccccgtacgcctaaacatacaaacgaaaaccaccatcaacgcctcgatacaactaaactacccgaccgcgcgcgccatcgcccaatactaacaaatattctccgtacccgccgtaaatcaaacgcccgactaaacgcaacccttaaatctaccccaactcgaaatcaaaaacaaccccttattcattcacatccccaataattcgttacaataaaa

SEQ ID NO: 21737 - DNA, 860 bp, Artificial Sequence
  chemically treated genomic DNA (Homo sapiens) CpG-island No: 21737
gtagggtatggaggtataaggcggagagggggtttattagcggaggcggagtttagggggagggcgagtttaggcgtatttcgggcggtttcgtcgtaagtttgtttttagttgttgaatgcgttggcggaggtcggattcggattcggattcggatttcgcggggtgagtagcgtagggggtcgcggtcgggataggggttcgttaggtcggggttcgggttcgtggggtcgttttcgttttttcgggcgttgtagttgtagcggcggcgttaggcgcggttttagtttcgcgggcgtgtgtttgcgagcgcgcgtgtgttcgtggagcgtgcggtcggttcgggggcgggagcgggtttgttgcggaaaggtttgcggagggtatcgggagcgggcgggttggcggacggatagacggggacggatagacggatatagtttgtcgcggtttttgacgcgcgtcgtttggtttttttcgggcgtttttttcgtcgaggtaggggtagaggcgcggcggcggggaggagggggcggcggcgtttgcgcgtatacgcgcgtttttagatatatatatagatatacgcgggttattttacggttacgtatttcgtatttatattcgcgtttatatttatatttatatttatatttatacgcgtaggtttcgcggtcgtcgtttttcggaggcggtgtttggttcggatttcggttggggttggggtaagtgaatttttttggattcgagcgtcgcgatcgatcggggagacggtgggagtcggggttggagtcggagggtatttttttcgttagtgggggtggggtttggagagggatacggaaggggggatgagacgggga

SEQ ID NO: 21738 - DNA, 860 bp, Artificial Sequence
  chemically treated genomic DNA (Homo sapiens) CpG-island No: 21738
tccccgtctcatccccccttccgtatccctctccaaaccccacccccactaacgaaaaaaataccctccgactccaaccccgactcccaccgtctccccgatcgatcgcgacgctcgaatccaaaaaaattcacttaccccaaccccaaccgaaatccgaaccaaacaccgcctccgaaaaacgacgaccgcgaaacctacgcgtataaatataaatataaatataaatataaacgcgaatataaatacgaaatacgtaaccgtaaaataacccgcgtatatctatatatatatctaaaaacgcgcgtatacgcgcaaacgccgccgccccctcctccccgccgccgcgcctctacccctacctcgacgaaaaaaacgcccgaaaaaaaccaaacgacgcgcgtcaaaaaccgcgacaaactatatccgtctatccgtccccgtctatccgtccgccaacccgcccgctcccgataccctccgcaaacctttccgcaacaaacccgctcccgcccccgaaccgaccgcacgctccacgaacacacgcgcgctcgcaaacacacgcccgcgaaactaaaaccgcgcctaacgccgccgctacaactacaacgcccgaaaaaacgaaaacgaccccacgaacccgaaccccgacctaacgaacccctatcccgaccgcgaccccctacgctactcaccccgcgaaatccgaatccgaatccgaatccgacctccgccaacgcattcaacaactaaaaacaaacttacgacgaaaccgcccgaaatacgcctaaactcgccctccccctaaactccgcctccgctaataaaccccctctccgccttatacctccataccctac

SEQ ID NO: 21739 - DNA, 860 bp, Artificial Sequence
  chemically treated genomic DNA (Homo sapiens) CpG-island No: 21739
ttttcgttttattttttttttcgtgtttttttttaagttttatttttattgacggagggggtgtttttcggttttagtttcgatttttatcgttttttcggtcggtcgcggcgttcggatttagaggaatttatttattttagttttagtcgggattcgggttaagtatcgttttcgggaagcggcggtcgcggggtttgcgcgtgtgagtgtgagtgtgaatgtgagtgtgagcgcgggtgtgggtgcggggtgcgtggtcgtggggtggttcgcgtgtgtttgtgtgtgtgtttgggagcgcgcgtgtgcgcgtagacgtcgtcgttttttttttttcgtcgtcgcgtttttgtttttgtttcggcggggagggcgttcgggaggggttaaacggcgcgcgttagggatcgcggtaggttgtgttcgtttgttcgttttcgtttgttcgttcgttagttcgttcgttttcggtgtttttcgtaggttttttcgtagtaagttcgttttcgttttcgagtcggtcgtacgttttacggatatacgcgcgttcgtagatatacgttcgcggggttggggtcgcgtttggcgtcgtcgttgtagttgtagcgttcggggaggcgaaggcggttttacggattcgagtttcggtttggcggatttttgtttcggtcgcggttttttgcgttgtttatttcgcgggattcgggttcgggttcgggttcggttttcgttagcgtatttaatagttgggggtaaatttgcggcggggtcgttcgaagtgcgtttggattcgttttttttttggatttcgttttcgttgatgggtttttttttcgttttgtatttttatgttttgt

SEQ ID NO: 21740 - DNA, 860 bp, Artificial Sequence
  chemically treated genomic DNA (Homo sapiens) CpG-island No: 21740
acaaaacataaaaatacaaaacgaaaaaaaaacccatcaacgaaaacgaaatccaaaaaaaaaacgaatccaaacgcacttcgaacgaccccgccgcaaatttacccccaactattaaatacgctaacgaaaaccgaacccgaacccgaacccgaatcccgcgaaataaacaacgcaaaaaaccgcgaccgaaacaaaaatccgccaaaccgaaactcgaatccgtaaaaccgccttcgcctccccgaacgctacaactacaacgacgacgccaaacgcgaccccaaccccgcgaacgtatatctacgaacgcgcgtatatccgtaaaacgtacgaccgactcgaaaacgaaaacgaacttactacgaaaaaacctacgaaaaacaccgaaaacgaacgaactaacgaacgaacaaacgaaaacgaacaaacgaacacaacctaccgcgatccctaacgcgcgccgtttaacccctcccgaacgccctccccgccgaaacaaaaacaaaaacgcgacgacgaaaaaaaaaaaacgacgacgtctacgcgcacacgcgcgctcccaaacacacacacaaacacacgcgaaccaccccacgaccacgcaccccgcacccacacccgcgctcacactcacattcacactcacactcacacgcgcaaaccccgcgaccgccgcttcccgaaaacgatacttaacccgaatcccgactaaaactaaaataaataaattcctctaaatccgaacgccgcgaccgaccgaaaaaacgataaaaatcgaaactaaaaccgaaaaacaccccctccgtcaataaaaataaaacttaaaaaaaaacacgaaaaaaaaaataaaacgaaaa

SEQ ID NO: 21741 - DNA, 736 bp, Artificial Sequence
  chemically treated genomic DNA (Homo sapiens) CpG-island No: 21741
gcggcgaagagggcggagagtagagaagacgttttggaggaggcgatcgacgtatagtcgcgtagcggtggttcgatatggtttatttatttggcggaggtagatttgggtttggaggtcggttgggattgttcgttttgggggcgtacggggcgggtgcgcgatggttgttgggtcggaggagggggcgggcgggaattgtcgcggatttggcgtggtggggacgggagcgcgcgttcggagtttcgtcggggtcgtatcgttattttgttttttttcgatttcgtcgcgttttttattttcgtatcgtttttcgtcgttcgcggtttttcgaggttttcgtttttcgcggtttatttcgttagttttcggaatttgcgttcggttggttcggtttttttttttatttgtttgtgtttagaatttgtagtcgtagtttttgacgttcgtagttaatttcgtagtttttgggttttgcgcggtgttcgggatcggaaagcgatcggtaggggcgggggttggcggcggggcgggtcgcgttgggtaggggtatagggggcgatcggagttaggattcggcgagttgttggcgagggggtgtgtgtgtcgggtgggtgtggacggtatggggacgcgtcgcgtgaattgttttgggagcgttgtggcgtgtaggcgtggttgtgttgggggtgtgttggtttatgtgtattggtacgtgtgttcgggagtggttttt

SEQ ID NO: 21742 - DNA, 736 bp, Artificial Sequence
  chemically treated genomic DNA (Homo sapiens) CpG-island No: 21742
aaaaaccactcccgaacacacgtaccaatacacataaaccaacacacccccaacacaaccacgcctacacgccacaacgctcccaaaacaattcacgcgacgcgtccccataccgtccacacccacccgacacacacaccccctcgccaacaactcgccgaatcctaactccgatcgccccctatacccctacccaacgcgacccgccccgccgccaacccccgcccctaccgatcgctttccgatcccgaacaccgcgcaaaacccaaaaactacgaaattaactacgaacgtcaaaaactacgactacaaattctaaacacaaacaaataaaaaaaaaaaccgaaccaaccgaacgcaaattccgaaaactaacgaaataaaccgcgaaaaacgaaaacctcgaaaaaccgcgaacgacgaaaaacgatacgaaaataaaaaacgcgacgaaatcgaaaaaaaacaaaataacgatacgaccccgacgaaactccgaacgcgcgctcccgtccccaccacgccaaatccgcgacaattcccgcccgccccctcctccgacccaacaaccatcgcgcacccgccccgtacgcccccaaaacgaacaatcccaaccgacctccaaacccaaatctacctccgccaaataaataaaccatatcgaaccaccgctacgcgactatacgtcgatcgcctcctccaaaacgtcttctctactctccgccctcttcgccgc

SEQ ID NO: 21743 - DNA, 736 bp, Artificial Sequence
  chemically treated genomic DNA (Homo sapiens) CpG-island No: 21743
gggaattattttcggatatacgtgttaatgtatatgagttaatatatttttagtatagttacgtttgtacgttatagcgtttttagggtagtttacgcggcgcgtttttatgtcgtttatatttattcggtatatatattttttcgttagtaattcgtcgggttttggtttcggtcgttttttgtgtttttgtttagcgcggttcgtttcgtcgttagttttcgtttttgtcggtcgtttttcgatttcgggtatcgcgtagagtttagaggttgcgaaattggttgcgagcgttaggggttgcggttgtaaattttaaatataggtaagtaaggaggaaagtcgggttagtcgggcgtaagtttcggaggttggcggggtgggtcgcgggggacgggggtttcgaagagtcgcggacggcggaggacggtgcggaggtggggagcgcggcgaggtcgggggggagtagggtggcggtgcggtttcggcggggtttcgagcgcgcgttttcgtttttattacgttaggttcgcggtagttttcgttcgttttttttttcggtttagtagttatcgcgtattcgtttcgtgcgtttttaggacggataattttagtcggtttttagatttaggtttgttttcgttaagtggatggattatatcgagttatcgttacgcggttgtgcgtcggtcgttttttttaggacgttttttttgtttttcgtttttttcgtcgt

SEQ ID NO: 21744 - DNA, 736 bp, Artificial Sequence
  chemically treated genomic DNA (Homo sapiens) CpG-island No: 21744
acgacgaaaaaaacgaaaaacaaaaaaaacgtcctaaaaaaaacgaccgacgcacaaccgcgtaacgataactcgatataatccatccacttaacgaaaacaaacctaaatctaaaaaccgactaaaattatccgtcctaaaaacgcacgaaacgaatacgcgataactactaaaccgaaaaaaaaaacgaacgaaaactaccgcgaacctaacgtaataaaaacgaaaacgcgcgctcgaaaccccgccgaaaccgcaccgccaccctactcccccccgacctcgccgcgctccccacctccgcaccgtcctccgccgtccgcgactcttcgaaacccccgtcccccgcgacccaccccgccaacctccgaaacttacgcccgactaacccgactttcctccttacttacctatatttaaaatttacaaccgcaacccctaacgctcgcaaccaatttcgcaacctctaaactctacgcgatacccgaaatcgaaaaacgaccgacaaaaacgaaaactaacgacgaaacgaaccgcgctaaacaaaaacacaaaaaacgaccgaaaccaaaacccgacgaattactaacgaaaaaatatatataccgaataaatataaacgacataaaaacgcgccgcgtaaactaccctaaaaacgctataacgtacaaacgtaactatactaaaaatatattaactcatatacattaacacgtatatccgaaaataattccc

SEQ ID NO: 21745 - DNA, 572 bp, Artificial Sequence
  chemically treated genomic DNA (Homo sapiens) CpG-island No: 21745
ttttcgtgcgcgattttagttttttcggttgtagtttagtttatcggttttgcgcgggaatagtgttattcgggtattcgggttagaataggttacgcgtgttttaggagcgcgggaagtttttacgttttttttttcgtatcgtttttttggttggtagagcgggtttttagcgcgttttagtcgtattaagcgtttttcgttttcgcgttattcgggcgcgttgttggggtttgatttttataataattagttagagatttttcgaaaaggttgggagcggtcgtcgtcgtttatcggggaagttttcgagggtgggcgtttttttttttattttttttgtcgtcgtcgggagggagtttcgtttttaaaagttttcgagaaatcgttcgtgcgtaggaggtagttgggagatatttaggatgtcgtttttcgtattaaggagggggacggcggtgggggaggtgggagaggtcgcggcgtaggtgtagattaggtttagaggtaaggaggggaggagggaaattgaggtagtcgcggggtggggagacgttttaaggtatatttttatt

SEQ ID NO: 21746 - DNA, 572 bp, Artificial Sequence
  chemically treated genomic DNA (Homo sapiens) CpG-island No: 21746
aataaaaatataccttaaaacgtctccccaccccgcgactacctcaatttccctcctcccctccttacctctaaacctaatctacacctacgccgcgacctctcccacctcccccaccgccgtccccctccttaatacgaaaaacgacatcctaaatatctcccaactacctcctacgcacgaacgatttctcgaaaacttttaaaaacgaaactccctcccgacgacgacaaaaaaaataaaaaaaaaaacgcccaccctcgaaaacttccccgataaacgacgacgaccgctcccaaccttttcgaaaaatctctaactaattattataaaaatcaaaccccaacaacgcgcccgaataacgcgaaaacgaaaaacgcttaatacgactaaaacgcgctaaaaacccgctctaccaaccaaaaaaacgatacgaaaaaaaaaacgtaaaaacttcccgcgctcctaaaacacgcgtaacctattctaacccgaatacccgaataacactattcccgcgcaaaaccgataaactaaactacaaccgaaaaaactaaaatcgcgcacgaaaa

SEQ ID NO: 21747 - DNA, 572 bp, Artificial Sequence
  chemically treated genomic DNA (Homo sapiens) CpG-island No: 21747
agtgagaatatattttgaaacgtttttttatttcgcggttgttttagtttttttttttttttttttgtttttgagtttggtttatatttgcgtcgcggttttttttattttttttatcgtcgtttttttttttaatgcggagaacgatattttgggtgttttttagttgttttttgcgtacggacggtttttcgaaagtttttaaaaacgaggttttttttcggcggcggtagggagggtgggaaggggggcgtttattttcgggagttttttcggtgggcggcggcggtcgtttttagttttttcgggagatttttggttgattattatggaaattaggttttagtagcgcgttcgggtggcgcgggagcgggaggcgtttggtgcggttgagacgcgttgaggattcgttttgttagttaaaggagcggtgcgggggagggggcgtgggagtttttcgcgtttttgggatacgcgtggtttgttttggttcgggtgttcgggtgatattgttttcgcgtagggtcgatgggttgagttgtagtcggaggggttggggtcgcgtacggaaa

SEQ ID NO: 21748 - DNA, 572 bp, Artificial Sequence
  chemically treated genomic DNA (Homo sapiens) CpG-island No: 21748
tttccgtacgcgaccccaacccctccgactacaactcaacccatcgaccctacgcgaaaacaatatcacccgaacacccgaaccaaaacaaaccacgcgtatcccaaaaacgcgaaaaactcccacgccccctcccccgcaccgctcctttaactaacaaaacgaatcctcaacgcgtctcaaccgcaccaaacgcctcccgctcccgcgccacccgaacgcgctactaaaacctaatttccataataatcaaccaaaaatctcccgaaaaaactaaaaacgaccgccgccgcccaccgaaaaaactcccgaaaataaacgccccccttcccaccctccctaccgccgccgaaaaaaaacctcgtttttaaaaactttcgaaaaaccgtccgtacgcaaaaaacaactaaaaaacacccaaaatatcgttctccgcattaaaaaaaaaaacgacgataaaaaaaataaaaaaaaccgcgacgcaaatataaaccaaactcaaaaacaaaaaaaaaaaaaaaaaaactaaaacaaccgcgaaataaaaaaacgtttcaaaatatattctcact

SEQ ID NO: 21749 - DNA, 722 bp, Artificial Sequence
  chemically treated genomic DNA (Homo sapiens) CpG-island No: 21749
gtttggggaggagagggcggggtcggggaggaggcgtttgtaagtttgtatcgtaatgtttttattggtttttagagggcgtaattattcgaggtttcgttttaagcgaggcggggcggaagcgtgttgtgtataggcgtaagatgggttttgggtagtttagagttttcgattggtttttttgtggtggcggggcggggttagaacgagatggttgtgtgcgtaggcgtaagattagcgtttttgggatcggaagttaaggcgttcgcggcgtgtggtaagtgaggggggcgggacgggtgtatcgggttgtggcggcgatggttgtcggagttgggtcgtttgggggtagtttggggtgcgagtttaggggcgagggtattttcgagatgaggagaaatgtaggaggtagtcgaagggtcggtaaacgcggatagagatggtatttgagcgtttttgggagaatttgggcgataggttagagatcgaaagaaatggaggtacgaaaagaagtttcgagaaattgagggattgaaagacgagggtgttgggagaggagggaagttgaaaattagagagcgtgggcgagagtgtcgatgggttttagcgagagttttagagtttacgaggtcgagaggcgtggtcgtttatgaatttggggagtggagggaaaagtcggaaattgatcgtggatattagaaatagaaaaaatggaatttaga

SEQ ID NO: 21750 - DNA, 722 bp, Artificial Sequence
  chemically treated genomic DNA (Homo sapiens) CpG-island No: 21750
tctaaattccattttttctatttctaatatccacgatcaatttccgacttttccctccactccccaaattcataaacgaccacgcctctcgacctcgtaaactctaaaactctcgctaaaacccatcgacactctcgcccacgctctctaattttcaacttccctcctctcccaacaccctcgtctttcaatccctcaatttctcgaaacttcttttcgtacctccatttctttcgatctctaacctatcgcccaaattctcccaaaaacgctcaaataccatctctatccgcgtttaccgacccttcgactacctcctacatttctcctcatctcgaaaataccctcgcccctaaactcgcaccccaaactacccccaaacgacccaactccgacaaccatcgccgccacaacccgatacacccgtcccgcccccctcacttaccacacgccgcgaacgccttaacttccgatcccaaaaacgctaatcttacgcctacgcacacaaccatctcgttctaaccccgccccgccaccacaaaaaaaccaatcgaaaactctaaactacccaaaacccatcttacgcctatacacaacacgcttccgccccgcctcgcttaaaacgaaacctcgaataattacgccctctaaaaaccaataaaaacattacgatacaaacttacaaacgcctcctccccgaccccgccctctcctccccaaac

SEQ ID NO: 21751 - DNA, 722 bp, Artificial Sequence
  chemically treated genomic DNA (Homo sapiens) CpG-island No: 21751
tttaaattttattttttttgtttttagtgtttacgattagttttcgatttttttttttattttttaagtttatgggcgattacgtttttcggtttcgtgggttttaagattttcgttggaatttatcggtattttcgtttacgttttttagtttttagtttttttttttttttaatattttcgttttttagttttttagtttttcgaagttttttttcgtgtttttatttttttcggtttttggtttgtcgtttaggtttttttagggacgtttaggtgttatttttgttcgcgtttgtcggtttttcggttgttttttatatttttttttatttcgagagtgttttcgtttttggattcgtattttaaattatttttaagcggtttaatttcgatagttatcgtcgttataattcggtatattcgtttcgttttttttatttattatacgtcgcgaacgttttaattttcggttttaagagcgttagttttgcgtttgcgtatatagttatttcgttttgatttcgtttcgttattatagaagagttaatcggaagttttgggttgtttaagatttattttgcgtttgtgtatagtacgttttcgtttcgtttcgtttggggcggagtttcgagtgattgcgttttttagaggttagtagaggtattgcggtatagatttgtaagcgtttttttttcggtttcgtttttttttttttaagt

SEQ ID NO: 21752 - DNA, 722 bp, Artificial Sequence
  chemically treated genomic DNA (Homo sapiens) CpG-island No: 21752
acttaaaaaaaaaaaaacgaaaccgaaaaaaaaacgcttacaaatctataccgcaatacctctactaacctctaaaaaacgcaatcactcgaaactccgccccaaacgaaacgaaacgaaaacgtactatacacaaacgcaaaataaatcttaaacaacccaaaacttccgattaactcttctataataacgaaacgaaatcaaaacgaaataactatatacgcaaacgcaaaactaacgctcttaaaaccgaaaattaaaacgttcgcgacgtataataaataaaaaaaacgaaacgaatataccgaattataacgacgataactatcgaaattaaaccgcttaaaaataatttaaaatacgaatccaaaaacgaaaacactctcgaaataaaaaaaaatataaaaaacaaccgaaaaaccgacaaacgcgaacaaaaataacacctaaacgtccctaaaaaaacctaaacgacaaaccaaaaaccgaaaaaaataaaaacacgaaaaaaaacttcgaaaaactaaaaaactaaaaaacgaaaatattaaaaaaaaaaaaaaactaaaaactaaaaaacgtaaacgaaaataccgataaattccaacgaaaatcttaaaacccacgaaaccgaaaaacgtaatcgcccataaacttaaaaaataaaaaaaaaaatcgaaaactaatcgtaaacactaaaaacaaaaaaaataaaatttaaa

SEQ ID NO: 21753 - DNA, 806 bp, Artificial Sequence
  chemically treated genomic DNA (Homo sapiens) CpG-island No: 21753
ttttaacgtttttatttttgacgtttttcgtaattttacggttgttgtaagttaatttttacgcgttttggcgttcgtttgggggttttcgcgcgtttgggcgaggttggggatttcggaggcggggacgcgtcgtttttttttttagttttttcgttaatagacgttgagcgttttttaggcgttgggttcgaagcgggaagcgtggtaacgggggttcggtggatgtcgtatttcgcggaaagcgttcgggacgtcgagcgggtgcggattttagaatcgcgcgttcgcgtcgtttgtttgttttttagattttagtttttagtttcggagttcgagtagtcgcgtcgggttcggaggtagtcgttaggacggagggttgttaggcgttcgaggtcgattcgtacggtttttagttcgcgttttcggttgtaattcgaggttattttttgtcgttttagggttatttatcgtggcgagacgcggcgaggtagttttacgtatttagcgattttcggttttttagtcgttttagtcggggaagggggaggtgttcgcgcgggggcggggtcgcggcgacgtgacgtacgggggcgggttcgatacgcggtttcgtttcgtttcgttttattttttttattgcgtttcgggatcgcgaggtgagtagaggttggtcgggaagtttttcggaggttcgtttcgggaatttcgtttcgtcgttttggaagtttttgtttgttcgttggtttatttttaggacgggtagtttattatttttttcggttagttttgtttaagagaagttt

SEQ ID NO: 21754 - DNA, 806 bp, Artificial Sequence
  chemically treated genomic DNA (Homo sapiens) CpG-island No: 21754
aaacttctcttaaacaaaactaaccgaaaaaaataataaactacccgtcctaaaaataaaccaacgaacaaacaaaaacttccaaaacgacgaaacgaaattcccgaaacgaacctccgaaaaacttcccgaccaacctctactcacctcgcgatcccgaaacgcaataaaaaaaataaaacgaaacgaaacgaaaccgcgtatcgaacccgcccccgtacgtcacgtcgccgcgaccccgcccccgcgcgaacacctcccccttccccgactaaaacgactaaaaaaccgaaaatcgctaaatacgtaaaactacctcgccgcgtctcgccacgataaataaccctaaaacgacaaaaaataacctcgaattacaaccgaaaacgcgaactaaaaaccgtacgaatcgacctcgaacgcctaacaaccctccgtcctaacgactacctccgaacccgacgcgactactcgaactccgaaactaaaaactaaaatctaaaaaacaaacaaacgacgcgaacgcgcgattctaaaatccgcacccgctcgacgtcccgaacgctttccgcgaaatacgacatccaccgaacccccgttaccacgcttcccgcttcgaacccaacgcctaaaaaacgctcaacgtctattaacgaaaaaactaaaaaaaaaaacgacgcgtccccgcctccgaaatccccaacctcgcccaaacgcgcgaaaacccccaaacgaacgccaaaacgcgtaaaaattaacttacaacaaccgtaaaattacgaaaaacgtcaaaaataaaaacgttaaaa

SEQ ID NO: 21755 - DNA, 806 bp, Artificial Sequence
  chemically treated genomic DNA (Homo sapiens) CpG-island No: 21755
gaattttttttaaatagaattgatcgggagaagtggtgagttgttcgttttaggggtaagttagcgagtagataggggtttttagggcggcggggcggggttttcggggcgagttttcgggaaatttttcgattagtttttgtttatttcgcggtttcgaggcgtagtggaggggatggggcggggcggggcggggtcgcgtatcgggttcgttttcgtacgttacgtcgtcgcggtttcgttttcgcgcgggtatttttttttttttcggttggggcggttggagagtcgggagtcgttgggtgcgtggggttgtttcgtcgcgtttcgttacggtaggtggttttggggcggtagggggtggtttcgggttgtaatcgggggcgcgggttgggggtcgtgcgggtcggtttcgggcgtttggtagtttttcgttttggcggttgttttcgggttcggcgcgattgttcgggtttcggggttgggagttgggatttgggaggtaggtaggcggcgcgggcgcgcggttttgggattcgtattcgttcggcgtttcgagcgtttttcgcggggtgcggtatttatcgggttttcgttattacgtttttcgtttcggatttagcgtttgggagacgtttagcgtttgttggcggggggattgggggggagggcggcgcgttttcgttttcggagtttttaatttcgtttaggcgcgcggggatttttaggcgggcgttagggcgcgtggaagttaatttgtagtagtcgtggagttgcgaggagcgttagaagtggaggcgttgggg

SEQ ID NO: 21756 - DNA, 806 bp, Artificial Sequence
  chemically treated genomic DNA (Homo sapiens) CpG-island No: 21756
ccccaacgcctccacttctaacgctcctcgcaactccacgactactacaaattaacttccacgcgccctaacgcccgcctaaaaatccccgcgcgcctaaacgaaattaaaaactccgaaaacgaaaacgcgccgccctcccccccaatccccccgccaacaaacgctaaacgtctcccaaacgctaaatccgaaacgaaaaacgtaataacgaaaacccgataaataccgcaccccgcgaaaaacgctcgaaacgccgaacgaatacgaatcccaaaaccgcgcgcccgcgccgcctacctacctcccaaatcccaactcccaaccccgaaacccgaacaatcgcgccgaacccgaaaacaaccgccaaaacgaaaaactaccaaacgcccgaaaccgacccgcacgacccccaacccgcgcccccgattacaacccgaaaccaccccctaccgccccaaaaccacctaccgtaacgaaacgcgacgaaacaaccccacgcacccaacgactcccgactctccaaccgccccaaccgaaaaaaaaaaaaatacccgcgcgaaaacgaaaccgcgacgacgtaacgtacgaaaacgaacccgatacgcgaccccgccccgccccgccccatcccctccactacgcctcgaaaccgcgaaataaacaaaaactaatcgaaaaatttcccgaaaactcgccccgaaaaccccgccccgccgccctaaaaacccctatctactcgctaacttacccctaaaacgaacaactcaccacttctcccgatcaattctatttaaaaaaaattc

SEQ ID NO: 21757 - DNA, 916 bp, Artificial Sequence
  chemically treated genomic DNA (Homo sapiens) CpG-island No: 21757
atattcgtttttaagatcgagattttgttacggttatattaatataggttttttttttttcggcgtttttttttttcggaggagtttcgtttgcgacgttttttagttaattatttttagtattttttttcgtttttatttagaattttcgtcgcgttttttttttttaggcgggattttcgtcggcgttttttttttcgcggcgtcgtttttttttttcgtttgaggcgagtttgggtttagtttagagtttttcggcggcggcgtagttttagggtagcgcgggttgtagcggcggcggcggttagggttgtgtagggcgaggttttttttttttttttcgttattttattttttttttttcgttatttttttttttcgtttttttcgtttttttttttttcgttaggttcgatttagttgtgagcggtaagatggcggcgtttaggtcgtcgtttgttaggttgtcgggcgttatggtgtcggcgtttatttaagatttggaggttttgcgcgcgtttacggcgttttttaaagagtagcggaatcggtaacgggttcggtcggggggttgtttcgggtaggggagggcggtcgggattttcgcggcggtttcggtttggatttaggcgtcgttttcgtttcgttggagacgcggagggcgaggtttgcgcgggttgtttgagcgttatttaggtttttcgatttttaggtatcgtttcgtgttcgtgggttttcgcggggtttggggcgggcgtttcgtttttttatcgtagttagttcgggtgcgaagtcgcgatttcgggagtttttgtcgcggcgtgtcggtgatgttgatttaatatacggttaggttttttttgttatgtgcgagggttgcgttaggttttggttgtaagatttacgcggtttttag

SEQ ID NO: 21758 - DNA, 916 bp, Artificial Sequence
  chemically treated genomic DNA (Homo sapiens) CpG-island No: 21758
ctaaaaaccgcgtaaatcttacaaccaaaacctaacgcaaccctcgcacataacaaaaaaaacctaaccgtatattaaatcaacatcaccgacacgccgcgacaaaaactcccgaaatcgcgacttcgcacccgaactaactacgataaaaaaacgaaacgcccgccccaaaccccgcgaaaacccacgaacacgaaacgatacctaaaaatcgaaaaacctaaataacgctcaaacaacccgcgcaaacctcgccctccgcgtctccaacgaaacgaaaacgacgcctaaatccaaaccgaaaccgccgcgaaaatcccgaccgccctcccctacccgaaacaaccccccgaccgaacccgttaccgattccgctactctttaaaaaacgccgtaaacgcgcgcaaaacctccaaatcttaaataaacgccgacaccataacgcccgacaacctaacaaacgacgacctaaacgccgccatcttaccgctcacaactaaatcgaacctaacgaaaaaaaaaaaaacgaaaaaaacgaaaaaaaaaaataacgaaaaaaaaaaaataaaataacgaaaaaaaaaaaaaaaacctcgccctacacaaccctaaccgccgccgccgctacaacccgcgctaccctaaaactacgccgccgccgaaaaactctaaactaaacccaaactcgcctcaaacgaaaaaaaaaaacgacgccgcgaaaaaaaaaacgccgacgaaaatcccgcctaaaaaaaaaaaacgcgacgaaaattctaaataaaaacgaaaaaaaatactaaaaataattaactaaaaaacgtcgcaaacgaaactcctccgaaaaaaaaaaacgccgaaaaaaaaaaaacctatattaatataaccgtaacaaaatctcgatcttaaaaacgaatat

SEQ ID NO: 21759 - DNA, 916 bp, Artificial Sequence
  chemically treated genomic DNA (Homo sapiens) CpG-island No: 21759
ttgggggtcgcgtgggttttgtagttagggtttggcgtagttttcgtatatgataggggaggtttaatcgtgtgttgggttaatattatcggtacgtcgcggtaagggttttcgggatcgcggtttcgtattcggattggttgcggtgggggagcggggcgttcgttttaggtttcgcggggatttacgagtacgaggcggtgtttgggagtcgggaggtttgggtggcgtttaggtagttcgcgtaggtttcgtttttcgcgtttttagcgaggcgggggcggcgtttgggtttaggtcggggtcgtcgcgggagtttcggtcgtttttttttgttcggggtagtttttcggtcggattcgttatcggtttcgttgttttttgaagagcgtcgtgagcgcgcgtagggtttttaggttttggatgggcgtcggtattatgacgttcgatagtttggtaggcggcggtttgggcgtcgttattttgtcgtttatagttgggtcgagtttgacgaggaggaggaaggcgaggaggacgaagggggaggatgacgaggagggaggagtaggatggcgaggaggaagggggaggtttcgttttatatagttttaatcgtcgtcgtcgttgtagttcgcgttgttttgaagttgcgtcgtcgtcggagagttttaggttgagtttagattcgttttaggcgggaggaggagacggcgtcgcgggggagggggcgtcggcggaagtttcgtttgaggggagggggcgcggcggaagttttgggtgagagcggggagggatgttgggggtgattgattgggaagcgtcgtagacggggttttttcgaggggaggggacgtcggggggagggggatttgtgttgatgtggtcgtaatagggtttcggttttgggagcgggtat

SEQ ID NO: 21760 - DNA, 916 bp, Artificial Sequence
  chemically treated genomic DNA (Homo sapiens) CpG-island No: 21760
atacccgctcccaaaaccgaaaccctattacgaccacatcaacacaaatccccctccccccgacgtcccctcccctcgaaaaaaccccgtctacgacgcttcccaatcaatcacccccaacatccctccccgctctcacccaaaacttccgccgcgccccctcccctcaaacgaaacttccgccgacgccccctcccccgcgacgccgtctcctcctcccgcctaaaacgaatctaaactcaacctaaaactctccgacgacgacgcaacttcaaaacaacgcgaactacaacgacgacgacgattaaaactatataaaacgaaacctcccccttcctcctcgccatcctactcctccctcctcgtcatcctcccccttcgtcctcctcgccttcctcctcctcgtcaaactcgacccaactataaacgacaaaataacgacgcccaaaccgccgcctaccaaactatcgaacgtcataataccgacgcccatccaaaacctaaaaaccctacgcgcgctcacgacgctcttcaaaaaacaacgaaaccgataacgaatccgaccgaaaaactaccccgaacaaaaaaaaacgaccgaaactcccgcgacgaccccgacctaaacccaaacgccgcccccgcctcgctaaaaacgcgaaaaacgaaacctacgcgaactacctaaacgccacccaaacctcccgactcccaaacaccgcctcgtactcgtaaatccccgcgaaacctaaaacgaacgccccgctcccccaccgcaaccaatccgaatacgaaaccgcgatcccgaaaacccttaccgcgacgtaccgataatattaacccaacacacgattaaacctcccctatcatatacgaaaactacgccaaaccctaactacaaaacccacgcgacccccaa

SEQ ID NO: 21761 - DNA, 673 bp, Artificial Sequence
  chemically treated genomic DNA (Homo sapiens) CpG-island No: 21761
ttaaattttttatttttagcgaaagttcgcgtcggagggcgattgtcggcgagcgggagcggcgtagggttcggggcgggcggttagtttagttttagcgttagcgttagcgttagcgcgggttgagttcgcgggaagaagggagattttaggcgcgatagtagtcgcggtttttagttttagcgtcgtttaatgttttcgattcgcgggaaaagacgaagaggttttgtggtgtttaaggttttggaacggtcgtagagagtaatcgttgtcggttgttttgtttagttcgaggtttagcgaacgcgtagagagcgggcgtttcgaggattcgtcgagggagcgtcgagggaatttgttcgtcgcgttttcgttcgttcgtcggttttcgggttttgtgtcgtattgggtttcggcgtagaagagttagtcggtattcgagcgtcgaggggggtatcgcgttcgttattagttcgagtggagttagtcggtaaggtagtcgtacgttggaggtagagggaagagcgagttagcgcgagtcgggaaggaagttattaggttaaggcggtggaacgcgcgtttcgagggagtttagagtcgagcgggaggattgttagtttttatttagttttcgggtttttgtttttaattttattggagcgttgagttcgga

SEQ ID NO: 21762 - DNA, 673 bp, Artificial Sequence
  chemically treated genomic DNA (Homo sapiens) CpG-island No: 21762
tccgaactcaacgctccaataaaattaaaaacaaaaacccgaaaactaaataaaaactaacaatcctcccgctcgactctaaactccctcgaaacgcgcgttccaccgccttaacctaataacttccttcccgactcgcgctaactcgctcttccctctacctccaacgtacgactaccttaccgactaactccactcgaactaataacgaacgcgatacccccctcgacgctcgaataccgactaactcttctacgccgaaacccaatacgacacaaaacccgaaaaccgacgaacgaacgaaaacgcgacgaacaaattccctcgacgctccctcgacgaatcctcgaaacgcccgctctctacgcgttcgctaaacctcgaactaaacaaaacaaccgacaacgattactctctacgaccgttccaaaaccttaaacaccacaaaacctcttcgtcttttcccgcgaatcgaaaacattaaacgacgctaaaactaaaaaccgcgactactatcgcgcctaaaatctcccttcttcccgcgaactcaacccgcgctaacgctaacgctaacgctaaaactaaactaaccgcccgccccgaaccctacgccgctcccgctcgccgacaatcgccctccgacgcgaactttcgctaaaaataaaaaatttaa

SEQ ID NO: 21763 - DNA, 673 bp, Artificial Sequence
  chemically treated genomic DNA (Homo sapiens) CpG-island No: 21763
ttcgagtttagcgttttagtggagttgggggtaagagttcgggggttgggtggaagttgatagttttttcgttcggttttgagttttttcggagcgcgcgttttatcgttttggtttggtggtttttttttcggttcgcgttagttcgtttttttttttatttttagcgtgcggttgttttgtcgattgattttattcgggttggtggcgggcgcggtgtttttttcggcgttcgagtgtcggttgatttttttgcgtcggagtttagtgcggtataaagttcgagggtcggcgggcgggcggagacgcggcgagtaggttttttcggcgttttttcggcgagttttcggagcgttcgttttttgcgcgttcgttgggtttcgggttggataaagtagtcggtagcggttgttttttgcggtcgttttagggttttgggtattatagagttttttcgttttttttcgcgggtcgggagtattgggcgacgttggggttaggagtcgcggttgttgtcgcgtttggagtttttttttttttcgcgagtttagttcgcgttggcgttggcgttggcgttggggttgagttggtcgttcgtttcgagttttgcgtcgttttcgttcgtcggtagtcgtttttcgacgcgggttttcgttggaagtagaaagtttgg

SEQ ID NO: 21764 - DNA, 673 bp, Artificial Sequence
  chemically treated genomic DNA (Homo sapiens) CpG-island No: 21764
ccaaactttctacttccaacgaaaacccgcgtcgaaaaacgactaccgacgaacgaaaacgacgcaaaactcgaaacgaacgaccaactcaaccccaacgccaacgccaacgccaacgcgaactaaactcgcgaaaaaaaaaaaaactccaaacgcgacaacaaccgcgactcctaaccccaacgtcgcccaatactcccgacccgcgaaaaaaaacgaaaaaactctataatacccaaaaccctaaaacgaccgcaaaaaacaaccgctaccgactactttatccaacccgaaacccaacgaacgcgcaaaaaacgaacgctccgaaaactcgccgaaaaaacgccgaaaaaacctactcgccgcgtctccgcccgcccgccgaccctcgaactttataccgcactaaactccgacgcaaaaaaatcaaccgacactcgaacgccgaaaaaaacaccgcgcccgccaccaacccgaataaaatcaatcgacaaaacaaccgcacgctaaaaataaaaaaaaaaacgaactaacgcgaaccgaaaaaaaaaccaccaaaccaaaacgataaaacgcgcgctccgaaaaaactcaaaaccgaacgaaaaaactatcaacttccacccaacccccgaactcttacccccaactccactaaaacgctaaactcgaa

SEQ ID NO: 21765 - DNA, 528 bp, Artificial Sequence
  chemically treated genomic DNA (Homo sapiens) CpG-island No: 21765
tcgtcgcgcgttgtcgggataacggcgcgttaggaacgcggaaatagtcgaaggtgagcgaggcggtttcgaggattttcgaagcgtttcgagcggtcggaaagagtcgaaggcgatcgggtacgtacgtgtagtttcgaggttcgagcgtcgggggttaggttatttcgttttgtaagagagaagcgggacgagttttttttaggagagacggcggcgtagggtcggcgtttgggttttttttgtgtggagggcgcgttgttatagtttcgattaatcgcggtattttttttttttgggcgtgtttttttttcgtgtatttcgaggcggagtttttttagtacgcggcggtttcggtttaggttttttttgggtttcgtttttttagtttcggagcggagggcgtgggttaagcgtttttgggaaagtcgatgcgttcggtagtgttttgaggtgttgggtgattgagggtttgttttatcgtcgggtttcggattttatagagttaagcgaggtagggagcgtttt

SEQ ID NO: 21766 - DNA, 528 bp, Artificial Sequence
  chemically treated genomic DNA (Homo sapiens) CpG-island No: 21766
aaaacgctccctacctcgcttaactctataaaatccgaaacccgacgataaaacaaaccctcaatcacccaacacctcaaaacactaccgaacgcatcgactttcccaaaaacgcttaacccacgccctccgctccgaaactaaaaaaacgaaacccaaaaaaaacctaaaccgaaaccgccgcgtactaaaaaaactccgcctcgaaatacacgaaaaaaaaacacgcccaaaaaaaaaaaataccgcgattaatcgaaactataacaacgcgccctccacacaaaaaaaacccaaacgccgaccctacgccgccgtctctcctaaaaaaaactcgtcccgcttctctcttacaaaacgaaataacctaacccccgacgctcgaacctcgaaactacacgtacgtacccgatcgccttcgactctttccgaccgctcgaaacgcttcgaaaatcctcgaaaccgcctcgctcaccttcgactatttccgcgttcctaacgcgccgttatcccgacaacgcgcgacga

SEQ ID NO: 21767 - DNA, 528 bp, Artificial Sequence
  chemically treated genomic DNA (Homo sapiens) CpG-island No: 21767
ggggcgttttttgtttcgtttggttttgtggagttcggggttcggcgatggaataggtttttagttatttaatattttaggatattgtcgagcgtatcgatttttttagaaacgtttgatttacgtttttcgtttcgaaattagaaaagcggagtttagggaaggtttgggtcgagatcgtcgcgtgttggaaaggtttcgtttcgggatgtacgggaagggaatacgtttaggaggggaggatgtcgcggttgatcggggttgtgatagcgcgttttttatataaaggggatttagacgtcggttttgcgtcgtcgttttttttagaaaaagttcgtttcgttttttttttgtagagcggaataatttggttttcgacgttcgggtttcggagttgtacgtgcgtgttcgatcgttttcggtttttttcggtcgttcggggcgtttcgggagttttcggggtcgtttcgtttattttcggttattttcgcgtttttggcgcgtcgttgtttcggtaacgcgcggcgg

SEQ ID NO: 21768 - DNA, 528 bp, Artificial Sequence
  chemically treated genomic DNA (Homo sapiens) CpG-island No: 21768
ccgccgcgcgttaccgaaacaacgacgcgccaaaaacgcgaaaataaccgaaaataaacgaaacgaccccgaaaactcccgaaacgccccgaacgaccgaaaaaaaccgaaaacgatcgaacacgcacgtacaactccgaaacccgaacgtcgaaaaccaaattattccgctctacaaaaaaaaaacgaaacgaactttttctaaaaaaaacgacgacgcaaaaccgacgtctaaatcccctttatataaaaaacgcgctatcacaaccccgatcaaccgcgacatcctcccctcctaaacgtattcccttcccgtacatcccgaaacgaaacctttccaacacgcgacgatctcgacccaaaccttccctaaactccgcttttctaatttcgaaacgaaaaacgtaaatcaaacgtttctaaaaaaatcgatacgctcgacaatatcctaaaatattaaataactaaaaacctattccatcgccgaaccccgaactccacaaaaccaaacgaaacaaaaaacgcccc

SEQ ID NO: 21769 - DNA, 1231 bp, Artificial Sequence
  chemically treated genomic DNA (Homo sapiens) CpG-island No: 21769
atattttatttaggaaagggtgcgtttaattgttttagacgtgtttttatattttttagaatttaggttcgcgttcgattttatatttcgagttattacgtcgttttttttttacgtattcgttaatattgttgcggttaattatagtacgggttttggtttattggttgtttgtttattaatttaaagagacgtatagttcgtaaggtcgcgaggttggcgttataatattattggcgtcgcgggttcgttttcgacgtttatcgggttcgtacgtgcgagcgcgttcgtttagcgttagttaatgggagcgtcgttttggggagacgggttcgaagaaatattgggggtgttcgttttcgcgttcgtcgtttcgtttcggcgttcgcgtatttcggtttcgttttcgcgcgtcgttcgtgaggtttttatcggtcgtcgtagtcggaattgttgttgagggcggcgggtcggtttcgttagggtgagtggcggtagtatttgcgttcgtagttttcgtagtcgcgcgtcggttcgcggaggggacgtgtcggggttagcgtcgttcgattagtcgttttcgaggcggacgattagttcggcgttgcggtttttttgtagtcggcgttcgggggtcggggttgttcggttcggttggttttgcgggtattcggggaggtttcgggaagttaggttgtcgttcggcgttgatgaaaaaggtgattaaggttgggcggcggggttgttatggcgaggttcggtcggggggttttgtcgggcggcgcgggagagcgcggggggggcgtcgtttttatagcgttcggtatagttataattggttttagggcgaggaggtttttgcgtttttatttcgagacgcgagtcggtgcggagcgggacggggttggaggagattgcgttttcgagaaaagttcggtttcgttggaggttttcgcgaaaaggaggttatttttttgtttgttggtttttagggtaaagtttggacggcgtcggtttttttagtggcgaaaagcgttttttcgtgttcggtcggcgttttgggtgtggagttcggcgagcgggcgagtttattttggtggtcgagtttgttttgtttgggtttcgggtggtttgcgggcggataggtttttgggtagcggggtttttagttcgagacgaggtttttgggggtttaggttttttgagtggaaagaggtgggttgagggggaa

SEQ ID NO: 21770 - DNA, 1231 bp, Artificial Sequence
  chemically treated genomic DNA (Homo sapiens) CpG-island No: 21770
ttccccctcaacccacctctttccactcaaaaaacctaaacccccaaaaacctcgtctcgaactaaaaaccccgctacccaaaaacctatccgcccgcaaaccacccgaaacccaaacaaaacaaactcgaccaccaaaataaactcgcccgctcgccgaactccacacccaaaacgccgaccgaacacgaaaaaacgcttttcgccactaaaaaaaccgacgccgtccaaactttaccctaaaaaccaacaaacaaaaaaataacctccttttcgcgaaaacctccaacgaaaccgaacttttctcgaaaacgcaatctcctccaaccccgtcccgctccgcaccgactcgcgtctcgaaataaaaacgcaaaaacctcctcgccctaaaaccaattataactataccgaacgctataaaaacgacgccccccccgcgctctcccgcgccgcccgacaaaaccccccgaccgaacctcgccataacaaccccgccgcccaaccttaatcacctttttcatcaacgccgaacgacaacctaacttcccgaaacctccccgaatacccgcaaaaccaaccgaaccgaacaaccccgacccccgaacgccgactacaaaaaaaccgcaacgccgaactaatcgtccgcctcgaaaacgactaatcgaacgacgctaaccccgacacgtcccctccgcgaaccgacgcgcgactacgaaaactacgaacgcaaatactaccgccactcaccctaacgaaaccgacccgccgccctcaacaacaattccgactacgacgaccgataaaaacctcacgaacgacgcgcgaaaacgaaaccgaaatacgcgaacgccgaaacgaaacgacgaacgcgaaaacgaacacccccaatatttcttcgaacccgtctccccaaaacgacgctcccattaactaacgctaaacgaacgcgctcgcacgtacgaacccgataaacgtcgaaaacgaacccgcgacgccaataatattataacgccaacctcgcgaccttacgaactatacgtctctttaaattaataaacaaacaaccaataaaccaaaacccgtactataattaaccgcaacaatattaacgaatacgtaaaaaaaaaacgacgtaataactcgaaatataaaatcgaacgcgaacctaaattctaaaaaatataaaaacacgtctaaaacaattaaacgcaccctttcctaaataaaatat

SEQ ID NO: 21771 - DNA, 1231 bp, Artificial Sequence
  chemically treated genomic DNA (Homo sapiens) CpG-island No: 21771
tttttttttaatttatttttttttatttaagaaatttaaatttttaaagatttcgtttcgggttgagaatttcgttgtttagggatttgttcgttcgtaggttattcgggatttaagtaaaataaattcggttattagagtgaattcgttcgttcgtcgggttttatatttaagacgtcgatcgagtacggggaagcgtttttcgttattgaaaggatcgacgtcgtttagattttattttaagggttaataagtagggggatggtttttttttcgcgagaatttttaacgagatcggatttttttcggaggcgtagttttttttagtttcgtttcgtttcgtatcggttcgcgtttcgggatggggacgtagaagttttttcgttttgaggttagttgtggttgtatcgggcgttgtggaagcgacgtttttttcgcgttttttcgcgtcgttcgataggatttttcggtcgggtttcgttatgatagtttcgtcgtttagttttggttattttttttattaacgtcgggcggtagtttggtttttcggggttttttcgggtgttcgtagaattagtcgggtcgggtagtttcggttttcgagcgtcggttgtagggaggtcgtaacgtcgggttggtcgttcgtttcggaagcgattggtcgagcggcgttagtttcggtacgtttttttcgcgggtcggcgcgcggttgcgggggttgcggacgtagatattgtcgttatttattttagcgaagtcggttcgtcgtttttagtagtagtttcggttacggcggtcggtggggattttacggacggcgcgcgggggcggggtcggggtgcgcgggcgtcggggcggggcgacgaacgcgggggcgagtatttttaatgttttttcgggttcgtttttttaaaacggcgtttttattggttagcgttgggcgggcgcgttcgtacgtacgagttcggtgggcgtcgggggcgagttcgcggcgttagtagtgttgtgacgttagtttcgcgattttgcggattgtgcgtttttttggattggtggatagatagttaataggttagggttcgtgttgtgattggtcgtagtagtgttgacggatacgtgagaagaaaacggcgtggtagttcggagtgtggaatcgggcgcgaatttgagttttgagaagtgtggaagtacgtttgaggtagttaagcgtatttttttttgggtggagtat

SEQ ID NO: 21772 - DNA, 1231 bp, Artificial Sequence
  chemically treated genomic DNA (Homo sapiens) CpG-island No: 21772
atactccacccaaaaaaaaatacgcttaactacctcaaacgtacttccacacttctcaaaactcaaattcgcgcccgattccacactccgaactaccacgccgttttcttctcacgtatccgtcaacactactacgaccaatcacaacacgaaccctaacctattaactatctatccaccaatccaaaaaaacgcacaatccgcaaaatcgcgaaactaacgtcacaacactactaacgccgcgaactcgcccccgacgcccaccgaactcgtacgtacgaacgcgcccgcccaacgctaaccaataaaaacgccgttttaaaaaaacgaacccgaaaaaacattaaaaatactcgcccccgcgttcgtcgccccgccccgacgcccgcgcaccccgaccccgcccccgcgcgccgtccgtaaaatccccaccgaccgccgtaaccgaaactactactaaaaacgacgaaccgacttcgctaaaataaataacgacaatatctacgtccgcaacccccgcaaccgcgcgccgacccgcgaaaaaaacgtaccgaaactaacgccgctcgaccaatcgcttccgaaacgaacgaccaacccgacgttacgacctccctacaaccgacgctcgaaaaccgaaactacccgacccgactaattctacgaacacccgaaaaaaccccgaaaaaccaaactaccgcccgacgttaataaaaaaaataaccaaaactaaacgacgaaactatcataacgaaacccgaccgaaaaatcctatcgaacgacgcgaaaaaacgcgaaaaaaacgtcgcttccacaacgcccgatacaaccacaactaacctcaaaacgaaaaaacttctacgtccccatcccgaaacgcgaaccgatacgaaacgaaacgaaactaaaaaaaactacgcctccgaaaaaaatccgatctcgttaaaaattctcgcgaaaaaaaaaccatccccctacttattaacccttaaaataaaatctaaacgacgtcgatcctttcaataacgaaaaacgcttccccgtactcgatcgacgtcttaaatataaaacccgacgaacgaacgaattcactctaataaccgaatttattttacttaaatcccgaataacctacgaacgaacaaatccctaaacaacgaaattctcaacccgaaacgaaatctttaaaaatttaaatttcttaaataaaaaaaaataaattaaaaaaaaa

SEQ ID NO: 21773 - DNA, 972 bp, Artificial Sequence
  chemically treated genomic DNA (Homo sapiens) CpG-island No: 21773
agtttttcgtgcgggtaggcgagttcgcgtttttttcgtttcggggtggattcggttttttttgtttttttttagggttagttttgggggtcggcgcgtggggtaggtgcgcggggttcgggagtttcgcgtttttcggggggcggggagggggtgggacgaggggttagggttggggttgcggttcggtcggtcgaggcggcgtagggagcgaggtcggcgcgtagggttaggttatgagtcgcggtttcgtcgggtaggtggttgtgggcggggtagcggttcggattcgtaatcgtgtttagattcgcgttcgcgtcggggtttttatagatttcggggtcggggtcggggtcggggtcgggtagggttcgtcgagttgtcgcgttttttcgtcgtcggttcgggcgtttggacgcgagtttcggttagggggcgttcggggaggttcgggagggtttcgggttggtgggtagggtcgggggcggcggcgtgggggcggtaggggtcgcggcgggttcgggcgggttcgggcgggtcgggtcgagtcgtcgagaggggatttggaataaataacggcggttatgttgagagcgcgtcggggtcgttaaatttttcggtttgcgttcgttttatcggtcgttttttttttttcggtcgtaggatgatagtgaagttgggcgacggcggtagcggggaggacgggtttaagaagttgggtaagcgggcggtcgatgaggagtttttggaaggagaaggggtcggcggcgtagacgcggtcgaggagagtagcggtataaagagggacgagaagatttttcgggtcggcgtcgacggttttttcgcgtttttcggcgcgtcgtaggcgtcgttttcgtcgtagggtagtttttaggattagtattatttttttcggtttagcgtgcggtcgtagagtaagaggtttaggaaggatttttcgagcgttgtggg

SEQ ID NO: 21774 - DNA, 972 bp, Artificial Sequence
  chemically treated genomic DNA (Homo sapiens) CpG-island No: 21774
cccacaacgctcgaaaaatccttcctaaacctcttactctacgaccgcacgctaaaccgaaaaaaataatactaatcctaaaaactaccctacgacgaaaacgacgcctacgacgcgccgaaaaacgcgaaaaaaccgtcgacgccgacccgaaaaatcttctcgtccctctttataccgctactctcctcgaccgcgtctacgccgccgaccccttctccttccaaaaactcctcatcgaccgcccgcttacccaacttcttaaacccgtcctccccgctaccgccgtcgcccaacttcactatcatcctacgaccgaaaaaaaaaaaacgaccgataaaacgaacgcaaaccgaaaaatttaacgaccccgacgcgctctcaacataaccgccgttatttattccaaatcccctctcgacgactcgacccgacccgcccgaacccgcccgaacccgccgcgacccctaccgcccccacgccgccgcccccgaccctacccaccaacccgaaaccctcccgaacctccccgaacgccccctaaccgaaactcgcgtccaaacgcccgaaccgacgacgaaaaaacgcgacaactcgacgaaccctacccgaccccgaccccgaccccgaccccgaaatctataaaaaccccgacgcgaacgcgaatctaaacacgattacgaatccgaaccgctaccccgcccacaaccacctacccgacgaaaccgcgactcataacctaaccctacgcgccgacctcgctccctacgccgcctcgaccgaccgaaccgcaaccccaaccctaacccctcgtcccaccccctccccgccccccgaaaaacgcgaaactcccgaaccccgcgcacctaccccacgcgccgacccccaaaactaaccctaaaaaaaaacaaaaaaaaccgaatccaccccgaaacgaaaaaaacgcgaactcgcctacccgcacgaaaaact

SEQ ID NO: 21775 - DNA, 972 bp, Artificial Sequence
  chemically treated genomic DNA (Homo sapiens) CpG-island No: 21775
tttatagcgttcggaggattttttttgggttttttgttttgcggtcgtacgttggatcggaggaagtggtgttggttttgggggttgttttgcggcggggacggcgtttgcggcgcgtcggggggcgcgggggggtcgtcggcgtcggttcggggggttttttcgtttttttttgtgtcgttgtttttttcggtcgcgtttgcgtcgtcggttttttttttttttagggattttttatcggtcgttcgtttgtttagttttttgagttcgtttttttcgttgtcgtcgtcgtttaattttattgttattttgcggtcgggagaggggaggcggtcggtgaggcgggcgtaggtcgggaagtttagcggtttcgacgcgtttttaatatggtcgtcgttgtttgttttaaattttttttcggcggttcggttcggttcgttcgagttcgttcgagttcgtcgcggtttttgtcgtttttacgtcgtcgttttcggttttgtttattagttcgggattttttcgggttttttcggacgttttttggtcgaggttcgcgtttagacgttcgggtcggcggcgggagggcgcgatagttcggcggattttgttcggtttcggtttcggtttcggtttcggggtttatgggagtttcggcgcgggcgcgggtttgggtacggttgcgggttcgggtcgttgtttcgtttatagttatttattcggcggggtcgcggtttatggtttggttttgcgcgtcggtttcgttttttgcgtcgtttcggtcggtcgggtcgtagttttagttttagtttttcgttttatttttttttcgtttttcgaaaggcgcggggttttcgggtttcgcgtatttgttttacgcgtcggtttttagagttggttttggaggaggatagaggaggtcggatttatttcgggacgggagaagcgcgggttcgtttgttcgtacggggaatt

SEQ ID NO: 21776 - DNA, 972 bp, Artificial Sequence
  chemically treated genomic DNA (Homo sapiens) CpG-island No: 21776
aattccccgtacgaacaaacgaacccgcgcttctcccgtcccgaaataaatccgacctcctctatcctcctccaaaaccaactctaaaaaccgacgcgtaaaacaaatacgcgaaacccgaaaaccccgcgcctttcgaaaaacgaaaaaaaaataaaacgaaaaactaaaactaaaactacgacccgaccgaccgaaacgacgcaaaaaacgaaaccgacgcgcaaaaccaaaccataaaccgcgaccccgccgaataaataactataaacgaaacaacgacccgaacccgcaaccgtacccaaacccgcgcccgcgccgaaactcccataaaccccgaaaccgaaaccgaaaccgaaaccgaacaaaatccgccgaactatcgcgccctcccgccgccgacccgaacgtctaaacgcgaacctcgaccaaaaaacgtccgaaaaaacccgaaaaaatcccgaactaataaacaaaaccgaaaacgacgacgtaaaaacgacaaaaaccgcgacgaactcgaacgaactcgaacgaaccgaaccgaaccgccgaaaaaaaatttaaaacaaacaacgacgaccatattaaaaacgcgtcgaaaccgctaaacttcccgacctacgcccgcctcaccgaccgcctcccctctcccgaccgcaaaataacaataaaattaaacgacgacgacaacgaaaaaaacgaactcaaaaaactaaacaaacgaacgaccgataaaaaatccctaaaaaaaaaaaaaaccgacgacgcaaacgcgaccgaaaaaaacaacgacacaaaaaaaaacgaaaaaaccccccgaaccgacgccgacgacccccccgcgccccccgacgcgccgcaaacgccgtccccgccgcaaaacaacccccaaaaccaacaccacttcctccgatccaacgtacgaccgcaaaacaaaaaacccaaaaaaaatcctccgaacgctataaa

SEQ ID NO: 21777 - DNA, 837 bp, Artificial Sequence
  chemically treated genomic DNA (Homo sapiens) CpG-island No: 21777
ttatcgcgttcgggcgcgtagggggagcggttatcgcgtcgaggttttatttgaaagaaaaaagggtacgaaaaaggaggtggtggagaaggaggaggaggaggaggaggaggagggggaggaggaagaaaacgaaaaggagcgaggagaggaggagaaagaggaggaggaggagaaaggcgaagaaaaagagtttgagagacggagaaagagcgagagaggaagaaagagaggtagaaagggcgtgtttttggcgttgcgttttttttttttttttttaggtttttcgttcgggttttgcgcgtttttcggttgtagttttttttcggcgaagttgggaattgggtgggattatacggagtagtttcgtcgtcgtcgttggtagaggtcggtttggagagggcgggggttttttttcgttagtcgtttttggcgtttttcgtttcgtcgtatttttcgtttcgtttttttcgacgttcggttaggaggagtcggtagtatcgggagtttcgcgtcgagggcgtcgcggttcgcgtttcgcgattgtagttttcggtttggtttcggcggggcgttttttttttttttttttttgcgagttgggattcggtcggttttcgtttttttttggtcgcgagatcggtttcggcggttgggtcgttagtagttttagttatgggttcggggcgcgtattcgggttttgtttgtttgttttgttggtttacgttcgcgtcgtttagtatagtaaagtcgcgtaaggtaaggaaggaggggcgcgcggtttgggggttgttttggttgttgggttttagggtttaggagcgattttcgagggg

SEQ ID NO: 21778 - DNA, 837 bp, Artificial Sequence
  chemically treated genomic DNA (Homo sapiens) CpG-island No: 21778
cccctcgaaaatcgctcctaaaccctaaaacccaacaaccaaaacaacccccaaaccgcgcgcccctccttccttaccttacgcgactttactatactaaacgacgcgaacgtaaaccaacaaaacaaacaaacaaaacccgaatacgcgccccgaacccataactaaaactactaacgacccaaccgccgaaaccgatctcgcgaccaaaaaaaaacgaaaaccgaccgaatcccaactcgcaaaaaaaaaaaaaaaaaaaacgccccgccgaaaccaaaccgaaaactacaatcgcgaaacgcgaaccgcgacgccctcgacgcgaaactcccgatactaccgactcctcctaaccgaacgtcgaaaaaaacgaaacgaaaaatacgacgaaacgaaaaacgccaaaaacgactaacgaaaaaaaacccccgccctctccaaaccgacctctaccaacgacgacgacgaaactactccgtataatcccacccaattcccaacttcgccgaaaaaaaactacaaccgaaaaacgcgcaaaacccgaacgaaaaacctaaaaaaaaaaaaaaaaaacgcaacgccaaaaacacgccctttctacctctctttcttcctctctcgctctttctccgtctctcaaactctttttcttcgcctttctcctcctcctcctctttctcctcctctcctcgctccttttcgttttcttcctcctccccctcctcctcctcctcctcctcctccttctccaccacctcctttttcgtacccttttttctttcaaataaaacctcgacgcgataaccgctccccctacgcgcccgaacgcgataa

SEQ ID NO: 21779 - DNA, 837 bp, Artificial Sequence
  chemically treated genomic DNA (Homo sapiens) CpG-island No: 21779
tttttcgggaatcgtttttaggttttgaggtttagtagttaggatagtttttaggtcgcgcgtttttttttttttattttgcgcggttttgttgtattgggcggcgcgggcgtggattagtaggataagtaggtagagttcgggtacgcgtttcgagtttatggttggagttattggcggtttagtcgtcggggtcggtttcgcggttaggggagggcggaagtcggtcggattttagttcgtaggagggggaggggagggggcgtttcgtcggggttaggtcgggggttgtagtcgcggggcgcggatcgcggcgttttcggcgcgaggttttcgatgttatcggttttttttggtcggacgtcggggagagcgaggcggagagtgcgacgaggcgaggggcgttaggggcgattgacggaggggaattttcgttttttttaagtcggtttttgttagcggcggcggcggggttgtttcgtgtaattttatttaatttttagtttcgtcgggagagagttgtagtcggagagcgcgtagagttcgagcgaaggatttgagaaaggggaggggaaacgtagcgttagaaatacgttttttttgtttttttttttttttttttcgtttttttttcgttttttaggtttttttttttcgttttttttttttttttttttttttttttttttttttcgttttttttcgttttttttttttttttttttttttttttttttttttttttttttttttattattttttttttcgtgttttttttttttttaaatggggtttcggcgcggtggtcgttttttttgcgcgttcgggcgcggtgg

SEQ ID NO: 21780 - DNA, 837 bp, Artificial Sequence
  chemically treated genomic DNA (Homo sapiens) CpG-island No: 21780
ccaccgcgcccgaacgcgcaaaaaaaacgaccaccgcgccgaaaccccatttaaaaaaaaaaaaaacacgaaaaaaaaaataataaaaaaaaaaaaaaaaaaaaaaaaaaaaaaaaaaaaaaaaaaaaaaaacgaaaaaaaacgaaaaaaaaaaaaaaaaaaaaaaaaaaaaaaaaaaaacgaaaaaaaaaaacctaaaaaacgaaaaaaaaacgaaaaaaaaaaaaaaaaaaacaaaaaaaacgtatttctaacgctacgtttcccctcccctttctcaaatccttcgctcgaactctacgcgctctccgactacaactctctcccgacgaaactaaaaattaaataaaattacacgaaacaaccccgccgccgccgctaacaaaaaccgacttaaaaaaaacgaaaattcccctccgtcaatcgcccctaacgcccctcgcctcgtcgcactctccgcctcgctctccccgacgtccgaccaaaaaaaaccgataacatcgaaaacctcgcgccgaaaacgccgcgatccgcgccccgcgactacaacccccgacctaaccccgacgaaacgccccctcccctccccctcctacgaactaaaatccgaccgacttccgccctcccctaaccgcgaaaccgaccccgacgactaaaccgccaataactccaaccataaactcgaaacgcgtacccgaactctacctacttatcctactaatccacgcccgcgccgcccaatacaacaaaaccgcgcaaaataaaaaaaaaaaaacgcgcgacctaaaaactatcctaactactaaacctcaaaacctaaaaacgattcccgaaaaa

SEQ ID NO: 21781 - DNA, 858 bp, Artificial Sequence
  chemically treated genomic DNA (Homo sapiens) CpG-island No: 21781
gggatcgtaagatagtgagtgttgagcgcgcggtcgggaagaagtttggaggttttgagttcggaggatagagatcgaagttttagggtttgcgttttttataatttgcgttttttgttttttcgcgttattttcgaagcgtattttttcgttcgtaggtcgtagaagtgatgacgtaaagttttcggggttttcgttatttttttacgtttttgttggatcgaatttttggaatggataggtagcggttttcgattgttatagcgacgattcggtttcgagtcgcgtttaggttttgattcgggcgtcgtgacgttagtacgttttttttgggcgtttagtttcgttggttatgcgttatttcggttttggtgggggcggggtttcgaagagttcggtttagatttcggtcgtttgggttttaggagtttcggaattaggataagttggatggttgtcgcggcgaagcggggggcggggtggatcgtgttcggtattttttatacgggtttcggggttcggtagaggcgcgttaagaggaaaggaaagtgcggcggttttggaatttggatatcgcgcgaggtaagttgcgcgcgggcgggcgggttatggcgtaggcgggttgtggggtcggcgttggtggcggggttcggtgtatggcggtttgtcggcggagtcgttttcgggggttgttaggttggtggttgcgggaggagtgggttaattatgtttagggcgggaggtcgggcgggcgtaggatttcgggaaggtttcgagttcggcgtgtttattttttttcggttttagtagggcggtttggtcgttggatcgcggtcgggtttttttttttatttaggg

SEQ ID NO: 21782 - DNA, 858 bp, Artificial Sequence
  chemically treated genomic DNA (Homo sapiens) CpG-island No: 21782
ccctaaataaaaaaaaaaacccgaccgcgatccaacgaccaaaccgccctactaaaaccgaaaaaaaataaacacgccgaactcgaaaccttcccgaaatcctacgcccgcccgacctcccgccctaaacataattaacccactcctcccgcaaccaccaacctaacaacccccgaaaacgactccgccgacaaaccgccatacaccgaaccccgccaccaacgccgaccccacaacccgcctacgccataacccgcccgcccgcgcgcaacttacctcgcgcgatatccaaattccaaaaccgccgcactttcctttcctcttaacgcgcctctaccgaaccccgaaacccgtataaaaaataccgaacacgatccaccccgccccccgcttcgccgcgacaaccatccaacttatcctaattccgaaactcctaaaacccaaacgaccgaaatctaaaccgaactcttcgaaaccccgcccccaccaaaaccgaaataacgcataaccaacgaaactaaacgcccaaaaaaaacgtactaacgtcacgacgcccgaatcaaaacctaaacgcgactcgaaaccgaatcgtcgctataacaatcgaaaaccgctacctatccattccaaaaattcgatccaacaaaaacgtaaaaaaataacgaaaaccccgaaaactttacgtcatcacttctacgacctacgaacgaaaaaatacgcttcgaaaataacgcgaaaaaacaaaaaacgcaaattataaaaaacgcaaaccctaaaacttcgatctctatcctccgaactcaaaacctccaaacttcttcccgaccgcgcgctcaacactcactatcttacgatccc

SEQ ID NO: 21783 - DNA, 858 bp, Artificial Sequence
  chemically treated genomic DNA (Homo sapiens) CpG-island No: 21783
ttttgggtgggggagggggttcggtcgcggtttagcggttaggtcgttttgttagggtcggagggaggtgggtacgtcgggttcgggattttttcggggttttgcgttcgttcggtttttcgttttgggtatggttggtttatttttttcgtagttattaatttgatagttttcgagggcgatttcgtcgatagatcgttatgtatcgggtttcgttattagcgtcggttttataattcgtttgcgttatagttcgttcgttcgcgcgtagtttgtttcgcgcgatatttaggttttagggtcgtcgtatttttttttttttttggcgcgtttttatcgggtttcggaattcgtatagaaaatatcgggtacggtttatttcgtttttcgtttcgtcgcggtagttatttaatttattttggtttcggggtttttggagtttaggcggtcgggatttgaatcgagtttttcggagtttcgtttttattaaggtcggggtgacgtatggttagcgaggttgagcgtttagggaaggcgtgttgacgttacgacgttcgggttagggtttgggcgcggttcggagtcgggtcgtcgttatagtaatcgggaatcgttatttgtttattttaaggattcggtttagtagaagcgtgaggaggtggcggaggtttcgagggttttgcgttattatttttgcggtttgcgggcgagaaggtgcgtttcgggagtagcgcgggaggataggaggcgtaggttgtgagggacgtaggttttggggtttcggtttttgtttttcgagtttagagtttttaggttttttttcggtcgcgcgtttagtatttattgttttacggtttt

SEQ ID NO: 21784 - DNA, 858 bp, Artificial Sequence
  chemically treated genomic DNA (Homo sapiens) CpG-island No: 21784
aaaaccgtaaaacaataaatactaaacgcgcgaccgaaaaaaaacctaaaaactctaaactcgaaaaacaaaaaccgaaaccccaaaacctacgtccctcacaacctacgcctcctatcctcccgcgctactcccgaaacgcaccttctcgcccgcaaaccgcaaaaataataacgcaaaaccctcgaaacctccgccacctcctcacgcttctactaaaccgaatccttaaaataaacaaataacgattcccgattactataacgacgacccgactccgaaccgcgcccaaaccctaacccgaacgtcgtaacgtcaacacgccttccctaaacgctcaacctcgctaaccatacgtcaccccgaccttaataaaaacgaaactccgaaaaactcgattcaaatcccgaccgcctaaactccaaaaaccccgaaaccaaaataaattaaataactaccgcgacgaaacgaaaaacgaaataaaccgtacccgatattttctatacgaattccgaaacccgataaaaacgcgccaaaaaaaaaaaaaaatacgacgaccctaaaacctaaatatcgcgcgaaacaaactacgcgcgaacgaacgaactataacgcaaacgaattataaaaccgacgctaataacgaaacccgatacataacgatctatcgacgaaatcgccctcgaaaactatcaaattaataactacgaaaaaaataaaccaaccatacccaaaacgaaaaaccgaacgaacgcaaaaccccgaaaaaatcccgaacccgacgtacccacctccctccgaccctaacaaaacgacctaaccgctaaaccgcgaccgaaccccctcccccacccaaaa

SEQ ID NO: 21785 - DNA, 820 bp, Artificial Sequence
  chemically treated genomic DNA (Homo sapiens) CpG-island No: 21785
cgcgtcgttgatatttattacgtcgcggcggggattcgggagatttggcggtttttgtgtattttcgcggtagtttgcgggtaacgggggcgggaggcgtcgggcgtttttgattcggtcgtatatttgcgtcgtagttcgtttttcgttcgttgtttttcgggttttcggtcgttttatcgcgcgtttcgagagttgagtcggtttcggcgtacgaggtcggtgagtgcgcgttagggggcggcggggggcgcgcgggcggcgggggcgcggggttcgggtcgggggttgttttttttttttcgtcgcgagcgcggtcggaggtcgtagcgtttttcggagttcggagtttaggcgtacgcgcgttcgtttttgtcgttaatttcgggaggtgcgagcggcgtcggggggacgcgggcggcggcggaggttgcgggagtcgttgtcgttcgagggatcgcggattcgggaggttcggttttcggcgtcgggttttagttttttttacgggagtcgtattttatttttagagttttagcgcgttcgcggggttcgagtcgcggtcggcgcggggcggggaggggcgggaagtttgcgttttatacgcggtttcgtagatttggcggtttcgttttcggtcgggcgtaggtaggagcggcgggagtcgcgggggcggttagttgggcgtcgcggggtcggttggacgcggggcgcgggggtagcgggtggttaggcgtgtggggggcgcggggggcggtcgggttttttttatttttttttcgaagtttaggagtagcgcggggggagggagggtcgtttt

SEQ ID NO: 21786 - DNA, 820 bp, Artificial Sequence
  chemically treated genomic DNA (Homo sapiens) CpG-island No: 21786
aaaacgaccctccctccccccgcgctactcctaaacttcgaaaaaaaaataaaaaaaacccgaccgccccccgcgccccccacacgcctaaccacccgctacccccgcgccccgcgtccaaccgaccccgcgacgcccaactaaccgcccccgcgactcccgccgctcctacctacgcccgaccgaaaacgaaaccgccaaatctacgaaaccgcgtataaaacgcaaacttcccgcccctccccgccccgcgccgaccgcgactcgaaccccgcgaacgcgctaaaactctaaaaataaaatacgactcccgtaaaaaaaactaaaacccgacgccgaaaaccgaacctcccgaatccgcgatccctcgaacgacaacgactcccgcaacctccgccgccgcccgcgtccccccgacgccgctcgcacctcccgaaattaacgacaaaaacgaacgcgcgtacgcctaaactccgaactccgaaaaacgctacgacctccgaccgcgctcgcgacgaaaaaaaaaaaacaacccccgacccgaaccccgcgcccccgccgcccgcgcgccccccgccgccccctaacgcgcactcaccgacctcgtacgccgaaaccgactcaactctcgaaacgcgcgataaaacgaccgaaaacccgaaaaacaacgaacgaaaaacgaactacgacgcaaatatacgaccgaatcaaaaacgcccgacgcctcccgcccccgttacccgcaaactaccgcgaaaatacacaaaaaccgccaaatctcccgaatccccgccgcgacgtaataaatatcaacgacgcg

SEQ ID NO: 21787 - DNA, 820 bp, Artificial Sequence
  chemically treated genomic DNA (Homo sapiens) CpG-island No: 21787
agggcggtttttttttttttcgcgttgtttttggatttcgagaagagggtgggggggattcggtcgtttttcgcgttttttatacgtttggttattcgttgttttcgcgtttcgcgtttagtcggtttcgcgacgtttaattggtcgttttcgcggttttcgtcgtttttatttgcgttcggtcgggagcggagtcgttaagtttgcgaggtcgcgtgtagggcgtaaatttttcgttttttttcgtttcgcgtcggtcgcgattcggatttcgcggacgcgttggggttttgggggtgggatgcggttttcgtgggggaaattgaggttcggcgtcgggagtcggatttttcgggttcgcggtttttcgagcggtagcgattttcgtagttttcgtcgtcgttcgcgttttttcgacgtcgttcgtatttttcgaagttggcggtagaggcgggcgcgcgtgcgtttgggtttcgggtttcggggggcgttgcgattttcgatcgcgttcgcggcgggagggaaggagtagttttcggttcgaatttcgcgttttcgtcgttcgcgcgtttttcgtcgttttttggcgcgtatttatcggtttcgtgcgtcgggatcggtttagttttcggggcgcgcggtggagcggtcgggaattcgggaggtagcggacggagagcggattgcggcgtaggtgtgcggtcgagttaggggcgttcggcgtttttcgttttcgttgttcgtaggttgtcgcgggggtgtatagaggtcgttaggtttttcgggttttcgtcgcggcgtgatgggtgttagcggcgcg

SEQ ID NO: 21788 - DNA, 820 bp, Artificial Sequence
  chemically treated genomic DNA (Homo sapiens) CpG-island No: 21788
cgcgccgctaacacccatcacgccgcgacgaaaacccgaaaaacctaacgacctctatacacccccgcgacaacctacgaacaacgaaaacgaaaaacgccgaacgcccctaactcgaccgcacacctacgccgcaatccgctctccgtccgctacctcccgaattcccgaccgctccaccgcgcgccccgaaaactaaaccgatcccgacgcacgaaaccgataaatacgcgccaaaaaacgacgaaaaacgcgcgaacgacgaaaacgcgaaattcgaaccgaaaactactccttccctcccgccgcgaacgcgatcgaaaatcgcaacgccccccgaaacccgaaacccaaacgcacgcgcgcccgcctctaccgccaacttcgaaaaatacgaacgacgtcgaaaaaacgcgaacgacgacgaaaactacgaaaatcgctaccgctcgaaaaaccgcgaacccgaaaaatccgactcccgacgccgaacctcaatttcccccacgaaaaccgcatcccacccccaaaaccccaacgcgtccgcgaaatccgaatcgcgaccgacgcgaaacgaaaaaaaacgaaaaatttacgccctacacgcgacctcgcaaacttaacgactccgctcccgaccgaacgcaaataaaaacgacgaaaaccgcgaaaacgaccaattaaacgtcgcgaaaccgactaaacgcgaaacgcgaaaacaacgaataaccaaacgtataaaaaacgcgaaaaacgaccgaatcccccccaccctcttctcgaaatccaaaaacaacgcgaaaaaaaaaaaaaccgccct

SEQ ID NO: 21789 - DNA, 812 bp, Artificial Sequence
  chemically treated genomic DNA (Homo sapiens) CpG-island No: 21789
ttttcgggcggggcggtgggtttttattggtagtgttggtggtgggtgggaacgggaggggtggtgagcgttgattggtcgtagtggcggggcggggcggaggaggaggaggtgtgcgtgtcggggcgcggagcggcgggcgttgattggtggtagtggtggtgggcgtggtgtaggcgtggcgcgtggtcggcgttggtattcgtaggggaggcggagaaggaggcggagggagcgattgtggtttcggtcgcggtggtcggcgcggtttgttttttgtgatcgtagttcgcgttttacgtttcgcgtttatggtcgtcgtgtcgggttttttggttacgcgtgttcgttcgcggatttgagtttcgcgtttgggatgtcggggatgcgcgtttttcggttttgcggttgtttcgggttgggcgcggggcgatggatttgagtatgaagaagttcgtcgtgcgtaggtttttttttgtgtatttgcgtaggaagtcgcgttttaagagttttagtttgagtcggttcgaggtaatgcggtcgttttcggggcgcgtaggtgtcgggtattgagcgggtcgtggtcgttcgagttcgtttcgttatttttgggtggatttcgagattcgttagggagtttaagttattggaaagttggttcggtttcgaaaatcgaattaaacggttttaaacgttatcgttgggatttcgtagtaattgggcggttcgtgggttttcgcgggggtaattttatttttattgtatttttagttggttttttcgtcgttggttgtacggggtgtgggatggtt

SEQ ID NO: 21790 - DNA, 812 bp, Artificial Sequence
  chemically treated genomic DNA (Homo sapiens) CpG-island No: 21790
aaccatcccacaccccgtacaaccaacgacgaaaaaaccaactaaaaatacaataaaaataaaattacccccgcgaaaacccacgaaccgcccaattactacgaaatcccaacgataacgtttaaaaccgtttaattcgattttcgaaaccgaaccaactttccaataacttaaactccctaacgaatctcgaaatccacccaaaaataacgaaacgaactcgaacgaccacgacccgctcaatacccgacacctacgcgccccgaaaacgaccgcattacctcgaaccgactcaaactaaaactcttaaaacgcgacttcctacgcaaatacacaaaaaaaaacctacgcacgacgaacttcttcatactcaaatccatcgccccgcgcccaacccgaaacaaccgcaaaaccgaaaaacgcgcatccccgacatcccaaacgcgaaactcaaatccgcgaacgaacacgcgtaaccaaaaaacccgacacgacgaccataaacgcgaaacgtaaaacgcgaactacgatcacaaaaaacaaaccgcgccgaccaccgcgaccgaaaccacaatcgctccctccgcctccttctccgcctcccctacgaataccaacgccgaccacgcgccacgcctacaccacgcccaccaccactaccaccaatcaacgcccgccgctccgcgccccgacacgcacacctcctcctcctccgccccgccccgccactacgaccaatcaacgctcaccacccctcccgttcccacccaccaccaacactaccaataaaaacccaccgccccgcccgaaaa

SEQ ID NO: 21791 - DNA, 812 bp, Artificial Sequence
  chemically treated genomic DNA (Homo sapiens) CpG-island No: 21791
gattattttatatttcgtgtagttagcggcggagaaattagttggaaatgtagtgggggtggagttgttttcgcgaggatttacggatcgtttaattattacggagttttagcgataacgtttggagtcgtttggttcgattttcggaatcggattagttttttagtaatttgaattttttgacgggtttcggggtttatttaggggtggcgaggcgggttcgggcgattacggttcgtttagtgttcggtatttgcgcgtttcgagggcggtcgtattatttcgagtcggtttaggttggagtttttggagcgcgattttttgcgtaggtatatagagaagaatttgcgtacggcgaatttttttatgtttaggtttatcgtttcgcgtttagttcggagtagtcgtagggtcgggggacgcgtattttcggtattttaggcgcggggtttaggttcgcgggcgggtacgcgtggttagggagttcggtacggcggttatgggcgcggggcgtggggcgcgagttgcggttataaagggtaggtcgcgtcggttatcgcggtcggggttataatcgtttttttcgttttttttttcgttttttttgcgagtattagcgtcggttacgcgttacgtttatattacgtttattattattattattaattagcgttcgtcgtttcgcgtttcggtacgtatatttttttttttttcgtttcgtttcgttattacggttaattagcgtttattatttttttcgtttttatttattattagtattgttaatgagagtttatcgtttcgttcgggag

SEQ ID NO: 21792 - DNA, 812 bp, Artificial Sequence
  chemically treated genomic DNA (Homo sapiens) CpG-island No: 21792
ctcccgaacgaaacgataaactctcattaacaatactaataataaataaaaacgaaaaaaataataaacgctaattaaccgtaataacgaaacgaaacgaaaaaaaaaaaaatatacgtaccgaaacgcgaaacgacgaacgctaattaataataataataataaacgtaatataaacgtaacgcgtaaccgacgctaatactcgcaaaaaaaacgaaaaaaaaaacgaaaaaaacgattataaccccgaccgcgataaccgacgcgacctaccctttataaccgcaactcgcgccccacgccccgcgcccataaccgccgtaccgaactccctaaccacgcgtacccgcccgcgaacctaaaccccgcgcctaaaataccgaaaatacgcgtcccccgaccctacgactactccgaactaaacgcgaaacgataaacctaaacataaaaaaattcgccgtacgcaaattcttctctatatacctacgcaaaaaatcgcgctccaaaaactccaacctaaaccgactcgaaataatacgaccgccctcgaaacgcgcaaataccgaacactaaacgaaccgtaatcgcccgaacccgcctcgccacccctaaataaaccccgaaacccgtcaaaaaattcaaattactaaaaaactaatccgattccgaaaatcgaaccaaacgactccaaacgttatcgctaaaactccgtaataattaaacgatccgtaaatcctcgcgaaaacaactccacccccactacatttccaactaatttctccgccgctaactacacgaaatataaaataatc

SEQ ID NO: 21793 - DNA, 637 bp, Artificial Sequence
  chemically treated genomic DNA (Homo sapiens) CpG-island No: 21793
gcgtttttagtcggtatttttcgtttcgggtttcgtaggcggttgggtttcgttagttcgggtttagtcgtcgcgtcggtcgttttttgcgttttttgcgttttttgtttacggttttcgtagttcggcgggcgtacggtttcggcggttgggttttcgcgcgggcgtaggtgtgtagggtaagcgcggacgggtttcgtgggtcgtcggcgaggtaggcgtagcggtttgtcgggtcgcggaagttcgcgcggtgagatttatgagtgtgtacgcgtggtttttttttacgtcgatatttgcgattatggacgggggtttcgatttttttttgttatagttaagtgagggttaaagttatttttaagaaggtcgggtagagtaggtcgttgggcggattttcggcgcggtcgtagtattttcgggaggggtcgttttagaagtcgcgcgtttttttttttttttttttttgttttattttttttttcgttttttttttttttttcggagaggaatttcgagggcgggaattgtttcggcgtttatggattcgggggcggtagttcgagtttttttttgtatcgtgtttgggagggtttgaagtttaaatttttcgggttgagaagggttcggggtt

SEQ ID NO: 21794 - DNA, 637 bp, Artificial Sequence
  chemically treated genomic DNA (Homo sapiens) CpG-island No: 21794
aaccccgaacccttctcaacccgaaaaatttaaacttcaaaccctcccaaacacgatacaaaaaaaaactcgaactaccgcccccgaatccataaacgccgaaacaattcccgccctcgaaattcctctccgaaaaaaaaaaaaaaaacgaaaaaaaaaataaaacaaaaaaaaaaaaaaaaaaaaacgcgcgacttctaaaacgacccctcccgaaaatactacgaccgcgccgaaaatccgcccaacgacctactctacccgaccttcttaaaaataactttaaccctcacttaactataacaaaaaaaaatcgaaacccccgtccataatcgcaaatatcgacgtaaaaaaaaaccacgcgtacacactcataaatctcaccgcgcgaacttccgcgacccgacaaaccgctacgcctacctcgccgacgacccacgaaacccgtccgcgcttaccctacacacctacgcccgcgcgaaaacccaaccgccgaaaccgtacgcccgccgaactacgaaaaccgtaaacaaaaaacgcaaaaaacgcaaaaaacgaccgacgcgacgactaaacccgaactaacgaaacccaaccgcctacgaaacccgaaacgaaaaataccgactaaaaacgc

SEQ ID NO: 21795 - DNA, 637 bp, Artificial Sequence
  chemically treated genomic DNA (Homo sapiens) CpG-island No: 21795
ggtttcggattttttttagttcgaggagtttgggttttaggtttttttagatacggtgtaaggagaggttcgggttgtcgttttcgagtttatgagcgtcggagtagttttcgttttcgaagttttttttcgggagagagggagagagcgagggagagaatgagatagggagggagggagagaggggcgcgcggtttttgaggcgatttttttcggagatgttgcggtcgcgtcgggaattcgtttagcgatttgttttgttcggtttttttagaaataattttggtttttatttggttgtagtagaaaggaatcgaggttttcgtttataatcgtaggtgtcggcgtggaaaggagttacgcgtgtatatttatgggttttatcgcgcgggttttcgcggttcggtaagtcgttgcgtttgtttcgtcggcggtttacggagttcgttcgcgtttgttttgtatatttgcgttcgcgcgaggatttagtcgtcgaggtcgtgcgttcgtcgggttgcgggggtcgtgggtagggggcgtagggggcgtagggggcggtcggcgcggcggttgaattcgggttgacgaggtttagtcgtttgcggggttcggagcgggaggtatcggttaggggcgt

SEQ ID NO: 21796 - DNA, 637 bp, Artificial Sequence
  chemically treated genomic DNA (Homo sapiens) CpG-island No: 21796
acgcccctaaccgatacctcccgctccgaaccccgcaaacgactaaacctcgtcaacccgaattcaaccgccgcgccgaccgccccctacgccccctacgccccctacccacgacccccgcaacccgacgaacgcacgacctcgacgactaaatcctcgcgcgaacgcaaatatacaaaacaaacgcgaacgaactccgtaaaccgccgacgaaacaaacgcaacgacttaccgaaccgcgaaaacccgcgcgataaaacccataaatatacacgcgtaactcctttccacgccgacacctacgattataaacgaaaacctcgattcctttctactacaaccaaataaaaaccaaaattatttctaaaaaaaccgaacaaaacaaatcgctaaacgaattcccgacgcgaccgcaacatctccgaaaaaaatcgcctcaaaaaccgcgcgcccctctctccctccctccctatctcattctctccctcgctctctccctctctcccgaaaaaaaacttcgaaaacgaaaactactccgacgctcataaactcgaaaacgacaacccgaacctctccttacaccgtatctaaaaaaacctaaaacccaaactcctcgaactaaaaaaaatccgaaacc

SEQ ID NO: 21797 - DNA, 607 bp, Artificial Sequence
  chemically treated genomic DNA (Homo sapiens) CpG-island No: 21797
gaacgtagtcgacggttatttttatagcggaggtcgtcgtcggtttagcgaggtaagaaatttgtaggacgttcggaatttttagagggttgggcgtttaagggttaggattttcgagatgtaattgtttaaagcggtgggtgttcgtggttatcggttggcgagtttcggttacggatattttaatgtattatttcgtttcgtttcgcgtttaacgtcggttggagagcgcgcggtcgtagggtaggcgttttttcgtacgcgcgaaggtttgcggttcggaggtagtcggtagttaatggggcggggcgtcgcgcgtagggggcggggtcgtgacgcgtttttttcgtgattcggttttcggtttgcgttcgcggaaatcggaagcggcggttgttcgcggtgtcggttgggggcggagaggcggcggtgggttttttggggtgtgtgagttcggtgatggagtcgggttcgatagtcgcgtagcggaggtgttcgttgtcgtcgtggttgtcgttggggttgttgttgtggtcggggttggttttgggcgcgttttttttcggtagtagttcgtatagggttttttacgattttttgtcggagt

SEQ ID NO: 21798 - DNA, 607 bp, Artificial Sequence
  chemically treated genomic DNA (Homo sapiens) CpG-island No: 21798
actccgacaaaaaatcgtaaaaaaccctatacgaactactaccgaaaaaaaacgcgcccaaaaccaaccccgaccacaacaacaaccccaacgacaaccacgacgacaacgaacacctccgctacgcgactatcgaacccgactccatcaccgaactcacacaccccaaaaaacccaccgccgcctctccgcccccaaccgacaccgcgaacaaccgccgcttccgatttccgcgaacgcaaaccgaaaaccgaatcacgaaaaaaacgcgtcacgaccccgccccctacgcgcgacgccccgccccattaactaccgactacctccgaaccgcaaaccttcgcgcgtacgaaaaaacgcctaccctacgaccgcgcgctctccaaccgacgttaaacgcgaaacgaaacgaaataatacattaaaatatccgtaaccgaaactcgccaaccgataaccacgaacacccaccgctttaaacaattacatctcgaaaatcctaacccttaaacgcccaaccctctaaaaattccgaacgtcctacaaatttcttacctcgctaaaccgacgacgacctccgctataaaaataaccgtcgactacgttc

SEQ ID NO: 21799 - DNA, 607 bp, Artificial Sequence
  chemically treated genomic DNA (Homo sapiens) CpG-island No: 21799
gtttcgataggaggtcgtggaagattttgtgcggattgttgtcgaaggggagcgcgtttagggttagtttcgattatagtagtagttttagcggtagttacggcggtaacgaatattttcgttgcgcggttgtcgggttcggttttattatcgggtttatatattttagggagtttatcgtcgttttttcgtttttagtcggtatcgcggatagtcgtcgttttcggttttcgcgagcgtaggtcgagagtcgggttacgaggagggcgcgttacggtttcgttttttgcgcgcggcgtttcgttttattggttgtcggttgttttcgggtcgtaggttttcgcgcgtgcgggagggcgtttattttgcggtcgcgcgttttttagtcggcgttaggcgcggggcggggcggagtggtgtattggggtattcgtagtcgaggttcgttagtcggtgattacgagtatttatcgttttggataattgtatttcgggggttttgatttttgaacgtttaattttttgggagtttcgggcgttttataagttttttatttcgttggatcgacgacggttttcgttgtggaaatggtcgtcggttgcgttt

SEQ ID NO: 21800 - DNA, 607 bp, Artificial Sequence
  chemically treated genomic DNA (Homo sapiens) CpG-island No: 21800
aaacgcaaccgacgaccatttccacaacgaaaaccgtcgtcgatccaacgaaataaaaaacttataaaacgcccgaaactcccaaaaaattaaacgttcaaaaatcaaaacccccgaaatacaattatccaaaacgataaatactcgtaatcaccgactaacgaacctcgactacgaataccccaatacaccactccgccccgccccgcgcctaacgccgactaaaaaacgcgcgaccgcaaaataaacgccctcccgcacgcgcgaaaacctacgacccgaaaacaaccgacaaccaataaaacgaaacgccgcgcgcaaaaaacgaaaccgtaacgcgccctcctcgtaacccgactctcgacctacgctcgcgaaaaccgaaaacgacgactatccgcgataccgactaaaaacgaaaaaacgacgataaactccctaaaatatataaacccgataataaaaccgaacccgacaaccgcgcaacgaaaatattcgttaccgccgtaactaccgctaaaactactactataatcgaaactaaccctaaacgcgctccccttcgacaacaatccgcacaaaatcttccacgacctcctatcgaaac

SEQ ID NO: 21801 - DNA, 975 bp, Artificial Sequence
  chemically treated genomic DNA (Homo sapiens) CpG-island No: 21801
gataaagacgcgtagtttcgtttttttggggttttagttcgtgagatcgtcgggtgtatttcgattttcgtcggtacgtgcgtttttttagggtagggtttgtttgttttttttcgcgggtcgttagtagttagtataggtcgtaaacggcggttcgtagagcggattaacggagtcgattttcgtaggtttggagtcggacgcggcggggtagagttttcgaggttgtagttcgtcggaattcgcgggagggtagtcgggttgggcggagcgtatagcgttacggatcgatcgcgtaggttttgtcggttattttcggtgtcgcgcggcggttttcggtaggaggtagagggtatatcgttagttttaggttaggttgcgagggtcgcggattcgagtcgggaaggattttgggcggacgagtcgcgcgtttcgtagttatggagtaggacgattcggtcgaggcgttgacggagttgcgcgagcggcggttgggcgcgttggagttgttgtaggcggcggtcggttcgggtttggtagtttacgcggtgtgggcgttgttgttttagttcggttttcggcgcgtgtcgttgcggttgtaggtgcggggcggggttaggtcgggtaggggagttcggttgtcgtttagggttttaaggtttgggcgtggtcggggtgagtttcgtttcgtcgtgtggtagttcgggtcgggttgcgggcggggcgggagcggttagtggattttcgtcgttattcggtttaggtgttttacgtcggcgcgagcgcgcggtaggtggagtacgtgttgtcgttgttgcgaggacgtttcggaaaaacggtggatttgggttttggcgacggtaggatcgtaagtgtttgcgtttgggttttcgtcgttttatatcgtttatttgttggcgggcgtttttgtttatattttggtttttatattttcggtgtttataggtgttggcg

SEQ ID NO: 21802 - DNA, 975 bp, Artificial Sequence
  chemically treated genomic DNA (Homo sapiens) CpG-island No: 21802
cgccaacacctataaacaccgaaaatataaaaaccaaaatataaacaaaaacgcccgccaacaaataaacgatataaaacgacgaaaacccaaacgcaaacacttacgatcctaccgtcgccaaaacccaaatccaccgtttttccgaaacgtcctcgcaacaacgacaacacgtactccacctaccgcgcgctcgcgccgacgtaaaacacctaaaccgaataacgacgaaaatccactaaccgctcccgccccgcccgcaacccgacccgaactaccacacgacgaaacgaaactcaccccgaccacgcccaaaccttaaaaccctaaacgacaaccgaactcccctacccgacctaaccccgccccgcacctacaaccgcaacgacacgcgccgaaaaccgaactaaaacaacaacgcccacaccgcgtaaactaccaaacccgaaccgaccgccgcctacaacaactccaacgcgcccaaccgccgctcgcgcaactccgtcaacgcctcgaccgaatcgtcctactccataactacgaaacgcgcgactcgtccgcccaaaatccttcccgactcgaatccgcgaccctcgcaacctaacctaaaactaacgatataccctctacctcctaccgaaaaccgccgcgcgacaccgaaaataaccgacaaaacctacgcgatcgatccgtaacgctatacgctccgcccaacccgactaccctcccgcgaattccgacgaactacaacctcgaaaactctaccccgccgcgtccgactccaaacctacgaaaatcgactccgttaatccgctctacgaaccgccgtttacgacctatactaactactaacgacccgcgaaaaaaaacaaacaaaccctaccctaaaaaaacgcacgtaccgacgaaaatcgaaatacacccgacgatctcacgaactaaaaccccaaaaaaacgaaactacgcgtctttatc

SEQ ID NO: 21803 - DNA, 975 bp, Artificial Sequence
  chemically treated genomic DNA (Homo sapiens) CpG-island No: 21803
cgttagtatttgtgggtatcgagagtgtgggaattaggatgtgggtaggggcgttcgttagtaggtgggcggtgtggggcggcgaagatttagacgtaggtatttacgattttgtcgtcgttagagtttagatttatcgttttttcggggcgttttcgtagtagcgataatacgtgttttatttgtcgcgcgttcgcgtcgacgtagggtatttggatcgggtggcggcgagagtttattggtcgttttcgtttcgttcgtagttcggttcgaattattatacggcggggcggagtttatttcggttacgtttagattttgagattttgagcggtagtcgagtttttttgttcggtttggtttcgtttcgtatttgtagtcgtagcggtacgcgtcggaagtcgggttggagtagtagcgtttatatcgcgtaggttgttaagttcgagtcggtcgtcgtttgtagtagttttagcgcgtttagtcgtcgttcgcgtagtttcgttagcgtttcgatcgggtcgttttgttttatggttgcgggacgcgcggttcgttcgtttaaggtttttttcggttcgggttcgcggttttcgtagtttggtttggggttggcggtgtgttttttgttttttgtcgggagtcgtcgcgcgatatcggaagtggtcggtagagtttgcgcggtcggttcgtggcgttgtgcgtttcgtttagttcggttgttttttcgcgggtttcggcgagttgtagtttcgggggttttgtttcgtcgcgttcggttttaagtttgcgagggtcggtttcgttggttcgttttgcggatcgtcgtttgcggtttgtgttggttgttggcgattcgcggaaggggataggtaggttttgttttgggggagcgtacgtgtcggcgggagtcgggatatattcggcgattttacgggttagagttttagggaaacggggttgcgcgtttttgtt

SEQ ID NO: 21804 - DNA, 975 bp, Artificial Sequence
  chemically treated genomic DNA (Homo sapiens) CpG-island No: 21804
aacaaaaacgcgcaaccccgtttccctaaaactctaacccgtaaaatcgccgaatatatcccgactcccgccgacacgtacgctcccccaaaacaaaacctacctatccccttccgcgaatcgccaacaaccaacacaaaccgcaaacgacgatccgcaaaacgaaccaacgaaaccgaccctcgcaaacttaaaaccgaacgcgacgaaacaaaacccccgaaactacaactcgccgaaacccgcgaaaaaacaaccgaactaaacgaaacgcacaacgccacgaaccgaccgcgcaaactctaccgaccacttccgatatcgcgcgacgactcccgacaaaaaacaaaaaacacaccgccaaccccaaaccaaactacgaaaaccgcgaacccgaaccgaaaaaaaccttaaacgaacgaaccgcgcgtcccgcaaccataaaacaaaacgacccgatcgaaacgctaacgaaactacgcgaacgacgactaaacgcgctaaaactactacaaacgacgaccgactcgaacttaacaacctacgcgatataaacgctactactccaacccgacttccgacgcgtaccgctacgactacaaatacgaaacgaaaccaaaccgaacaaaaaaactcgactaccgctcaaaatctcaaaatctaaacgtaaccgaaataaactccgccccgccgtataataattcgaaccgaactacgaacgaaacgaaaacgaccaataaactctcgccgccacccgatccaaataccctacgtcgacgcgaacgcgcgacaaataaaacacgtattatcgctactacgaaaacgccccgaaaaaacgataaatctaaactctaacgacgacaaaatcgtaaatacctacgtctaaatcttcgccgccccacaccgcccacctactaacgaacgcccctacccacatcctaattcccacactctcgatacccacaaatactaacg

SEQ ID NO: 21805 - DNA, 602 bp, Artificial Sequence
  chemically treated genomic DNA (Homo sapiens) CpG-island No: 21805
ggaaacgattggtttagtcggggcgtcgggagggttttttggaggaggtgttagcgtcgggcgcggcggggtcggagcgtgcgcgtggcgttttatcgggtacgcgtatcgtcggcgggttttgtggttttatcgcgcgtaggattcgggtcgggcgggggcgggggcggggcgcgttcgcggaggggggcggttggcggttttcgagtttagcgtcgcgtttagttcggatttcgtgatcggcggtcgaggtttcgttttcgttagtttgtttttcgggtttttagtatagtcgtgtcggtgaggcgggcggcgggggaacgcggttgtttcgggttaggggttttgcggcggtagggcggggggtcgaggggcggggtttgggaggaaggcgtggtttttggggattggggttcggattgggggcggagtcggggttggttggggatcggtcgggtttcgtttttgttggagttcggtgcgtggaattttacgcgagtgtcggggagtttttggggagtcgggttttttttttggtttttagcgtgttgatcgagttcgtttcgtatagttttttttagggtgtggagagcgggtttcgt

SEQ ID NO: 21806 - DNA, 602 bp, Artificial Sequence
  chemically treated genomic DNA (Homo sapiens) CpG-island No: 21806
acgaaacccgctctccacaccctaaaaaaaactatacgaaacgaactcgatcaacacgctaaaaaccaaaaaaaaaacccgactccccaaaaactccccgacactcgcgtaaaattccacgcaccgaactccaacaaaaacgaaacccgaccgatccccaaccaaccccgactccgcccccaatccgaaccccaatccccaaaaaccacgccttcctcccaaaccccgcccctcgaccccccgccctaccgccgcaaaacccctaacccgaaacaaccgcgttcccccgccgcccgcctcaccgacacgactatactaaaaacccgaaaaacaaactaacgaaaacgaaacctcgaccgccgatcacgaaatccgaactaaacgcgacgctaaactcgaaaaccgccaaccgcccccctccgcgaacgcgccccgcccccgcccccgcccgacccgaatcctacgcgcgataaaaccacaaaacccgccgacgatacgcgtacccgataaaacgccacgcgcacgctccgaccccgccgcgcccgacgctaacacctcctccaaaaaaccctcccgacgccccgactaaaccaatcgtttcc

SEQ ID NO: 21807 - DNA, 602 bp, Artificial Sequence
  chemically treated genomic DNA (Homo sapiens) CpG-island No: 21807
gcggggttcgttttttatattttaggaagggttgtgcgaagcgggttcggttaatacgttgggggttaaaagagaagttcggttttttaggaatttttcggtattcgcgtggaattttacgtatcgggttttagtaggagcggaattcggtcggtttttaattagtttcggtttcgtttttagttcgagttttagtttttaaaggttacgttttttttttaggtttcgtttttcggtttttcgttttgtcgtcgtaagatttttgattcgggatagtcgcgttttttcgtcgttcgttttatcggtacggttgtgttgaggattcgaaggatagattgacggaggcggggtttcggtcgtcggttacggggttcggattgagcgcggcgttgggttcgggagtcgttaatcgttttttttcgcggacgcgtttcgttttcgttttcgttcggttcggattttgcgcgcgatgagattataaggttcgtcggcggtgcgcgtgttcggtggggcgttacgcgtacgtttcgatttcgtcgcgttcggcgttggtattttttttaggaagttttttcgacgtttcggttgagttagtcgttttt

SEQ ID NO: 21808 - DNA, 602 bp, Artificial Sequence
  chemically treated genomic DNA (Homo sapiens) CpG-island No: 21808
aaaaacgactaactcaaccgaaacgtcgaaaaaacttcctaaaaaaaataccaacgccgaacgcgacgaaatcgaaacgtacgcgtaacgccccaccgaacacgcgcaccgccgacgaaccttataatctcatcgcgcgcaaaatccgaaccgaacgaaaacgaaaacgaaacgcgtccgcgaaaaaaaacgattaacgactcccgaacccaacgccgcgctcaatccgaaccccgtaaccgacgaccgaaaccccgcctccgtcaatctatccttcgaatcctcaacacaaccgtaccgataaaacgaacgacgaaaaaacgcgactatcccgaatcaaaaatcttacgacgacaaaacgaaaaaccgaaaaacgaaacctaaaaaaaaaacgtaacctttaaaaactaaaactcgaactaaaaacgaaaccgaaactaattaaaaaccgaccgaattccgctcctactaaaacccgatacgtaaaattccacgcgaataccgaaaaattcctaaaaaaccgaacttctcttttaacccccaacgtattaaccgaacccgcttcgcacaacccttcctaaaatataaaaaacgaaccccgc

SEQ ID NO: 21809 - DNA, 581 bp, Artificial Sequence
  chemically treated genomic DNA (Homo sapiens) CpG-island No: 21809
gcgtcggcggggcgcggggaggtacgaggacgtcgttttgttttaattcgatttaattcggttttcgttcgttcgttcgtagggattacgcgcggggaaattcggagttggcgcggtttcgtttcgggttggcggtgttgggcgcggacgagcgtattttttcgttgacgcgtaggttggcgtacggcgaggagttgcgggtgagcgcgcgttttcgggaggggcggggagggcgtttcgggtttattcgtttttataggttcgtttgttttttcgtcgtagttcggggttatttacgtgcgttgttttttgacgttcggttatatcgtcggttatatgagttattttttgtgggaggacgattgttcggatttattcgttttgttttcgggtattcgtagcgcggagcgcgtttatttcgtttttcgtcggtttcgttttatttgttttgattcgttttttttcgttaggcgacgcgttgtcggtggtcggttgcggttcgtgtttggagggtagcgtttagtagatgtattagagtttggtcgagttgggtattttgtttttcgagacggtgagcgggt

SEQ ID NO: 21810 - DNA, 581 bp, Artificial Sequence
  chemically treated genomic DNA (Homo sapiens) CpG-island No: 21810
acccgctcaccgtctcgaaaaacaaaatacccaactcgaccaaactctaatacatctactaaacgctaccctccaaacacgaaccgcaaccgaccaccgacaacgcgtcgcctaacgaaaaaaaacgaatcaaaacaaataaaacgaaaccgacgaaaaacgaaataaacgcgctccgcgctacgaatacccgaaaacaaaacgaataaatccgaacaatcgtcctcccacaaaaaataactcatataaccgacgatataaccgaacgtcaaaaaacaacgcacgtaaataaccccgaactacgacgaaaaaacaaacgaacctataaaaacgaataaacccgaaacgccctccccgcccctcccgaaaacgcgcgctcacccgcaactcctcgccgtacgccaacctacgcgtcaacgaaaaaatacgctcgtccgcgcccaacaccgccaacccgaaacgaaaccgcgccaactccgaatttccccgcgcgtaatccctacgaacgaacgaacgaaaaccgaattaaatcgaattaaaacaaaacgacgtcctcgtacctccccgcgccccgccgacgc

SEQ ID NO: 21811 - DNA, 581 bp, Artificial Sequence
  chemically treated genomic DNA (Homo sapiens) CpG-island No: 21811
gttcgtttatcgtttcggggggtagggtatttagttcggttaggttttggtatatttgttgggcgttgttttttaggtacgagtcgtagtcggttatcgatagcgcgtcgtttggcgggggagggcgggttagagtagatggggcggggtcggcgggaggcggggtgggcgcgtttcgcgttgcgggtattcgagaatagggcgggtgggttcgggtaatcgtttttttataggaagtagtttatgtggtcggcggtgtggtcgggcgttaggaggtaacgtacgtggatggtttcgaattgcggcggaggagtaggcggatttgtgagggcgggtggattcggggcgtttttttcgtttttttcgggagcgcgcgtttattcgtagtttttcgtcgtgcgttagtttgcgcgttagcgagaagatgcgttcgttcgcgtttagtatcgttagttcgggacgaagtcgcgttagtttcgggttttttcgcgcgtggtttttgcgggcgggcgggcgggggtcgggttaggtcgggttgggataaggcggcgttttcgtgttttttcgcgtttcgtcggcgt

SEQ ID NO: 21812 - DNA, 581 bp, Artificial Sequence
  chemically treated genomic DNA (Homo sapiens) CpG-island No: 21812
acgccgacgaaacgcgaaaaaacacgaaaacgccgccttatcccaacccgacctaacccgacccccgcccgcccgcccgcaaaaaccacgcgcgaaaaaacccgaaactaacgcgacttcgtcccgaactaacgatactaaacgcgaacgaacgcatcttctcgctaacgcgcaaactaacgcacgacgaaaaactacgaataaacgcgcgctcccgaaaaaaacgaaaaaaacgccccgaatccacccgccctcacaaatccgcctactcctccgccgcaattcgaaaccatccacgtacgttacctcctaacgcccgaccacaccgccgaccacataaactacttcctataaaaaaacgattacccgaacccacccgccctattctcgaatacccgcaacgcgaaacgcgcccaccccgcctcccgccgaccccgccccatctactctaacccgccctcccccgccaaacgacgcgctatcgataaccgactacgactcgtacctaaaaaacaacgcccaacaaatataccaaaacctaaccgaactaaataccctaccccccgaaacgataaacgaac

SEQ ID NO: 21813 - DNA, 690 bp, Artificial Sequence
  chemically treated genomic DNA (Homo sapiens) CpG-island No: 21813
gggtcgatagagtttttgacggtttagatcgggttttcgggattcggattttattttttaggggaggaagtggggcgtagagtaattttttttcgcgcgatagggtatcgagcgtagtttcgatttcgttcgtttaggtcggtttatttgagacggttcgatgaagttatttaggttcgttagttgtagcgtttcgttgaagggcgacgttatgacggtcgtattgtcgtcgcgcgtaggtgtcgttaaacggcgcgaaacgaagtggttggtttcgttacgttgtcggaaagcgtttttaggacgtatgcgtatttcgtttcggggtcggcgttttttgttgacgagtttcggcgttgcggtttttcgtttatttcgcgggaattcgggatttatcgtttcgtttatttttcgcgcgttttaggtttcgggttggggtgtagggggcgtaggggttggtcgggttagcgtcgtagtttcggtttcggagttttttcgtttttataaggaagcggaggggatttggtttcgtttatttttttattttttgcgtatttgcggattaggtgttttcggatgtaatttaagaattcggaacgcgtttggtatataggaggcgtttagttcgtgttggggaatttaggtagggaagaaagtatggataggtacgaggttttttttttttgggga

SEQ ID NO: 21814 - DNA, 690 bp, Artificial Sequence
  chemically treated genomic DNA (Homo sapiens) CpG-island No: 21814
tccccaaaaaaaaaaaacctcgtacctatccatactttcttccctacctaaattccccaacacgaactaaacgcctcctatataccaaacgcgttccgaattcttaaattacatccgaaaacacctaatccgcaaatacgcaaaaaataaaaaaataaacgaaaccaaatcccctccgcttccttataaaaacgaaaaaactccgaaaccgaaactacgacgctaacccgaccaacccctacgccccctacaccccaacccgaaacctaaaacgcgcgaaaaataaacgaaacgataaatcccgaattcccgcgaaataaacgaaaaaccgcaacgccgaaactcgtcaacaaaaaacgccgaccccgaaacgaaatacgcatacgtcctaaaaacgctttccgacaacgtaacgaaaccaaccacttcgtttcgcgccgtttaacgacacctacgcgcgacgacaatacgaccgtcataacgtcgcccttcaacgaaacgctacaactaacgaacctaaataacttcatcgaaccgtctcaaataaaccgacctaaacgaacgaaatcgaaactacgctcgataccctatcgcgcgaaaaaaaattactctacgccccacttcctcccctaaaaaataaaatccgaatcccgaaaacccgatctaaaccgtcaaaaactctatcgaccc

SEQ ID NO: 21815 - DNA, 690 bp, Artificial Sequence
  chemically treated genomic DNA (Homo sapiens) CpG-island No: 21815
tttttaggaaggggagatttcgtgtttatttatgtttttttttttgtttgaattttttaatacgagttgagcgttttttgtgtgttaggcgcgtttcgggtttttgggttgtattcgggagtatttggttcgtaggtacgtagaggatgaggaaatggacggagttagatttttttcgtttttttgtgaaggcggagagatttcggggtcggagttgcggcgttggttcgattaatttttgcgttttttgtattttaattcggggtttggggcgcgcgggaggtggacgaagcggtaggtttcgggttttcgcgaggtgggcggggagtcgtagcgtcggggttcgttagtagagggcgtcggtttcgggacgaggtgcgtatgcgttttgggggcgtttttcggtagcgtggcggaattagttatttcgtttcgcgtcgtttagcgatatttgcgcgcggcggtagtgcggtcgttatggcgtcgttttttagcggggcgttgtagttgacggatttggatgattttatcgggtcgttttaggtgggtcggtttgggcgggcggggtcgaggttgcgttcggtgttttgtcgcgcggagggaaattgttttgcgttttatttttttttttgaggaatgagattcgaatttcgggagttcggtttgggtcgttagggattttatcgattt

SEQ ID NO: 21816 - DNA, 690 bp, Artificial Sequence
  chemically treated genomic DNA (Homo sapiens) CpG-island No: 21816
aaatcgataaaatccctaacgacccaaaccgaactcccgaaattcgaatctcattcctcaaaaaaaaaaataaaacgcaaaacaatttccctccgcgcgacaaaacaccgaacgcaacctcgaccccgcccgcccaaaccgacccacctaaaacgacccgataaaatcatccaaatccgtcaactacaacgccccgctaaaaaacgacgccataacgaccgcactaccgccgcgcgcaaatatcgctaaacgacgcgaaacgaaataactaattccgccacgctaccgaaaaacgcccccaaaacgcatacgcacctcgtcccgaaaccgacgccctctactaacgaaccccgacgctacgactccccgcccacctcgcgaaaacccgaaacctaccgcttcgtccacctcccgcgcgccccaaaccccgaattaaaatacaaaaaacgcaaaaattaatcgaaccaacgccgcaactccgaccccgaaatctctccgccttcacaaaaaaacgaaaaaaatctaactccgtccatttcctcatcctctacgtacctacgaaccaaatactcccgaatacaacccaaaaacccgaaacgcgcctaacacacaaaaaacgctcaactcgtattaaaaaattcaaacaaaaaaaaaaacataaataaacacgaaatctccccttcctaaaaa

SEQ ID NO: 21817 - DNA, 756 bp, Artificial Sequence
  chemically treated genomic DNA (Homo sapiens) CpG-island No: 21817
gcggtttcgcggagattaaatttttttttttgtttatttgagtttacgttgaggtttagattttgggttacgtttttcgaggggttcgcgaagggtttttcgggttcggtttacgcggcgttcgtcggttcgtttttgtcggagagttcgtagggaggattgtcgggcgcgggcgtcggggcggttgcgaggcgggtcgggcgtttcgaggcggttggtattagtagcggtttatagcgcgggtcgaagtgcggcgcgtagatttcgtgtacggcggcggggcgcgggtagggggcggtttgggcgtcgagggcgtcgtttagggcgtaggggtgatgcgggtgcgcgtggtgcgggtgcgcgtggtgttagggtttcgtggcgttttggtgtaggtggttatgtagcgcggcgggcgagtaggggtcggcggcggcgaagggtagtttcgagtgcgcggtggttagagggttgtttagcggcgggggtattggcgtttggtacgcgttattttagaaggaggcggggaagttgcgttggtttatcgggaaggagtagtttgtaggtcggtcggggaggcggagtggaggaaaggaaaagaggtgcgtgttattgcggttggatttagcgtcgatttgtacgtttcgttcgagagacgaaggcgtcgggcgggtatagggttggttagttatggtcggggttgatgggtagttttcgtttttgtagcggcgtttttttaagggggttgtaatttgt

SEQ ID NO: 21818 - DNA, 756 bp, Artificial Sequence
  chemically treated genomic DNA (Homo sapiens) CpG-island No: 21818
acaaattacaacccccttaaaaaaacgccgctacaaaaacgaaaactacccatcaaccccgaccataactaaccaaccctatacccgcccgacgccttcgtctctcgaacgaaacgtacaaatcgacgctaaatccaaccgcaataacacgcacctcttttcctttcctccactccgcctccccgaccgacctacaaactactccttcccgataaaccaacgcaacttccccgcctccttctaaaataacgcgtaccaaacgccaatacccccgccgctaaacaaccctctaaccaccgcgcactcgaaactacccttcgccgccgccgacccctactcgcccgccgcgctacataaccacctacaccaaaacgccacgaaaccctaacaccacgcgcacccgcaccacgcgcacccgcatcacccctacgccctaaacgacgccctcgacgcccaaaccgccccctacccgcgccccgccgccgtacacgaaatctacgcgccgcacttcgacccgcgctataaaccgctactaataccaaccgcctcgaaacgcccgacccgcctcgcaaccgccccgacgcccgcgcccgacaatcctccctacgaactctccgacaaaaacgaaccgacgaacgccgcgtaaaccgaacccgaaaaacccttcgcgaacccctcgaaaaacgtaacccaaaatctaaacctcaacgtaaactcaaataaacaaaaaaaaaaatttaatctccgcgaaaccgc

SEQ ID NO: 21819 - DNA, 756 bp, Artificial Sequence
  chemically treated genomic DNA (Homo sapiens) CpG-island No: 21819
ataggttgtagtttttttagaaaaacgtcgttgtagaggcgggggttgtttattagtttcggttatggttagttagttttgtgttcgttcggcgttttcgtttttcgggcgggacgtgtaggtcggcgttgagtttagtcgtagtgatacgtattttttttttttttttttatttcgttttttcggtcggtttatagattgttttttttcgatgagttagcgtagttttttcgtttttttttggaatagcgcgtattaggcgttagtgttttcgtcgttgggtagttttttggttatcgcgtattcggagttgtttttcgtcgtcgtcgatttttattcgttcgtcgcgttgtatggttatttgtattagggcgttacggagttttggtattacgcgtattcgtattacgcgtattcgtattatttttacgttttgggcggcgttttcggcgtttaggtcgttttttattcgcgtttcgtcgtcgtgtacgaagtttacgcgtcgtatttcgattcgcgttatgggtcgttgttgatgttagtcgtttcggggcgttcggttcgtttcgtaatcgtttcggcgttcgcgttcggtagttttttttgcgagtttttcggtaaaggcgagtcggcgggcgtcgcgtgggtcgggttcgggggatttttcgcgagtttttcgggggacgtggtttagggtttgggttttagcgtggatttaggtaagtagaggaagaagtttggttttcgcggagtcgt

SEQ ID NO: 21820 - DNA, 756 bp, Artificial Sequence
  chemically treated genomic DNA (Homo sapiens) CpG-island No: 21820
acgactccgcgaaaaccaaacttcttcctctacttacctaaatccacgctaaaacccaaaccctaaaccacgtcccccgaaaaactcgcgaaaaatcccccgaacccgacccacgcgacgcccgccgactcgcctttaccgaaaaactcgcaaaaaaaactaccgaacgcgaacgccgaaacgattacgaaacgaaccgaacgccccgaaacgactaacatcaacaacgacccataacgcgaatcgaaatacgacgcgtaaacttcgtacacgacgacgaaacgcgaataaaaaacgacctaaacgccgaaaacgccgcccaaaacgtaaaaataatacgaatacgcgtaatacgaatacgcgtaataccaaaactccgtaacgccctaatacaaataaccatacaacgcgacgaacgaataaaaatcgacgacgacgaaaaacaactccgaatacgcgataaccaaaaaactacccaacgacgaaaacactaacgcctaatacgcgctattccaaaaaaaaacgaaaaaactacgctaactcatcgaaaaaaaacaatctataaaccgaccgaaaaaacgaaataaaaaaaaaaaaaaaaaatacgtatcactacgactaaactcaacgccgacctacacgtcccgcccgaaaaacgaaaacgccgaacgaacacaaaactaactaaccataaccgaaactaataaacaacccccgcctctacaacgacgtttttctaaaaaaactacaacctat

SEQ ID NO: 21821 - DNA, 536 bp, Artificial Sequence
  chemically treated genomic DNA (Homo sapiens) CpG-island No: 21821
gggtgttgtatgggcggcgtttggattcgcgttttggagttattaggcggagtaaagttagcgcgtttcgcggttcggaatttagttggttcgttatttttttatttttgcgattttattttcgatcgcgttttagggtagaagcgtttgagttttcgttagtgggtatttaaagtttatgttcggcgggcgtgttgacgttattcgggggttgcggagcgggagggggcggtggggggcggggatcggggggttaatggggagcgagggacgtttgttggaggggtagcgagtgtgtttttcggggtttatttttgataagtatgcggttaagggtgtcggagattatgcggtttttagcggattcgaggtttcgtatcgcgagtaggaattttttaggataaaataggagagagagagaaagagagagagagaaggaggcggggacgaagggattcgggtttatatacgtagagaaagaaagttggagaaaggttttttaggaaagtttttgttttatattgtagttgagtggg

SEQ ID NO: 21822 - DNA, 536 bp, Artificial Sequence
  chemically treated genomic DNA (Homo sapiens) CpG-island No: 21822
cccactcaactacaatataaaacaaaaactttcctaaaaaacctttctccaactttctttctctacgtatataaacccgaatcccttcgtccccgcctccttctctctctctctttctctctctctcctattttatcctaaaaaattcctactcgcgatacgaaacctcgaatccgctaaaaaccgcataatctccgacacccttaaccgcatacttatcaaaaataaaccccgaaaaacacactcgctacccctccaacaaacgtccctcgctccccattaaccccccgatccccgccccccaccgccccctcccgctccgcaacccccgaataacgtcaacacgcccgccgaacataaactttaaatacccactaacgaaaactcaaacgcttctaccctaaaacgcgatcgaaaataaaatcgcaaaaataaaaaaataacgaaccaactaaattccgaaccgcgaaacgcgctaactttactccgcctaataactccaaaacgcgaatccaaacgccgcccatacaacaccc

SEQ ID NO: 21823 - DNA, 536 bp, Artificial Sequence
  chemically treated genomic DNA (Homo sapiens) CpG-island No: 21823
tttatttaattatagtatgagataagggtttttttaagagatttttttttaattttttttttttgcgtgtatgagttcggattttttcgttttcgttttttttttttttttttttttttttttttttttattttgttttgggagatttttattcgcggtgcgaagtttcggattcgttgggaatcgtatagttttcggtatttttggtcgtatgtttgttagaggtgggtttcgggaaatatattcgttgtttttttaataagcgtttttcgttttttattggtttttcggttttcgttttttatcgttttttttcgtttcgtagttttcgagtggcgttagtacgttcgtcgggtatgggttttaaatgtttattagcgggagtttaggcgtttttgttttggagcgcggtcgggagtaaaatcgtaggagtgggagggtagcgagttagttggatttcgagtcgcggagcgcgttggttttgtttcgtttgatgattttagagcgcgggtttaagcgtcgtttatgtagtattt

SEQ ID NO: 21824 - DNA, 536 bp, Artificial Sequence
  chemically treated genomic DNA (Homo sapiens) CpG-island No: 21824
aaatactacataaacgacgcttaaacccgcgctctaaaatcatcaaacgaaacaaaaccaacgcgctccgcgactcgaaatccaactaactcgctaccctcccactcctacgattttactcccgaccgcgctccaaaacaaaaacgcctaaactcccgctaataaacatttaaaacccatacccgacgaacgtactaacgccactcgaaaactacgaaacgaaaaaaaacgataaaaaacgaaaaccgaaaaaccaataaaaaacgaaaaacgcttattaaaaaaacaacgaatatatttcccgaaacccacctctaacaaacatacgaccaaaaataccgaaaactatacgattcccaacgaatccgaaacttcgcaccgcgaataaaaatctcccaaaacaaaataaaaaaaaaaaaaaaaaaaaaaaaaaaaaaaaaacgaaaacgaaaaaatccgaactcatacacgcaaaaaaaaaaaattaaaaaaaaatctcttaaaaaaacccttatctcatactataattaaataaa

SEQ ID NO: 21825 - DNA, 754 bp, Artificial Sequence
  chemically treated genomic DNA (Homo sapiens) CpG-island No: 21825
gtacgttcgtcgtcgtttgcgcgtaatttcgggttgggcgggcgttgcgtttcggggcgtattgttaggatttttcggagcggcggcgggcgcggtttcgggtcgtttttcgtattgcgagcgtaggtgtcgggtgtaggggggttttcggtttcgtttcgtaggtttcgttttttcgtattttttttttcggcggtttagcgcgcgcggtattgtgggagttgtggttttcgcggtttcgcggagcgtagcgcggcgtcggtatcggtaggggtatcggcgcggtttaggttcgggttcgggtttcggttcgggttttcgcggcgtgggttgggtagtagttaggcggcggtttcgcggcgtcgggtaggggtcgttcgcgggttcgcgttttcgggcggcggcgttttttgggtttcggtagtcgttcgcgcgttcgggcgtaggtaagtttcgttttcgggggttgtcggggcgggagggcggcgcggttgggtcgattttaggataggggttggaggcgggagttcggtagttgtaggtttacggtttttttttatcggcgtcgtcgtcgtcgtcgttttcgtcgaggatgtttcgggattcgggcgttcgtatttcggttcggtcgaggttagtgttcgtacgtgttaagcgtcgtcgtttcggagtcgggtattattttttttagatttttttttattttttttttttgttttatcgtggtttttttttttatttttttttttttttg

SEQ ID NO: 21826 - DNA, 754 bp, Artificial Sequence
  chemically treated genomic DNA (Homo sapiens) CpG-island No: 21826
caaaaaaaaaaaaaaataaaaaaaaaaaccacgataaaacaaaaaaaaaaaataaaaaaaaatctaaaaaaaataatacccgactccgaaacgacgacgcttaacacgtacgaacactaacctcgaccgaaccgaaatacgaacgcccgaatcccgaaacatcctcgacgaaaacgacgacgacgacgacgccgataaaaaaaaaccgtaaacctacaactaccgaactcccgcctccaacccctatcctaaaatcgacccaaccgcgccgccctcccgccccgacaacccccgaaaacgaaacttacctacgcccgaacgcgcgaacgactaccgaaacccaaaaaacgccgccgcccgaaaacgcgaacccgcgaacgacccctacccgacgccgcgaaaccgccgcctaactactacccaacccacgccgcgaaaacccgaaccgaaacccgaacccgaacctaaaccgcgccgatacccctaccgataccgacgccgcgctacgctccgcgaaaccgcgaaaaccacaactcccacaataccgcgcgcgctaaaccgccgaaaaaaaaaatacgaaaaaacgaaacctacgaaacgaaaccgaaaacccccctacacccgacacctacgctcgcaatacgaaaaacgacccgaaaccgcgcccgccgccgctccgaaaaatcctaacaatacgccccgaaacgcaacgcccgcccaacccgaaattacgcgcaaacgacgacgaacgtac

SEQ ID NO: 21827 - DNA, 754 bp, Artificial Sequence
  chemically treated genomic DNA (Homo sapiens) CpG-island No: 21827
taggggagaagggagatggaggaagggattacgatggggtagggaagaggagtaggaggaggtttagggagggtgatgttcggtttcgaggcggcggcgtttagtacgtacgagtattggtttcggtcgggtcgggatgcgggcgttcgggtttcggagtattttcggcgggggcggcggcggcggcggcgtcggtaagggagggtcgtgggtttgtagttgtcgggttttcgtttttaatttttgttttggggtcggtttagtcgcgtcgttttttcgtttcggtagttttcggagacgaagtttatttgcgttcgggcgcgcggacggttgtcgggatttaggagacgtcgtcgttcgagggcgcggattcgcggacggtttttgttcggcgtcgcggagtcgtcgtttggttgttgtttagtttacgtcgcgggagttcgagtcggagttcgagttcgagtttaagtcgcgtcggtgtttttgtcggtgtcgacgtcgcgttgcgtttcgcggggtcgcgaagattataatttttataatgtcgcgcgcgttgggtcgtcgggggagggggtacgggggggcggggtttgcggggcggggtcggggatttttttgtattcggtatttgcgttcgtagtgcgggaggcgattcgaggtcgcgttcgtcgtcgtttcggagggttttggtagtgcgtttcgagacgtagcgttcgtttagttcgaggttgcgcgtaggcggcgacgggcgtgt

SEQ ID NO: 21828 - DNA, 754 bp, Artificial Sequence
  chemically treated genomic DNA (Homo sapiens) CpG-island No: 21828
acacgcccgtcgccgcctacgcgcaacctcgaactaaacgaacgctacgtctcgaaacgcactaccaaaaccctccgaaacgacgacgaacgcgacctcgaatcgcctcccgcactacgaacgcaaataccgaatacaaaaaaatccccgaccccgccccgcaaaccccgcccccccgtaccccctcccccgacgacccaacgcgcgcgacattataaaaattataatcttcgcgaccccgcgaaacgcaacgcgacgtcgacaccgacaaaaacaccgacgcgacttaaactcgaactcgaactccgactcgaactcccgcgacgtaaactaaacaacaaccaaacgacgactccgcgacgccgaacaaaaaccgtccgcgaatccgcgccctcgaacgacgacgtctcctaaatcccgacaaccgtccgcgcgcccgaacgcaaataaacttcgtctccgaaaactaccgaaacgaaaaaacgacgcgactaaaccgaccccaaaacaaaaattaaaaacgaaaacccgacaactacaaacccacgaccctcccttaccgacgccgccgccgccgccgcccccgccgaaaatactccgaaacccgaacgcccgcatcccgacccgaccgaaaccaatactcgtacgtactaaacgccgccgcctcgaaaccgaacatcaccctccctaaacctcctcctactcctcttccctaccccatcgtaatcccttcctccatctcccttctccccta

SEQ ID NO: 21829 - DNA, 773 bp, Artificial Sequence
  chemically treated genomic DNA (Homo sapiens) CpG-island No: 21829
ggagtgcgcgtttttttcgcgtaggtggcgttcgtgggttgtgtagggttttaggtgcgttcgcggttttattgcggtttttttatttggcgtagtaaatttagtcgtttttggtggttttttttttttagttcggaggtagttcgtttttattgttcgtgtcgtttagtttcgcgtagcgtagcgttgttatggttgattgtggaggtatttggtttttttatcgttcgttgtcgggtttattcgtttaggaatttattttcgttttaaacgagattcgcgcgcgtcggggttcgatcgtttacgtttgcgtattgcgttttttaggggtcgtttcgtcgattacgaagttgaaatttagttttcgtaatatcgcgacggtcggcgttaaaggggtagggtttggagaggaaggcggtgaaagtgtttaagagatcgcgttgtcgtcgggttagatagtaaagtcggagagcgtttcgaggcgttagagatagagcggagttttgttagttttttcgtcgtagggaaggggcgtgcgtatttagtttcgggttaggatttcgttcgttgttgggcgattcgtaattattttcgcgttgttttggttaattttgtaggagttcggtaattggatatgggaaatgtagtttaggtggcgtttgattaaaaagcggcgttcgattaaaaagcggcgtttatgttgttgttttgggtttttgtttttttttgttttggggtttcgtgaaagttcgtgattataaattttttagggt

SEQ ID NO: 21830 - DNA, 773 bp, Artificial Sequence
  chemically treated genomic DNA (Homo sapiens) CpG-island No: 21830
accctaaaaaatttataatcacgaactttcacgaaaccccaaaacaaaaaaaaacaaaaacccaaaacaacaacataaacgccgctttttaatcgaacgccgctttttaatcaaacgccacctaaactacatttcccatatccaattaccgaactcctacaaaattaaccaaaacaacgcgaaaataattacgaatcgcccaacaacgaacgaaatcctaacccgaaactaaatacgcacgccccttccctacgacgaaaaaactaacaaaactccgctctatctctaacgcctcgaaacgctctccgactttactatctaacccgacgacaacgcgatctcttaaacactttcaccgccttcctctccaaaccctacccctttaacgccgaccgtcgcgatattacgaaaactaaatttcaacttcgtaatcgacgaaacgacccctaaaaaacgcaatacgcaaacgtaaacgatcgaaccccgacgcgcgcgaatctcgtttaaaacgaaaataaattcctaaacgaataaacccgacaacgaacgataaaaaaaccaaatacctccacaatcaaccataacaacgctacgctacgcgaaactaaacgacacgaacaataaaaacgaactacctccgaactaaaaaaaaaaaaccaccaaaaacgactaaatttactacgccaaataaaaaaaccgcaataaaaccgcgaacgcacctaaaaccctacacaacccacgaacgccacctacgcgaaaaaaacgcgcactcc

SEQ ID NO: 21831 - DNA, 773 bp, Artificial Sequence
  chemically treated genomic DNA (Homo sapiens) CpG-island No: 21831
gttttggaaggtttgtgattacggatttttacgagattttaaggtaaggagagatagaagtttaggataatagtatgggcgtcgttttttagtcgggcgtcgttttttggttaggcgttatttggattatattttttatatttaattgtcgggtttttgtaggattggttagaataacgcggaagtgattacgggtcgtttagtaacgggcggagttttggttcgaaattggatgcgtacgttttttttttgcggcggggaggttgataaggtttcgttttatttttagcgtttcggagcgtttttcggttttgttgtttagttcggcggtagcgcgattttttaggtatttttatcgtttttttttttaggttttgtttttttgacgtcggtcgtcgcgatattgcggagattggattttagtttcgtggtcggcggagcggtttttggagggcgtagtgcgtaggcgtgagcggtcgggtttcgacgcgcgcgggtttcgtttggagcgggagtgagtttttgagcgagtggattcggtagcgggcgataggggggttaggtgtttttatagttagttatggtagcgttgcgttacgcggggttggacgatacggatagtgaggacgagttgttttcgggttgggaggagagaattattaaggacggttgggtttattacgttaagtaagggggtcgtagtggggtcgcggacgtatttgggattttgtatagtttacggacgttatttgcgcggggaggacgcgtatttt

SEQ ID NO: 21832 - DNA, 773 bp, Artificial Sequence
  chemically treated genomic DNA (Homo sapiens) CpG-island No: 21832
aaaatacgcgtcctccccgcgcaaataacgtccgtaaactatacaaaatcccaaatacgtccgcgaccccactacgacccccttacttaacgtaataaacccaaccgtccttaataattctctcctcccaacccgaaaacaactcgtcctcactatccgtatcgtccaaccccgcgtaacgcaacgctaccataactaactataaaaacacctaacccccctatcgcccgctaccgaatccactcgctcaaaaactcactcccgctccaaacgaaacccgcgcgcgtcgaaacccgaccgctcacgcctacgcactacgccctccaaaaaccgctccgccgaccacgaaactaaaatccaatctccgcaatatcgcgacgaccgacgtcaaaaaaacaaaacctaaaaaaaaaaacgataaaaatacctaaaaaatcgcgctaccgccgaactaaacaacaaaaccgaaaaacgctccgaaacgctaaaaataaaacgaaaccttatcaacctccccgccgcaaaaaaaaaacgtacgcatccaatttcgaaccaaaactccgcccgttactaaacgacccgtaatcacttccgcgttattctaaccaatcctacaaaaacccgacaattaaatataaaaaatataatccaaataacgcctaaccaaaaaacgacgcccgactaaaaaacgacgcccatactattatcctaaacttctatctctccttaccttaaaatctcgtaaaaatccgtaatcacaaaccttccaaaac

SEQ ID NO: 21833 - DNA, 996 bp, Artificial Sequence
  chemically treated genomic DNA (Homo sapiens) CpG-island No: 21833
tcgtattcgcgtgtttgagcgtttagttttcgcgatgaggacgcgttcgggatatttacgttttttgtatcggttttcgtcgtttgcgattggcgtaggtgatgttggcgttgttgttgtttatggtgtttagtcgacggcggcggttatttttcgggtattggcggtcgggttttcggaattcggtgtaggttgggattattgcggcggtcggcgtcgggtttcgcgaagtcgcgttcgttttatttgcgttttttcgggatagtggcgtgggcgtcgcgttttaacgtttcggtttacgtaggttttcgtagttcgcgttagtataggtgagttgtttgggtttggcgtagtgagggtgggcgaggggcggagattcgcgagtaaggcggcgtaggtgtcgtttatatcggcggaggcggcgcggtaatgttcgtaggtgaggcggttcgggcggaggaggagtttgggtcgtttatttagaattttggtttgggtcgtttacggtggcgtcgcgtttcgtgatcgtcgtcgcggttttttgggtgagggaggtgtcgtcgcgttgttttcgggattttttaaatttagggtgtttttcgtttgcggagttcgggcgcgggttattagtttcggttgtttttagttttcgttcggttatacggttgtttttgttttgagttggcggttcggggtacgttttcggaatagagcgtcgacgggattttttagttattgtttttcgtcgtcgcgcgtatcggttgaatagtaggagtattttcgattttttatcggtttcgtttcgtttagatttcgcgtagtttcgtttcgttttgtttgttttcgtttatttggattttatttcgttttttttgagggttttatttttatttcggtacgtgatgacgtaggacgtaaggacgttttttttcgtcggtagttattttcgtgtataggtaaatttattgtagttagattgtataaagtatattaaga

SEQ ID NO: 21834 - DNA, 996 bp, Artificial Sequence
  chemically treated genomic DNA (Homo sapiens) CpG-island No: 21834
tcttaatatactttatacaatctaactacaataaatttacctatacacgaaaataactaccgacgaaaaaaaacgtccttacgtcctacgtcatcacgtaccgaaataaaaataaaaccctcaaaaaaaacgaaataaaatccaaataaacgaaaacaaacaaaacgaaacgaaactacgcgaaatctaaacgaaacgaaaccgataaaaaatcgaaaatactcctactattcaaccgatacgcgcgacgacgaaaaacaataactaaaaaatcccgtcgacgctctattccgaaaacgtaccccgaaccgccaactcaaaacaaaaacaaccgtataaccgaacgaaaactaaaaacaaccgaaactaataacccgcgcccgaactccgcaaacgaaaaacaccctaaatttaaaaaatcccgaaaacaacgcgacgacacctccctcacccaaaaaaccgcgacgacgatcacgaaacgcgacgccaccgtaaacgacccaaaccaaaattctaaataaacgacccaaactcctcctccgcccgaaccgcctcacctacgaacattaccgcgccgcctccgccgatataaacgacacctacgccgccttactcgcgaatctccgcccctcgcccaccctcactacgccaaacccaaacaactcacctatactaacgcgaactacgaaaacctacgtaaaccgaaacgttaaaacgcgacgcccacgccactatcccgaaaaaacgcaaataaaacgaacgcgacttcgcgaaacccgacgccgaccgccgcaataatcccaacctacaccgaattccgaaaacccgaccgccaatacccgaaaaataaccgccgccgtcgactaaacaccataaacaacaacaacgccaacatcacctacgccaatcgcaaacgacgaaaaccgatacaaaaaacgtaaatatcccgaacgcgtcctcatcgcgaaaactaaacgctcaaacacgcgaatacga

SEQ ID NO: 21835 - DNA, 996 bp, Artificial Sequence
  chemically treated genomic DNA (Homo sapiens) CpG-island No: 21835
ttttgatatattttgtatagtttagttataataagtttgtttatgtacgaagatggttatcggcgggggggggcgtttttacgttttacgttattacgtgtcgggatgagggtggggtttttaaggaagacggaatggaatttagatgggcgggggtaagtaggacggggcggggttacgcgggatttgggcggggcggggtcggtgaggggtcgggggtgtttttgttatttagtcggtgcgcgcggcggcgggaggtagtggttggggagtttcgtcgacgttttgtttcgagagcgtgtttcggatcgttagtttagaataggggtagtcgtgtagtcgaacggaagttgggagtagtcgggattggtggttcgcgttcgagtttcgtaggcgggaagtattttggatttaggaagtttcgggagtagcgcggcggtattttttttatttaaggggtcgcggcgacggttacggggcgcggcgttatcgtgagcgatttaggttaggattttaaatagacggtttaggtttttttttcgttcgggtcgttttatttgcgggtattgtcgcgtcgttttcgtcggtgtagacggtatttgcgtcgttttgttcgcgggttttcgtttttcgtttatttttattgcgttaggtttaggtagtttatttgtattggcgcgggttgcggaagtttgcgtgagtcgaggcgttgaggcgcggcgtttacgttattgtttcgagaggacgtaggtggagcgggcgcggtttcgcggaattcggcgtcggtcgtcgtagtggttttagtttatatcgggtttcggggattcggtcgttagtgttcggggagtagtcgtcgtcgtcggttgggtattatgaatagtagtagcgttaatattatttacgttagtcgtaagcggcggaagtcggtgtagaaaacgtgagtgtttcgagcgcgtttttatcgcgggggttgggcgtttaggtacgcgggtgcgg

SEQ ID NO: 21836 - DNA, 996 bp, Artificial Sequence
  chemically treated genomic DNA (Homo sapiens) CpG-island No: 21836
ccgcacccgcgtacctaaacgcccaacccccgcgataaaaacgcgctcgaaacactcacgttttctacaccgacttccgccgcttacgactaacgtaaataatattaacgctactactattcataatacccaaccgacgacgacgactactccccgaacactaacgaccgaatccccgaaacccgatataaactaaaaccactacgacgaccgacgccgaattccgcgaaaccgcgcccgctccacctacgtcctctcgaaacaataacgtaaacgccgcgcctcaacgcctcgactcacgcaaacttccgcaacccgcgccaatacaaataaactacctaaacctaacgcaataaaaataaacgaaaaacgaaaacccgcgaacaaaacgacgcaaataccgtctacaccgacgaaaacgacgcgacaatacccgcaaataaaacgacccgaacgaaaaaaaaacctaaaccgtctatttaaaatcctaacctaaatcgctcacgataacgccgcgccccgtaaccgtcgccgcgaccccttaaataaaaaaaataccgccgcgctactcccgaaacttcctaaatccaaaatacttcccgcctacgaaactcgaacgcgaaccaccaatcccgactactcccaacttccgttcgactacacgactacccctattctaaactaacgatccgaaacacgctctcgaaacaaaacgtcgacgaaactccccaaccactacctcccgccgccgcgcgcaccgactaaataacaaaaacacccccgacccctcaccgaccccgccccgcccaaatcccgcgtaaccccgccccgtcctacttacccccgcccatctaaattccattccgtcttccttaaaaaccccaccctcatcccgacacgtaataacgtaaaacgtaaaaacgcccccccccgccgataaccatcttcgtacataaacaaacttattataactaaactatacaaaatatatcaaaa

SEQ ID NO: 21837 - DNA, 603 bp, Artificial Sequence
  chemically treated genomic DNA (Homo sapiens) CpG-island No: 21837
gtcgtatcgggtagtcgcgaaagtacggtttttttcggtttgttgataggacggtcgttttttttttttcgttagttacggtttttacgtagtagaggtatcgcgtttgtaggtcgggttttcggggtcggattcggttttaaggcgcggaggaggaaggcgtaaagtataaacgagtgggttgcggcggttgaagatttgaaaacgcgttacgcggtcgcggcgtcgatacgcgcgtttcgtttcgttttacgttacgcgtcgtgtttcgtttcgcgttcgtttttcgtgtttgttttttcgcgttgcgcgtttcgtttttttacgtcgtcgtttttttcgcgtttcgttttggttttgtaggttgtgttttcgtttttatttcgtttttatttcgttgtttttttagttttagattcgggttttcggttcgtcgttttaggttttggcgtagttttagagagttggcgcggttttgtgttgattaaatttagtggatgtagttagcgtcggagttcggtttcgttcgttattagggttattttcgttttttaggtttgttaggattgtcggttttgtagttgttttttgttttaggtatgt

SEQ ID NO: 21838 - DNA, 603 bp, Artificial Sequence
  chemically treated genomic DNA (Homo sapiens) CpG-island No: 21838
acatacctaaaacaaaaaacaactacaaaaccgacaatcctaacaaacctaaaaaacgaaaataaccctaataacgaacgaaaccgaactccgacgctaactacatccactaaatttaatcaacacaaaaccgcgccaactctctaaaactacgccaaaacctaaaacgacgaaccgaaaacccgaatctaaaactaaaaaaacaacgaaataaaaacgaaataaaaacgaaaacacaacctacaaaaccaaaacgaaacgcgaaaaaaacgacgacgtaaaaaaacgaaacgcgcaacgcgaaaaaacaaacacgaaaaacgaacgcgaaacgaaacacgacgcgtaacgtaaaacgaaacgaaacgcgcgtatcgacgccgcgaccgcgtaacgcgttttcaaatcttcaaccgccgcaacccactcgtttatactttacgccttcctcctccgcgccttaaaaccgaatccgaccccgaaaacccgacctacaaacgcgatacctctactacgtaaaaaccgtaactaacgaaaaaaaaaaaacgaccgtcctatcaacaaaccgaaaaaaaccgtactttcgcgactacccgatacgac

SEQ ID NO: 21839 - DNA, 603 bp, Artificial Sequence
  chemically treated genomic DNA (Homo sapiens) CpG-island No: 21839
gtatatttggggtagaaggtagttgtagggtcggtagttttggtaaatttagaaggcgggaataattttggtgacgggcggggtcgggtttcggcgttaattgtatttattaggtttggttaatatagagtcgcgttaattttttgaggttgcgttaagatttgaagcggcggatcgagagttcgggtttgagattgagagagtaacggaatggaggcggggtagaggcggaaatataatttgtagggttagagcgaggcgcgagaaggacggcggcgtgagggggcggggcgcgtagcgcgagaaggtaggtacgaggggcgagcgcgaggcggggtacggcgcgtggcgtgagacggggcggggcgcgcgtatcggcgtcgcggtcgcgtgacgcgtttttaaatttttaatcgtcgtagtttattcgtttgtgttttgcgtttttttttttcgcgttttggagtcggattcggtttcggaaattcgatttgtagacgcggtatttttattgcgtagaggtcgtagttggcggaaggagagaggcggtcgttttgttaataggtcgggggaagtcgtgttttcgcggttgttcggtgcgat

SEQ ID NO: 21840 - DNA, 603 bp, Artificial Sequence
  chemically treated genomic DNA (Homo sapiens) CpG-island No: 21840
atcgcaccgaacaaccgcgaaaacacgacttcccccgacctattaacaaaacgaccgcctctctccttccgccaactacgacctctacgcaataaaaataccgcgtctacaaatcgaatttccgaaaccgaatccgactccaaaacgcgaaaaaaaaaaacgcaaaacacaaacgaataaactacgacgattaaaaatttaaaaacgcgtcacgcgaccgcgacgccgatacgcgcgccccgccccgtctcacgccacgcgccgtaccccgcctcgcgctcgcccctcgtacctaccttctcgcgctacgcgccccgccccctcacgccgccgtccttctcgcgcctcgctctaaccctacaaattatatttccgcctctaccccgcctccattccgttactctctcaatctcaaacccgaactctcgatccgccgcttcaaatcttaacgcaacctcaaaaaattaacgcgactctatattaaccaaacctaataaatacaattaacgccgaaacccgaccccgcccgtcaccaaaattattcccgccttctaaatttaccaaaactaccgaccctacaactaccttctaccccaaatatac

SEQ ID NO: 21841 - DNA, 509 bp, Artificial Sequence
  chemically treated genomic DNA (Homo sapiens) CpG-island No: 21841
gttgattgcgagttggggcgggacgcggtgatgggaggggatcgggtcgggaatgcgggaggcgaggggagcgacgggatttgtcgtttcggcggtcgggtagttaatcgattcgttttttttaggaaggagcgaggggagggtggtttagagagaaagcgtcgcgcggtttcggttgttttcggttcgggatatttaaatagattaaagaggattcggagtggagttcggagcggatttcgtagttcgcgttcgtcgcgtatttattcgcgcgttcgttgttgggttttcggtagtcgcgttttttgcgttggcggagtcggaggagtttgcgttgggtcggcggggggcgggcgtttggggagggcggagagagggttcgttcgtcgggatttttgttcggttcgggcgttttagagtcgcgggattggtcgtcggaggttgcgggaggggttcgggttagattttttagaagttttagagagagtcgttttttttttttcgtgtga

SEQ ID NO: 21842 - DNA, 509 bp, Artificial Sequence
  chemically treated genomic DNA (Homo sapiens) CpG-island No: 21842
tcacacgaaaaaaaaaaaacgactctctctaaaacttctaaaaaatctaacccgaacccctcccgcaacctccgacgaccaatcccgcgactctaaaacgcccgaaccgaacaaaaatcccgacgaacgaaccctctctccgccctccccaaacgcccgccccccgccgacccaacgcaaactcctccgactccgccaacgcaaaaaacgcgactaccgaaaacccaacaacgaacgcgcgaataaatacgcgacgaacgcgaactacgaaatccgctccgaactccactccgaatcctctttaatctatttaaatatcccgaaccgaaaacaaccgaaaccgcgcgacgctttctctctaaaccaccctcccctcgctccttcctaaaaaaaacgaatcgattaactacccgaccgccgaaacgacaaatcccgtcgctcccctcgcctcccgcattcccgacccgatcccctcccatcaccgcgtcccgccccaactcgcaatcaac

SEQ ID NO: 21843 - DNA, 509 bp, Artificial Sequence
  chemically treated genomic DNA (Homo sapiens) CpG-island No: 21843
ttatacgaaggaggggaagcggttttttttggggtttttgggaggtttggttcgggtttttttcgtagttttcggcggttagtttcgcggttttggggcgttcggatcgagtaaaggtttcggcgggcgggtttttttttcgttttttttaagcgttcgtttttcgtcggtttagcgtaggttttttcgatttcgttagcgtagggggcgcggttgtcggggatttagtagcgggcgcgcgggtaagtgcgcggcgggcgcgggttgcgggattcgtttcgggttttatttcggattttttttggtttgtttgggtgtttcgggtcgggggtagtcgaggtcgcgcggcgttttttttttgggttatttttttttcgtttttttttaggggagacgaatcgattggttgttcggtcgtcggaacggtaggtttcgtcgtttttttcgtttttcgtattttcggttcggtttttttttattatcgcgtttcgttttaattcgtagttagt

SEQ ID NO: 21844 - DNA, 509 bp, Artificial Sequence
  chemically treated genomic DNA (Homo sapiens) CpG-island No: 21844
actaactacgaattaaaacgaaacgcgataataaaaaaaaaccgaaccgaaaatacgaaaaacgaaaaaaacgacgaaacctaccgttccgacgaccgaacaaccaatcgattcgtctcccctaaaaaaaaacgaaaaaaaaataacccaaaaaaaaaacgccgcgcgacctcgactacccccgacccgaaacacccaaacaaaccaaaaaaaatccgaaataaaacccgaaacgaatcccgcaacccgcgcccgccgcgcacttacccgcgcgcccgctactaaatccccgacaaccgcgccccctacgctaacgaaatcgaaaaaacctacgctaaaccgacgaaaaacgaacgcttaaaaaaaacgaaaaaaaaacccgcccgccgaaacctttactcgatccgaacgccccaaaaccgcgaaactaaccgccgaaaactacgaaaaaaacccgaaccaaacctcccaaaaaccccaaaaaaaaccgcttcccctccttcgtataa

SEQ ID NO: 21845 - DNA, 555 bp, Artificial Sequence
  chemically treated genomic DNA (Homo sapiens) CpG-island No: 21845
gggtcggggcgttcgtcggtggggaggggcgcgggcgggttttagtaggcgttttttagttcggtttggttggttttggcgtttcgggcgcggggtcgcggttttcggtttttttgcggtcgagcggtttcggtttcgaagtttttgagtttcgattggttgtggaagcgggtgaggcgtttgtatttgtacgaggttattaggcgtattttgcgcgcgcgcggcgttttattatcgggatatagtagttgtacgcgttgcgcgcggtagcggtcggggatgtagcggaagtcgggtttattaggtcgttattatttgtcgcggtcgatggcgttgggtagtaggcgcgtcgggtcgtattggtcggagtatattagttcggtgatcggtttggcgttgcggtacggtttatcggttacgtagcgggtgaagtgtagttcgcggtagttgtattcggatacgtttgtggagagaggcgcgcgtgagggtggtcgttcgtttggttatttttgttttggatcggttcgtttttttttattttagttttgtttttgt

SEQ ID NO: 21846 - DNA, 555 bp, Artificial Sequence
  chemically treated genomic DNA (Homo sapiens) CpG-island No: 21846
acaaaaacaaaactaaaataaaaaaaaacgaaccgatccaaaacaaaaataaccaaacgaacgaccaccctcacgcgcgcctctctccacaaacgtatccgaatacaactaccgcgaactacacttcacccgctacgtaaccgataaaccgtaccgcaacgccaaaccgatcaccgaactaatatactccgaccaatacgacccgacgcgcctactacccaacgccatcgaccgcgacaaataataacgacctaataaacccgacttccgctacatccccgaccgctaccgcgcgcaacgcgtacaactactatatcccgataataaaacgccgcgcgcgcgcaaaatacgcctaataacctcgtacaaatacaaacgcctcacccgcttccacaaccaatcgaaactcaaaaacttcgaaaccgaaaccgctcgaccgcaaaaaaaccgaaaaccgcgaccccgcgcccgaaacgccaaaaccaaccaaaccgaactaaaaaacgcctactaaaacccgcccgcgcccctccccaccgacgaacgccccgaccc

SEQ ID NO: 21847 - DNA, 555 bp, Artificial Sequence
  chemically treated genomic DNA (Homo sapiens) CpG-island No: 21847
gtaaaagtagggttggggtggagagagacgggtcggtttagggtaggggtggttaggcgggcggttatttttacgcgcgtttttttttatagacgtgttcgagtatagttgtcgcgagttgtattttattcgttacgtgatcgatgggtcgtgtcgtagcgttaagtcggttatcgagttggtgtgtttcggttagtgcggttcggcgcgtttgttgtttaacgttatcggtcgcggtaagtggtggcgatttagtgggttcgattttcgttgtattttcgatcgttatcgcgcgtagcgcgtgtagttgttgtgtttcggtggtgaggcgtcgcgcgcgcgtaaggtgcgtttggtggtttcgtgtaagtgtaagcgttttattcgtttttataattagtcggagtttaaggatttcgggatcgaggtcgttcggtcgtagaagggtcggaagtcgcggtttcgcgttcggagcgttaaagttaattaggtcgagttggagaacgtttattagagttcgttcgcgtttttttttatcggcgggcgtttcggttt

SEQ ID NO: 21848 - DNA, 555 bp, Artificial Sequence
  chemically treated genomic DNA (Homo sapiens) CpG-island No: 21848
aaaccgaaacgcccgccgataaaaaaaaacgcgaacgaactctaataaacgttctccaactcgacctaattaactttaacgctccgaacgcgaaaccgcgacttccgacccttctacgaccgaacgacctcgatcccgaaatccttaaactccgactaattataaaaacgaataaaacgcttacacttacacgaaaccaccaaacgcaccttacgcgcgcgcgacgcctcaccaccgaaacacaacaactacacgcgctacgcgcgataacgatcgaaaatacaacgaaaatcgaacccactaaatcgccaccacttaccgcgaccgataacgttaaacaacaaacgcgccgaaccgcactaaccgaaacacaccaactcgataaccgacttaacgctacgacacgacccatcgatcacgtaacgaataaaatacaactcgcgacaactatactcgaacacgtctataaaaaaaaacgcgcgtaaaaataaccgcccgcctaaccacccctaccctaaaccgacccgtctctctccaccccaaccctacttttac

SEQ ID NO: 21849 - DNA, 914 bp, Artificial Sequence
  chemically treated genomic DNA (Homo sapiens) CpG-island No: 21849
tttatgttcgaattgtgacgtcggttcgttgttatggcggcgaaggtagatatttcgcggtgattttattgtagaattaggtagttgttatatgacgcgcgggtaggagatcggtcgggcgatcgagggttatttgttaagtgaatatggtagtttcgatttcgtttaaggttaagttttaagcgggtggcggttgggattcgggtaggcgttattcgggtttcgtgtatttcgttacggggaagggtcgcgttcggttaggtagggttttagttttttggttttacgcgcgggggtaggcgtcgattttaggttttttttaagttttcgttgtggttttcggaggggttatcgcgttcgggtttttttaatttaagattcgcgatatttcgattttagtttcgggtgggcggggcgtttcgagagggacggcggggtcgggttcgcgaaagggatttacgcgttgtttacgtagattcgcggggtgatttcgttgtagggttggttcgggaggttgtagtagtcgttgtcgttcgagagtaggtcgttgagattttgtatcgagagttcgaacgagttcgatatggcggcggcggggttttgtacgttcggtaggagtaagcgaggcggagagcggcggattagttgggcgggggttcgcgtcgggagtcgtttcgtttcgtttttggggcgggttcgtcgggtttcgggagttgcggagcgcgggcgtcgtgacgcgggggtttcgcgcgttatttttgggcgcgtttcggggggaagacgttatcgttttggagttttaggggttttcgttttatttcggtttaggtcgtttgtgtatttttgtaaattggtaagcgcggtaatttttttttttgaattaaatgtagggtttaataaatatttcgtggcgg

SEQ ID NO: 21850 - DNA, 914 bp, Artificial Sequence
  chemically treated genomic DNA (Homo sapiens) CpG-island No: 21850
ccgccacgaaatatttattaaaccctacatttaattcaaaaaaaaaaattaccgcgcttaccaatttacaaaaatacacaaacgacctaaaccgaaataaaacgaaaacccctaaaactccaaaacgataacgtcttccccccgaaacgcgcccaaaaataacgcgcgaaacccccgcgtcacgacgcccgcgctccgcaactcccgaaacccgacgaacccgccccaaaaacgaaacgaaacgactcccgacgcgaacccccgcccaactaatccgccgctctccgcctcgcttactcctaccgaacgtacaaaaccccgccgccgccatatcgaactcgttcgaactctcgatacaaaatctcaacgacctactctcgaacgacaacgactactacaacctcccgaaccaaccctacaacgaaatcaccccgcgaatctacgtaaacaacgcgtaaatccctttcgcgaacccgaccccgccgtccctctcgaaacgccccgcccacccgaaactaaaatcgaaatatcgcgaatcttaaattaaaaaaacccgaacgcgataacccctccgaaaaccacaacgaaaacttaaaaaaaacctaaaatcgacgcctacccccgcgcgtaaaaccaaaaaactaaaaccctacctaaccgaacgcgacccttccccgtaacgaaatacacgaaacccgaataacgcctacccgaatcccaaccgccacccgcttaaaacttaaccttaaacgaaatcgaaactaccatattcacttaacaaataaccctcgatcgcccgaccgatctcctacccgcgcgtcatataacaactacctaattctacaataaaatcaccgcgaaatatctaccttcgccgccataacaacgaaccgacgtcacaattcgaacataaa

SEQ ID NO: 21851 - DNA, 914 bp, Artificial Sequence
  chemically treated genomic DNA (Homo sapiens) CpG-island No: 21851
tcgttacgaaatgtttattgggttttgtatttaatttagggaaggaagttatcgcgtttgttagtttataaagatatataaacggtttggatcgggatggggcgaggatttttgagattttagggcggtggcgtttttttttcgggacgcgtttaggagtggcgcgcggggttttcgcgttacggcgttcgcgtttcgtagttttcggagttcggcgggttcgttttaggggcgggacggggcggttttcggcgcgagttttcgtttagttgattcgtcgtttttcgtttcgtttgtttttgtcgggcgtgtagggtttcgtcgtcgttatgtcgggttcgttcgagttttcggtgtaggattttaacgatttgttttcggacggtagcggttgttatagtttttcgagttagttttgtaacgaggttatttcgcggatttacgtgggtaacgcgtgagtttttttcgcgagttcggtttcgtcgtttttttcgggacgtttcgtttattcgaggttggggtcggggtgtcgcgagttttgggttgggggagttcgggcgcgatggttttttcgggagttatagcgggggtttgggaggggtttggagtcgacgtttattttcgcgcgtggggttaaggaattggaattttgtttggtcgggcgcggttttttttcgtggcggggtgtacggagttcgggtggcgtttgttcgggttttagtcgttattcgtttggggtttggttttgggcggggtcggggttattatgtttatttaataggtgattttcggtcgttcggtcggttttttgttcgcgcgttatgtgatagttgtttggttttgtagtgaggttatcgcggaatgtttgttttcgtcgttatggtaacgggtcgacgttataattcgggtatgga

SEQ ID NO: 21852 - DNA, 914 bp, Artificial Sequence
  chemically treated genomic DNA (Homo sapiens) CpG-island No: 21852
tccatacccgaattataacgtcgacccgttaccataacgacgaaaacaaacattccgcgataacctcactacaaaaccaaacaactatcacataacgcgcgaacaaaaaaccgaccgaacgaccgaaaatcacctattaaataaacataataaccccgaccccgcccaaaaccaaaccccaaacgaataacgactaaaacccgaacaaacgccacccgaactccgtacaccccgccacgaaaaaaaaccgcgcccgaccaaacaaaattccaattccttaaccccacgcgcgaaaataaacgtcgactccaaacccctcccaaacccccgctataactcccgaaaaaaccatcgcgcccgaactcccccaacccaaaactcgcgacaccccgaccccaacctcgaataaacgaaacgtcccgaaaaaaacgacgaaaccgaactcgcgaaaaaaactcacgcgttacccacgtaaatccgcgaaataacctcgttacaaaactaactcgaaaaactataacaaccgctaccgtccgaaaacaaatcgttaaaatcctacaccgaaaactcgaacgaacccgacataacgacgacgaaaccctacacgcccgacaaaaacaaacgaaacgaaaaacgacgaatcaactaaacgaaaactcgcgccgaaaaccgccccgtcccgcccctaaaacgaacccgccgaactccgaaaactacgaaacgcgaacgccgtaacgcgaaaaccccgcgcgccactcctaaacgcgtcccgaaaaaaaaacgccaccgccctaaaatctcaaaaatcctcgccccatcccgatccaaaccgtttatatatctttataaactaacaaacgcgataacttccttccctaaattaaatacaaaacccaataaacatttcgtaacga

SEQ ID NO: 21853 - DNA, 581 bp, Artificial Sequence
  chemically treated genomic DNA (Homo sapiens) CpG-island No: 21853
gtttttttatgtttttttacgtttttttttacgtttttttacgtttttttttacgtttttttacgtttttttttacgtttttttacgtttttttacgtttttttttacgtttttttacgtttttttacgttttttttcgtttttttttacgtttttttacgtttttttttacgtttttttatttttttttttacgtttttttacgtttttttttacgtttttttacgtttttttttacgtttttttacgtttttttttacgtttttttacgtttttttacgtttttttttacgtttttttacgtttttttttacgttttttttcgtttttttttacgtttttttacgtttttttttacgtttttttacgtttttttttacgtttttttttacgtttttttacgtttttttttacgtttttttacgtttttttttacgtttttttacgtttttttttacgtttttttacgtttttttttacgtttttttacgtttttttttatatttttttacgtttttttttatgtttttgttgatttgattgatgaatgttgaaggaggaataaggcgtgtgtaattcgg

SEQ ID NO: 21854 - DNA, 581 bp, Artificial Sequence
  chemically treated genomic DNA (Homo sapiens) CpG-island No: 21854
ccgaattacacacgccttattcctccttcaacattcatcaatcaaatcaacaaaaacataaaaaaaaacgtaaaaaaatataaaaaaaaacgtaaaaaaacgtaaaaaaaaacgtaaaaaaacgtaaaaaaaaacgtaaaaaaacgtaaaaaaaaacgtaaaaaaacgtaaaaaaaaacgtaaaaaaacgtaaaaaaaaacgtaaaaaaaaacgtaaaaaaacgtaaaaaaaaacgtaaaaaaacgtaaaaaaaaacgaaaaaaaacgtaaaaaaaaacgtaaaaaaacgtaaaaaaaaacgtaaaaaaacgtaaaaaaacgtaaaaaaaaacgtaaaaaaacgtaaaaaaaaacgtaaaaaaacgtaaaaaaaaacgtaaaaaaacgtaaaaaaaaaaataaaaaaacgtaaaaaaaaacgtaaaaaaacgtaaaaaaaaacgaaaaaaaacgtaaaaaaacgtaaaaaaacgtaaaaaaaaacgtaaaaaaacgtaaaaaaacgtaaaaaaaaacgtaaaaaaacgtaaaaaaaaacgtaaaaaaacgtaaaaaaaaacgtaaaaaaacataaaaaaac

SEQ ID NO: 21855 - DNA, 581 bp, Artificial Sequence
  chemically treated genomic DNA (Homo sapiens) CpG-island No: 21855
tcgggttatatacgttttgttttttttttaatatttattaattaaattagtagaggtatggagaaaggcgtggagaggtgtagagagaggcgtggagaggcgtggagagaggcgtggagaggcgtggagagaggcgtggagaggcgtggagagaggcgtggagaggcgtggagagaggcgtggagaggcgtggagagaggcgtggagagaggcgtggagaggcgtggagagaggcgtggagaggcgtggagagaggcggggagaggcgtggagagaggcgtggagaggcgtggagagaggcgtggagaggcgtggagaggcgtggagagaggcgtggagaggcgtggagagaggcgtggagaggcgtggagagaggcgtggagaggcgtggagagaggggtggagaggcgtagagagaggcgtggagaggcgtggagagaggcggggagaggcgtggagaggcgtggagaggcgtggagagaggcgtggagaggcgtggagaggcgtagagagaggcgtggagaggcgtggagagaggcgtggagaggcgtggagagaggcgtggagaggtatggagaggt

SEQ ID NO: 21856 - DNA, 581 bp, Artificial Sequence
  chemically treated genomic DNA (Homo sapiens) CpG-island No: 21856
acctctccatacctctccacgcctctctccacgcctctccacgcctctctccacgcctctccacgcctctctctacgcctctccacgcctctccacgcctctctccacgcctctccacgcctctccacgcctctccccgcctctctccacgcctctccacgcctctctctacgcctctccacccctctctccacgcctctccacgcctctctccacgcctctccacgcctctctccacgcctctccacgcctctctccacgcctctccacgcctctccacgcctctctccacgcctctccacgcctctctccacgcctctccccgcctctctccacgcctctccacgcctctctccacgcctctccacgcctctctccacgcctctctccacgcctctccacgcctctctccacgcctctccacgcctctctccacgcctctccacgcctctctccacgcctctccacgcctctctccacgcctctccacgcctctctctacacctctccacgcctttctccatacctctactaatttaattaataaatattaaaaaaaaaacaaaacgtatataacccga

SEQ ID NO: 21857 - DNA, 888 bp, Artificial Sequence
  chemically treated genomic DNA (Homo sapiens) CpG-island No: 21857
gcggcggcggatcgtgtggggcggggtgcgtagtgtgagtcggggagcgtcggtcggaattttatagtgcggtgataaaaaatcgtgagggtggcgtagaacgggtaagagattatagcgtttatttggtaggggcgcgagtttatacgtcgatttttggagttttagttagggttgttttgagttgggcgcgttaggcgagttttattttcggaggcggggtcgtcgcgcggttattggtcggcgttttggagttatttgtttttattttgggggcggggttatttgggtttcgtttcgcggttcgggtttcggggtcgcgtttttgtttttcgttttcgttttcgtttcgtttcggcgcgaaggtttcgttttcgagtttcggggtttaggcgtttcgtgatgttatcgtagtttgatataaagagtttttcggtttacgcgggtttttcggtaacgggcgggggcggggtcgcgttttttattggtgtttagaagtgcgagcggataggtcggtcgcgattgtttttgcgtttcggggttgttcgtcgttttcgtcgtcgtcgattcgcgttttttggttttcgcgtttttgtcggggagcggttcgcggatgcgtatttcgttagttttcgggagttaggtaagcggcggtttcggggttggcgttcgtagggtttcggcggcgcgtatttggttcggttcggttcgcggtttcgggaagttggcggagagcggatttggtttgggaggtcgtgttatttgagttatttcgttcggtcgcgagtagaagtcgttgttaggtgcgcgggtggcggttttttttttagcgtagttttaggaagtgtttttagtggattaggaagggggttcgtttgttggggcgtt

SEQ ID NO: 21858 - DNA, 888 bp, Artificial Sequence
  chemically treated genomic DNA (Homo sapiens) CpG-island No: 21858
aacgccccaacaaacgaacccccttcctaatccactaaaaacacttcctaaaactacgctaaaaaaaaaaccgccacccgcgcacctaacaacgacttctactcgcgaccgaacgaaataactcaaataacacgacctcccaaaccaaatccgctctccgccaacttcccgaaaccgcgaaccgaaccgaaccaaatacgcgccgccgaaaccctacgaacgccaaccccgaaaccgccgcttacctaactcccgaaaactaacgaaatacgcatccgcgaaccgctccccgacaaaaacgcgaaaaccaaaaaacgcgaatcgacgacgacgaaaacgacgaacaaccccgaaacgcaaaaacaatcgcgaccgacctatccgctcgcacttctaaacaccaataaaaaacgcgaccccgcccccgcccgttaccgaaaaacccgcgtaaaccgaaaaactctttatatcaaactacgataacatcacgaaacgcctaaaccccgaaactcgaaaacgaaaccttcgcgccgaaacgaaacgaaaacgaaaacgaaaaacaaaaacgcgaccccgaaacccgaaccgcgaaacgaaacccaaataaccccgcccccaaaataaaaacaaataactccaaaacgccgaccaataaccgcgcgacgaccccgcctccgaaaataaaactcgcctaacgcgcccaactcaaaacaaccctaactaaaactccaaaaatcgacgtataaactcgcgcccctaccaaataaacgctataatctcttacccgttctacgccaccctcacgattttttatcaccgcactataaaattccgaccgacgctccccgactcacactacgcaccccgccccacacgatccgccgccgc

SEQ ID NO: 21859 - DNA, 888 bp, Artificial Sequence
  chemically treated genomic DNA (Homo sapiens) CpG-island No: 21859
ggcgttttagtagacgagttttttttttagtttattaaaagtattttttggaattgcgttggggaaggagtcgttattcgcgtatttggtagcggtttttattcgcggtcgaacgagatggtttaggtaatacgattttttaggttaagttcgtttttcgttaatttttcggggtcgcgggtcgggtcgagttaggtgcgcgtcgtcggagttttgcgagcgttagtttcggggtcgtcgtttatttggttttcgagagttggcggggtgcgtattcgcgggtcgtttttcggtagaggcgcggaagttagagggcgcgggtcggcggcggcggggacggcgggtagtttcgaagcgtaggaataatcgcggtcggtttgttcgttcgtatttttgggtattagtggaaggcgcggtttcgttttcgttcgttgtcgggagattcgcgtgggtcgaagggttttttgtattaagttgcggtgatattacgaggcgtttgggtttcgggattcgggggcggggttttcgcgtcggggcggggcgggggcgggggcggaggatagggacgcggtttcggaattcgagtcgcggggcggggtttaggtaatttcgtttttaaggtaggggtaggtggttttagggcgtcgattaatggtcgcgcggcggtttcgttttcggaggtggagttcgtttggcgcgtttagtttagggtagttttggttgggattttaggagtcggcgtgtgagttcgcgtttttgttaggtaggcgttgtagttttttgttcgttttgcgttatttttacggttttttgttatcgtattgtgagatttcggtcggcgtttttcggtttatattgcgtatttcgttttatacggttcgtcgtcgt

SEQ ID NO: 21860 - DNA, 888 bp, Artificial Sequence
  chemically treated genomic DNA (Homo sapiens) CpG-island No: 21860
acgacgacgaaccgtataaaacgaaatacgcaatataaaccgaaaaacgccgaccgaaatctcacaatacgataacaaaaaaccgtaaaaataacgcaaaacgaacaaaaaactacaacgcctacctaacaaaaacgcgaactcacacgccgactcctaaaatcccaaccaaaactaccctaaactaaacgcgccaaacgaactccacctccgaaaacgaaaccgccgcgcgaccattaatcgacgccctaaaaccacctacccctaccttaaaaacgaaattacctaaaccccgccccgcgactcgaattccgaaaccgcgtccctatcctccgcccccgcccccgccccgccccgacgcgaaaaccccgcccccgaatcccgaaacccaaacgcctcgtaatatcaccgcaacttaatacaaaaaacccttcgacccacgcgaatctcccgacaacgaacgaaaacgaaaccgcgccttccactaatacccaaaaatacgaacgaacaaaccgaccgcgattattcctacgcttcgaaactacccgccgtccccgccgccgccgacccgcgccctctaacttccgcgcctctaccgaaaaacgacccgcgaatacgcaccccgccaactctcgaaaaccaaataaacgacgaccccgaaactaacgctcgcaaaactccgacgacgcgcacctaactcgacccgacccgcgaccccgaaaaattaacgaaaaacgaacttaacctaaaaaatcgtattacctaaaccatctcgttcgaccgcgaataaaaaccgctaccaaatacgcgaataacgactccttccccaacgcaattccaaaaaatacttttaataaactaaaaaaaaaactcgtctactaaaacgcc

SEQ ID NO: 21861 - DNA, 570 bp, Artificial Sequence
  chemically treated genomic DNA (Homo sapiens) CpG-island No: 21861
gcgtttcgagtttggttttatgttttaggtttttcgcgtttttttcggagcgttggtttcgttttagttttcgttttcggtcgcgtcgttttttttggtttgcgttttggtttttattaatttcgttcgagtttttacggattttgttcggttcgacggaaatgattcggttagggttatatacggtttttgttcgtttcgttgcggttattttcgttttcgttttcgttttcgtcgaggttttttttcgatttaggtacggttttgtgtcgtagttttcgattttatcgttaggtcgttgttcgttttaggcgtgggttgggtttcggggtatcgttcgcggcgggcgcggggcgagagaggagggaggagggtcgggttttttaagacgtcggttcgggtttcgtaggcggcgggcgcgggatttgtttttgatcgggcgggagcggtgttcgtagagttaagttcgggtttgcgggtggggtttgcgggggcgggatcgggggcggggtcgaggtcgtagtttttagtcggtattattttttttttattgagagattttatcggttt

SEQ ID NO: 21862 - DNA, 570 bp, Artificial Sequence
  chemically treated genomic DNA (Homo sapiens) CpG-island No: 21862
aaaccgataaaatctctcaataaaaaaaaaataataccgactaaaaactacgacctcgaccccgcccccgatcccgcccccgcaaaccccacccgcaaacccgaacttaactctacgaacaccgctcccgcccgatcaaaaacaaatcccgcgcccgccgcctacgaaacccgaaccgacgtcttaaaaaacccgaccctcctccctcctctctcgccccgcgcccgccgcgaacgataccccgaaacccaacccacgcctaaaacgaacaacgacctaacgataaaatcgaaaactacgacacaaaaccgtacctaaatcgaaaaaaaacctcgacgaaaacgaaaacgaaaacgaaaataaccgcaacgaaacgaacaaaaaccgtatataaccctaaccgaatcatttccgtcgaaccgaacaaaatccgtaaaaactcgaacgaaattaataaaaaccaaaacgcaaaccaaaaaaaacgacgcgaccgaaaacgaaaactaaaacgaaaccaacgctccgaaaaaaacgcgaaaaacctaaaacataaaaccaaactcgaaacgc

SEQ ID NO: 21863 - DNA, 570 bp, Artificial Sequence
  chemically treated genomic DNA (Homo sapiens) CpG-island No: 21863
ggatcggtggaattttttagtggaggggaggtggtatcggttgggagttgcggtttcggtttcgttttcggtttcgttttcgtaagttttattcgtaagttcgggtttgattttgcgagtatcgttttcgttcggttaggggtaggtttcgcgttcgtcgtttgcgggattcgaatcggcgttttgagaagttcggttttttttttttttttttcgtttcgcgttcgtcgcgagcgatgtttcgagatttagtttacgtttagagcgggtagcggtttggcggtggggtcgaaagttacggtatagagtcgtgtttgagtcggaaagaagtttcggcggaagcggaagcggaagcggagatggtcgtagcggagcgggtaggggtcgtgtgtgattttggtcgggttattttcgtcgggtcgggtagggttcgtgggggttcgggcggggttggtggggattagggcgtaagttaagaagggcggcgcggtcgggggcggggattgggacggggttagcgtttcgaggaagacgcggggagtttggggtatggggttaggttcggggcgt

SEQ ID NO: 21864 - DNA, 570 bp, Artificial Sequence
  chemically treated genomic DNA (Homo sapiens) CpG-island No: 21864
acgccccgaacctaaccccataccccaaactccccgcgtcttcctcgaaacgctaaccccgtcccaatccccgcccccgaccgcgccgcccttcttaacttacgccctaatccccaccaaccccgcccgaacccccacgaaccctacccgacccgacgaaaataacccgaccaaaatcacacacgacccctacccgctccgctacgaccatctccgcttccgcttccgcttccgccgaaacttctttccgactcaaacacgactctataccgtaactttcgaccccaccgccaaaccgctacccgctctaaacgtaaactaaatctcgaaacatcgctcgcgacgaacgcgaaacgaaaaaaaaaaaaaaaaaaccgaacttctcaaaacgccgattcgaatcccgcaaacgacgaacgcgaaacctacccctaaccgaacgaaaacgatactcgcaaaatcaaacccgaacttacgaataaaacttacgaaaacgaaaccgaaaacgaaaccgaaaccgcaactcccaaccgataccacctcccctccactaaaaaattccaccgatcc

SEQ ID NO: 21865 - DNA, 962 bp, Artificial Sequence
  chemically treated genomic DNA (Homo sapiens) CpG-island No: 21865
taggcgcgttttatcgggcgggggcgcggttcgggagcggagcggtcggtagggggtttttcgcgtcggttttcgcgggaggaagcgttggtagttgttcggacgggttaaaggaggaaaagggaaaattattgggtttcggggcgggaaggattgcgtgattgggaggaaggtattttagattgtcgagtagggtcgttcgcgtcgggattttattttcggggtagtgcgggttattcgggatttgggaattcgggttattttttatcgtcgttagggtttttttcgtcggtgtcgtaggttggagcgggcgtcgcggtcgggggcggtgcgtttaggggcgcgaagggcgggtcggggcggggcgtcgttcgttcggtttcgggaggcggtgtgggcgggcgttggcgcgtttcgggagtgagtcgcggggcgcgtagtttttttgatgtgttattagtacgtggagttaggtcgggtcgcggcgagtaagtcgatttttttaattttcgaggggtttcgtcgtttcgtttttttttcggtttcgtcgggttcgtttttttagcggagggggcggcggcggtttttaggtttcgggtaggtcgagcgagttacggttttcggttaggagttcgaggggttttcggaacgttcgggcgcgggtttcggttagcggttatggttttcgtgtttaggtagcggtgcgggttcggttttgcgggagggtgcggtttgttgcgagaggtcggttacggtttttgtttcgcgtttcgcgtttttcgttcgtcgagttgagcgtaggtaatcgaggtagagcggagttgggtttcgtaggcgcggcgtgggagcgtggcgaagtttttcggcgtataatttttgcgttttattcgggagtggggttgcggtggggaggttttggttttcgtattttttttttttttagcgttgtttttcggtttgag

SEQ ID NO: 21866 - DNA, 962 bp, Artificial Sequence
  chemically treated genomic DNA (Homo sapiens) CpG-island No: 21866
ctcaaaccgaaaaacaacgctaaaaaaaaaaaaaatacgaaaaccaaaacctccccaccgcaaccccactcccgaataaaacgcaaaaattatacgccgaaaaacttcgccacgctcccacgccgcgcctacgaaacccaactccgctctacctcgattacctacgctcaactcgacgaacgaaaaacgcgaaacgcgaaacaaaaaccgtaaccgacctctcgcaacaaaccgcaccctcccgcaaaaccgaacccgcaccgctacctaaacacgaaaaccataaccgctaaccgaaacccgcgcccgaacgttccgaaaacccctcgaactcctaaccgaaaaccgtaactcgctcgacctacccgaaacctaaaaaccgccgccgccccctccgctaaaaaaacgaacccgacgaaaccgaaaaaaaaacgaaacgacgaaacccctcgaaaattaaaaaaatcgacttactcgccgcgacccgacctaactccacgtactaataacacatcaaaaaaactacgcgccccgcgactcactcccgaaacgcgccaacgcccgcccacaccgcctcccgaaaccgaacgaacgacgccccgccccgacccgcccttcgcgcccctaaacgcaccgcccccgaccgcgacgcccgctccaacctacgacaccgacgaaaaaaaccctaacgacgataaaaaataacccgaattcccaaatcccgaataacccgcactaccccgaaaataaaatcccgacgcgaacgaccctactcgacaatctaaaataccttcctcccaatcacgcaatccttcccgccccgaaacccaataattttcccttttcctcctttaacccgtccgaacaactaccaacgcttcctcccgcgaaaaccgacgcgaaaaaccccctaccgaccgctccgctcccgaaccgcgcccccgcccgataaaacgcgccta

SEQ ID NO: 21867 - DNA, 962 bp, Artificial Sequence
  chemically treated genomic DNA (Homo sapiens) CpG-island No: 21867
tttaggtcgagggatagcgttgggggagggggaggtgcggggattaaagtttttttatcgtagttttattttcgagtggggcgtaagagttatgcgtcgagaaatttcgttacgtttttacgtcgcgtttgcgaggtttagtttcgttttgtttcggttatttgcgtttagttcggcgggcgaggggcgcggggcgcggggtaggagtcgtggtcgatttttcgtagtaggtcgtattttttcgtaaggtcgagttcgtatcgttgtttgggtacgggggttatagtcgttagtcggggttcgcgttcgaacgtttcgggagtttttcgaatttttggtcgggggtcgtggttcgttcgatttgttcgggatttgggggtcgtcgtcgtttttttcgttaggagagcgagttcgacgaagtcgggagaggagcggggcggcgagatttttcgaaagttgggggggtcggtttgttcgtcgcggttcgatttggttttacgtgttggtgatatattaggaaggttgcgcgtttcgcggtttattttcggaacgcgttagcgttcgtttatatcgtttttcggagtcgagcggacggcgtttcgtttcggttcgtttttcgcgtttttaggcgtatcgttttcggtcgcgacgttcgttttagtttgcggtatcggcgggagagattttgacggcggtggggggtggttcgggtttttaggtttcgggtggttcgtattgtttcggggatggggtttcgacgcgggcggttttattcgatagtttggagtgttttttttttagttacgtagtttttttcgtttcggagtttagtaatttttttttttttttttttgattcgttcgagtagttgttagcgttttttttcgcggagatcggcgcggggagttttttgtcggtcgtttcgttttcgggtcgcgttttcgttcggtggagcgcgtttg

SEQ ID NO: 21868 - DNA, 962 bp, Artificial Sequence
  chemically treated genomic DNA (Homo sapiens) CpG-island No: 21868
caaacgcgctccaccgaacgaaaacgcgacccgaaaacgaaacgaccgacaaaaaactccccgcgccgatctccgcgaaaaaaaacgctaacaactactcgaacgaatcaaaaaaaaaaaaaaaaaaattactaaactccgaaacgaaaaaaactacgtaactaaaaaaaaaacactccaaactatcgaataaaaccgcccgcgtcgaaaccccatccccgaaacaatacgaaccacccgaaacctaaaaacccgaaccaccccccaccgccgtcaaaatctctcccgccgataccgcaaactaaaacgaacgtcgcgaccgaaaacgatacgcctaaaaacgcgaaaaacgaaccgaaacgaaacgccgtccgctcgactccgaaaaacgatataaacgaacgctaacgcgttccgaaaataaaccgcgaaacgcgcaaccttcctaatatatcaccaacacgtaaaaccaaatcgaaccgcgacgaacaaaccgacccccccaactttcgaaaaatctcgccgccccgctcctctcccgacttcgtcgaactcgctctcctaacgaaaaaaacgacgacgacccccaaatcccgaacaaatcgaacgaaccacgacccccgaccaaaaattcgaaaaactcccgaaacgttcgaacgcgaaccccgactaacgactataacccccgtacccaaacaacgatacgaactcgaccttacgaaaaaatacgacctactacgaaaaatcgaccacgactcctaccccgcgccccgcgcccctcgcccgccgaactaaacgcaaataaccgaaacaaaacgaaactaaacctcgcaaacgcgacgtaaaaacgtaacgaaatttctcgacgcataactcttacgccccactcgaaaataaaactacgataaaaaaactttaatccccgcacctccccctcccccaacgctatccctcgacctaaa

SEQ ID NO: 21869 - DNA, 604 bp, Artificial Sequence
  chemically treated genomic DNA (Homo sapiens) CpG-island No: 21869
tcgtcgagcgtcgtgtaatttttggagggttgggtttggagttcgcgattcgaggtcgggcggggcggtggattttttcggggaacgtcgtttgagggatatttagagtttcggcggagcggagcgcggtgtatagagtcggcgatcggatttagtttcgggaagttcgtcggggacgtatttcgaatttcgaggatgggagttgagggttgggtttttgcgggcgagatgagggtgtcggattaattggtttataaagttttagttttcggttttcgggattagcgtttttttttcggttttcgttttaggtcggttttttttcgggttggcgtgcgtttcggttaggttgttttttaggtttacgttggagaaggagtggtgaggtgcgttcgtttcggttgcgtgcggtgattcgggaaattttcgtatttcgttggagaaatagcgacgttttcggaagtgtgagtcggttattgtttggggttcgtattttttgggtagacgtggatcgcgtttcggcgatttgggttgagtggatagacgggattcggtttatttatgggttaagttttgttatttatcgaggtttgttttgttgtgt

SEQ ID NO: 21870 - DNA, 604 bp, Artificial Sequence
  chemically treated genomic DNA (Homo sapiens) CpG-island No: 21870
acacaacaaaacaaacctcgataaataacaaaacttaacccataaataaaccgaatcccgtctatccactcaacccaaatcgccgaaacgcgatccacgtctacccaaaaaatacgaaccccaaacaataaccgactcacacttccgaaaacgtcgctatttctccaacgaaatacgaaaatttcccgaatcaccgcacgcaaccgaaacgaacgcacctcaccactccttctccaacgtaaacctaaaaaacaacctaaccgaaacgcacgccaacccgaaaaaaaaccgacctaaaacgaaaaccgaaaaaaaaacgctaatcccgaaaaccgaaaactaaaactttataaaccaattaatccgacaccctcatctcgcccgcaaaaacccaaccctcaactcccatcctcgaaattcgaaatacgtccccgacgaacttcccgaaactaaatccgatcgccgactctatacaccgcgctccgctccgccgaaactctaaatatccctcaaacgacgttccccgaaaaaatccaccgccccgcccgacctcgaatcgcgaactccaaacccaaccctccaaaaattacacgacgctcgacga

SEQ ID NO: 21871 - DNA, 604 bp, Artificial Sequence
  chemically treated genomic DNA (Homo sapiens) CpG-island No: 21871
gtatagtagggtaggtttcggtaagtggtagggtttggtttatgggtaagtcgggtttcgtttgtttatttaatttaggtcgtcggggcgcggtttacgtttgtttaaagggtacggattttaagtagtgatcgatttatattttcgagagcgtcgttatttttttagcgaagtgcggggatttttcgaattatcgtacgtagtcggggcgagcgtattttattattttttttttagcgtggatttgagaggtagtttggtcggagcgtacgttagttcgggaggaagtcggtttggggcgaggatcggggagaagacgttggtttcgggggtcgagaattgggattttgtaggttagttgattcgatatttttatttcgttcgtaaagatttagtttttagtttttattttcggagttcggggtgcgttttcgacgggtttttcggggttgggttcggtcgtcggttttgtgtatcgcgtttcgtttcgtcgaagttttgggtgttttttaggcggcgtttttcgggaaagtttatcgtttcgttcgatttcgggtcgcgggttttaaatttagttttttaagggttatacgacgttcggcgg

SEQ ID NO: 21872 - DNA, 604 bp, Artificial Sequence
  chemically treated genomic DNA (Homo sapiens) CpG-island No: 21872
ccgccgaacgtcgtataacccttaaaaaactaaatttaaaacccgcgacccgaaatcgaacgaaacgataaactttcccgaaaaacgccgcctaaaaaacacccaaaacttcgacgaaacgaaacgcgatacacaaaaccgacgaccgaacccaaccccgaaaaacccgtcgaaaacgcaccccgaactccgaaaataaaaactaaaaactaaatctttacgaacgaaataaaaatatcgaatcaactaacctacaaaatcccaattctcgacccccgaaaccaacgtcttctccccgatcctcgccccaaaccgacttcctcccgaactaacgtacgctccgaccaaactacctctcaaatccacgctaaaaaaaaaataataaaatacgctcgccccgactacgtacgataattcgaaaaatccccgcacttcgctaaaaaaataacgacgctctcgaaaatataaatcgatcactacttaaaatccgtaccctttaaacaaacgtaaaccgcgccccgacgacctaaattaaataaacaaacgaaacccgacttacccataaaccaaaccctaccacttaccgaaacctaccctactatac

SEQ ID NO: 21873 - DNA, 504 bp, Artificial Sequence
  chemically treated genomic DNA (Homo sapiens) CpG-island No: 21873
atatgcgcggatcgaatgaatttcggtatcgcgttgtttgcggtttagtttttggtttttgttgtcgcgcgtggggcggtaggggttggggggtggggtcggggtcgggttgagcgcgttgggcgggaggcgtcgtaggtgggcgcggttaggtgagtttcgggggcgtcgttcgttttgttcgggattttggtcggcgttggttgttggcgttttttcgttttcgttgtcgttagtggttgttgtcgtttcgtggagtttaaggagatcgcggttagagcgtttatcgtttaagatggtggtttttgtgttttcgtgagtgcgagcggacggggcgggggcgttaggtcgggttggacgttttttttcggagcgggcgggacgggcgggcggaggtttagtgtttttgcgggatttatcgagggttttgttatcgcgcgttttttagaggaagttttttagtttttttcgttttagttttcgggaggatgcgtgagaagaggt

SEQ ID NO: 21874 - DNA, 504 bp, Artificial Sequence
  chemically treated genomic DNA (Homo sapiens) CpG-island No: 21874
acctcttctcacgcatcctcccgaaaactaaaacgaaaaaaactaaaaaacttcctctaaaaaacgcgcgataacaaaaccctcgataaatcccgcaaaaacactaaacctccgcccgcccgtcccgcccgctccgaaaaaaaacgtccaacccgacctaacgcccccgccccgtccgctcgcactcacgaaaacacaaaaaccaccatcttaaacgataaacgctctaaccgcgatctccttaaactccacgaaacgacaacaaccactaacgacaacgaaaacgaaaaaacgccaacaaccaacgccgaccaaaatcccgaacaaaacgaacgacgcccccgaaactcacctaaccgcgcccacctacgacgcctcccgcccaacgcgctcaacccgaccccgaccccaccccccaacccctaccgccccacgcgcgacaacaaaaaccaaaaactaaaccgcaaacaacgcgataccgaaattcattcgatccgcgcatat

SEQ ID NO: 21875 - DNA, 504 bp, Artificial Sequence
  chemically treated genomic DNA (Homo sapiens) CpG-island No: 21875
atttttttttacgtattttttcgggggttgggacggggagggttgaggaattttttttggggggcgcgcggtgatagagttttcggtgggtttcgtagaggtattgagttttcgttcgttcgtttcgttcgtttcgggagggggcgtttagttcggtttggcgttttcgtttcgttcgttcgtatttacggagatataggagttattattttgggcggtggacgttttggtcgcggtttttttgggttttacggagcgatagtagttattagcggtaacgggggcgaagaggcgttagtagttagcgtcggttagggtttcgggtagggcgggcggcgttttcggggtttatttggtcgcgtttatttgcggcgtttttcgtttagcgcgtttagttcggtttcggttttattttttagtttttgtcgttttacgcgcggtagtaggagttagaggttagatcgtaggtagcgcggtgtcggggtttattcggttcgcgtatgt

SEQ ID NO: 21876 - DNA, 504 bp, Artificial Sequence
  chemically treated genomic DNA (Homo sapiens) CpG-island No: 21876
acatacgcgaaccgaataaaccccgacaccgcgctacctacgatctaacctctaactcctactaccgcgcgtaaaacgacaaaaactaaaaaataaaaccgaaaccgaactaaacgcgctaaacgaaaaacgccgcaaataaacgcgaccaaataaaccccgaaaacgccgcccgccctacccgaaaccctaaccgacgctaactactaacgcctcttcgcccccgttaccgctaataactactatcgctccgtaaaacccaaaaaaaccgcgaccaaaacgtccaccgcccaaaataataactcctatatctccgtaaatacgaacgaacgaaacgaaaacgccaaaccgaactaaacgccccctcccgaaacgaacgaaacgaacgaacgaaaactcaatacctctacgaaacccaccgaaaactctatcaccgcgcgccccccaaaaaaaattcctcaaccctccccgtcccaacccccgaaaaaatacgtaaaaaaaaat

SEQ ID NO: 21877 - DNA, 559 bp, Artificial Sequence
  chemically treated genomic DNA (Homo sapiens) CpG-island No: 21877
atcgcggcgtggagttgttcggttatttcgaggttgcggttcggggtttggagtggtttcggggattttttttggattttatgcggaagggtttataggatttttatttcgggttttcgttggacgtcgtggtcgttttcgtagcgattttcgattttcgacgttattcgtaggcgtcggaggagttgggtacgtatggcgagggggcgttgcgggtgttgttgcgcggttttgtttttgtcgtggtgcgttagcgggcgttgggcgatttcgcgttgtttaagcgcgtagtattcggttttgggcggttcggttcgcgggttttgtgtatttagttggcgtgcgcgtattcggagttgtacgagttttttttcgatttcgtcgttttagtcgttttggttttggcgttgttcgcgggcgttggtttgttggataaggtcggtcgtagtcgggagttgcggtggtgggggtagagtggggtcggggaaggtcgggggggttatatggtgaagatcgtagtggatgggttttcgttgtacgagtttgatttcgggttggt

SEQ ID NO: 21878 - DNA, 559 bp, Artificial Sequence
  chemically treated genomic DNA (Homo sapiens) CpG-island No: 21878
accaacccgaaatcaaactcgtacaacgaaaacccatccactacgatcttcaccatataacccccccgaccttccccgaccccactctacccccaccaccgcaactcccgactacgaccgaccttatccaacaaaccaacgcccgcgaacaacgccaaaaccaaaacgactaaaacgacgaaatcgaaaaaaaactcgtacaactccgaatacgcgcacgccaactaaatacacaaaacccgcgaaccgaaccgcccaaaaccgaatactacgcgcttaaacaacgcgaaatcgcccaacgcccgctaacgcaccacgacaaaaacaaaaccgcgcaacaacacccgcaacgccccctcgccatacgtacccaactcctccgacgcctacgaataacgtcgaaaatcgaaaatcgctacgaaaacgaccacgacgtccaacgaaaacccgaaataaaaatcctataaacccttccgcataaaatccaaaaaaaatccccgaaaccactccaaaccccgaaccgcaacctcgaaataaccgaacaactccacgccgcgat

SEQ ID NO: 21879 - DNA, 559 bp, Artificial Sequence
  chemically treated genomic DNA (Homo sapiens) CpG-island No: 21879
gttaattcgaagttaaattcgtgtagcgggggtttatttattgcgatttttattatgtggttttttcggtttttttcggttttattttgtttttattatcgtagttttcggttgcggtcgattttgtttagtaggttagcgttcgcgggtagcgttaaagttaaggcggttagggcggcgaagtcggggaagagttcgtgtagtttcgagtgcgcgtacgttagttgggtgtatagggttcgcgggtcgagtcgtttaaggtcgaatattacgcgtttaaatagcgcgaagtcgtttagcgttcgttggcgtattacggtaggagtaaagtcgcgtagtagtattcgtagcgttttttcgttatgcgtgtttagttttttcggcgtttgcgggtagcgtcgggggtcgaagatcgttgcgaaggcggttacggcgtttagcgaaggttcggggtaggagttttgtaggttttttcgtatggagtttaggaaggattttcggagttattttaagtttcggatcgtagtttcggagtaatcgagtagttttacgtcgcggt

SEQ ID NO: 21880 - DNA, 559 bp, Artificial Sequence
  chemically treated genomic DNA (Homo sapiens) CpG-island No: 21880
accgcgacgtaaaactactcgattactccgaaactacgatccgaaacttaaaataactccgaaaatccttcctaaactccatacgaaaaaacctacaaaactcctaccccgaaccttcgctaaacgccgtaaccgccttcgcaacgatcttcgacccccgacgctacccgcaaacgccgaaaaaactaaacacgcataacgaaaaaacgctacgaatactactacgcgactttactcctaccgtaatacgccaacgaacgctaaacgacttcgcgctatttaaacgcgtaatattcgaccttaaacgactcgacccgcgaaccctatacacccaactaacgtacgcgcactcgaaactacacgaactcttccccgacttcgccgccctaaccgccttaactttaacgctacccgcgaacgctaacctactaaacaaaatcgaccgcaaccgaaaactacgataataaaaacaaaataaaaccgaaaaaaaccgaaaaaaccacataataaaaatcgcaataaataaacccccgctacacgaatttaacttcgaattaac

SEQ ID NO: 21881 - DNA, 635 bp, Artificial Sequence
  chemically treated genomic DNA (Homo sapiens) CpG-island No: 21881
cggggcgtgcgtgttcggcggtggcggggggtttgggcgtgcgttttttggttgtggaagggtcgttgggattggcgattttttgcggcgaggagggtagttggggcggattatttttggcggtgagggagtcgtcggggcgggcgttattagttatgtagggggttgtgggggcgggcgtttcgggtggtgacggggatggtttttgggttgggcgttttttcgcggtaaggaggtagtttggtcgtgcgttttcggaggtgagaggtttttcggggcgaatatttttagtggaggaaggggtttttcgggcggcgagagattggggggcggtagagggagtcgttagggcggtggagtgtcggggttagcgtatttcgttgacgtcggtgtagtgcgagtcgttgttcgtgaagttcgcggggtaggggtcgtagcgcgcgtcgtttttcgtttggatgtaggttacgtcggggaagtagaagtcgggcgcgtagtggagtaggggtcgtacgttgggtaggtcggtgcgtattgattgttgtatttttgcgggggggaggggggagaagcggcggggttgatcggtggttcgttcgggggtagagtttattatggttacgtttcggggttgg

SEQ ID NO: 21882 - DNA, 635 bp, Artificial Sequence
  chemically treated genomic DNA (Homo sapiens) CpG-island No: 21882
ccaaccccgaaacgtaaccataataaactctacccccgaacgaaccaccgatcaaccccgccgcttctcccccctcccccccgcaaaaatacaacaatcaatacgcaccgacctacccaacgtacgacccctactccactacgcgcccgacttctacttccccgacgtaacctacatccaaacgaaaaacgacgcgcgctacgacccctaccccgcgaacttcacgaacaacgactcgcactacaccgacgtcaacgaaatacgctaaccccgacactccaccgccctaacgactccctctaccgccccccaatctctcgccgcccgaaaaaccccttcctccactaaaaatattcgccccgaaaaacctctcacctccgaaaacgcacgaccaaactacctccttaccgcgaaaaaacgcccaacccaaaaaccatccccgtcaccacccgaaacgcccgcccccacaaccccctacataactaataacgcccgccccgacgactccctcaccgccaaaaataatccgccccaactaccctcctcgccgcaaaaaatcgccaatcccaacgacccttccacaaccaaaaaacgcacgcccaaaccccccgccaccgccgaacacgcacgccccg

SEQ ID NO: 21883 - DNA, 635 bp, Artificial Sequence
  chemically treated genomic DNA (Homo sapiens) CpG-island No: 21883
ttagtttcggggcgtggttatgataggttttgttttcgggcgagttatcgattagtttcgtcgttttttttttttttttttcgtagggatgtagtagttagtacgtatcggtttatttagcgtgcggtttttgttttattgcgcgttcggtttttgttttttcggcgtggtttgtatttagacggagagcggcgcgcgttgcggtttttgtttcgcgggttttacgggtaacggttcgtattgtatcgacgttaacgaggtgcgttagtttcgatattttatcgttttgacgattttttttatcgttttttaatttttcgtcgttcgggagatttttttttttattgggagtgttcgtttcgaagagttttttattttcgggggcgtacggttagattatttttttatcgcggggggacgtttaatttaaggattattttcgttattattcgggacgttcgtttttataattttttatatagttagtgacgttcgtttcgacgatttttttatcgttaggggtggttcgttttagttatttttttcgtcgtaggggatcgttagttttaacgatttttttatagttagggaacgtacgtttagatttttcgttatcgtcgggtacgtacgtttcg

SEQ ID NO: 21884 - DNA, 635 bp, Artificial Sequence
  chemically treated genomic DNA (Homo sapiens) CpG-island No: 21884
cgaaacgtacgtacccgacgataacgaaaaatctaaacgtacgttccctaactataaaaaaatcgttaaaactaacgatcccctacgacgaaaaaaataactaaaacgaaccacccctaacgataaaaaaatcgtcgaaacgaacgtcactaactatataaaaaattataaaaacgaacgtcccgaataataacgaaaataatccttaaattaaacgtccccccgcgataaaaaaataatctaaccgtacgcccccgaaaataaaaaactcttcgaaacgaacactcccaataaaaaaaaaaatctcccgaacgacgaaaaattaaaaaacgataaaaaaaatcgtcaaaacgataaaatatcgaaactaacgcacctcgttaacgtcgatacaatacgaaccgttacccgtaaaacccgcgaaacaaaaaccgcaacgcgcgccgctctccgtctaaatacaaaccacgccgaaaaaacaaaaaccgaacgcgcaataaaacaaaaaccgcacgctaaataaaccgatacgtactaactactacatccctacgaaaaaaaaaaaaaaaaaacgacgaaactaatcgataactcgcccgaaaacaaaacctatcataaccacgccccgaaactaa

SEQ ID NO: 21885 - DNA, 690 bp, Artificial Sequence
  chemically treated genomic DNA (Homo sapiens) CpG-island No: 21885
gtcgtgtgtttcgtaggtgagggcgtttcgagggttgcgtcgggggcgtttttttttgtttttcggtcgtttaggtggcgttcgcgtttttttttttcgcggttgttttcggggcgttcgttttttgttttggtaggggggaaggagtggggcgtcgggtatttacgggtttttgattcggttcgcggcgtttcgaggacgtagagtagtagtagtaggggtagtaacggcggcggtcgtcgcgcggattgggcggcggggtttcggcggtcggcgggtatggggtcggcgttgtcgggggcgcgcggcgggttgcggttcggcggcggtggcgtagggcgcgggacgtaggtcgggcgcgggagggcgcgggttaggtcgttcgtacgtcgttgggcgcggacgcggaggtcggagtaagtttgagtagtcgaattgataaggcgttaatgcgtcgttggtttcgttcggtttcgttttcggttcggttcggtttcgggggggcggcgggtttcgtatcggttttttcgtcgttcgttcgttcgcgggtatcgcgcgtttcgttcgtttcgttttcgttttatcgagaatcgcgcgcgttttatttcgcggtttaaagttttttaatttaatttttatcggtttaggatttttttttttaattttgttagttttaggttttttattttt

SEQ ID NO: 21886 - DNA, 690 bp, Artificial Sequence
  chemically treated genomic DNA (Homo sapiens) CpG-island No: 21886
aaaaataaaaaacctaaaactaacaaaattaaaaaaaaaaatcctaaaccgataaaaattaaattaaaaaactttaaaccgcgaaataaaacgcgcgcgattctcgataaaacgaaaacgaaacgaacgaaacgcgcgatacccgcgaacgaacgaacgacgaaaaaaccgatacgaaacccgccgcccccccgaaaccgaaccgaaccgaaaacgaaaccgaacgaaaccaacgacgcattaacgccttatcaattcgactactcaaacttactccgacctccgcgtccgcgcccaacgacgtacgaacgacctaacccgcgccctcccgcgcccgacctacgtcccgcgccctacgccaccgccgccgaaccgcaacccgccgcgcgcccccgacaacgccgaccccatacccgccgaccgccgaaaccccgccgcccaatccgcgcgacgaccgccgccgttactacccctactactactactctacgtcctcgaaacgccgcgaaccgaatcaaaaacccgtaaatacccgacgccccactccttcccccctaccaaaacaaaaaacgaacgccccgaaaacaaccgcgaaaaaaaaaaacgcgaacgccacctaaacgaccgaaaaacaaaaaaaaacgcccccgacgcaaccctcgaaacgccctcacctacgaaacacacgac

SEQ ID NO: 21887 - DNA, 690 bp, Artificial Sequence
  chemically treated genomic DNA (Homo sapiens) CpG-island No: 21887
gggggtgggaagtttggagttggtagggttggagagggaggttttgggtcggtaggggttgagttagggggttttgggtcgcgggatagggcgcgcgcggttttcggtggggcggaggcgggacgggcggggcgcgcggtgttcgcgggcgggcgggcggcggggaggtcggtgcggggttcgtcgttttttcggggtcgggtcgggtcgggggcggggtcgggcggggttagcggcgtattagcgttttgttaattcggttgtttagatttgtttcggttttcgcgttcgcgtttagcgacgtgcgggcggtttggttcgcgttttttcgcgttcggtttgcgtttcgcgttttgcgttatcgtcgtcgagtcgtagttcgtcgcgcgttttcggtagcgtcggttttatgttcgtcggtcgtcggggtttcgtcgtttaattcgcgcggcggtcgtcgtcgttgttgtttttgttgttgttgttttgcgttttcggggcgtcgcgagtcggattaggagttcgtgagtattcggcgttttatttttttttttttgttagagtagagggcgggcgtttcgggggtagtcgcggggggagggggcgcgggcgttatttggacggtcggggaataaaggaaggcgttttcggcgtagttttcggggcgtttttatttgcggggtatacggt

SEQ ID NO: 21888 - DNA, 690 bp, Artificial Sequence
  chemically treated genomic DNA (Homo sapiens) CpG-island No: 21888
accgtataccccgcaaataaaaacgccccgaaaactacgccgaaaacgccttcctttattccccgaccgtccaaataacgcccgcgccccctccccccgcgactacccccgaaacgcccgccctctactctaacaaaaaaaaaaaaataaaacgccgaatactcacgaactcctaatccgactcgcgacgccccgaaaacgcaaaacaacaacaacaaaaacaacaacgacgacgaccgccgcgcgaattaaacgacgaaaccccgacgaccgacgaacataaaaccgacgctaccgaaaacgcgcgacgaactacgactcgacgacgataacgcaaaacgcgaaacgcaaaccgaacgcgaaaaaacgcgaaccaaaccgcccgcacgtcgctaaacgcgaacgcgaaaaccgaaacaaatctaaacaaccgaattaacaaaacgctaatacgccgctaaccccgcccgaccccgcccccgacccgacccgaccccgaaaaaacgacgaaccccgcaccgacctccccgccgcccgcccgcccgcgaacaccgcgcgccccgcccgtcccgcctccgccccaccgaaaaccgcgcgcgccctatcccgcgacccaaaaccccctaactcaacccctaccgacccaaaacctccctctccaaccctaccaactccaaacttcccaccccc

SEQ ID NO: 21889 - DNA, 516 bp, Artificial Sequence
  chemically treated genomic DNA (Homo sapiens) CpG-island No: 21889
ggggtcgcgatgtatttgtttcgttcgattcgtacgtttcgggtgtcgtagcgtagttatttcgttcgtttttcgtattttttatttttcgttttttaggttgtttcgttcgggtgacgttagcgtttcggttttcgtcgtagtcgttgtatttttcgtgttcggtttgagttggagtttttcgcgtttttcgcgtttcgttcggttatggttgcggtggcgttgatgttatcgtcgttgttgttgttgttgttgttggcgtcgtcgttcgtcgttttcgcgtcgttcgttcgcgattttttcgttttttagttcggggatacgtagaattgttagttgcggtgtcgcgatcgcgatttcggttcgtagttttcgtaggtgaggcgcgtgcggtgttaggtgttagcgggggacgcgggattttttcgaaggaggaggcgttgggatgggttttttttggatgatagtaggagattttggtgggggtgttcgtggggaggtgggggtcgggaatgg

SEQ ID NO: 21890 - DNA, 516 bp, Artificial Sequence
  chemically treated genomic DNA (Homo sapiens) CpG-island No: 21890
ccattcccgacccccacctccccacgaacacccccaccaaaatctcctactatcatccaaaaaaaacccatcccaacgcctcctccttcgaaaaaatcccgcgtcccccgctaacacctaacaccgcacgcgcctcacctacgaaaactacgaaccgaaatcgcgatcgcgacaccgcaactaacaattctacgtatccccgaactaaaaaacgaaaaaatcgcgaacgaacgacgcgaaaacgacgaacgacgacgccaacaacaacaacaacaacaacgacgataacatcaacgccaccgcaaccataaccgaacgaaacgcgaaaaacgcgaaaaactccaactcaaaccgaacacgaaaaatacaacgactacgacgaaaaccgaaacgctaacgtcacccgaacgaaacaacctaaaaaacgaaaaataaaaaatacgaaaaacgaacgaaataactacgctacgacacccgaaacgtacgaatcgaacgaaacaaatacatcgcgacccc

SEQ ID NO: 21891 - DNA, 516 bp, Artificial Sequence
  chemically treated genomic DNA (Homo sapiens) CpG-island No: 21891
ttattttcgatttttatttttttacggatatttttattaaagttttttgttgttatttaagagaagtttattttaacgttttttttttcggagagatttcgcgtttttcgttggtatttggtatcgtacgcgttttatttgcgagggttgcgggtcgaggtcgcggtcgcggtatcgtagttggtagttttgcgtgttttcgagttggggggcgaagggatcgcgggcggacggcgcggaggcggcgggcggcgacgttaatagtagtagtagtagtagcggcggtggtattagcgttatcgtagttatggtcgggcggaacgcggggggcgcgggggattttagtttaggtcgggtacggaggatgtagcggttgcggcggggatcggggcgttgacgttattcgagcgaggtagtttgggaagcggggggtgggagatgcggagagcgggcggggtagttgcgttgcggtattcgaggcgtgcgggtcgggcggggtaggtgtatcgcggtttt

SEQ ID NO: 21892 - DNA, 516 bp, Artificial Sequence
  chemically treated genomic DNA (Homo sapiens) CpG-island No: 21892
aaaaccgcgatacacctaccccgcccgacccgcacgcctcgaataccgcaacgcaactaccccgcccgctctccgcatctcccaccccccgcttcccaaactacctcgctcgaataacgtcaacgccccgatccccgccgcaaccgctacatcctccgtacccgacctaaactaaaatcccccgcgccccccgcgttccgcccgaccataactacgataacgctaataccaccgccgctactactactactactattaacgtcgccgcccgccgcctccgcgccgtccgcccgcgatcccttcgccccccaactcgaaaacacgcaaaactaccaactacgataccgcgaccgcgacctcgacccgcaaccctcgcaaataaaacgcgtacgataccaaataccaacgaaaaacgcgaaatctctccgaaaaaaaaaacgttaaaataaacttctcttaaataacaacaaaaaactttaataaaaatatccgtaaaaaaataaaaatcgaaaataa

SEQ ID NO: 21893 - DNA, 534 bp, Artificial Sequence
  chemically treated genomic DNA (Homo sapiens) CpG-island No: 21893
atttcggggatcgtcgtcgttgtagttatcggttcgtttacgttcgttttttgtagtcgttattgtcgttttatatttttttcgttcgtcgggggttttgtttcgtgaggttagcgattaacggtcgtcgcgtattcgttttttaatagttaatcgtcggcggggtcgcgatattttatatatcgttgagttggaaagggacgcgttatttaagtttcgcggcgttcgtatttttattagtttttgcgtaggttacgtttttttcgacgtcgtaggcggagaagtcggaggtaggagattataaagcgtaggagtagatgttttcgtcgtttcgttcgttttaggtttcgtttatttgttggtttgcgtttagaaagtcgggaggagtttagtgatttttagtatttttttttatagtggatcgtttttcgtttttcgcgcgttgagttcgcgtaagggtttttgggagttgtagtttgttttttagaattcgttttttttttttttagttttttttagaatttatggttttgt

SEQ ID NO: 21894 - DNA, 534 bp, Artificial Sequence
  chemically treated genomic DNA (Homo sapiens) CpG-island No: 21894
acaaaaccataaattctaaaaaaaactaaaaaaaaaaaaaacgaattctaaaaaacaaactacaactcccaaaaacccttacgcgaactcaacgcgcgaaaaacgaaaaacgatccactataaaaaaaaatactaaaaatcactaaactcctcccgactttctaaacgcaaaccaacaaataaacgaaacctaaaacgaacgaaacgacgaaaacatctactcctacgctttataatctcctacctccgacttctccgcctacgacgtcgaaaaaaacgtaacctacgcaaaaactaataaaaatacgaacgccgcgaaacttaaataacgcgtccctttccaactcaacgatatataaaatatcgcgaccccgccgacgattaactattaaaaaacgaatacgcgacgaccgttaatcgctaacctcacgaaacaaaacccccgacgaacgaaaaaaatataaaacgacaataacgactacaaaaaacgaacgtaaacgaaccgataactacaacgacgacgatccccgaaat

SEQ ID NO: 21895 - DNA, 534 bp, Artificial Sequence
  chemically treated genomic DNA (Homo sapiens) CpG-island No: 21895
ataaaattatggattttaggagggattgggaaagagaaaaacgaattttggaaggtaaattataatttttaaaggtttttgcgcggatttagcgcgcgagggacgaagggcggtttattgtaaggggaaatgttgaggattattgggtttttttcggttttttgaacgtaagttagtaagtgggcgggatttggggcgggcggagcggcgagagtatttgtttttgcgttttgtggttttttgttttcggttttttcgtttgcgacgtcgaagggggcgtggtttgcgtagaggttggtgggggtgcgggcgtcgcgggatttgggtgacgcgtttttttttagtttagcggtgtgtgaggtgtcgcggtttcgtcggcgattggttgttgagaggcgagtacgcggcggtcgttggtcgttggttttacggagtaaggttttcggcgggcggggaggatatggggcggtagtggcggttgtaggaggcgggcgtggacgagtcggtggttgtagcggcggcggttttcggagt

SEQ ID NO: 21896 - DNA, 534 bp, Artificial Sequence
  chemically treated genomic DNA (Homo sapiens) CpG-island No: 21896
actccgaaaaccgccgccgctacaaccaccgactcgtccacgcccgcctcctacaaccgccactaccgccccatatcctccccgcccgccgaaaaccttactccgtaaaaccaacgaccaacgaccgccgcgtactcgcctctcaacaaccaatcgccgacgaaaccgcgacacctcacacaccgctaaactaaaaaaaaacgcgtcacccaaatcccgcgacgcccgcacccccaccaacctctacgcaaaccacgcccccttcgacgtcgcaaacgaaaaaaccgaaaacaaaaaaccacaaaacgcaaaaacaaatactctcgccgctccgcccgccccaaatcccgcccacttactaacttacgttcaaaaaaccgaaaaaaacccaataatcctcaacatttccccttacaataaaccgcccttcgtccctcgcgcgctaaatccgcgcaaaaacctttaaaaattataatttaccttccaaaattcgtttttctctttcccaatccctcctaaaatccataattttat

SEQ ID NO: 21897 - DNA, 889 bp, Artificial Sequence
  chemically treated genomic DNA (Homo sapiens) CpG-island No: 21897
attttcgcggtttttttttttgttgtttgtaggaaaatgtcgcggtcgtaatggcggcggatgtggagggggacgtgtacgtattggtggagtattttttcgagtatatcggtaaggacgggcgtcgcgtggttatttcgtttaatgagcgttatcggtcgttgcggcgtagtatagagtattgagtattggtggtacgtgcggcgtaagttcggcggtcgttttttttatttgttcgcgtagtacgtgcgcgagttgtttgcgttgggtaattttgtcgttgacgcgtcgttaggtttttttatcgggattcgtagtttttgagtcgttcgtttacgattatcggttcgtgagcgcggttgtggtagcggtttttaacggttttttagcggagtttcgaggcggggttagttttttgtgcggttttgcgtagcgcggcgtcgcgagttagcgtagtagtttggcgttcggtttgttcgtttgtttgtatttgcggtttacggcgttcgtgcggttcgcgtagtttttggacgatttgacgcgcgtcgtcgtttcgtttttcgtcggtaatttcggaagtagcggtagttttaaggtttgtagcgtagcgggtttttgggtgtgtttgttgtttttgtcgcgtagcgatttagagaacgtttaagaggttatttaggaggtacgcggttcgtcgcggtaggagatcgtgaagtaggtacgatttcgggcgcggaggcggggaggttcgttgaggatagcgttcgtagggagtttgggttcgaggagatttatttcgtttagcgtcgggtatgacgtttatttttgtcggaagatttcggatgagttttttttttttagtcgcgaaatagtgtaggtttttattttttat

SEQ ID NO: 21898 - DNA, 889 bp, Artificial Sequence
  chemically treated genomic DNA (Homo sapiens) CpG-island No: 21898
ataaaaaataaaaacctacactatttcgcgactaaaaaaaaaaaactcatccgaaatcttccgacaaaaataaacgtcatacccgacgctaaacgaaataaatctcctcgaacccaaactccctacgaacgctatcctcaacgaacctccccgcctccgcgcccgaaatcgtacctacttcacgatctcctaccgcgacgaaccgcgtacctcctaaataacctcttaaacgttctctaaatcgctacgcgacaaaaacaacaaacacacccaaaaacccgctacgctacaaaccttaaaactaccgctacttccgaaattaccgacgaaaaacgaaacgacgacgcgcgtcaaatcgtccaaaaactacgcgaaccgcacgaacgccgtaaaccgcaaatacaaacaaacgaacaaaccgaacgccaaactactacgctaactcgcgacgccgcgctacgcaaaaccgcacaaaaaactaaccccgcctcgaaactccgctaaaaaaccgttaaaaaccgctaccacaaccgcgctcacgaaccgataatcgtaaacgaacgactcaaaaactacgaatcccgataaaaaaacctaacgacgcgtcaacgacaaaattacccaacgcaaacaactcgcgcacgtactacgcgaacaaataaaaaaaacgaccgccgaacttacgccgcacgtaccaccaatactcaatactctatactacgccgcaacgaccgataacgctcattaaacgaaataaccacgcgacgcccgtccttaccgatatactcgaaaaaatactccaccaatacgtacacgtccccctccacatccgccgccattacgaccgcgacattttcctacaaacaacaaaaaaaaaaaccgcgaaaat

SEQ ID NO: 21899 - DNA, 889 bp, Artificial Sequence
  chemically treated genomic DNA (Homo sapiens) CpG-island No: 21899
atgagggatgggggtttgtattgtttcgcggttggggagagggagtttattcgaagtttttcgatagaggtgggcgttatgttcgacgttgagcggagtgggttttttcgagtttaggttttttgcgggcgttgtttttagcgagttttttcgttttcgcgttcggggtcgtatttgttttacgattttttatcgcggcgggtcgcgtattttttggatggttttttagacgttttttgagtcgttgcgcgataggggtagtaggtatatttaggagttcgttacgttgtaggttttgaagttgtcgttgttttcgaggttgtcggcgggaggcgagacgacggcgcgcgttaggtcgtttagggattgcgcgggtcgtacgggcgtcgtgggtcgtaggtataggtaggcgggtaggtcgggcgttaggttgttgcgttggttcgcggcgtcgcgttgcgtagggtcgtatagggagttggtttcgtttcggggtttcgttggggggtcgttgggggtcgttgttatagtcgcgtttacgaatcggtagtcgtaggcgagcggtttaggggttgcgggtttcgatggggggatttggcggcgcgttagcggtagggttgtttagcgtaggtagttcgcgtacgtattgcgcgggtaggtagaaggggcggtcgtcgggtttgcgtcgtacgtgttattaatgtttagtgttttgtgttgcgtcgtagcggtcggtagcgtttattgggcgggatggttacgcggcgttcgtttttgtcggtgtattcgaaggggtgttttattagtacgtatacgtttttttttatattcgtcgttattgcggtcgcggtatttttttgtaggtaataaggaagagggtcgcggaagt

SEQ ID NO: 21900 - DNA, 889 bp, Artificial Sequence
  chemically treated genomic DNA (Homo sapiens) CpG-island No: 21900
acttccgcgaccctcttccttattacctacaaaaaaataccgcgaccgcaataacgacgaatataaaaaaaaacgtatacgtactaataaaacaccccttcgaatacaccgacaaaaacgaacgccgcgtaaccatcccgcccaataaacgctaccgaccgctacgacgcaacacaaaacactaaacattaataacacgtacgacgcaaacccgacgaccgccccttctacctacccgcgcaatacgtacgcgaactacctacgctaaacaaccctaccgctaacgcgccgccaaatccccccatcgaaacccgcaacccctaaaccgctcgcctacgactaccgattcgtaaacgcgactataacaacgacccccaacgaccccccaacgaaaccccgaaacgaaaccaactccctatacgaccctacgcaacgcgacgccgcgaaccaacgcaacaacctaacgcccgacctacccgcctacctatacctacgacccacgacgcccgtacgacccgcgcaatccctaaacgacctaacgcgcgccgtcgtctcgcctcccgccgacaacctcgaaaacaacgacaacttcaaaacctacaacgtaacgaactcctaaatatacctactacccctatcgcgcaacgactcaaaaaacgtctaaaaaaccatccaaaaaatacgcgacccgccgcgataaaaaatcgtaaaacaaatacgaccccgaacgcgaaaacgaaaaaactcgctaaaaacaacgcccgcaaaaaacctaaactcgaaaaaacccactccgctcaacgtcgaacataacgcccacctctatcgaaaaacttcgaataaactccctctccccaaccgcgaaacaatacaaacccccatccctcat

SEQ ID NO: 21901 - DNA, 545 bp, Artificial Sequence
  chemically treated genomic DNA (Homo sapiens) CpG-island No: 21901
cgcgggtagcgcgtagtttttacgcggtttcgggtagagttcggcgcgcgggttcggggcggcgtagttttcgttcggttggtagttttcggcgttcgcgggcggcgggaaggattcgttcgcgtcggggaagtcggtcgtttggggtcgcggcgggtaggcgtaggttttaaggaagcggttcggcggggcgggtattaaggcgtttttcgggtagggagattttaggttgtcgttttcgcgacgttcgttcgcgttttgcgcgttcggtttcgggtagaagtagcggtgttgcgggtcggcgttaggcgttcggttttcgtcgtttttcggtatcggttcggtgttcgttagtatgttttcgtaattcggttttacgatgtttattcggggcgggttggtattttttcgtagtcgtcgaggattcgttttttcgcgcgcgagagggtcgcgtgggttgggatgggtagggagtagggggcgggggattcgagggtcgggtgggggattttatcggagttcgggttttgacgtttggtttttat

SEQ ID NO: 21902 - DNA, 545 bp, Artificial Sequence
  chemically treated genomic DNA (Homo sapiens) CpG-island No: 21902
ataaaaaccaaacgtcaaaacccgaactccgataaaatcccccacccgaccctcgaatcccccgccccctactccctacccatcccaacccacgcgaccctctcgcgcgcgaaaaaacgaatcctcgacgactacgaaaaaataccaacccgccccgaataaacatcgtaaaaccgaattacgaaaacatactaacgaacaccgaaccgataccgaaaaacgacgaaaaccgaacgcctaacgccgacccgcaacaccgctacttctacccgaaaccgaacgcgcaaaacgcgaacgaacgtcgcgaaaacgacaacctaaaatctccctacccgaaaaacgccttaatacccgccccgccgaaccgcttccttaaaacctacgcctacccgccgcgaccccaaacgaccgacttccccgacgcgaacgaatccttcccgccgcccgcgaacgccgaaaactaccaaccgaacgaaaactacgccgccccgaacccgcgcgccgaactctacccgaaaccgcgtaaaaactacgcgctacccgcg

SEQ ID NO: 21903 - DNA, 545 bp, Artificial Sequence
  chemically treated genomic DNA (Homo sapiens) CpG-island No: 21903
gtagaagttaggcgttagagttcgggtttcggtggggttttttattcggttttcgggtttttcgttttttgttttttgtttattttagtttacgcgattttttcgcgcgcggaggggcgggttttcgacggttacgggaaggtgttagttcgtttcggatgggtatcgtggagtcgggttgcggagatatgttgacgggtatcgagtcgatgtcggggagcgacgagggtcgggcgtttggcgtcgattcgtagtatcgttatttttattcggagtcgggcgcgtaggacgcggacgagcgtcgcgggggcggtagtttggggtttttttattcggggggcgttttggtgttcgtttcgtcgagtcgtttttttggagtttacgtttattcgtcgcgattttaggcggtcggttttttcggcgcgggcgagtttttttcgtcgttcgcggacgtcgagggttattagtcgggcgagggttacgtcgtttcggattcgcgcgtcgggttttattcggggtcgcgtgaggattacgcgttattcgcg

SEQ ID NO: 21904 - DNA, 545 bp, Artificial Sequence
  chemically treated genomic DNA (Homo sapiens) CpG-island No: 21904
cgcgaataacgcgtaatcctcacgcgaccccgaataaaacccgacgcgcgaatccgaaacgacgtaaccctcgcccgactaataaccctcgacgtccgcgaacgacgaaaaaaactcgcccgcgccgaaaaaaccgaccgcctaaaatcgcgacgaataaacgtaaactccaaaaaaacgactcgacgaaacgaacaccaaaacgccccccgaataaaaaaaccccaaactaccgcccccgcgacgctcgtccgcgtcctacgcgcccgactccgaataaaaataacgatactacgaatcgacgccaaacgcccgaccctcgtcgctccccgacatcgactcgatacccgtcaacatatctccgcaacccgactccacgatacccatccgaaacgaactaacaccttcccgtaaccgtcgaaaacccgcccctccgcgcgcgaaaaaatcgcgtaaactaaaataaacaaaaaacaaaaaacgaaaaacccgaaaaccgaataaaaaaccccaccgaaacccgaactctaacgcctaacttctac

SEQ ID NO: 21905 - DNA, 532 bp, Artificial Sequence
  chemically treated genomic DNA (Homo sapiens) CpG-island No: 21905
ggagacgtagtatttatcgaagtcgaatttttaagtacggtcgtcgttatcggattgtgagcggagcggggtcgggagcggcgggcgattcggggcgggaatttaggtacggttgttattagcgttagcgatttatcggttgatgcgtagcggggcgattttcgttttgtgtcggaggtagcgtttttaatttaggcggcgtgggtcgaggtagagaattattaaaattattatttcggagcggtgtcggaagtttcgttttatcgtatgtaataaacggagataggttcgtttttgaacgttgattggtttcgcgtttttgtagtttggcgttcggtattatgggtaatgtagtttttagaagtttagggtttcggtgttttttttgagatttattcggaataagggttaagcggttcgcggagggcgttaggaaaaggcgcgatattaagagcgagatagggatttgttgttttttaaaggggtcgttggtcgattttcgtagttttatatttattgaagggagtgtttg

SEQ ID NO: 21906 - DNA, 532 bp, Artificial Sequence
  chemically treated genomic DNA (Homo sapiens) CpG-island No: 21906
caaacactcccttcaataaatataaaactacgaaaatcgaccaacgacccctttaaaaaacaacaaatccctatctcgctcttaatatcgcgccttttcctaacgccctccgcgaaccgcttaacccttattccgaataaatctcaaaaaaaacaccgaaaccctaaacttctaaaaactacattacccataataccgaacgccaaactacaaaaacgcgaaaccaatcaacgttcaaaaacgaacctatctccgtttattacatacgataaaacgaaacttccgacaccgctccgaaataataattttaataattctctacctcgacccacgccgcctaaattaaaaacgctacctccgacacaaaacgaaaatcgccccgctacgcatcaaccgataaatcgctaacgctaataacaaccgtacctaaattcccgccccgaatcgcccgccgctcccgaccccgctccgctcacaatccgataacgacgaccgtacttaaaaattcgacttcgataaatactacgtctcc

SEQ ID NO: 21907 - DNA, 532 bp, Artificial Sequence
  chemically treated genomic DNA (Homo sapiens) CpG-island No: 21907
tagatattttttttagtgggtatgggattgcggaaatcggttagcggtttttttaaggagtagtaagtttttgtttcgtttttggtgtcgcgtttttttttagcgtttttcgcgggtcgtttagtttttgtttcgggtgaattttagggagggtatcggaattttgggtttttgagaattatattatttataatgtcgagcgttaagttgtaaagacgcggagttaattaacgtttaggaacggatttgttttcgtttgttgtatacggtaaggcgggattttcggtatcgtttcgagatggtaattttggtggttttttatttcggtttacgtcgtttgagttagaaacgttgttttcggtatagagcgggggtcgtttcgttgcgtattagtcggtgggtcgttggcgttggtggtagtcgtgtttgggttttcgtttcgggtcgttcgtcgttttcggtttcgtttcgtttataattcgatggcggcggtcgtgtttagggattcgatttcggtgagtgttgcgttttt

SEQ ID NO: 21908 - DNA, 532 bp, Artificial Sequence
  chemically treated genomic DNA (Homo sapiens) CpG-island No: 21908
aaaaacgcaacactcaccgaaatcgaatccctaaacacgaccgccgccatcgaattataaacgaaacgaaaccgaaaacgacgaacgacccgaaacgaaaacccaaacacgactaccaccaacgccaacgacccaccgactaatacgcaacgaaacgacccccgctctataccgaaaacaacgtttctaactcaaacgacgtaaaccgaaataaaaaaccaccaaaattaccatctcgaaacgataccgaaaatcccgccttaccgtatacaacaaacgaaaacaaatccgttcctaaacgttaattaactccgcgtctttacaacttaacgctcgacattataaataatataattctcaaaaacccaaaattccgataccctccctaaaattcacccgaaacaaaaactaaacgacccgcgaaaaacgctaaaaaaaaacgcgacaccaaaaacgaaacaaaaacttactactccttaaaaaaaccgctaaccgatttccgcaatcccatacccactaaaaaaaatatcta

SEQ ID NO: 21909 - DNA, 504 bp, Artificial Sequence
  chemically treated genomic DNA (Homo sapiens) CpG-island No: 21909
gaattttcggcgttttttttgtggcgggtattttggtttgtgttagttttattcgcgggtgtcggatttggatttaggtgttgatagcgagaaggcgcgaggagagtcgtttttttagttgtatagtcggggtttgacggtcgtcggcggtggtgatagttttgtttttgttttcgttcggatcgtttatcgttttcggttcgtttcgtttagagttcgatggcggcggtattgagggtttcgatttaggtgagcgttgcgttttttcggttttttttgttttttttattcgaaattgagggacgcgtgaagggttttttgtagttcggatcgtattgttcggtatagtgaggcgttggtgttggatttcgtttttggtagtgtggtagggagcgggagagcgatacggttagggggttgcgcgggtaatagtttggagttgcgtttgagtcgggaggttggggagatttaggtcggttttacgcgtgtaggtagtagagggtg

SEQ ID NO: 21910 - DNA, 504 bp, Artificial Sequence
  chemically treated genomic DNA (Homo sapiens) CpG-island No: 21910
caccctctactacctacacgcgtaaaaccgacctaaatctccccaacctcccgactcaaacgcaactccaaactattacccgcgcaaccccctaaccgtatcgctctcccgctccctaccacactaccaaaaacgaaatccaacaccaacgcctcactataccgaacaatacgatccgaactacaaaaaacccttcacgcgtccctcaatttcgaataaaaaaaacaaaaaaaaccgaaaaaacgcaacgctcacctaaatcgaaaccctcaataccgccgccatcgaactctaaacgaaacgaaccgaaaacgataaacgatccgaacgaaaacaaaaacaaaactatcaccaccgccgacgaccgtcaaaccccgactatacaactaaaaaaacgactctcctcgcgccttctcgctatcaacacctaaatccaaatccgacacccgcgaataaaactaacacaaaccaaaatacccgccacaaaaaaaacgccgaaaattc

SEQ ID NO: 21911 - DNA, 504 bp, Artificial Sequence
  chemically treated genomic DNA (Homo sapiens) CpG-island No: 21911
tattttttgttatttgtacgcgtgaggtcggtttgggtttttttagtttttcggtttaggcgtagttttaagttgttgttcgcgtagttttttgatcgtgtcgttttttcgttttttgttatattattagaaacgagatttagtattagcgttttattgtgtcggatagtgcggttcgggttgtagaaaattttttacgcgttttttagtttcgggtggggagggtagaggaggtcgggaggacgtagcgtttatttgggtcggggtttttagtgtcgtcgttatcggattttgggcggagcgggtcgggagcggtggacgattcgggcggagataagagtaaagttgttattatcgtcggcgatcgttaggtttcggttgtgtagttgagaaaacgatttttttcgcgttttttcgttgttagtatttaggtttagattcggtattcgcggatggaattgatataagttaaagtgttcgttatagggaggacgtcggaagttt

SEQ ID NO: 21912 - DNA, 504 bp, Artificial Sequence
  chemically treated genomic DNA (Homo sapiens) CpG-island No: 21912
aaacttccgacgtcctccctataacgaacactttaacttatatcaattccatccgcgaataccgaatctaaacctaaatactaacaacgaaaaaacgcgaaaaaaatcgttttctcaactacacaaccgaaacctaacgatcgccgacgataataacaactttactcttatctccgcccgaatcgtccaccgctcccgacccgctccgcccaaaatccgataacgacgacactaaaaaccccgacccaaataaacgctacgtcctcccgacctcctctaccctccccacccgaaactaaaaaacgcgtaaaaaattttctacaacccgaaccgcactatccgacacaataaaacgctaatactaaatctcgtttctaataatataacaaaaaacgaaaaaacgacacgatcaaaaaactacgcgaacaacaacttaaaactacgcctaaaccgaaaaactaaaaaaacccaaaccgacctcacgcgtacaaataacaaaaaata

SEQ ID NO: 21913 - DNA, 658 bp, Artificial Sequence
  chemically treated genomic DNA (Homo sapiens) CpG-island No: 21913
tgaggtttcgttatagcgtttttttttttttaatcggaggttcggcgtttcgtttttttaatttacggtttttttcgattttagtttattcggattttttagcgttttattttatcgtatcgttttcggggtcgcgttcgggtcgtcgttagtcgttttcgttttttatacgcgttcggagtttcgagtttttattcggtcgcgttttatcgtttcgggtttttcgagatcgtatacgtcgttcgttagtttttagggtttaggatgattacgtcgaatcgtttttcgtttttcggttttttttattcgagtacgcggttcggcgcgttttttatttttattttagatatatataggtatacgtatttaacgttattttacggtcgggatagattcgggagttttaattcggacgcggtttttatttgtttttttattcgtttatatcgcgttttttataatttcgtcgttttttcgtttttattcggggttttggttttttttcgtttttagtttttcgggttttttatcgggtttttcggttttgtttttagtttttttcggtcgtcgttttttttttcgttttcgtatttattatttagttattaggttatggattttttaattttggttttttttttttaattagttatttttt

SEQ ID NO: 21914 - DNA, 658 bp, Artificial Sequence
  chemically treated genomic DNA (Homo sapiens) CpG-island No: 21914
aaaaaataactaattaaaaaaaaaaaaccaaaattaaaaaatccataacctaataactaaataataaatacgaaaacgaaaaaaaaaacgacgaccgaaaaaaactaaaaacaaaaccgaaaaacccgataaaaaacccgaaaaactaaaaacgaaaaaaaaccaaaaccccgaataaaaacgaaaaaacgacgaaattataaaaaacgcgatataaacgaataaaaaaacaaataaaaaccgcgtccgaattaaaactcccgaatctatcccgaccgtaaaataacgttaaatacgtatacctatatatatctaaaataaaaataaaaaacgcgccgaaccgcgtactcgaataaaaaaaaccgaaaaacgaaaaacgattcgacgtaatcatcctaaaccctaaaaactaacgaacgacgtatacgatctcgaaaaacccgaaacgataaaacgcgaccgaataaaaactcgaaactccgaacgcgtataaaaaacgaaaacgactaacgacgacccgaacgcgaccccgaaaacgatacgataaaataaaacgctaaaaaatccgaataaactaaaatcgaaaaaaaccgtaaattaaaaaaacgaaacgccgaacctccgattaaaaaaaaaaaaacgctataacgaaacctca

SEQ ID NO: 21915 - DNA, 658 bp, Artificial Sequence
  chemically treated genomic DNA (Homo sapiens) CpG-island No: 21915
agagagtggttggttggggggaaggggttagagttgaggggtttatagtttagtaattgggtggtgagtacgggggcggaggggggggcggcggtcggagagggttaggaatagggtcggggggttcggtggggagttcgaaaagttggagacggggaggggttaaagtttcggatgggggcggagggacggcgaaattgtggggagcgcggtatgggcgggtgggggggtaggtgggggtcgcgttcgggttagagttttcgggtttgtttcggtcgtgaagtagcgttggatgcgtgtgtttgtgtgtgtttggggtgggggtgaggggcgcgtcgggtcgcgtgttcgagtagaaggggtcggagggcggggagcggttcggcgtggttattttggattttgggggttggcgggcggcgtgtgcggtttcggagggttcgaggcggtggagcgcggtcgggtaggaattcggggtttcgggcgcgtgtgaaggacgggggcggttggcggcggttcggacgcggtttcgggagcggtacggtggggtggggcgttgagggattcgagtagattggagtcgagagagatcgtgagttgggggggcggggcgtcgggttttcggttgggggaaggggagcgttatagcgaggtttta

SEQ ID NO: 21916 - DNA, 658 bp, Artificial Sequence
  chemically treated genomic DNA (Homo sapiens) CpG-island No: 21916
taaaacctcgctataacgctccccttcccccaaccgaaaacccgacgccccgcccccccaactcacgatctctctcgactccaatctactcgaatccctcaacgccccaccccaccgtaccgctcccgaaaccgcgtccgaaccgccgccaaccgcccccgtccttcacacgcgcccgaaaccccgaattcctacccgaccgcgctccaccgcctcgaaccctccgaaaccgcacacgccgcccgccaacccccaaaatccaaaataaccacgccgaaccgctccccgccctccgaccccttctactcgaacacgcgacccgacgcgcccctcacccccaccccaaacacacacaaacacacgcatccaacgctacttcacgaccgaaacaaacccgaaaactctaacccgaacgcgacccccacctacccccccacccgcccataccgcgctccccacaatttcgccgtccctccgcccccatccgaaactttaacccctccccgtctccaacttttcgaactccccaccgaaccccccgaccctattcctaaccctctccgaccgccgcccccccctccgcccccgtactcaccacccaattactaaactataaacccctcaactctaaccccttccccccaaccaaccactctct

SEQ ID NO: 21917 - DNA, 701 bp, Artificial Sequence
  chemically treated genomic DNA (Homo sapiens) CpG-island No: 21917
ttcgaattttttcgttgggtttcggggttcgatttttaagtttgttaattgatttttcgttcgtttttcgtcggtttagcgttttgtatcggtcgagagtttattttcgggattgggtttcgttatggtttttagtatcgttttttttttttttttcggttcggcgttttttttttcggagtcggggatttcggtgtcgtttttagtgttcgatgtttttattgtttcgttttatagaagtgttcgttttagttcggttgagattcgagttcgttagtcgttgtcgttatttttttttattattgtttttcgtattttcggatcgggtttttttttttcgcgtcgtcggtcgtttgttttttttttttttttttttttttttttttttttttttttttttttttttttttttttttttttcgtcggcgtcgaggcgtagtgtattaagggttttgtagttcgttcgggaatagcggaaaagggatcgtatgaattttcggaattttgatttttagaaagttataggttggcgtaggcgtattaagtcgtttttttttttcggggagcggcggggagattaggagtcggaggggagagcggaagtgcgcgcgtaggtttttgggagatgtaggttgggcgggattaagaaagaagaggaagaagggattagaattttcggttattatattgtttcgttttgt

SEQ ID NO: 21918 - DNA, 701 bp, Artificial Sequence
  chemically treated genomic DNA (Homo sapiens) CpG-island No: 21918
acaaaacgaaacaatataataaccgaaaattctaatcccttcttcctcttctttcttaatcccgcccaacctacatctcccaaaaacctacgcgcgcacttccgctctcccctccgactcctaatctccccgccgctccccgaaaaaaaaaaacgacttaatacgcctacgccaacctataactttctaaaaatcaaaattccgaaaattcatacgatcccttttccgctattcccgaacgaactacaaaacccttaatacactacgcctcgacgccgacgaaaaaaaaaaaaaaaaaaaaaaaaaaaaaaaaaaaaaaaaaaaaaaaaaaaaaaaaaaaaaaaacaaacgaccgacgacgcgaaaaaaaaaaacccgatccgaaaatacgaaaaacaataataaaaaaaaataacgacaacgactaacgaactcgaatctcaaccgaactaaaacgaacacttctataaaacgaaacaataaaaacatcgaacactaaaaacgacaccgaaatccccgactccgaaaaaaaaaacgccgaaccgaaaaaaaaaaaaaaaacgatactaaaaaccataacgaaacccaatcccgaaaataaactctcgaccgatacaaaacgctaaaccgacgaaaaacgaacgaaaaatcaattaacaaacttaaaaatcgaaccccgaaacccaacgaaaaaattcgaa

SEQ ID NO: 21919 - DNA, 701 bp, Artificial Sequence
  chemically treated genomic DNA (Homo sapiens) CpG-island No: 21919
gtagaacgaggtagtatggtggtcgagagttttaattttttttttttttttttttttggtttcgtttagtttatattttttaggggtttgcgcgcgtattttcgttttttttttcggtttttggttttttcgtcgtttttcgggggaggggagcggtttggtgcgtttgcgttagtttgtggttttttgggaattaaagtttcggaggtttatgcggtttttttttcgttgttttcggacggattataaaatttttggtgtattgcgtttcggcgtcggcggggggaggagggagagaagaggagggagggaggagagaggaggaggaggaggaggaggagggagtaggcggtcggcggcgcggggggagggggttcggttcgggagtgcgggaggtagtggtagagggaggtggcggtagcggttagcggattcgagttttaatcgggttgaggcggatatttttgtggagcgaagtagtgggagtatcgagtattagaggcggtatcgggattttcggtttcggggaggggggcgtcggatcgggaggaggggagggggcgatgttggaagttatggcggagtttagtttcgaaggtgagttttcgatcggtgtagagcgttgagtcggcggggggcgggcgaggaattaattggtaaatttggaggtcgagtttcggagtttagcgggggagttcggg

SEQ ID NO: 21920 - DNA, 701 bp, Artificial Sequence
  chemically treated genomic DNA (Homo sapiens) CpG-island No: 21920
cccgaactcccccgctaaactccgaaactcgacctccaaatttaccaattaattcctcgcccgccccccgccgactcaacgctctacaccgatcgaaaactcaccttcgaaactaaactccgccataacttccaacatcgccccctcccctcctcccgatccgacgcccccctccccgaaaccgaaaatcccgataccgcctctaatactcgatactcccactacttcgctccacaaaaatatccgcctcaacccgattaaaactcgaatccgctaaccgctaccgccacctccctctaccactacctcccgcactcccgaaccgaaccccctccccccgcgccgccgaccgcctactccctcctcctcctcctcctcctcctctctcctccctccctcctcttctctccctcctccccccgccgacgccgaaacgcaatacaccaaaaattttataatccgtccgaaaacaacgaaaaaaaaaccgcataaacctccgaaactttaattcccaaaaaaccacaaactaacgcaaacgcaccaaaccgctcccctcccccgaaaaacgacgaaaaaaccaaaaaccgaaaaaaaaaacgaaaatacgcgcgcaaacccctaaaaaatataaactaaacgaaaccaaaaaaaaaaaaaaaaaaaaaattaaaactctcgaccaccatactacctcgttctac

SEQ ID NO: 21921 - DNA, 514 bp, Artificial Sequence
  chemically treated genomic DNA (Homo sapiens) CpG-island No: 21921
gttcgtacgattgtgcgttagggttcggggaggggcgtttttcgcgtgagcgtttttttgggaatattgaatataattattttttattttagattatgttaggttttaatggtgggaggacgttcgagtgttcggttcgttttatttcgaggaggaaggatattgggttatgacgttattagagggcgttagagtagggatcggacgcgagttggagatgttggattcgttgttggttttgggcggtttggtgttgtttcggggtgagagttagaggtacggtggcggggcggggggtgcggttcgggtttggttgaggggacggaagtgggtaggaagggttaggggttataggttaggtgtggaaatcgcgacgggttcgcgaaggcggtaattttagcgtttttatattttttattcgtttttcgttttgtagatttcgtggagtgggaggggcgtagttttttgaaggcgtttgttaagaaatttgtattgtggtgagtattttatagtg

SEQ ID NO: 21922 - DNA, 514 bp, Artificial Sequence
  chemically treated genomic DNA (Homo sapiens) CpG-island No: 21922
cactataaaatactcaccacaatacaaatttcttaacaaacgccttcaaaaaactacgcccctcccactccacgaaatctacaaaacgaaaaacgaataaaaaatataaaaacgctaaaattaccgccttcgcgaacccgtcgcgatttccacacctaacctataacccctaacccttcctacccacttccgtcccctcaaccaaacccgaaccgcaccccccgccccgccaccgtacctctaactctcaccccgaaacaacaccaaaccgcccaaaaccaacaacgaatccaacatctccaactcgcgtccgatccctactctaacgccctctaataacgtcataacccaatatccttcctcctcgaaataaaacgaaccgaacactcgaacgtcctcccaccattaaaacctaacataatctaaaataaaaaataattatattcaatattcccaaaaaaacgctcacgcgaaaaacgcccctccccgaaccctaacgcacaatcgtacgaac

SEQ ID NO: 21923 - DNA, 514 bp, Artificial Sequence
  chemically treated genomic DNA (Homo sapiens) CpG-island No: 21923
tattgtgggatatttattatagtgtagattttttgataagcgtttttaagagattgcgttttttttattttacggaatttgtagagcgagggacggataaagggtatgagagcgttgggattatcgttttcgcgaattcgtcgcgatttttatatttagtttgtgatttttggttttttttgtttattttcgtttttttagttaggttcgaatcgtatttttcgtttcgttatcgtgtttttggtttttatttcgaagtagtattaggtcgtttaaggttaatagcgagtttaatatttttaattcgcgttcggtttttgttttggcgttttttgatggcgttatgatttagtgtttttttttttcggggtgaaacgggtcgagtattcgggcgtttttttattattaagatttaatatagtttggaatgagaggtgattatgtttaatatttttaggggggcgtttacgcggagggcgttttttttcgagttttggcgtatagtcgtacggat

SEQ ID NO: 21924 - DNA, 514 bp, Artificial Sequence
  chemically treated genomic DNA (Homo sapiens) CpG-island No: 21924
atccgtacgactatacgccaaaactcgaaaaaaaacgccctccgcgtaaacgcccccctaaaaatattaaacataatcacctctcattccaaactatattaaatcttaataataaaaaaacgcccgaatactcgacccgtttcaccccgaaaaaaaaaaacactaaatcataacgccatcaaaaaacgccaaaacaaaaaccgaacgcgaattaaaaatattaaactcgctattaaccttaaacgacctaatactacttcgaaataaaaaccaaaaacacgataacgaaacgaaaaatacgattcgaacctaactaaaaaaacgaaaataaacaaaaaaaaccaaaaatcacaaactaaatataaaaatcgcgacgaattcgcgaaaacgataatcccaacgctctcataccctttatccgtccctcgctctacaaattccgtaaaataaaaaaaacgcaatctcttaaaaacgcttatcaaaaaatctacactataataaatatcccacaata

SEQ ID NO: 21925 - DNA, 579 bp, Artificial Sequence
  chemically treated genomic DNA (Homo sapiens) CpG-island No: 21925
gtaggcggttttagttttcgtgtcgtcggtcgcgtttattaatcgttggattttttttgttcggcgtcgtgttttgtcgagggttaggggcgtttaggtgtttaagatttgggttaagcgggtaggttttcgtttttttcgatagcgcggtttttttgttttcgtttcgtttttttcgtttaaggattcgttcggggcgtcggggtttcggtgaaattgttttggatagggggaagggtgaaagggtgtagcgaagagaagtcgagacggtggttcgaagtttcgcgcggcgtatatgttagtcggcgtttttgttttgagttcgttatcgaggttatcgggtttgtggtttcggttaatcggtcgataagattagaggtagtaggcggcggtttattttgattagtcgtatcgtttttcggttttcggcgcgtttcgtgtttcgcgtttcggggtcgtttttgtttgagaaaaggacgggagatgacggaggttatggtttgttcgggaatggaggaggggatggtttcggtttaagtatcgttgtttcgagtcggggacgaggttgggttgggggag

SEQ ID NO: 21926 - DNA, 579 bp, Artificial Sequence
  chemically treated genomic DNA (Homo sapiens) CpG-island No: 21926
ctcccccaacccaacctcgtccccgactcgaaacaacgatacttaaaccgaaaccatcccctcctccattcccgaacaaaccataacctccgtcatctcccgtccttttctcaaacaaaaacgaccccgaaacgcgaaacacgaaacgcgccgaaaaccgaaaaacgatacgactaatcaaaataaaccgccgcctactacctctaatcttatcgaccgattaaccgaaaccacaaacccgataacctcgataacgaactcaaaacaaaaacgccgactaacatatacgccgcgcgaaacttcgaaccaccgtctcgacttctcttcgctacaccctttcacccttccccctatccaaaacaatttcaccgaaaccccgacgccccgaacgaatccttaaacgaaaaaaacgaaacgaaaacaaaaaaaccgcgctatcgaaaaaaacgaaaacctacccgcttaacccaaatcttaaacacctaaacgcccctaaccctcgacaaaacacgacgccgaacaaaaaaaatccaacgattaataaacgcgaccgacgacacgaaaactaaaaccgcctac

SEQ ID NO: 21927 - DNA, 579 bp, Artificial Sequence
  chemically treated genomic DNA (Homo sapiens) CpG-island No: 21927
tttttttaatttagtttcgttttcggttcggagtagcggtgtttaggtcggggttatttttttttttattttcgggtaggttatggttttcgttatttttcgttttttttttagatagaaacggtttcggggcgcggggtacggggcgcgtcgagggtcgaagggcggtgcggttggttagagtgggtcgtcgtttgttgtttttaattttatcggtcgattagtcgaagttataaattcggtggtttcgatagcgggtttagagtagggacgtcggttggtatgtgcgtcgcgcggggtttcggattatcgtttcggttttttttcgttgtatttttttatttttttttttatttagggtagttttatcgaaatttcggcgtttcgggcggatttttgagcggagagggcggggcgggagtaggaaggtcgcgttgtcgggaggggcggggatttgttcgtttggtttaggttttggatatttgggcgtttttggttttcggtagaatacggcgtcggatagaagaggtttagcggttagtgggcgcggtcggcggtacgaaggttggagtcgtttgt

SEQ ID NO: 21928 - DNA, 579 bp, Artificial Sequence
  chemically treated genomic DNA (Homo sapiens) CpG-island No: 21928
acaaacgactccaaccttcgtaccgccgaccgcgcccactaaccgctaaacctcttctatccgacgccgtattctaccgaaaaccaaaaacgcccaaatatccaaaacctaaaccaaacgaacaaatccccgcccctcccgacaacgcgaccttcctactcccgccccgccctctccgctcaaaaatccgcccgaaacgccgaaatttcgataaaactaccctaaataaaaaaaaaaataaaaaaatacaacgaaaaaaaaccgaaacgataatccgaaaccccgcgcgacgcacataccaaccgacgtccctactctaaacccgctatcgaaaccaccgaatttataacttcgactaatcgaccgataaaattaaaaacaacaaacgacgacccactctaaccaaccgcaccgcccttcgaccctcgacgcgccccgtaccccgcgccccgaaaccgtttctatctaaaaaaaaaacgaaaaataacgaaaaccataacctacccgaaaataaaaaaaaaaataaccccgacctaaacaccgctactccgaaccgaaaacgaaactaaattaaaaaaa

SEQ ID NO: 21929 - DNA, 939 bp, Artificial Sequence
  chemically treated genomic DNA (Homo sapiens) CpG-island No: 21929
agagtcgttttgtgcgcgtttgttttttatttagtatcggtttgttcgtttgatttcgggtcgggggggcgggggttttcgagatcgtcgtcgtcggattgttaggggtgcgggagttcggcgtcgagggggttttagtagcggggttcgaggcggtttcgttttcgtcgttcgtttcgtcgtttttttgcggtttttttgcgggtatcggtattattatcgttattatttttgtcgtcgtcgcgggtatcgtcgtcgcggggatcgttgtagttttcgttgtcgtttttatttcgtttatttcgtcgggtttagtatcggttatagtcgttatcgtttcggttttttttttcggttcgcgaatttatcgttttgttcggttttcgcgtttcgagtttcgtttatacgtcggtagcgggttcggagtcgaggttaatggtagttcgttgtcgtcgttcgcgtagatttcgtttttcgattacgggttaattttagtttagtagtattttcggatcgtacgtcgatttcgtttttcggatttcgtatcgcggtttcggttttcgttagtcgtttagtaagtatatttgggtttcgttttttggtcgttacgtgacggttttcggtttaatttattggtcggcggttttttttttttttttttttcgtttttttttatcggtcgcgggaaattaaacgggtcggtcgcgttttaatcgttatttggtttttgcgggaagggcggggtcggggtcgtagtgttaaggttgtttttaacgatttgagcgaggggcgggaatttgtagtttcggttttggtagtgagtagtatcgttcgtttttattttcgagatcgattttgttcgtatgttgttaggtgtagacgtttttcggttattatcgtttttggtattttttttttataggacggttttgtatattt

SEQ ID NO: 21930 - DNA, 939 bp, Artificial Sequence
  chemically treated genomic DNA (Homo sapiens) CpG-island No: 21930
aaatatacaaaaccgtcctataaaaaaaaaataccaaaaacgataataaccgaaaaacgtctacacctaacaacatacgaacaaaatcgatctcgaaaataaaaacgaacgatactactcactaccaaaaccgaaactacaaattcccgcccctcgctcaaatcgttaaaaacaaccttaacactacgaccccgaccccgcccttcccgcaaaaaccaaataacgattaaaacgcgaccgacccgtttaatttcccgcgaccgataaaaaaaaacgaaaaaaaaaaaaaaaaaaaaccgccgaccaataaattaaaccgaaaaccgtcacgtaacgaccaaaaaacgaaacccaaatatacttactaaacgactaacgaaaaccgaaaccgcgatacgaaatccgaaaaacgaaatcgacgtacgatccgaaaatactactaaactaaaattaacccgtaatcgaaaaacgaaatctacgcgaacgacgacaacgaactaccattaacctcgactccgaacccgctaccgacgtataaacgaaactcgaaacgcgaaaaccgaacaaaacgataaattcgcgaaccgaaaaaaaaaaccgaaacgataacgactataaccgatactaaacccgacgaaataaacgaaataaaaacgacaacgaaaactacaacgatccccgcgacgacgatacccgcgacgacgacaaaaataataacgataataataccgatacccgcaaaaaaaccgcaaaaaaacgacgaaacgaacgacgaaaacgaaaccgcctcgaaccccgctactaaaaccccctcgacgccgaactcccgcacccctaacaatccgacgacgacgatctcgaaaacccccgcccccccgacccgaaatcaaacgaacaaaccgatactaaataaaaaacaaacgcgcacaaaacgactct

SEQ ID NO: 21931 - DNA, 939 bp, Artificial Sequence
  chemically treated genomic DNA (Homo sapiens) CpG-island No: 21931
gggtgtgtagggtcgttttgtggggagagggtgttaagggcggtggtggtcggaaggcgtttgtatttggtagtatacgggtaaggtcggtttcgagggtggaggcgagcggtgttatttattgttagaatcgaggttgtagattttcgtttttcgtttaggtcgttaggggtaattttggtattgcggtttcggtttcgtttttttcgtagaggttaggtggcggttggggcgcgatcggttcgtttgatttttcgcggtcggtggaaaggggcggaggggggaggggaaaggggtcgtcggttaatgggttgggtcgggggtcgttacgtggcggttagggggcggggtttaggtgtatttattgggcggttggcgggggtcggggtcgcggtgcgaagttcgggaggcggggtcggcgtgcggttcgggggtgttgttgggttgggattggttcgtggtcgggaggcggggtttgcgcgagcggcggtagcgggttgttattggtttcggtttcgggttcgttgtcggcgtgtgggcgaggttcggggcgcgaggatcgagtagggcggtgggttcgcgagtcggggggaggggtcggggcggtggcggttgtggtcggtattggattcggcgggatgagcgaggtggaggcggtagcgggggttatagcggttttcgcggcgacggtgttcgcgacggcggtaggggtggtagcggtggtggtatcggtgttcgtaggggagtcgtagaaaggcggcggggcgggcggcgggggcggagtcgtttcgggtttcgttgttgggattttttcggcgtcgggttttcgtatttttggtaattcggcgacggcggtttcgggaattttcgttttttcggttcggagttaggcggataagtcggtgttgggtgaggggtaggcgcgtatagggcggtttt

SEQ ID NO: 21932 - DNA, 939 bp, Artificial Sequence
  chemically treated genomic DNA (Homo sapiens) CpG-island No: 21932
aaaaccgccctatacgcgcctacccctcacccaacaccgacttatccgcctaactccgaaccgaaaaaacgaaaattcccgaaaccgccgtcgccgaattaccaaaaatacgaaaacccgacgccgaaaaaatcccaacaacgaaacccgaaacgactccgcccccgccgcccgccccgccgcctttctacgactcccctacgaacaccgataccaccaccgctaccacccctaccgccgtcgcgaacaccgtcgccgcgaaaaccgctataacccccgctaccgcctccacctcgctcatcccgccgaatccaataccgaccacaaccgccaccgccccgacccctccccccgactcgcgaacccaccgccctactcgatcctcgcgccccgaacctcgcccacacgccgacaacgaacccgaaaccgaaaccaataacaacccgctaccgccgctcgcgcaaaccccgcctcccgaccacgaaccaatcccaacccaacaacacccccgaaccgcacgccgaccccgcctcccgaacttcgcaccgcgaccccgacccccgccaaccgcccaataaatacacctaaaccccgccccctaaccgccacgtaacgacccccgacccaacccattaaccgacgacccctttcccctcccccctccgcccctttccaccgaccgcgaaaaatcaaacgaaccgatcgcgccccaaccgccacctaacctctacgaaaaaaacgaaaccgaaaccgcaataccaaaattacccctaacgacctaaacgaaaaacgaaaatctacaacctcgattctaacaataaataacaccgctcgcctccaccctcgaaaccgaccttacccgtatactaccaaatacaaacgccttccgaccaccaccgcccttaacaccctctccccacaaaacgaccctacacaccc

SEQ ID NO: 21933 - DNA, 744 bp, Artificial Sequence
  chemically treated genomic DNA (Homo sapiens) CpG-island No: 21933
gttcgcgtattgtttcgagcgtagttgggatcgtagagtcgtcgggcgttcgcggtattttcggtgtgtttttgttttcggggtcgggttgggtcgggtgggtcgtgtgtttttttttcgttaagtgcgcgtgtttttttttttttcgggtatagggtacgattagtcgcgtcggttatttggcggggttcgagttcgcgtcgtcgtcgtcgtcgtcgtcgcgggagtcgttcgcgtttagtttgggtagcgttttttatttgttcgacgcgtcgttcgtcgtcgtcgtcgtcgcgttttattattttagttttacgttgttcgcgtcgtcgcgcgggggtttttcgttggtcgcgttttagggcggttcgtttattaagttgtagcgcggcggttcggttttcgagggcgttatttacgtcgcgtcgcgcggtttttcgtttaagtagtcgtttagtcgtttggttaagttttatagtattagttcgtttattaatatcgtcgtgttttcggtcggtttgttttcgattcgcgtgatttcgttttttatcgtgtagtttattatttttttttcgtttatttattagttgagttttattatcggtacgtacgttattttgtcgtttattaagcgtttggtttacgcgttcgagtagtatagtaagtattcgtaggagttgtatgttacggttattttttagaggtcgggtagtttggtaggtaaaggttcgttgttatttggcg

SEQ ID NO: 21934 - DNA, 744 bp, Artificial Sequence
  chemically treated genomic DNA (Homo sapiens) CpG-island No: 21934
cgccaaataacaacgaacctttacctaccaaactacccgacctctaaaaaataaccgtaacatacaactcctacgaatacttactatactactcgaacgcgtaaaccaaacgcttaataaacgacaaaataacgtacgtaccgataataaaactcaactaataaataaacgaaaaaaaaataataaactacacgataaaaaacgaaatcacgcgaatcgaaaacaaaccgaccgaaaacacgacgatattaataaacgaactaatactataaaacttaaccaaacgactaaacgactacttaaacgaaaaaccgcgcgacgcgacgtaaataacgccctcgaaaaccgaaccgccgcgctacaacttaataaacgaaccgccctaaaacgcgaccaacgaaaaacccccgcgcgacgacgcgaacaacgtaaaactaaaataataaaacgcgacgacgacgacgacgaacgacgcgtcgaacaaataaaaaacgctacccaaactaaacgcgaacgactcccgcgacgacgacgacgacgacgacgcgaactcgaaccccgccaaataaccgacgcgactaatcgtaccctatacccgaaaaaaaaaaaaacacgcgcacttaacgaaaaaaaaacacacgacccacccgacccaacccgaccccgaaaacaaaaacacaccgaaaataccgcgaacgcccgacgactctacgatcccaactacgctcgaaacaatacgcgaac

SEQ ID NO: 21935 - DNA, 744 bp, Artificial Sequence
  chemically treated genomic DNA (Homo sapiens) CpG-island No: 21935
cgttaggtggtagcgagtttttatttgttaggttgttcggtttttggagggtggtcgtggtatatagtttttgcgagtgtttgttgtattgttcggacgcgtggattaggcgtttggtgggcgatagggtggcgtacgtgtcgatggtggagtttagttggtggatgggcgaggaggagatggtggattgtacggtggggggcgaggttacgcggatcggggataggtcggtcgaggatacgacgatgttgatgggcgagttggtgttgtaggatttggttaggcggttgggcgattgtttgggcgaggagtcgcgcggcgcggcgtaggtggcgttttcgggggtcgagtcgtcgcgttgtagtttggtgggcgaatcgttttggggcgcggttagcggggagttttcgcgcggcggcgcgggtagcgtggagttggagtagtagagcgcggcggcggcggcggcgggcggcgcgtcgggtaggtggaaggcgttgtttaggttgggcgcgaacggttttcgcggcggcggcggcggcggcggcgcgggttcgggtttcgttaggtggtcggcgcggttggtcgtgttttgtgttcgggagaggagagaatacgcgtatttagcgagggagaagtatacggtttattcggtttagttcggtttcgagagtagaggtatatcggggatgtcgcgggcgttcggcggttttgcgattttagttgcgttcggggtagtacgcgaat

SEQ ID NO: 21936 - DNA, 744 bp, Artificial Sequence
  chemically treated genomic DNA (Homo sapiens) CpG-island No: 21936
attcgcgtactaccccgaacgcaactaaaatcgcaaaaccgccgaacgcccgcgacatccccgatatacctctactctcgaaaccgaactaaaccgaataaaccgtatacttctccctcgctaaatacgcgtattctctcctctcccgaacacaaaacacgaccaaccgcgccgaccacctaacgaaacccgaacccgcgccgccgccgccgccgccgccgcgaaaaccgttcgcgcccaacctaaacaacgccttccacctacccgacgcgccgcccgccgccgccgccgccgcgctctactactccaactccacgctacccgcgccgccgcgcgaaaactccccgctaaccgcgccccaaaacgattcgcccaccaaactacaacgcgacgactcgacccccgaaaacgccacctacgccgcgccgcgcgactcctcgcccaaacaatcgcccaaccgcctaaccaaatcctacaacaccaactcgcccatcaacatcgtcgtatcctcgaccgacctatccccgatccgcgtaacctcgccccccaccgtacaatccaccatctcctcctcgcccatccaccaactaaactccaccatcgacacgtacgccaccctatcgcccaccaaacgcctaatccacgcgtccgaacaatacaacaaacactcgcaaaaactatataccacgaccaccctccaaaaaccgaacaacctaacaaataaaaactcgctaccacctaacg

SEQ ID NO: 21937 - DNA, 583 bp, Artificial Sequence
  chemically treated genomic DNA (Homo sapiens) CpG-island No: 21937
atttgtttcggtcggtcgaagcgtcgcgggcgtttttttatttacggcgggtttgtttagtttttcgtttagttcgggttcgggtttcgtcgaggtaggtgtgcgtggcggattagttttcgggtattcggttggtttagttttatttcgaacgttatcgggttaggttacgcgtagattcgagttcggggttttcgtttttggttgtcggttcgcgttcgtcgcgcgtttcgcgtttattgcgcgttcggtttcggtttcgtttttcggagggtttcgttttcgtttttttgtcgatgtcgttgaggaaaatgaaagcggtcgtggttaggattggcgtagttgtcgttttaggcgaggggcgtagaatgtagcggtcgttagtttggagcgcgggttttggggtcgtaattcgcgtcgggcgaggtaagtatagttttttcgcggtcgtttcgcgggtttttttttgcggattcggcgggttcgacgttaggcgtttgattcgggtagggttaggggttttgtcgtgggggcggggagggtttgagaagcggtatttttgggtttcgtggttttgagtttt

SEQ ID NO: 21938 - DNA, 583 bp, Artificial Sequence
  chemically treated genomic DNA (Homo sapiens) CpG-island No: 21938
aaaactcaaaaccacgaaacccaaaaataccgcttctcaaaccctccccgcccccacgacaaaacccctaaccctacccgaatcaaacgcctaacgtcgaacccgccgaatccgcaaaaaaaaacccgcgaaacgaccgcgaaaaaactatacttacctcgcccgacgcgaattacgaccccaaaacccgcgctccaaactaacgaccgctacattctacgcccctcgcctaaaacgacaactacgccaatcctaaccacgaccgctttcattttcctcaacgacatcgacaaaaaaacgaaaacgaaaccctccgaaaaacgaaaccgaaaccgaacgcgcaataaacgcgaaacgcgcgacgaacgcgaaccgacaaccaaaaacgaaaaccccgaactcgaatctacgcgtaacctaacccgataacgttcgaaataaaactaaaccaaccgaatacccgaaaactaatccgccacgcacacctacctcgacgaaacccgaacccgaactaaacgaaaaactaaacaaacccgccgtaaataaaaaaacgcccgcgacgcttcgaccgaccgaaacaaat

SEQ ID NO: 21939 - DNA, 583 bp, Artificial Sequence
  chemically treated genomic DNA (Homo sapiens) CpG-island No: 21939
gaggtttaaagttacgaaatttaagggtgtcgttttttaggtttttttcgtttttacggtagaatttttgattttgttcgggttaaacgtttggcgtcgggttcgtcgggttcgtaaggaggagttcgcgaggcggtcgcgaaggggttgtgtttatttcgttcggcgcgggttgcggttttagggttcgcgttttaggttggcggtcgttgtattttgcgtttttcgtttgaaacggtagttgcgttagttttggttacgatcgtttttattttttttaacgatatcggtaggaaagcgaaagcgaaatttttcgggaggcgggatcggggtcgagcgcgtagtgaacgcggggcgcgcggcgggcgcgggtcggtagttagaggcgggggtttcgggttcgggtttgcgcgtggtttggttcggtggcgttcggggtggagttgggttagtcgagtgttcgagagttagttcgttacgtatatttgtttcggcgggattcgggttcgggttgggcgggaggttgggtaggttcgtcgtaagtggaaaggcgttcgcggcgtttcggtcgatcgggataggt

SEQ ID NO: 21940 - DNA, 583 bp, Artificial Sequence
  chemically treated genomic DNA (Homo sapiens) CpG-island No: 21940
acctatcccgatcgaccgaaacgccgcgaacgcctttccacttacgacgaacctacccaacctcccgcccaacccgaacccgaatcccgccgaaacaaatatacgtaacgaactaactctcgaacactcgactaacccaactccaccccgaacgccaccgaaccaaaccacgcgcaaacccgaacccgaaacccccgcctctaactaccgacccgcgcccgccgcgcgccccgcgttcactacgcgctcgaccccgatcccgcctcccgaaaaatttcgctttcgctttcctaccgatatcgttaaaaaaaataaaaacgatcgtaaccaaaactaacgcaactaccgtttcaaacgaaaaacgcaaaatacaacgaccgccaacctaaaacgcgaaccctaaaaccgcaacccgcgccgaacgaaataaacacaaccccttcgcgaccgcctcgcgaactcctccttacgaacccgacgaacccgacgccaaacgtttaacccgaacaaaatcaaaaattctaccgtaaaaacgaaaaaaacctaaaaaacgacacccttaaatttcgtaactttaaacctc

SEQ ID NO: 21941 - DNA, 541 bp, Artificial Sequence
  chemically treated genomic DNA (Homo sapiens) CpG-island No: 21941
acggtcgggtcgggcggcggagttgtaagggatagaggcgcggtaggcgcgcggagttagcggagttagttgagttcgagtttagttcgcgttcgcgtcgttatgtttttggttttttgcggtagcgagaattattcggtcgtttatcgggtggattagggggtttttaataacggttgttttgtggacgcgtttaacgtggtgtcgtacgtttttttattttttattattttttttattttttttattggtgagtgcgcgtagcgagtcgcggaggaggggacgggagagtagggagggaggaggaggcgttgcgcgtcgtatcgttcggcgttttttttcggttcgcgatcgtcgttcgtttcgttttcggggttttttgttttgtgttttgttcgtcggttttcgtattcgtatattagtttatttttttattttttcggtgttttcgatttcgcgttaaatatagcggacgtttgtgatttatgggattattaagttttgtttttgtagggttaagagttgggatggggaaaaggga

SEQ ID NO: 21942 - DNA, 541 bp, Artificial Sequence
  chemically treated genomic DNA (Homo sapiens) CpG-island No: 21942
tcccttttccccatcccaactcttaaccctacaaaaacaaaacttaataatcccataaatcacaaacgtccgctatatttaacgcgaaatcgaaaacaccgaaaaaataaaaaaataaactaatatacgaatacgaaaaccgacgaacaaaacacaaaacaaaaaaccccgaaaacgaaacgaacgacgatcgcgaaccgaaaaaaaacgccgaacgatacgacgcgcaacgcctcctcctccctccctactctcccgtcccctcctccgcgactcgctacgcgcactcaccaataaaaaaaataaaaaaaataataaaaaataaaaaaacgtacgacaccacgttaaacgcgtccacaaaacaaccgttattaaaaaccccctaatccacccgataaacgaccgaataattctcgctaccgcaaaaaaccaaaaacataacgacgcgaacgcgaactaaactcgaactcaactaactccgctaactccgcgcgcctaccgcgcctctatcccttacaactccgccgcccgacccgaccgt

SEQ ID NO: 21943 - DNA, 541 bp, Artificial Sequence
  chemically treated genomic DNA (Homo sapiens) CpG-island No: 21943
ttttttttttttattttagtttttggttttgtagaagtaaaatttggtgattttatgggttataaacgttcgttgtgtttggcgcgggatcgggggtatcgggggagtgaagggatgagttggtgtgcgagtgcggggatcggcgggtaggatatagggtaggggatttcgggaacgaggcggacggcggtcgcgggtcggaaggggacgtcgagcggtgcggcgcgtagcgtttttttttttttttttgttttttcgttttttttttcgcggttcgttgcgcgtatttattaatgaagaggatggggaaggtgatgaagagtaggaagacgtgcggtattacgttgagcgcgtttataaagtagtcgttgttgaggattttttggtttattcggtaggcggtcgagtggttttcgttgtcgtagaaggttaggggtatggcggcgcgggcgcgggttgggttcgggtttagttggtttcgttggtttcgcgcgtttgtcgcgtttttgttttttgtagtttcgtcgttcggttcggtcgt

SEQ ID NO: 21944 - DNA, 541 bp, Artificial Sequence
  chemically treated genomic DNA (Homo sapiens) CpG-island No: 21944
acgaccgaaccgaacgacgaaactacaaaaaacaaaaacgcgacaaacgcgcgaaaccaacgaaaccaactaaacccgaacccaacccgcgcccgcgccgccatacccctaaccttctacgacaacgaaaaccactcgaccgcctaccgaataaaccaaaaaatcctcaacaacgactactttataaacgcgctcaacgtaataccgcacgtcttcctactcttcatcaccttccccatcctcttcattaataaatacgcgcaacgaaccgcgaaaaaaaaaacgaaaaaacaaaaaaaaaaaaaaaaacgctacgcgccgcaccgctcgacgtccccttccgacccgcgaccgccgtccgcctcgttcccgaaatcccctaccctatatcctacccgccgatccccgcactcgcacaccaactcatcccttcactcccccgatacccccgatcccgcgccaaacacaacgaacgtttataacccataaaatcaccaaattttacttctacaaaaccaaaaactaaaataaaaaaaaaaaa

SEQ ID NO: 21945 - DNA, 609 bp, Artificial Sequence
  chemically treated genomic DNA (Homo sapiens) CpG-island No: 21945
tgagtttcgggaggggaggtggagggcgggggcggggaggggcgcgggaggggcgggggtttgtttcggtttcgttttttgcgtttcggtgtaggtcgggttttttttggcggttttcggtttcgttttttttttcgtgcgtttttttttcgtcgttttagatttttgtttagtttaggtcggttttcgcggatttacggacggatagatagacgggaggacggttagtcgcgagcgttcgggcggcgggagggggcggggaggcgacggtcgtggcgtgaggagtaggagtaggtgtagcggcggcggcgggcggggtcgggattcggcgcggagcgggagtcgcggcgcgggcgggcggtagggatcgggaggtcgcgattcggagttagtttcgtcgggtcgcgcgtaggttcggggagtcgcggttgagtcgggtggggtggtgattttagagaacgtaggattttaaggagatagagaggacgagagttggagggggattcggaaagcggcgggggcgtttcgggaggggtggagtaggatatagggggcgtatttggaggagagacggggcgggggtggttaggatttgagttggagtttggg

SEQ ID NO: 21946 - DNA, 609 bp, Artificial Sequence
  chemically treated genomic DNA (Homo sapiens) CpG-island No: 21946
cccaaactccaactcaaatcctaaccacccccgccccgtctctcctccaaatacgccccctatatcctactccacccctcccgaaacgcccccgccgctttccgaatccccctccaactctcgtcctctctatctccttaaaatcctacgttctctaaaatcaccaccccacccgactcaaccgcgactccccgaacctacgcgcgacccgacgaaactaactccgaatcgcgacctcccgatccctaccgcccgcccgcgccgcgactcccgctccgcgccgaatcccgaccccgcccgccgccgccgctacacctactcctactcctcacgccacgaccgtcgcctccccgccccctcccgccgcccgaacgctcgcgactaaccgtcctcccgtctatctatccgtccgtaaatccgcgaaaaccgacctaaactaaacaaaaatctaaaacgacgaaaaaaaaacgcacgaaaaaaaaaacgaaaccgaaaaccgccaaaaaaaacccgacctacaccgaaacgcaaaaaacgaaaccgaaacaaacccccgcccctcccgcgcccctccccgcccccgccctccacctcccctcccgaaactca

SEQ ID NO: 21947 - DNA, 609 bp, Artificial Sequence
  chemically treated genomic DNA (Homo sapiens) CpG-island No: 21947
tttaggttttagtttaggttttggttattttcgtttcgttttttttttaggtgcgttttttatgttttattttatttttttcggagcgttttcgtcgtttttcggatttttttttagttttcgttttttttgtttttttgggattttgcgttttttggagttattattttattcggtttaatcgcggtttttcggatttgcgcgcgattcggcggggttgatttcgagtcgcggtttttcggtttttgtcgttcgttcgcgtcgcggttttcgtttcgcgtcgggtttcggtttcgttcgtcgtcgtcgttgtatttgtttttgttttttacgttacggtcgtcgttttttcgttttttttcgtcgttcgggcgttcgcggttggtcgttttttcgtttgtttgttcgttcgtgggttcgcggagatcgatttgggttaggtaggggtttaggacggcgggaggggggcgtacgaggagaggaacggggtcggggatcgttagggggagttcgatttgtatcggagcgtagggggcggggtcggagtaagttttcgtttttttcgcgttttttttcgttttcgttttttattttttttttcgggattta

SEQ ID NO: 21948 - DNA, 609 bp, Artificial Sequence
  chemically treated genomic DNA (Homo sapiens) CpG-island No: 21948
taaatcccgaaaaaaaaaataaaaaacgaaaacgaaaaaaaacgcgaaaaaaacgaaaacttactccgaccccgccccctacgctccgatacaaatcgaactccccctaacgatccccgaccccgttcctctcctcgtacgcccccctcccgccgtcctaaacccctacctaacccaaatcgatctccgcgaacccacgaacgaacaaacaaacgaaaaaacgaccaaccgcgaacgcccgaacgacgaaaaaaaacgaaaaaacgacgaccgtaacgtaaaaaacaaaaacaaatacaacgacgacgacgaacgaaaccgaaacccgacgcgaaacgaaaaccgcgacgcgaacgaacgacaaaaaccgaaaaaccgcgactcgaaatcaaccccgccgaatcgcgcgcaaatccgaaaaaccgcgattaaaccgaataaaataataactccaaaaaacgcaaaatcccaaaaaaacaaaaaaaacgaaaactaaaaaaaaatccgaaaaacgacgaaaacgctccgaaaaaaataaaataaaacataaaaaacgcacctaaaaaaaaaacgaaacgaaaataaccaaaacctaaactaaaacctaaa

SEQ ID NO: 21949 - DNA, 1033 bp, Artificial Sequence
  chemically treated genomic DNA (Homo sapiens) CpG-island No: 21949
ttcgtttcgggttagcggtagtcgtattcgtttattattatgtttttatattgtcgtagtattacgttgtcgttgttgttaaagaagagtacggagatgggcgataggcgcgcgggtacgtagtagggtaggtcggcggttttcggggcggtcgcgtgtatgagcgcgcgtagtatagcgtggttgagcgtcggcggtttttcggatttcgatagcgcgacgggtagcgcgtattgattttggtagtagttggttaggaagtcgcgcggcgcgatgatttagcggtgttagtttatttcgcggaagtttacgtatagtcgtcgcgcgcgataagcgttttcggggtcgtcgtttaatacgggttcggcgtcgcgtcgcggtcgggttagggggtggtataggcgcgggtcgagggttattagtagtagcgaggtttcggttaggcgcgcgtaggcggtaggggttcgggggcgtagcgttagcgttaggcggaggttgcgcggttatgaggcgttgcgagtttaagcggcgtttagtagtttcgcgcgtattggcggttttagggcgggtattaattggcggagtagtatcggttcggggttcgcgttcgcgttttggttcgtttgcgttacgtttagtttttagtcgtttttcggggttgtcgtcgtcgtcgtcgcgaaacgtagttttaggcgggttcggttcgggcgtttagcgggttttatagtcgataggtcgaagacgattgtttatttagggtaatgtttcgcggtcgaggtaggtttcgaggttcgggtgggcgtatttggggaggtaggaataggaattcggttcgcgttgcgttttcggtttgtttatggggtttcggttagggatagggaggaaggtgaacgttggggttcggggcgtatcgtttgtgggaagggtgtgaagcggcggggtgggttgatggagtgggggtagggtatgagttttaaggaaggcgttttgcggggtgcggcggggggggtgggttgttttcggcggggggtat

SEQ ID NO: 21950 - DNA, 1033 bp, Artificial Sequence
  chemically treated genomic DNA (Homo sapiens) CpG-island No: 21950
ataccccccgccgaaaacaacccaccccccccgccgcaccccgcaaaacgccttccttaaaactcataccctacccccactccatcaacccaccccgccgcttcacacccttcccacaaacgatacgccccgaaccccaacgttcaccttcctccctatccctaaccgaaaccccataaacaaaccgaaaacgcaacgcgaaccgaattcctattcctacctccccaaatacgcccacccgaacctcgaaacctacctcgaccgcgaaacattaccctaaataaacaatcgtcttcgacctatcgactataaaacccgctaaacgcccgaaccgaacccgcctaaaactacgtttcgcgacgacgacgacgacaaccccgaaaaacgactaaaaactaaacgtaacgcaaacgaaccaaaacgcgaacgcgaaccccgaaccgatactactccgccaattaatacccgccctaaaaccgccaatacgcgcgaaactactaaacgccgcttaaactcgcaacgcctcataaccgcgcaacctccgcctaacgctaacgctacgcccccgaacccctaccgcctacgcgcgcctaaccgaaacctcgctactactaataaccctcgacccgcgcctataccaccccctaacccgaccgcgacgcgacgccgaacccgtattaaacgacgaccccgaaaacgcttatcgcgcgcgacgactatacgtaaacttccgcgaaataaactaacaccgctaaatcatcgcgccgcgcgacttcctaaccaactactaccaaaatcaatacgcgctacccgtcgcgctatcgaaatccgaaaaaccgccgacgctcaaccacgctatactacgcgcgctcatacacgcgaccgccccgaaaaccgccgacctaccctactacgtacccgcgcgcctatcgcccatctccgtactcttctttaacaacaacgacaacgtaatactacgacaatataaaaacataataataaacgaatacgactaccgctaacccgaaacgaa

SEQ ID NO: 21951 - DNA, 1033 bp, Artificial Sequence
  chemically treated genomic DNA (Homo sapiens) CpG-island No: 21951
atgtttttcgtcgagggtagtttatttttttcgtcgtatttcgtagggcgttttttttggaatttatgttttgtttttattttattagtttatttcgtcgttttatattttttttatagacggtgcgtttcgagttttagcgtttatttttttttttgtttttaatcgagattttatgggtaggtcggggacgtagcgcgagtcgagtttttgtttttatttttttaggtgcgtttattcgggtttcggagtttgtttcggtcgcggggtattgttttgagtggatagtcgttttcgatttgtcggttgtggaattcgttgagcgttcgagtcgggttcgtttggagttgcgtttcgcggcggcggcggcggtagtttcggagggcggttgggagttgagcgtggcgtaagcgggttagggcgcgggcgcggatttcgggtcggtgttgtttcgttagttggtgttcgttttggggtcgttagtgcgcgcggagttgttgggcgtcgtttgggttcgtaacgttttatggtcgcgtagttttcgtttggcgttggcgttacgttttcgggtttttgtcgtttgcgcgcgtttggtcgaggtttcgttgttgttggtgattttcgattcgcgtttgtgttattttttggttcggtcgcggcgcgacgtcgaattcgtgttgggcggcggtttcgggggcgtttgtcgcgcgcggcggttgtacgtgagttttcgcgaggtgggttggtatcgttgggttatcgcgtcgcgcggttttttggttaattattgttagggttagtgcgcgttgttcgtcgcgttgtcggggttcggggggtcgtcggcgtttaattacgttgtgttgcgcgcgtttatgtacgcggtcgtttcgggagtcgtcgatttgttttgttgcgtgttcgcgcgtttgtcgtttattttcgtgtttttttttgataatagcgataacgtggtgttgcggtagtatgaggatatggtggtggacgagtgcggttgtcgttaattcggggcggg

SEQ ID NO: 21952 - DNA, 1033 bp, Artificial Sequence
  chemically treated genomic DNA (Homo sapiens) CpG-island No: 21952
cccgccccgaattaacgacaaccgcactcgtccaccaccatatcctcatactaccgcaacaccacgttatcgctattatcaaaaaaaaacacgaaaataaacgacaaacgcgcgaacacgcaacaaaacaaatcgacgactcccgaaacgaccgcgtacataaacgcgcgcaacacaacgtaattaaacgccgacgaccccccgaaccccgacaacgcgacgaacaacgcgcactaaccctaacaataattaaccaaaaaaccgcgcgacgcgataacccaacgataccaacccacctcgcgaaaactcacgtacaaccgccgcgcgcgacaaacgcccccgaaaccgccgcccaacacgaattcgacgtcgcgccgcgaccgaaccaaaaaataacacaaacgcgaatcgaaaatcaccaacaacaacgaaacctcgaccaaacgcgcgcaaacgacaaaaacccgaaaacgtaacgccaacgccaaacgaaaactacgcgaccataaaacgttacgaacccaaacgacgcccaacaactccgcgcgcactaacgaccccaaaacgaacaccaactaacgaaacaacaccgacccgaaatccgcgcccgcgccctaacccgcttacgccacgctcaactcccaaccgccctccgaaactaccgccgccgccgccgcgaaacgcaactccaaacgaacccgactcgaacgctcaacgaattccacaaccgacaaatcgaaaacgactatccactcaaaacaataccccgcgaccgaaacaaactccgaaacccgaataaacgcacctaaaaaaataaaaacaaaaactcgactcgcgctacgtccccgacctacccataaaatctcgattaaaaacaaaaaaaaaaataaacgctaaaactcgaaacgcaccgtctataaaaaaaatataaaacgacgaaataaactaataaaataaaaacaaaacataaattccaaaaaaaacgccctacgaaatacgacgaaaaaaataaactaccctcgacgaaaaacat

SEQ ID NO: 21953 - DNA, 581 bp, Artificial Sequence
  chemically treated genomic DNA (Homo sapiens) CpG-island No: 21953
gattgcgggattcgtagattgagtttttaagcgtttcgtttcgtcgcgttttttttcgcgggttttatcgcggattcgtttttgcgcgtttcgggttaggagtttttagttgtaggattaggtacgtgcgattttacgtgagtttttcggtcggagcgtagatgggaagtgcgtatgcgtttatcgtttggaaagtaggttagatttttttttttacgtgatttgttttttttagttattttcggcgttttttcgtcggggcgtagtcgggatgcgttcggtagttaacgtgacggggttgggcgcgggcggtttcgcgagcgtttagcgttcgcgaggatttgtcggttttttttatattcgagcgtttcgtttagaagtcgggcgggtaaaagggagcgtttcgggaagtatttgggagtcgggttggaaatgaatggggttcggaagcgagtttaaatcgttgatatttggtatcgggttgcgtttatttttatgttttttaaggtagttttgtttgtaagaagggaacgcgtatcgttttttagtagattatatcgatcgtttgtacgtttgtattt

SEQ ID NO: 21954 - DNA, 581 bp, Artificial Sequence
  chemically treated genomic DNA (Homo sapiens) CpG-island No: 21954
aaatacaaacgtacaaacgatcgatataatctactaaaaaacgatacgcgttcccttcttacaaacaaaactaccttaaaaaacataaaaataaacgcaacccgataccaaatatcaacgatttaaactcgcttccgaaccccattcatttccaacccgactcccaaatacttcccgaaacgctcccttttacccgcccgacttctaaacgaaacgctcgaatataaaaaaaaccgacaaatcctcgcgaacgctaaacgctcgcgaaaccgcccgcgcccaaccccgtcacgttaactaccgaacgcatcccgactacgccccgacgaaaaaacgccgaaaataactaaaaaaaacaaatcacgtaaaaaaaaaaatctaacctactttccaaacgataaacgcatacgcacttcccatctacgctccgaccgaaaaactcacgtaaaatcgcacgtacctaatcctacaactaaaaactcctaacccgaaacgcgcaaaaacgaatccgcgataaaacccgcgaaaaaaaacgcgacgaaacgaaacgcttaaaaactcaatctacgaatcccgcaatc

SEQ ID NO: 21955 - DNA, 581 bp, Artificial Sequence
  chemically treated genomic DNA (Homo sapiens) CpG-island No: 21955
gaatgtaaacgtgtaaacgatcggtgtgatttattgaaaggcgatgcgcgttttttttttgtaggtagaattgttttaggaagtatgaaagtggacgtagttcggtgttaggtgttagcgatttgagttcgttttcgggttttatttatttttagttcggtttttagatatttttcgaggcgtttttttttgttcgttcgatttttgagcggagcgttcgggtgtgaggagaatcggtaaattttcgcgggcgttgggcgttcgcggagtcgttcgcgtttagtttcgttacgttggttgtcgagcgtatttcggttgcgtttcggcggggaggcgtcgagggtagttaaggggagtaggttacgtgagaggaggagtttgatttattttttaggcggtaggcgtatgcgtattttttatttgcgtttcggtcgggaggtttacgtggaatcgtacgtgtttggttttgtagttaggggtttttggttcggggcgcgtaggggcgggttcgcggtgggattcgcggagaggggcgcggcggggcggagcgtttggagatttagtttgcgggtttcgtaatt

SEQ ID NO: 21956 - DNA, 581 bp, Artificial Sequence
  chemically treated genomic DNA (Homo sapiens) CpG-island No: 21956
aattacgaaacccgcaaactaaatctccaaacgctccgccccgccgcgcccctctccgcgaatcccaccgcgaacccgcccctacgcgccccgaaccaaaaacccctaactacaaaaccaaacacgtacgattccacgtaaacctcccgaccgaaacgcaaataaaaaatacgcatacgcctaccgcctaaaaaataaatcaaactcctcctctcacgtaacctactccccttaactaccctcgacgcctccccgccgaaacgcaaccgaaatacgctcgacaaccaacgtaacgaaactaaacgcgaacgactccgcgaacgcccaacgcccgcgaaaatttaccgattctcctcacacccgaacgctccgctcaaaaatcgaacgaacaaaaaaaaacgcctcgaaaaatatctaaaaaccgaactaaaaataaataaaacccgaaaacgaactcaaatcgctaacacctaacaccgaactacgtccactttcatacttcctaaaacaattctacctacaaaaaaaaaacgcgcatcgcctttcaataaatcacaccgatcgtttacacgtttacattc

SEQ ID NO: 21957 - DNA, 730 bp, Artificial Sequence
  chemically treated genomic DNA (Homo sapiens) CpG-island No: 21957
gtcgggtcgatttcgggggtatttcgttttttgttttttttttttataaatttacgagttttcggagatgtttaggtagaggtggtcgaggagaggtcgcgggataagtacgcggagcgttatcgtttcgtatttgtcgaggagatttcgaggtgcgaggagggatttcggggcggcgttttttttgttttgtcgcggcggcggttcgggttttgcggggttgggggggtcggggggcggcgggagagcggagggcgggttttgggtttacgtgttcgttgtttagtttttaattcggtttcgtcgtttcgtcgggatggtcgcggtcggagcgcgttgagtttcggcgtcgtttttgtcgtttttattttttcgcgattttcgttcggtttcgcgttttcgtttcggtttcgtagttggcgtttttttattttcgtttttgttttcgtttttttcgcgtcgttggtagtcgtagttttcggatcgggaggaatgagcgagttatgaggttgttgcggcgttgggcgttcgcggttttgttgttgtcgttgttttttacgttcggtgagtgattttcgttcggtttcggcgttttttttttgttttcgtttcgggatgtgcggcgtttgttgttgtagttatttttttttgtagtgttcggggtgatagtcggttcggagcgcgggagggtaggggagcgggagaggagggaaggtgcgtttatttattt

SEQ ID NO: 21958 - DNA, 730 bp, Artificial Sequence
  chemically treated genomic DNA (Homo sapiens) CpG-island No: 21958
aaataaataaacgcaccttccctcctctcccgctcccctaccctcccgcgctccgaaccgactatcaccccgaacactacaaaaaaaaataactacaacaacaaacgccgcacatcccgaaacgaaaacaaaaaaaaaacgccgaaaccgaacgaaaatcactcaccgaacgtaaaaaacaacgacaacaacaaaaccgcgaacgcccaacgccgcaacaacctcataactcgctcattcctcccgatccgaaaactacgactaccaacgacgcgaaaaaaacgaaaacaaaaacgaaaataaaaaaacgccaactacgaaaccgaaacgaaaacgcgaaaccgaacgaaaatcgcgaaaaaataaaaacgacaaaaacgacgccgaaactcaacgcgctccgaccgcgaccatcccgacgaaacgacgaaaccgaattaaaaactaaacaacgaacacgtaaacccaaaacccgccctccgctctcccgccgccccccgacccccccaaccccgcaaaacccgaaccgccgccgcgacaaaacaaaaaaaacgccgccccgaaatccctcctcgcacctcgaaatctcctcgacaaatacgaaacgataacgctccgcgtacttatcccgcgacctctcctcgaccacctctacctaaacatctccgaaaactcgtaaatttataaaaaaaaaaaacaaaaaacgaaatacccccgaaatcgacccgac

SEQ ID NO: 21959 - DNA, 730 bp, Artificial Sequence
  chemically treated genomic DNA (Homo sapiens) CpG-island No: 21959
aggtgggtggacgtatttttttttttttttcgtttttttattttttcgcgtttcggatcggttgttatttcgagtattgtaggaaaaggtggttgtagtagtaagcgtcgtatatttcggggcgggggtagggagggggcgtcggggtcgggcgggggttatttatcgggcgtggggagtagcgatagtagtagagtcgcgaacgtttagcgtcgtagtagttttatggttcgtttatttttttcggttcgggggttgcggttgttagcggcgcggggagggcgggagtagggacgggggtggggaggcgttagttgcggagtcggggcgggggcgcggggtcgggcgggggtcgcggagaggtgggggcggtagggacggcgtcggggtttagcgcgtttcggtcgcggttatttcggcggggcggcggggtcgggttaagagttgagtagcgagtacgtgagtttagggttcgtttttcgttttttcgtcgtttttcggtttttttagtttcgtagggttcgggtcgtcgtcgcggtaggataaaagaggcgtcgtttcggggttttttttcgtatttcgaagttttttcggtaggtgcggggcggtggcgtttcgcgtatttatttcgcggttttttttcggttatttttgtttgagtattttcgaggattcgtagatttgtaggggagggaagtaggggacggggtattttcggggtcgattcggt

SEQ ID NO: 21960 - DNA, 730 bp, Artificial Sequence
  chemically treated genomic DNA (Homo sapiens) CpG-island No: 21960
accgaatcgaccccgaaaataccccgtcccctacttccctcccctacaaatctacgaatcctcgaaaatactcaaacaaaaataaccgaaaaaaaaccgcgaaataaatacgcgaaacgccaccgccccgcacctaccgaaaaaacttcgaaatacgaaaaaaaaccccgaaacgacgcctcttttatcctaccgcgacgacgacccgaaccctacgaaactaaaaaaaccgaaaaacgacgaaaaaacgaaaaacgaaccctaaactcacgtactcgctactcaactcttaacccgaccccgccgccccgccgaaataaccgcgaccgaaacgcgctaaaccccgacgccgtccctaccgcccccacctctccgcgacccccgcccgaccccgcgcccccgccccgactccgcaactaacgcctccccacccccgtccctactcccgccctccccgcgccgctaacaaccgcaacccccgaaccgaaaaaaataaacgaaccataaaactactacgacgctaaacgttcgcgactctactactatcgctactccccacgcccgataaataacccccgcccgaccccgacgccccctccctacccccgccccgaaatatacgacgcttactactacaaccaccttttcctacaatactcgaaataacaaccgatccgaaacgcgaaaaaataaaaaaacgaaaaaaaaaaaaaaatacgtccacccacct

SEQ ID NO: 21961 - DNA, 1292 bp, Artificial Sequence
  chemically treated genomic DNA (Homo sapiens) CpG-island No: 21961
ttagttttcgaacgaatttttttttaattttcgggaggtaggagttttagcggggagatgcgggaagttttagacgagttcgtacgtcgtcggagacgtagggatcgaggtcggggagataaagagtagttcgcgaagagttcgggcggcgaggggcggttcggtttcgttttgcgtttttaatcgttcgggtagttgtcggtatcgtcggggcgtcgtcgagtgcgcgtcgtttttgttcgggtttttcgatcgtcgttcgatattttcgcggtttaggatattttcgagtcgtttttttttcgatttgggagtcgcgcgtttggggataaagagggagggtgcgtcggggatagtggtaggacgcgggtcggcgacgttttttcggattcggcgggaatttttcggcggcgtttttttttttttttcgttttggtcgcgttttttttcggattttcggaggtttttttcggttttttttcgggttttttaagagttttttcgtttttttttgggatttcgtttttggttcgtttttttttagtcggttttgcggtcgttttttattcggcggcgggttttttcggagtcgtttttttcgtcgggtttcggttcgtttcgtcggtcgcggttttatgtgtttcgcgtcgttatcgtttttattttcgttttttttttatttttttcgtcgttgtcgttttcgttttagtttttagtcgaggtagaagtcgttttcgtcgttgtcgtcgtcgtcgtcgtttttcgttttcgtcgtcgcgattcgcgggaaggcgtttgcgtattgcgcgttgcggtgggggcgggggcgtttcgtcgcggttcgggagcggggggcgcgcggtacgtggcgttcgagtgggaggggggcgttttagaacgcgcgggaagcgacgcgagcgttaatttttcgcggtcgagttttcgtcgttttttcggatagttcgggacgcggcggaggcgcggcgcgcgtgggagttattcgcgtggagtttggatttcgggtgggcgtagatttcgtttcggatagtttatttttttaagttgattttcgggcgagagtttttcgttagtcgcgttttagtttgagcgggtcgttaacggcgtcgtgggttttcgttttatttgggtattttgggttggtttagcgggtttagagttgttttttgcgcgtttcgtcgaggttttggtttattgtagtacgggatgttaatgtttttttttaggttttgttttataatttttcgaggatttggcgggttttgcgtggattt

SEQ ID NO: 21962 - DNA, 1292 bp, Artificial Sequence
  chemically treated genomic DNA (Homo sapiens) CpG-island No: 21962
aaatccacgcaaaacccgccaaatcctcgaaaaattataaaacaaaacctaaaaaaaaacattaacatcccgtactacaataaaccaaaacctcgacgaaacgcgcaaaaaacaactctaaacccgctaaaccaacccaaaatacccaaataaaacgaaaacccacgacgccgttaacgacccgctcaaactaaaacgcgactaacgaaaaactctcgcccgaaaatcaacttaaaaaaataaactatccgaaacgaaatctacgcccacccgaaatccaaactccacgcgaataactcccacgcgcgccgcgcctccgccgcgtcccgaactatccgaaaaaacgacgaaaactcgaccgcgaaaaattaacgctcgcgtcgcttcccgcgcgttctaaaacgcccccctcccactcgaacgccacgtaccgcgcgccccccgctcccgaaccgcgacgaaacgcccccgcccccaccgcaacgcgcaatacgcaaacgccttcccgcgaatcgcgacgacgaaaacgaaaaacgacgacgacgacgacaacgacgaaaacgacttctacctcgactaaaaactaaaacgaaaacgacaacgacgaaaaaaataaaaaaaaaacgaaaataaaaacgataacgacgcgaaacacataaaaccgcgaccgacgaaacgaaccgaaacccgacgaaaaaaacgactccgaaaaaacccgccgccgaataaaaaacgaccgcaaaaccgactaaaaaaaaacgaaccaaaaacgaaatcccaaaaaaaaacgaaaaaactcttaaaaaacccgaaaaaaaaccgaaaaaaacctccgaaaatccgaaaaaaaacgcgaccaaaacgaaaaaaaaaaaaaaacgccgccgaaaaattcccgccgaatccgaaaaaacgtcgccgacccgcgtcctaccactatccccgacgcaccctccctctttatccccaaacgcgcgactcccaaatcgaaaaaaaaacgactcgaaaatatcctaaaccgcgaaaatatcgaacgacgatcgaaaaacccgaacaaaaacgacgcgcactcgacgacgccccgacgataccgacaactacccgaacgattaaaaacgcaaaacgaaaccgaaccgcccctcgccgcccgaactcttcgcgaactactctttatctccccgacctcgatccctacgtctccgacgacgtacgaactcgtctaaaacttcccgcatctccccgctaaaactcctacctcccgaaaattaaaaaaaaattcgttcgaaaactaa

SEQ ID NO: 21963 - DNA, 1292 bp, Artificial Sequence
  chemically treated genomic DNA (Homo sapiens) CpG-island No: 21963
agatttacgtagggttcgttagattttcgaggaattgtagagtagaatttgggaggagatattagtatttcgtgttataatggattaaggtttcggcggagcgcgtagaagataattttgggttcgttaaattaatttaggatatttaggtaaggcgagaatttacggcgtcgttagcggttcgtttaaattgaggcgcggttggcgggggattttcgttcgaaaattagtttggaagaatgaattgttcggagcgaagtttgcgtttattcggggtttagattttacgcgggtgatttttacgcgcgtcgcgttttcgtcgcgtttcggattattcgagagagcggcgaggattcgatcgcggaaagttggcgttcgcgtcgtttttcgcgcgttttggggcgttttttttttattcgagcgttacgtgtcgcgcgtttttcgttttcgggtcgcggcgggacgttttcgtttttatcgtagcgcgtagtgcgtaggcgttttttcgcgggtcgcggcggcgggagcgggaggcggcggcggcggcggtagcggcgggagcggtttttgtttcggttggagattgaggcgaaggcggtagcggcggaggaggtggaggagaggcgagggtgaaggcgatggcgacgcggggtatatgaggtcgcgatcggcgggacgggtcgaggttcggcggaggaggcggtttcgggggaattcgtcgtcgggtgaggggcggtcgtagggtcggttgaggagaagcgggttaggggcggggttttagggggaggcgggagaatttttggggagttcggggaggggtcgaggagaattttcggaggttcggggaggagcgcggttagagcgggagaaggaggggggcgtcgtcgaggggttttcgtcgagttcggaggggcgtcgtcggttcgcgttttgttattgttttcggcgtattttttttttttgtttttaggcgcgcggtttttaaatcgggagggaaacggttcgggggtgttttgggtcgcggaggtgtcgggcgacggtcggggagttcggatagaagcggcgcgtattcggcggcgtttcggcggtgtcgataattattcgggcggttaggggcgtagggcggagtcgggtcgtttttcgtcgttcgggtttttcgcgggttgttttttgttttttcgatttcgatttttgcgttttcggcggcgtgcgggttcgtttgaggtttttcgtattttttcgttggaatttttgtttttcgggggttagaggagggttcgttcgagggttgg

SEQ ID NO: 21964 - DNA, 1292 bp, Artificial Sequence
  chemically treated genomic DNA (Homo sapiens) CpG-island No: 21964
ccaaccctcgaacgaaccctcctctaacccccgaaaaacaaaaattccaacgaaaaaatacgaaaaacctcaaacgaacccgcacgccgccgaaaacgcaaaaatcgaaatcgaaaaaacaaaaaacaacccgcgaaaaacccgaacgacgaaaaacgacccgactccgccctacgcccctaaccgcccgaataattatcgacaccgccgaaacgccgccgaatacgcgccgcttctatccgaactccccgaccgtcgcccgacacctccgcgacccaaaacacccccgaaccgtttccctcccgatttaaaaaccgcgcgcctaaaaacaaaaaaaaaaaatacgccgaaaacaataacaaaacgcgaaccgacgacgcccctccgaactcgacgaaaacccctcgacgacgcccccctccttctcccgctctaaccgcgctcctccccgaacctccgaaaattctcctcgacccctccccgaactccccaaaaattctcccgcctccccctaaaaccccgcccctaacccgcttctcctcaaccgaccctacgaccgcccctcacccgacgacgaattcccccgaaaccgcctcctccgccgaacctcgacccgtcccgccgatcgcgacctcatataccccgcgtcgccatcgccttcaccctcgcctctcctccacctcctccgccgctaccgccttcgcctcaatctccaaccgaaacaaaaaccgctcccgccgctaccgccgccgccgccgcctcccgctcccgccgccgcgacccgcgaaaaaacgcctacgcactacgcgctacgataaaaacgaaaacgtcccgccgcgacccgaaaacgaaaaacgcgcgacacgtaacgctcgaataaaaaaaaaacgccccaaaacgcgcgaaaaacgacgcgaacgccaactttccgcgatcgaatcctcgccgctctctcgaataatccgaaacgcgacgaaaacgcgacgcgcgtaaaaatcacccgcgtaaaatctaaaccccgaataaacgcaaacttcgctccgaacaattcattcttccaaactaattttcgaacgaaaatcccccgccaaccgcgcctcaatttaaacgaaccgctaacgacgccgtaaattctcgccttacctaaatatcctaaattaatttaacgaacccaaaattatcttctacgcgctccgccgaaaccttaatccattataacacgaaatactaatatctcctcccaaattctactctacaattcctcgaaaatctaacgaaccctacgtaaatct

SEQ ID NO: 21965 - DNA, 1047 bp, Artificial Sequence
  chemically treated genomic DNA (Homo sapiens) CpG-island No: 21965
tttcgtcgtttcggtttcgggtaggcgacgagagcgtttttttttagtcgtcgtcgtcgtcgtcgtcgtcgtttcgggtttaacggtcggttttttttcgtttttcggtttcggtcgtcgtcgtcgtttttttttttggttcgttcgttttttttttttgtcggttgcgttttcggttcggttttttttcgtttcgggtttcgtacggcgtttatatttcgggcggggaaggcgtttcgttttcgttttcggaggtcggtcgtcgtcgtcgtttcggttttatttacgtcgcgttcgggtcgcgtcgtttcgttcgcgtcgtcgcgtttacgttttttgtcgtatttttcgttttttgtcgtcgtcgttgtttcgcgggtcggcgggcggcgagggggtttcgggggtcgggcgtacgggtttcgggcgcggaggaggttttttgttgtttttgtttttcgttcgttttttaaattttttagtttcgggtcgttcgtatttcgtcgtttaggcggggggattaggaggttaatttcggtcggcggcgtgcgttttttttttttcgtcgttcgcggttatttgggagttgtcggttttcgtattaaggacgtcgcggtcgttcggtcggagcgcggttcggcgtagatttcgggcgagtaggcgggtcgtgcgtttggtagcgttcgggtcggtttcggtttcgtcgttttgtagcgcgtttttttcgtcgttttcgttttttcgcgttcgcgtaatggtacgggtttgcgttgtcggaattgtggagtcgttgttttggaaatcgagttcggtttggtttcgtggtttttgatttttaattttgtgggcgttacgggggagcggtagttgttagtagagcgtttttttattcggtttttttttattcggtagttcgttattgagtcgttttttttttgggttacgttttagtttcgttttttttttttttttgttgttgaagtttgcgtagtttttttttatagtttatttttgtaattcgttatttttattttatatttttttttt

SEQ ID NO: 21966 - DNA, 1047 bp, Artificial Sequence
  chemically treated genomic DNA (Homo sapiens) CpG-island No: 21966
aaaaaaaaaatataaaataaaaataacgaattacaaaaataaactataaaaaaaaactacgcaaacttcaacaacaaaaaaaaaaaaaaaacgaaactaaaacgtaacccaaaaaaaaaacgactcaataacgaactaccgaataaaaaaaaaccgaataaaaaaacgctctactaacaactaccgctcccccgtaacgcccacaaaattaaaaatcaaaaaccacgaaaccaaaccgaactcgatttccaaaacaacgactccacaattccgacaacgcaaacccgtaccattacgcgaacgcgaaaaaacgaaaacgacgaaaaaaacgcgctacaaaacgacgaaaccgaaaccgacccgaacgctaccaaacgcacgacccgcctactcgcccgaaatctacgccgaaccgcgctccgaccgaacgaccgcgacgtccttaatacgaaaaccgacaactcccaaataaccgcgaacgacgaaaaaaaaaaaacgcacgccgccgaccgaaattaacctcctaatccccccgcctaaacgacgaaatacgaacgacccgaaactaaaaaatttaaaaaacgaacgaaaaacaaaaacaacaaaaaacctcctccgcgcccgaaacccgtacgcccgacccccgaaaccccctcgccgcccgccgacccgcgaaacaacgacgacgacaaaaaacgaaaaatacgacaaaaaacgtaaacgcgacgacgcgaacgaaacgacgcgacccgaacgcgacgtaaataaaaccgaaacgacgacgacgaccgacctccgaaaacgaaaacgaaacgccttccccgcccgaaatataaacgccgtacgaaacccgaaacgaaaaaaaaccgaaccgaaaacgcaaccgacaaaaaaaaaaaacgaacgaaccaaaaaaaaaaacgacgacgacgaccgaaaccgaaaaacgaaaaaaaaccgaccgttaaacccgaaacgacgacgacgacgacgacgacgactaaaaaaaaacgctctcgtcgcctacccgaaaccgaaacgacgaaa

SEQ ID NO: 21967 - DNA, 1047 bp, Artificial Sequence
  chemically treated genomic DNA (Homo sapiens) CpG-island No: 21967
gggagaggggtgtgaaataagggtaacgaattgtaggggtaaattgtgggaaggggttgcgtagattttaatagtaaagaaaaagaaggaacggggttggggcgtggtttagagagggaacggtttaataacgggttatcgggtgaaaagaagtcgggtggggaggcgttttgttgatagttgtcgttttttcgtggcgtttatagggttaaaaattaggggttacgggattaggtcgaattcggtttttagggtaacggttttatagtttcggtagcgtaggttcgtattattgcgcgggcgcgggggagcgggagcggcggaggggacgcgttgtagggcggcggagtcggggtcggttcgggcgttattaaacgtacggttcgtttgttcgttcggggtttgcgtcgagtcgcgtttcggtcggacggtcgcggcgtttttggtgcgggggtcggtagtttttaagtggtcgcggacggcgggggagaaggaacgtacgtcgtcggtcgggattggttttttggttttttcgtttgggcggcggagtgcgggcggttcggggttgggaggtttgaaaagcgggcgagagataaaggtagtaggaagtttttttcgcgttcggagttcgtgcgttcggttttcggggttttttcgtcgttcgtcggttcgcggagtagcggcggcggtaggaggcggaggatgcggtagggggcgtgggcgcggcggcgcgggcggagcggcgcggttcgggcgcggcgtgggtagagtcgaggcggcggcggcggtcggttttcgggagcgagagcgaggcgtttttttcgttcgggatgtgagcgtcgtgcggagttcggggcgggggagggtcgggtcggaggcgtagtcggtaggaaggaaggacggacggattaggaggaggagcggcggcggcggtcggagtcggaaggcggggaggggtcggtcgttgggttcgaggcggcggcggcggcggcggcggcggttggggagaagcgttttcgtcgtttgttcgaggtcggagcggcgggg

SEQ ID NO: 21968 - DNA, 1047 bp, Artificial Sequence
  chemically treated genomic DNA (Homo sapiens) CpG-island No: 21968
ccccgccgctccgacctcgaacaaacgacgaaaacgcttctccccaaccgccgccgccgccgccgccgccgcctcgaacccaacgaccgacccctccccgccttccgactccgaccgccgccgccgctcctcctcctaatccgtccgtccttccttcctaccgactacgcctccgacccgaccctcccccgccccgaactccgcacgacgctcacatcccgaacgaaaaaaacgcctcgctctcgctcccgaaaaccgaccgccgccgccgcctcgactctacccacgccgcgcccgaaccgcgccgctccgcccgcgccgccgcgcccacgccccctaccgcatcctccgcctcctaccgccgccgctactccgcgaaccgacgaacgacgaaaaaaccccgaaaaccgaacgcacgaactccgaacgcgaaaaaaacttcctactacctttatctctcgcccgcttttcaaacctcccaaccccgaaccgcccgcactccgccgcccaaacgaaaaaaccaaaaaaccaatcccgaccgacgacgtacgttccttctcccccgccgtccgcgaccacttaaaaactaccgacccccgcaccaaaaacgccgcgaccgtccgaccgaaacgcgactcgacgcaaaccccgaacgaacaaacgaaccgtacgtttaataacgcccgaaccgaccccgactccgccgccctacaacgcgtcccctccgccgctcccgctcccccgcgcccgcgcaataatacgaacctacgctaccgaaactataaaaccgttaccctaaaaaccgaattcgacctaatcccgtaacccctaatttttaaccctataaacgccacgaaaaaacgacaactatcaacaaaacgcctccccacccgacttcttttcacccgataacccgttattaaaccgttccctctctaaaccacgccccaaccccgttccttctttttctttactattaaaatctacgcaaccccttcccacaatttacccctacaattcgttacccttatttcacacccctctccc

SEQ ID NO: 21969 - DNA, 860 bp, Artificial Sequence
  chemically treated genomic DNA (Homo sapiens) CpG-island No: 21969
tttttcgtcgcgaaaggcgaggcgaggggaatagcgggcgtcggattttttcgatagcggtcgtaaggagggcggttttaggtttttatacggtcgatttttaggttaaggcgcgtcgggcggtaggttagagttaggaattaagttgcgggtcgggtcgagagcgcgttttttcgttcgcgttagggatattcgttttttagtttttattttttttcgattttaagttttttttttgcgtttaggaaacggcgtttatattttagagatttttattcggagttcgtcgtcgttttatcgcgtgtttcggattttttgggagttatcgttgaggggaggggggaggaggggggaacggaggagggagggggttaagttcggtgtagtcgtcgtcgttgtcgtcgtcgcgatgtcgtttttggaatcgcgttttcgtcgtcgcgatagcgatcgtcgtcgtcgcgttttttcgtttttacgatcgtacgtcgtcgtgacgcgtatcgtacgaggcggttcgagttaataagattatacgtcgtgcgtagtcgcgttgttttaaatcggaagtcgtttttttgatcgttttaaaatttgggtgtatcgtgggagttgtggttcggttaggaatttagcgaaaattatattgggtgttgagggtcggaggagcgtgcgttttttaggcgtttatataatttttcggagtttttttttttatcgaaaaaggaagtaatttggagttgaggaggagggggtcgtttcggttcgcggatgtttttcgtagtttttatggatattggttatatattttgggtaagagttagaatttgaggatttaggttggatcgtgtgtttttgtt

SEQ ID NO: 21970 - DNA, 860 bp, Artificial Sequence
  chemically treated genomic DNA (Homo sapiens) CpG-island No: 21970
aacaaaaacacacgatccaacctaaatcctcaaattctaactcttacccaaaatatataaccaatatccataaaaactacgaaaaacatccgcgaaccgaaacgaccccctcctcctcaactccaaattacttcctttttcgataaaaaaaaaaactccgaaaaattatataaacgcctaaaaaacgcacgctcctccgaccctcaacacccaatataattttcgctaaattcctaaccgaaccacaactcccacgatacacccaaattttaaaacgatcaaaaaaacgacttccgatttaaaacaacgcgactacgcacgacgtataatcttattaactcgaaccgcctcgtacgatacgcgtcacgacgacgtacgatcgtaaaaacgaaaaaacgcgacgacgacgatcgctatcgcgacgacgaaaacgcgattccaaaaacgacatcgcgacgacgacaacgacgacgactacaccgaacttaaccccctccctcctccgttcccccctcctcccccctcccctcaacgataactcccaaaaaatccgaaacacgcgataaaacgacgacgaactccgaataaaaatctctaaaatataaacgccgtttcctaaacgcaaaaaaaaaacttaaaatcgaaaaaaaataaaaactaaaaaacgaatatccctaacgcgaacgaaaaaacgcgctctcgacccgacccgcaacttaattcctaactctaacctaccgcccgacgcgccttaacctaaaaatcgaccgtataaaaacctaaaaccgccctccttacgaccgctatcgaaaaaatccgacgcccgctattcccctcgcctcgcctttcgcgacgaaaaa

SEQ ID NO: 21971 - DNA, 860 bp, Artificial Sequence
  chemically treated genomic DNA (Homo sapiens) CpG-island No: 21971
ggtagagatatacgatttagtttaaatttttaaattttggtttttgtttaaagtgtgtagttagtatttatagagattgcgaaaagtattcgcgagtcggggcggtttttttttttttagttttaaattgttttttttttcggtgggagaaaaaatttcgaggagttgtgtgagcgtttaaggagcgtacgttttttcggtttttaatatttagtatagttttcgttaagtttttggtcgaattatagtttttacgatgtatttaggttttagagcggttagaggggcggttttcggtttaggatagcgcggttgcgtacggcgtgtggttttattggttcgaatcgtttcgtgcgatgcgcgttacggcgacgtgcggtcgtgggggcggggagacgcggcggcggcggtcgttgtcgcggcggcgagagcgcgattttagaagcggtatcgcggcggcggtagcggcggcggttatatcgggtttggttttttttttttttcgtttttttttttttttttttttttttagcggtggtttttaagaagttcgagatacgcggtgaggcggcgacgggtttcgggtgagggtttttggagtgtgggcgtcgttttttgggcgtagagggagagtttggggtcggggggaggtgagagttgaggggcgaatgtttttggcgcgggcgggagagcgcgttttcggttcggttcgtaatttgatttttaattttgatttgtcgttcggcgcgttttggtttgagggtcggtcgtgtggggatttggagtcgttttttttgcgatcgttgtcggaggagttcggcgttcgttgtttttttcgtttcgtttttcgcggcggaggg

SEQ ID NO: 21972 - DNA, 860 bp, Artificial Sequence
  chemically treated genomic DNA (Homo sapiens) CpG-island No: 21972
ccctccgccgcgaaaaacgaaacgaaaaaaacaacgaacgccgaactcctccgacaacgatcgcaaaaaaaacgactccaaatccccacacgaccgaccctcaaaccaaaacgcgccgaacgacaaatcaaaattaaaaatcaaattacgaaccgaaccgaaaacgcgctctcccgcccgcgccaaaaacattcgcccctcaactctcacctccccccgaccccaaactctccctctacgcccaaaaaacgacgcccacactccaaaaaccctcacccgaaacccgtcgccgcctcaccgcgtatctcgaacttcttaaaaaccaccgctaaaaaaaaaaaaaaaaaaaaaaaaacgaaaaaaaaaaaaaaccaaacccgatataaccgccgccgctaccgccgccgcgataccgcttctaaaatcgcgctctcgccgccgcgacaacgaccgccgccgccgcgtctccccgcccccacgaccgcacgtcgccgtaacgcgcatcgcacgaaacgattcgaaccaataaaaccacacgccgtacgcaaccgcgctatcctaaaccgaaaaccgcccctctaaccgctctaaaacctaaatacatcgtaaaaactataattcgaccaaaaacttaacgaaaactatactaaatattaaaaaccgaaaaaacgtacgctccttaaacgctcacacaactcctcgaaattttttctcccaccgaaaaaaaaaacaatttaaaactaaaaaaaaaaaaaccgccccgactcgcgaatacttttcgcaatctctataaatactaactacacactttaaacaaaaaccaaaatttaaaaatttaaactaaatcgtatatctctacc

SEQ ID NO: 21973 - DNA, 540 bp, Artificial Sequence
  chemically treated genomic DNA (Homo sapiens) CpG-island No: 21973
tgcgtagggaggtcgcgattcggcgtcggcgcgaattttcgcgatgtgattcgtgagggaattttttaagaagtagcgtatttcgcgcgtaaaggcggtttttcgaattgtaggaataaacgttttttgttggggggaagacggagatttttatatcgcgggagattaatttgtgagtaatagaagtattacgttataaagagtatgacgagtttttttaggtttgggaaagtacgggtaaatgttcgcggttttgcgcgttagcggggagtagtagagattttcggcgtcggttgttcgtagggttagagcgtcgaatcgggataatcggaggttttagtttatttcggattgtaaatgttaatacgggtttttcggtcggttgatttagaatttaggtcgtcgggacgtgtggtttttgttttttagacgttcggattcgcgtcgggaagggtttcgttttttttggttttcgttttttttttttttttttgcgttcggttattgtaaatgtatttagtttagtagtattagtttagg

SEQ ID NO: 21974 - DNA, 540 bp, Artificial Sequence
  chemically treated genomic DNA (Homo sapiens) CpG-island No: 21974
cctaaactaatactactaaactaaatacatttacaataaccgaacgcaaaaaaaaaaaaaaaaaacgaaaaccaaaaaaaacgaaacccttcccgacgcgaatccgaacgtctaaaaaacaaaaaccacacgtcccgacgacctaaattctaaatcaaccgaccgaaaaacccgtattaacatttacaatccgaaataaactaaaacctccgattatcccgattcgacgctctaaccctacgaacaaccgacgccgaaaatctctactactccccgctaacgcgcaaaaccgcgaacatttacccgtactttcccaaacctaaaaaaactcgtcatactctttataacgtaatacttctattactcacaaattaatctcccgcgatataaaaatctccgtcttccccccaacaaaaaacgtttattcctacaattcgaaaaaccgcctttacgcgcgaaatacgctacttcttaaaaaattccctcacgaatcacatcgcgaaaattcgcgccgacgccgaatcgcgacctccctacgca

SEQ ID NO: 21975 - DNA, 540 bp, Artificial Sequence
  chemically treated genomic DNA (Homo sapiens) CpG-island No: 21975
tttgggttagtgttattggattgaatgtatttgtaataatcggacgtagaaaaaaaaaaaaaaagcggggattaggggaggcgaaatttttttcggcgcgagttcgagcgtttgagaagtagaagttatacgtttcggcgatttaagttttggattagtcggtcggaggattcgtgttagtatttataattcgaggtgagttgaagttttcggttgtttcggttcgacgttttagttttgcgagtagtcgacgtcggaagtttttattgtttttcgttggcgcgtaggatcgcgggtatttattcgtgtttttttaagtttggaagaattcgttatgttttttgtagcgtggtgtttttgttgtttataggttagtttttcgcggtataagagttttcgttttttttttagtaagaagcgtttgtttttgtaattcggggggtcgtttttgcgcgcggggtgcgttgttttttggagagtttttttacgggttatatcgcggaggttcgcgtcggcgtcgggtcgcggtttttttgcgta

SEQ ID NO: 21976 - DNA, 540 bp, Artificial Sequence
  chemically treated genomic DNA (Homo sapiens) CpG-island No: 21976
tacgcaaaaaaaccgcgacccgacgccgacgcgaacctccgcgatataacccgtaaaaaaactctccaaaaaacaacgcaccccgcgcgcaaaaacgaccccccgaattacaaaaacaaacgcttcttactaaaaaaaaaacgaaaactcttataccgcgaaaaactaacctataaacaacaaaaacaccacgctacaaaaaacataacgaattcttccaaacttaaaaaaacacgaataaatacccgcgatcctacgcgccaacgaaaaacaataaaaacttccgacgtcgactactcgcaaaactaaaacgtcgaaccgaaacaaccgaaaacttcaactcacctcgaattataaatactaacacgaatcctccgaccgactaatccaaaacttaaatcgccgaaacgtataacttctacttctcaaacgctcgaactcgcgccgaaaaaaatttcgcctcccctaatccccgctttttttttttttttctacgtccgattattacaaatacattcaatccaataacactaacccaaa

SEQ ID NO: 21977 - DNA, 570 bp, Artificial Sequence
  chemically treated genomic DNA (Homo sapiens) CpG-island No: 21977
tattagcgcgcgggtttcgcgtttcgtttagttcgggattcgcggtcggcgggggaggggcggggcggagcggcgatcgttattcgcggttagttatcgcgtttcgaagcgtattgggtaggtttttattatagcggagagggaggtaggggggaggtggcgttcgattcgacgcggggtaggaaggcggaggtagcggcgtaggcggcggcgatagtcgcgggggatttcggcgggagtttataacgcgttgggttgtatgggcgtcgttatagtggggacgtagcggcgggcggagcgcgcggtcgcgattcggtcgggcgtttgcgattaatgggttcgcggaagtcgggcggagcgagggtttggttaatgcggagttgcgttgtttcgagtagtttaatagacgtaggagtcgcggatttgtcgtttcgtttatttcgtttattacgagagtagtgttgcggcgagtgcggggcgagaggttcgcgttggtggagtattttagtttgtaggtttagcgtgggtgtttttttcgggtatatcgagttgtttagaggaatttttttt

SEQ ID NO: 21978 - DNA, 570 bp, Artificial Sequence
  chemically treated genomic DNA (Homo sapiens) CpG-island No: 21978
aaaaaaaattcctctaaacaactcgatatacccgaaaaaaacacccacgctaaacctacaaactaaaatactccaccaacgcgaacctctcgccccgcactcgccgcaacactactctcgtaataaacgaaataaacgaaacgacaaatccgcgactcctacgtctattaaactactcgaaacaacgcaactccgcattaaccaaaccctcgctccgcccgacttccgcgaacccattaatcgcaaacgcccgaccgaatcgcgaccgcgcgctccgcccgccgctacgtccccactataacgacgcccatacaacccaacgcgttataaactcccgccgaaatcccccgcgactatcgccgccgcctacgccgctacctccgccttcctaccccgcgtcgaatcgaacgccacctcccccctacctccctctccgctataataaaaacctacccaatacgcttcgaaacgcgataactaaccgcgaataacgatcgccgctccgccccgcccctcccccgccgaccgcgaatcccgaactaaacgaaacgcgaaacccgcgcgctaata

SEQ ID NO: 21979 - DNA, 570 bp, Artificial Sequence
  chemically treated genomic DNA (Homo sapiens) CpG-island No: 21979
gaagagggtttttttagatagttcgatgtgttcgggagagatatttacgttgaatttgtaagttggggtgttttattagcgcgaatttttcgtttcgtattcgtcgtagtattgttttcgtggtaggcggggtgggcgggacggtaaattcgcggtttttgcgtttattgggttgttcggggtagcgtagtttcgtattggttaggttttcgtttcgttcggttttcgcgagtttattggtcgtaggcgttcgatcgggtcgcggtcgcgcgtttcgttcgtcgttgcgtttttattatggcggcgtttatgtagtttagcgcgttgtgggttttcgtcggggtttttcgcggttgtcgtcgtcgtttacgtcgttgttttcgtttttttgtttcgcgtcgggtcgggcgttattttttttttgttttttttttcgttgtggtaagggtttgtttagtgcgtttcggggcgcgatggttgatcgcgaataacggtcgtcgtttcgtttcgtttttttttcgtcggtcgcgggtttcgggttgggcggggcgcggagttcgcgcgttagtg

SEQ ID NO: 21980 - DNA, 570 bp, Artificial Sequence
  chemically treated genomic DNA (Homo sapiens) CpG-island No: 21980
cactaacgcgcgaactccgcgccccgcccaacccgaaacccgcgaccgacgaaaaaaaaacgaaacgaaacgacgaccgttattcgcgatcaaccatcgcgccccgaaacgcactaaacaaacccttaccacaacgaaaaaaaaaacaaaaaaaaaataacgcccgacccgacgcgaaacaaaaaaacgaaaacaacgacgtaaacgacgacgacaaccgcgaaaaaccccgacgaaaacccacaacgcgctaaactacataaacgccgccataataaaaacgcaacgacgaacgaaacgcgcgaccgcgacccgatcgaacgcctacgaccaataaactcgcgaaaaccgaacgaaacgaaaacctaaccaatacgaaactacgctaccccgaacaacccaataaacgcaaaaaccgcgaatttaccgtcccgcccaccccgcctaccacgaaaacaatactacgacgaatacgaaacgaaaaattcgcgctaataaaacaccccaacttacaaattcaacgtaaatatctctcccgaacacatcgaactatctaaaaaaaccctcttc

SEQ ID NO: 21981 - DNA, 1216 bp, Artificial Sequence
  chemically treated genomic DNA (Homo sapiens) CpG-island No: 21981
gttcgaacgttgaacgtttttaatatattgttttttagatacgtttaagcgggtatttcgggtcgtttattttggatcgcggtcggttacgtataagtagcgtcgtaggttgtttggagtcgggtcgtgttttgatttttttttttttagttttatatgcggcggatttcggggaagttagggttaggcgaagcgtagcgggttttttgggttgtagcgaggagacgtaagttttttcgtaaagtcgcggggaggaggtgttgagaatgtttgttcggcgttttaattcggagttaagggtatcgggttcgggtcgaggggtcgcgttcgtttggtttcgtcggggtcgttcggggttttgaatttaagaacggcgtttgtaggatttcggagtcgggcgcgagttgcgggttcggttcgagcgtttttgcgtggcgtttcgcgtgttaatcgggttatttcggtttttatcgtagatttcggttacgagtttcggcgttttagttttttttcgagttttggttttggtcggggtagttttgtcgagttttggtttagcggtttttttttcgcgggtaaatttggttttttcggcgcgggtagtaaggataagtaagcgttcgcgtcgggttttgtagtaagatgcggggtcgcgggcgttaggattttagtggggtgtagcgggatcggttggtggcggcgttagcgatatggtatttttttcgcgttcgttgggagttgcgttcgcgtatttgagacggtcggggtcgaggggaagattaggtggtcggatttgggcgggagggagggagtatttcgtggcggcggcggcgatttcgtttcgcgtttttcggttggtttttcgggttgtcggcgggtttcgggttcgttggaggttgttgaggttttagttttttgagtcgtcgttgttcgttgttgtgttatcgtcgtcgcggttgttttatttttgtcgtcgggatcggagttcgtgacgttattttttgggtttcgtttgtttaatcgtcgttatttgtgcgcgtcgttcgttcgttagtcggttagattcgcgcggcggttacggtaggtgcgcggagtaggcgggcgcgtacgcggggcgcgatgatttcggagcgttggggttatttagggttcggagggaggagggttagcgtagcgtttttgtttttggttagcgtggagttcggtaagtgatagt

SEQ ID NO: 21982 - DNA, 1216 bp, Artificial Sequence
  chemically treated genomic DNA (Homo sapiens) CpG-island No: 21982
actatcacttaccgaactccacgctaaccaaaaacaaaaacgctacgctaaccctcctccctccgaaccctaaataaccccaacgctccgaaatcatcgcgccccgcgtacgcgcccgcctactccgcgcacctaccgtaaccgccgcgcgaatctaaccgactaacgaacgaacgacgcgcacaaataacgacgattaaacaaacgaaacccaaaaaataacgtcacgaactccgatcccgacgacaaaaataaaacaaccgcgacgacgataacacaacaacgaacaacgacgactcaaaaaactaaaacctcaacaacctccaacgaacccgaaacccgccgacaacccgaaaaaccaaccgaaaaacgcgaaacgaaatcgccgccgccgccacgaaatactccctccctcccgcccaaatccgaccacctaatcttcccctcgaccccgaccgtctcaaatacgcgaacgcaactcccaacgaacgcgaaaaaaataccatatcgctaacgccgccaccaaccgatcccgctacaccccactaaaatcctaacgcccgcgaccccgcatcttactacaaaacccgacgcgaacgcttacttatccttactacccgcgccgaaaaaaccaaatttacccgcgaaaaaaaaaccgctaaaccaaaactcgacaaaactaccccgaccaaaaccaaaactcgaaaaaaaactaaaacgccgaaactcgtaaccgaaatctacgataaaaaccgaaataacccgattaacacgcgaaacgccacgcaaaaacgctcgaaccgaacccgcaactcgcgcccgactccgaaatcctacaaacgccgttcttaaattcaaaaccccgaacgaccccgacgaaaccaaacgaacgcgacccctcgacccgaacccgatacccttaactccgaattaaaacgccgaacaaacattctcaacacctcctccccgcgactttacgaaaaaacttacgtctcctcgctacaacccaaaaaacccgctacgcttcgcctaaccctaacttccccgaaatccgccgcatataaaactaaaaaaaaaaaaatcaaaacacgacccgactccaaacaacctacgacgctacttatacgtaaccgaccgcgatccaaaataaacgacccgaaatacccgcttaaacgtatctaaaaaacaatatattaaaaacgttcaacgttcgaac

SEQ ID NO: 21983 - DNA, 1216 bp, Artificial Sequence
  chemically treated genomic DNA (Homo sapiens) CpG-island No: 21983
gttgttatttgtcgagttttacgttagttagaggtaggagcgttacgttggttttttttttttcgggttttagatggttttagcgtttcggagttatcgcgtttcgcgtgcgcgttcgtttgtttcgcgtatttgtcgtggtcgtcgcgcgggtttgatcggttggcgggcgggcggcgcgtataggtggcggcgattgggtaggcggggtttagagggtgacgttacgggtttcggtttcggcggtagaaatagggtagtcgcggcggcggtggtatagtagcgggtagcggcggtttagggagttggagttttaatagtttttagcgagttcgggattcgtcgatagttcgagaaattagtcgaaggacgcggggcggggtcgtcgtcgtcgttacggggtgttttttttttttcgtttaagttcggttatttggtttttttttcggtttcggtcgttttaggtacgcgggcgtagtttttagcgggcgcggggagggtgttatgtcgttggcgtcgttattagtcggtttcgttgtattttattggggttttggcgttcgcggtttcgtattttgttgtagggttcggcgcgggcgtttgtttgtttttattgttcgcgtcgggaaagttaagtttgttcgcggggaagggatcgttgggttagggttcggtagggttatttcggttaaggttaggattcgaggagaggttgggacgtcgaggttcgtggtcggggtttacggtggggatcggagtgattcggttggtacgcggggcgttacgtagaagcgttcgggtcgagttcgtagttcgcgttcggtttcgaaattttgtaggcgtcgtttttgggtttaggatttcgagcggtttcggcggagttaggcgagcgcggtttttcggttcgggttcggtgtttttggtttcgggttggggcgtcgggtaggtatttttagtatttttttttcgcggttttgcggggaaatttgcgttttttcgttgtagtttaaagggttcgttgcgtttcgtttggttttggttttttcggggttcgtcgtatgtgaggttggggaggaaggaattagggtacgattcgattttaggtagtttgcggcgttgtttgtgcgtagtcggtcgcggtttagagtgagcggttcggggtattcgtttgaacgtgtttagggagtagtgtgttgggggcgtttagcgttcgggt

SEQ ID NO: 21984 - DNA, 1216 bp, Artificial Sequence
  chemically treated genomic DNA (Homo sapiens) CpG-island No: 21984
acccgaacgctaaacgcccccaacacactactccctaaacacgttcaaacgaataccccgaaccgctcactctaaaccgcgaccgactacgcacaaacaacgccgcaaactacctaaaatcgaatcgtaccctaattccttcctccccaacctcacatacgacgaaccccgaaaaaaccaaaaccaaacgaaacgcaacgaaccctttaaactacaacgaaaaaacgcaaatttccccgcaaaaccgcgaaaaaaaaatactaaaaatacctacccgacgccccaacccgaaaccaaaaacaccgaacccgaaccgaaaaaccgcgctcgcctaactccgccgaaaccgctcgaaatcctaaacccaaaaacgacgcctacaaaatttcgaaaccgaacgcgaactacgaactcgacccgaacgcttctacgtaacgccccgcgtaccaaccgaatcactccgatccccaccgtaaaccccgaccacgaacctcgacgtcccaacctctcctcgaatcctaaccttaaccgaaataaccctaccgaaccctaacccaacgatcccttccccgcgaacaaacttaactttcccgacgcgaacaataaaaacaaacaaacgcccgcgccgaaccctacaacaaaatacgaaaccgcgaacgccaaaaccccaataaaatacaacgaaaccgactaataacgacgccaacgacataacaccctccccgcgcccgctaaaaactacgcccgcgtacctaaaacgaccgaaaccgaaaaaaaaaccaaataaccgaacttaaacgaaaaaaaaaaaacaccccgtaacgacgacgacgaccccgccccgcgtccttcgactaatttctcgaactatcgacgaatcccgaactcgctaaaaactattaaaactccaactccctaaaccgccgctacccgctactataccaccgccgccgcgactaccctatttctaccgccgaaaccgaaacccgtaacgtcaccctctaaaccccgcctacccaatcgccgccacctatacgcgccgcccgcccgccaaccgatcaaacccgcgcgacgaccacgacaaatacgcgaaacaaacgaacgcgcacgcgaaacgcgataactccgaaacgctaaaaccatctaaaacccgaaaaaaaaaaaaccaacgtaacgctcctacctctaactaacgtaaaactcgacaaataacaac

SEQ ID NO: 21985 - DNA, 727 bp, Artificial Sequence
  chemically treated genomic DNA (Homo sapiens) CpG-island No: 21985
ggcgttcggaacggtagtttggggggcgtttcgttcggagttgtggttagggttggcgggtcgtgtgcggcgcgggatttagagtttaggagtagtagtttcggcgcggcggcgtaggagtcggcgtacgagtataggaatatatagagttagacgtagagtatggcgaagagtagcgcgagttttttttttatcggcggcgggggcggcggcggttgcggtaggagtcggtcggggatatcgaggtaagatttgtcgttatttaggcgttgttttatgcgttgttcgcgggcgcggttagggatatggtttagtatatggcgtgggtttcgtcgggtagtgagcgtagagagggtttttcggtacgttggacgttcgggtggttcggtttattgttttcgtgtgttcgcggtcgtcgttgttgttgttgtttttttttaggtggcggcggtagttgtagcggcggcggtttttgatatgttgttcggtaggagttgtaattggaacggaaagtcgggacggcggtaattgttgggcgagggtttgttttcggggcgcgacgacgcgttcggggttaggaggacgttgtattttcgcgttttggttattttagattgtgcgtatcgtcgtacgtcggggttgtttttttgtagttttaagaattgagtttcgagtagtttcggtattttttcgtagaggttgtagaggcgaattgcgtaggaagaga

SEQ ID NO: 21986 - DNA, 727 bp, Artificial Sequence
  chemically treated genomic DNA (Homo sapiens) CpG-island No: 21986
tctcttcctacgcaattcgcctctacaacctctacgaaaaaataccgaaactactcgaaactcaattcttaaaactacaaaaaaacaaccccgacgtacgacgatacgcacaatctaaaataaccaaaacgcgaaaatacaacgtcctcctaaccccgaacgcgtcgtcgcgccccgaaaacaaaccctcgcccaacaattaccgccgtcccgactttccgttccaattacaactcctaccgaacaacatatcaaaaaccgccgccgctacaactaccgccgccacctaaaaaaaaacaacaacaacaacgacgaccgcgaacacacgaaaacaataaaccgaaccacccgaacgtccaacgtaccgaaaaaccctctctacgctcactacccgacgaaacccacgccatatactaaaccatatccctaaccgcgcccgcgaacaacgcataaaacaacgcctaaataacgacaaatcttacctcgatatccccgaccgactcctaccgcaaccgccgccgcccccgccgccgataaaaaaaaaactcgcgctactcttcgccatactctacgtctaactctatatattcctatactcgtacgccgactcctacgccgccgcgccgaaactactactcctaaactctaaatcccgcgccgcacacgacccgccaaccctaaccacaactccgaacgaaacgccccccaaactaccgttccgaacgcc

SEQ ID NO: 21987 - DNA, 727 bp, Artificial Sequence
  chemically treated genomic DNA (Homo sapiens) CpG-island No: 21987
tttttttttgcgtagttcgtttttgtagtttttgcggggaagtgtcggggttgttcgaggtttagtttttaggattgtaaggaggtagtttcggcgtgcggcggtgcgtatagtttagagtggttagggcgcgagagtgtaacgtttttttggtttcgagcgcgtcgtcgcgtttcgggagtagattttcgtttagtagttatcgtcgtttcgatttttcgttttagttgtagtttttgtcgggtaatatgttaagagtcgtcgtcgttatagttgtcgtcgttatttggggaagagtagtagtagtagcggcggtcgcgggtatacgggggtaataaatcgagttattcgggcgtttagcgtgtcggggaattttttttgcgtttattgttcggcgggatttacgttatgtgttgagttatgtttttggtcgcgttcgcgggtagcgtatggggtagcgtttgagtggcggtagattttgtttcgatgttttcggtcggtttttatcgtagtcgtcgtcgttttcgtcgtcggtgaggaggaagttcgcgttgtttttcgttatgttttgcgtttggttttatatgtttttgtattcgtgcgtcggtttttgcgtcgtcgcgtcggggttgttgtttttgggttttgggtttcgcgtcgtatacgattcgttagttttggttatagtttcggacgggacgttttttaggttgtcgtttcgggcgtt

SEQ ID NO: 21988 - DNA, 727 bp, Artificial Sequence
  chemically treated genomic DNA (Homo sapiens) CpG-island No: 21988
aacgcccgaaacgacaacctaaaaaacgtcccgtccgaaactataaccaaaactaacgaatcgtatacgacgcgaaacccaaaacccaaaaacaacaaccccgacgcgacgacgcaaaaaccgacgcacgaatacaaaaacatataaaaccaaacgcaaaacataacgaaaaacaacgcgaacttcctcctcaccgacgacgaaaacgacgacgactacgataaaaaccgaccgaaaacatcgaaacaaaatctaccgccactcaaacgctaccccatacgctacccgcgaacgcgaccaaaaacataactcaacacataacgtaaatcccgccgaacaataaacgcaaaaaaaattccccgacacgctaaacgcccgaataactcgatttattacccccgtatacccgcgaccgccgctactactactactcttccccaaataacgacgacaactataacgacgacgactcttaacatattacccgacaaaaactacaactaaaacgaaaaatcgaaacgacgataactactaaacgaaaatctactcccgaaacgcgacgacgcgctcgaaaccaaaaaaacgttacactctcgcgccctaaccactctaaactatacgcaccgccgcacgccgaaactacctccttacaatcctaaaaactaaacctcgaacaaccccgacacttccccgcaaaaactacaaaaacgaactacgcaaaaaaaaa

SEQ ID NO: 21989 - DNA, 644 bp, Artificial Sequence
  chemically treated genomic DNA (Homo sapiens) CpG-island No: 21989
gtggcgcgtattcggttcgttcgtatcgattggcgtcgtatttttggcgggaggaagtggcgttcgtgttgcgtttggtatagtagtcgtttaggttcggggtcgtggtcgtttagtatttttaattttacgataaaaggaatttgtacgtttcgttttaggaagcgttaaaaaggtttttcgggttttagggtttagagtagttttatgggttcgagtttcgcgaagttgtcgtttagcgcgggtgcgcgttttaggtttagttcgtcgcgggcgtcggcgtagtagcgcgcgtgggttcggaagagcgcgtttttttcgtcgcgtagggacgcgcgtagcgtaattcgttgtttcggggttaggtcgcgtacggtaatgcgtatcggttcgttttagtagtagcggtttgggggttttaggattagcgttgttgatattttggagtcggagcggggaatttaaaggtcgaggttcgagattcgtttaagatcgtggtaagcgcgtcgaatgttcggacggcgttcggcgttttttggtgtcggaagttgtcggtggttgagtagttttagaaagtttttgggattttagatcggttaattcggcgtttcggattcgtttgaggtaaaagtagttaggttttt

SEQ ID NO: 21990 - DNA, 644 bp, Artificial Sequence
  chemically treated genomic DNA (Homo sapiens) CpG-island No: 21990
aaaaacctaactacttttacctcaaacgaatccgaaacgccgaattaaccgatctaaaatcccaaaaactttctaaaactactcaaccaccgacaacttccgacaccaaaaaacgccgaacgccgtccgaacattcgacgcgcttaccacgatcttaaacgaatctcgaacctcgacctttaaattccccgctccgactccaaaatatcaacaacgctaatcctaaaacccccaaaccgctactactaaaacgaaccgatacgcattaccgtacgcgacctaaccccgaaacaacgaattacgctacgcgcgtccctacgcgacgaaaaaaacgcgctcttccgaacccacgcgcgctactacgccgacgcccgcgacgaactaaacctaaaacgcgcacccgcgctaaacgacaacttcgcgaaactcgaacccataaaactactctaaaccctaaaacccgaaaaacctttttaacgcttcctaaaacgaaacgtacaaattccttttatcgtaaaattaaaaatactaaacgaccacgaccccgaacctaaacgactactataccaaacgcaacacgaacgccacttcctcccgccaaaaatacgacgccaatcgatacgaacgaaccgaatacgcgccac

SEQ ID NO: 21991 - DNA, 644 bp, Artificial Sequence
  chemically treated genomic DNA (Homo sapiens) CpG-island No: 21991
aggagtttggttatttttgttttagacgagttcggagcgtcgggttaatcggtttgaagttttaggggttttttgggattgtttagttatcggtagttttcggtattaggggacgtcggacgtcgttcggatattcggcgcgtttgttacgattttggacgggtttcgggtttcgatttttgaatttttcgtttcggttttaagatgttagtaacgttgattttggagtttttaggtcgttgttgttggaacgagtcggtgcgtattgtcgtgcgcggtttggtttcggagtagcgggttacgttgcgcgcgtttttgcgcgacgagaagggcgcgttttttcgggtttacgcgcgttattgcgtcgacgttcgcggcgagttggatttggagcgcgtattcgcgttgggcggtagtttcgcgggattcgagtttatggggttgttttgggttttggaattcgagaagtttttttggcgttttttgaagcgggacgtatagattttttttgtcgtggagttggaggtgttggacggttacgatttcgagtttggacggttgttgtgttaggcgtagtacgagcgttattttttttcgttaggggtgcggcgttagtcggtgcgagcgggtcgggtgcgcgttat

SEQ ID NO: 21992 - DNA, 644 bp, Artificial Sequence
  chemically treated genomic DNA (Homo sapiens) CpG-island No: 21992
ataacgcgcacccgacccgctcgcaccgactaacgccgcacccctaacgaaaaaaaataacgctcgtactacgcctaacacaacaaccgtccaaactcgaaatcgtaaccgtccaacacctccaactccacgacaaaaaaaatctatacgtcccgcttcaaaaaacgccaaaaaaacttctcgaattccaaaacccaaaacaaccccataaactcgaatcccgcgaaactaccgcccaacgcgaatacgcgctccaaatccaactcgccgcgaacgtcgacgcaataacgcgcgtaaacccgaaaaaacgcgcccttctcgtcgcgcaaaaacgcgcgcaacgtaacccgctactccgaaaccaaaccgcgcacgacaatacgcaccgactcgttccaacaacaacgacctaaaaactccaaaatcaacgttactaacatcttaaaaccgaaacgaaaaattcaaaaatcgaaacccgaaacccgtccaaaatcgtaacaaacgcgccgaatatccgaacgacgtccgacgtcccctaataccgaaaactaccgataactaaacaatcccaaaaaacccctaaaacttcaaaccgattaacccgacgctccgaactcgtctaaaacaaaaataaccaaactcct

SEQ ID NO: 21993 - DNA, 670 bp, Artificial Sequence
  chemically treated genomic DNA (Homo sapiens) CpG-island No: 21993
ttattttttagcgttcggtaaagtcgttagcgttcgtttattgatttcgcggagttgggtcgtttttgttttatttagattgggatggtagcgacgttgattttggagttcgcgcgcgttgttgttgggacgagtcgttgcgtatcgtagtgcgcgtttggtttcggagtagttagttacgttgcgtacgtttttgcgcgacgaagagggcgcgttttttcgggtttacgcgcgttatcgtgtcgacgttcgcgacgagttggatttggagcgcgcgttcgcgttgggaggtagtttcgcgcggttttagttatggggttgttgtgggcgttggagttcgagaaagttttggtgcggttggtgaagcgcgacgtgcggacgtttttcgtcgtggagttggaagtgttggacggttacgatatcgagttcgggcggttgttgtgtttggcgtagaataagcgcgatttttttcggtcgggggtgcggcgcgagtcggtgcgcgcgggttcggtgcgcgtcgcgttttttttgtcgtcggatgagtagtttgtttagaatttggtcgagttttgcgatttttatcggttttttttttgttttgggaatcgcgtgattgtggaatatttttgaatttgttttttcgttttagagtttgttatggattttgagt

SEQ ID NO: 21994 - DNA, 670 bp, Artificial Sequence
  chemically treated genomic DNA (Homo sapiens) CpG-island No: 21994
actcaaaatccataacaaactctaaaacgaaaaaacaaattcaaaaatattccacaatcacgcgattcccaaaacaaaaaaaaaaccgataaaaatcgcaaaactcgaccaaattctaaacaaactactcatccgacgacaaaaaaaacgcgacgcgcaccgaacccgcgcgcaccgactcgcgccgcacccccgaccgaaaaaaatcgcgcttattctacgccaaacacaacaaccgcccgaactcgatatcgtaaccgtccaacacttccaactccacgacgaaaaacgtccgcacgtcgcgcttcaccaaccgcaccaaaactttctcgaactccaacgcccacaacaaccccataactaaaaccgcgcgaaactacctcccaacgcgaacgcgcgctccaaatccaactcgtcgcgaacgtcgacacgataacgcgcgtaaacccgaaaaaacgcgccctcttcgtcgcgcaaaaacgtacgcaacgtaactaactactccgaaaccaaacgcgcactacgatacgcaacgactcgtcccaacaacaacgcgcgcgaactccaaaatcaacgtcgctaccatcccaatctaaataaaacaaaaacgacccaactccgcgaaatcaataaacgaacgctaacgactttaccgaacgctaaaaaataa

SEQ ID NO: 21995 - DNA, 670 bp, Artificial Sequence
  chemically treated genomic DNA (Homo sapiens) CpG-island No: 21995
atttagaatttatgatagattttggagcgaaggaataagtttagggatgttttataattacgcgatttttaggataggaaaggggtcggtgggggtcgtagagttcgattaaattttgggtagattatttattcggcggtaggaagagcgcggcgcgtatcgggttcgcgcgtatcggttcgcgtcgtattttcggtcggagaaagtcgcgtttgttttgcgttaggtatagtagtcgttcgggttcggtgtcgtggtcgtttagtatttttagttttacggcgaagggcgttcgtacgtcgcgttttattagtcgtattaaggttttttcgggttttaacgtttatagtagttttatggttggagtcgcgcgaagttgttttttagcgcgggcgcgcgttttaggtttagttcgtcgcgggcgtcggtacggtagcgcgcgtgggttcggaagagcgcgtttttttcgtcgcgtagggacgtgcgtagcgtgattggttgtttcggggttaggcgcgtattgcgatgcgtagcggttcgttttagtagtagcgcgcgcgggttttaggattagcgtcgttgttattttaatttgggtagaataggggcgatttagtttcgcggagttagtgggcgggcgttggcggttttgtcgagcgttggaaagtag

SEQ ID NO: 21996 - DNA, 670 bp, Artificial Sequence
  chemically treated genomic DNA (Homo sapiens) CpG-island No: 21996
ctactttccaacgctcgacaaaaccgccaacgcccgcccactaactccgcgaaactaaatcgcccctattctacccaaattaaaataacaacgacgctaatcctaaaacccgcgcgcgctactactaaaacgaaccgctacgcatcgcaatacgcgcctaaccccgaaacaaccaatcacgctacgcacgtccctacgcgacgaaaaaaacgcgctcttccgaacccacgcgcgctaccgtaccgacgcccgcgacgaactaaacctaaaacgcgcgcccgcgctaaaaaacaacttcgcgcgactccaaccataaaactactataaacgttaaaacccgaaaaaaccttaatacgactaataaaacgcgacgtacgaacgcccttcgccgtaaaactaaaaatactaaacgaccacgacaccgaacccgaacgactactatacctaacgcaaaacaaacgcgactttctccgaccgaaaatacgacgcgaaccgatacgcgcgaacccgatacgcgccgcgctcttcctaccgccgaataaataatctacccaaaatttaatcgaactctacgacccccaccgacccctttcctatcctaaaaatcgcgtaattataaaacatccctaaacttattccttcgctccaaaatctatcataaattctaaat

SEQ ID NO: 21997 - DNA, 545 bp, Artificial Sequence
  chemically treated genomic DNA (Homo sapiens) CpG-island No: 21997
gttgggacgaatcggtgcgaatcgtcgtgcgcggtttagtttcggagtagtcggttacgttgcgcgcgtttttgcgcgacgagaagggcgcgtttttttaggtttacgcgcgttatcgcgtcgatatttttggcgagttggatttggagcgcgcgttcgcgttgggcggtagtttcgcgcgggtttgagtttatggggttgttttgggttttggagttcgagaaatttttggtgcggttggtgaagcgcgacgtgcgaacgtttttggtcgtggagttggaggtgttggatggttacgatttcgatttcgggcggttgttgtgttagacgcggtacgagcgttattttttttcgttcggggtgcggcgcgagtcggtgcgcgtgggtcgggtgcgaggtacgttttttttgtcgttaggtgatttattttcgttaattgtttcgtgttcgttcgttttttattttgtgtgtttttttcgttttacgtttttcgtttatgtgtatgttttttcgtcgcgttttcgggttatattgtttaggtaggt

SEQ ID NO: 21998 - DNA, 545 bp, Artificial Sequence
  chemically treated genomic DNA (Homo sapiens) CpG-island No: 21998
acctacctaaacaatataacccgaaaacgcgacgaaaaaacatacacataaacgaaaaacgtaaaacgaaaaaaacacacaaaataaaaaacgaacgaacacgaaacaattaacgaaaataaatcacctaacgacaaaaaaaacgtacctcgcacccgacccacgcgcaccgactcgcgccgcaccccgaacgaaaaaaaataacgctcgtaccgcgtctaacacaacaaccgcccgaaatcgaaatcgtaaccatccaacacctccaactccacgaccaaaaacgttcgcacgtcgcgcttcaccaaccgcaccaaaaatttctcgaactccaaaacccaaaacaaccccataaactcaaacccgcgcgaaactaccgcccaacgcgaacgcgcgctccaaatccaactcgccaaaaatatcgacgcgataacgcgcgtaaacctaaaaaaacgcgcccttctcgtcgcgcaaaaacgcgcgcaacgtaaccgactactccgaaactaaaccgcgcacgacgattcgcaccgattcgtcccaac

SEQ ID NO: 21999 - DNA, 545 bp, Artificial Sequence
  chemically treated genomic DNA (Homo sapiens) CpG-island No: 21999
atttgtttgggtaatatagttcgggggcgcggcgggggggtatatatataagcgaaaagcgtggggcgggggagatatataaagtgaaaggcgaacgaatacggaataattagcggaggtgagttatttggcggtaggaagagcgtgtttcgtattcggtttacgcgtatcggttcgcgtcgtatttcgggcgggaggaagtagcgttcgtgtcgcgtttggtatagtagtcgttcggggtcggggtcgtggttatttagtatttttagttttacggttaagggcgttcgtacgtcgcgttttattagtcgtattaaaggtttttcgggttttaaggtttagagtagttttatgggtttaagttcgcgcgaagttgtcgtttagcgcgggcgcgcgttttaggtttagttcgttaagagtgtcggcgcggtagcgcgcgtgggtttggaaaagcgcgtttttttcgtcgcgtagggacgcgcgtagcgtgatcggttgtttcggggttaggtcgcgtacggcgattcgtatcggttcgttttagt

SEQ ID NO: 22000 - DNA, 545 bp, Artificial Sequence
  chemically treated genomic DNA (Homo sapiens) CpG-island No: 22000
actaaaacgaaccgatacgaatcgccgtacgcgacctaaccccgaaacaaccgatcacgctacgcgcgtccctacgcgacgaaaaaaacgcgcttttccaaacccacgcgcgctaccgcgccgacactcttaacgaactaaacctaaaacgcgcgcccgcgctaaacgacaacttcgcgcgaacttaaacccataaaactactctaaaccttaaaacccgaaaaacctttaatacgactaataaaacgcgacgtacgaacgcccttaaccgtaaaactaaaaatactaaataaccacgaccccgaccccgaacgactactataccaaacgcgacacgaacgctacttcctcccgcccgaaatacgacgcgaaccgatacgcgtaaaccgaatacgaaacacgctcttcctaccgccaaataactcacctccgctaattattccgtattcgttcgcctttcactttatatatctcccccgccccacgcttttcgcttatatatatacccccccgccgcgcccccgaactatattacccaaacaaat

SEQ ID NO: 22001 - DNA, 539 bp, Artificial Sequence
  chemically treated genomic DNA (Homo sapiens) CpG-island No: 22001
gtattcggttcgcgcgtatcggttcgcgtcgtatttcgggcgggaggaagtagcgttcgtgtcgtattcggtatagtagtcgttcggggtcggggtcgtggttatttagtatttttagttttacggttaagggcgttcgtacgtcgcgttttattagtcgtattaagggtttttcgggttttaaggtttagagtagttttatgcgtttaagttcgcgaagttgtcgtttagcgcggggcgcgttttaggtttagttcgttaagggtgtcggcgcggtagcgcgcgggggtttggaaaagcgcgtttttttcgtcgcgtagggacgcgcgtagcgtgatcggttgtttcggggttaggtcgcgtacggcgattcgtatcggttcgttttagtagtagcggttcgcgggttttaggattagcgtcgtcgttattcgagtaggaatttaaataattcggttaaattgttttagttgtggagatttttgtaattttgtttaattttttttttcgggttgtcgtcgtaggttaaacgtttatta

SEQ ID NO: 22002 - DNA, 539 bp, Artificial Sequence
  chemically treated genomic DNA (Homo sapiens) CpG-island No: 22002
taataaacgtttaacctacgacgacaacccgaaaaaaaaaattaaacaaaattacaaaaatctccacaactaaaacaatttaaccgaattatttaaattcctactcgaataacgacgacgctaatcctaaaacccgcgaaccgctactactaaaacgaaccgatacgaatcgccgtacgcgacctaaccccgaaacaaccgatcacgctacgcgcgtccctacgcgacgaaaaaaacgcgcttttccaaacccccgcgcgctaccgcgccgacacccttaacgaactaaacctaaaacgcgccccgcgctaaacgacaacttcgcgaacttaaacgcataaaactactctaaaccttaaaacccgaaaaacccttaatacgactaataaaacgcgacgtacgaacgcccttaaccgtaaaactaaaaatactaaataaccacgaccccgaccccgaacgactactataccgaatacgacacgaacgctacttcctcccgcccgaaatacgacgcgaaccgatacgcgcgaaccgaatac

SEQ ID NO: 22003 - DNA, 539 bp, Artificial Sequence
  chemically treated genomic DNA (Homo sapiens) CpG-island No: 22003
tagtgggcgtttagtttgcgacggtagttcgagaggaagagttgggtagagttgtaggggtttttatagttgaggtagtttggtcggattatttgggtttttgttcggatggcggcgacgttgattttggagttcgcgggtcgttgttgttgggacgaatcggtgcgaatcgtcgtgcgcggtttagtttcggagtagtcggttacgttgcgcgcgtttttgcgcgacgagaagggcgcgtttttttaggttttcgcgcgttatcgcgtcgatatttttggcgagttggatttggagcgcgtttcgcgttgggcggtagtttcgcgggtttggacgtatggggttgttttgggttttggagttcgagaaatttttggtgcggttggtgaagcgcgacgtgcgaacgtttttggtcgtggagttggaggtgttggatggttacgatttcgatttcgggcggttgttgtgtcgggtgcggtacgagcgttattttttttcgttcggggtgcggcgcgagtcggtgcgcgcgggtcgggtgt

SEQ ID NO: 22004 - DNA, 539 bp, Artificial Sequence
  chemically treated genomic DNA (Homo sapiens) CpG-island No: 22004
acacccgacccgcgcgcaccgactcgcgccgcaccccgaacgaaaaaaaataacgctcgtaccgcacccgacacaacaaccgcccgaaatcgaaatcgtaaccatccaacacctccaactccacgaccaaaaacgttcgcacgtcgcgcttcaccaaccgcaccaaaaatttctcgaactccaaaacccaaaacaaccccatacgtccaaacccgcgaaactaccgcccaacgcgaaacgcgctccaaatccaactcgccaaaaatatcgacgcgataacgcgcgaaaacctaaaaaaacgcgcccttctcgtcgcgcaaaaacgcgcgcaacgtaaccgactactccgaaactaaaccgcgcacgacgattcgcaccgattcgtcccaacaacaacgacccgcgaactccaaaatcaacgtcgccgccatccgaacaaaaacccaaataatccgaccaaactacctcaactataaaaacccctacaactctacccaactcttcctctcgaactaccgtcgcaaactaaacgcccacta

SEQ ID NO: 22005 - DNA, 1579 bp, Artificial Sequence
  chemically treated genomic DNA (Homo sapiens) CpG-island No: 22005
gaggttcgaagtggcgggaacgggtttttcgcggcggttttaaggcgagggaggttgtaaaatttggtagagaattcggcgcgtcgggtcggggatgtttcgggtgtcgggggtaggggtcgtaggttcgtaggtagaagtttttttacgcgagcgggggtttcggtcgcggaaggggcgttttcggggtcgtcggtagcggcgagcgggcgggagggagtttttcgggtttttttcgcgtttcgggttggcggggcgatggcgacgacggtttttcggttttttcgtttcggacgtcgatggcggtgcgtttcggtttttttttaatagtttttttttcgcggtcgtcggagtcggtgaggtcgagagggcggggagtcgcgtagggaaggcgagagggcggaggttgcgtggtgtaggcggcggcggcgggaggaggagggtcgggcgggtaggggaggaggaggaggcgggcgtcgtgtcgtacgtagttttaggcggggtagtttcggtagttgagggacgtagttagattttggcgggacggggttttcgtcggggtttaggtttagggattaggcggaggcgtcgcgggagtttttggggtattatagagatgcgggtgagtgtcggtagtcgtcggggtcgagaggaggtggcggcggcggcggcggcgtaggttcggtttcgagtcgcggtgtcgtagtgattcgggtcgcgacggtcgaaattaggcgtttggcgaggtttgagtcgtcgaaacgcggtcgggtagaatggcggtcgggtcgggggattcgtgggcggaggacgtcgaaggtggtagaggagcgagcggggtcgggttttgagttatttcggacgggtcggggcggttaggtttggattacgtattgggaaaaagtacgatttatcgcgtttggaggcggcggtttggtggcgtcggttttttttttcgtcgcgatcgggttgggttttcggagggtgggtcgacgtgtggttcggggcggttcgggcgttcgcgtttcgtttggtgaggcgattttcgcgggacgtcgggattcgtgtttttgttttttcgcgtttacgttttttttcggcgttgtttttcggtcgacgcgtgtttttttgtgagttttgggtttaagcgtaggagtagtcgcggagtcgggttttttcgtttttcggttttttgttcgcggttttcgggtttttcgtttgtattgttgcgaacgtgtagggcgttattattgggtaatagtcgtttttttgtttcgtttttttgggagagcgggtcggggtatgcgcgtagggatgttagttcggcggtcgaatcggatagagtttttcggcgttcgtttatcgttcgttagtcgggtcgggttttgcgttgcggtttcggcgcgttttcggttttaacgggagcgcgcgttttgattttgagggtagtcgtgcgttcgttaggtcgttgggatttggggtttttagattcgggggtcgtcgttttttttttttttaagatttgaaagattttcgtttttgttattcgtgtagtattgtgtagcgtagatataagata

SEQ ID NO: 22006 - DNA, 1579 bp, Artificial Sequence
  chemically treated genomic DNA (Homo sapiens) CpG-island No: 22006
tatcttatatctacgctacacaatactacacgaataacaaaaacgaaaatctttcaaatcttaaaaaaaaaaaaaacgacgacccccgaatctaaaaaccccaaatcccaacgacctaacgaacgcacgactaccctcaaaatcaaaacgcgcgctcccgttaaaaccgaaaacgcgccgaaaccgcaacgcaaaacccgacccgactaacgaacgataaacgaacgccgaaaaactctatccgattcgaccgccgaactaacatccctacgcgcataccccgacccgctctcccaaaaaaacgaaacaaaaaaacgactattacccaataataacgccctacacgttcgcaacaatacaaacgaaaaacccgaaaaccgcgaacaaaaaaccgaaaaacgaaaaaacccgactccgcgactactcctacgcttaaacccaaaactcacaaaaaaacacgcgtcgaccgaaaaacaacgccgaaaaaaaacgtaaacgcgaaaaaacaaaaacacgaatcccgacgtcccgcgaaaatcgcctcaccaaacgaaacgcgaacgcccgaaccgccccgaaccacacgtcgacccaccctccgaaaacccaacccgatcgcgacgaaaaaaaaaaccgacgccaccaaaccgccgcctccaaacgcgataaatcgtactttttcccaatacgtaatccaaacctaaccgccccgacccgtccgaaataactcaaaacccgaccccgctcgctcctctaccaccttcgacgtcctccgcccacgaatcccccgacccgaccgccattctacccgaccgcgtttcgacgactcaaacctcgccaaacgcctaatttcgaccgtcgcgacccgaatcactacgacaccgcgactcgaaaccgaacctacgccgccgccgccgccgccacctcctctcgaccccgacgactaccgacactcacccgcatctctataataccccaaaaactcccgcgacgcctccgcctaatccctaaacctaaaccccgacgaaaaccccgtcccgccaaaatctaactacgtccctcaactaccgaaactaccccgcctaaaactacgtacgacacgacgcccgcctcctcctcctcccctacccgcccgaccctcctcctcccgccgccgccgcctacaccacgcaacctccgccctctcgccttccctacgcgactccccgccctctcgacctcaccgactccgacgaccgcgaaaaaaaaactattaaaaaaaaaccgaaacgcaccgccatcgacgtccgaaacgaaaaaaccgaaaaaccgtcgtcgccatcgccccgccaacccgaaacgcgaaaaaaacccgaaaaactccctcccgcccgctcgccgctaccgacgaccccgaaaacgccccttccgcgaccgaaacccccgctcgcgtaaaaaaacttctacctacgaacctacgacccctacccccgacacccgaaacatccccgacccgacgcgccgaattctctaccaaattttacaacctccctcgccttaaaaccgccgcgaaaaacccgttcccgccacttcgaacctc

SEQ ID NO: 22007 - DNA, 1579 bp, Artificial Sequence
  chemically treated genomic DNA (Homo sapiens) CpG-island No: 22007
tattttatgtttgcgttatataatattgtacgggtggtagaaacgggggttttttagattttaagggaaaaaaaagcgacgattttcgagtttggggattttaagttttagcggtttggcgggcgtacggttatttttagggttagggcgcgcgttttcgttgggatcgggggcgcgtcgaggtcgtagcgtagggttcggttcgattagcgagcgataggcgggcgtcggggggttttgttcggttcggtcgtcgggttagtatttttgcgcgtatgtttcggttcgtttttttaggagaacggggtaaaagggcgattgttatttaataatagcgttttgtacgttcgtaataatgtaggcggggaattcgagagtcgcgggtagggaatcggaaagcgagagagttcggtttcgcggttgtttttgcgtttgagtttagagtttataggggaatacgcgtcggtcggaaagtagcgtcgggaagaagcgtgggcgcgagggggtaagggtacgggtttcggcgtttcgcggaggtcgttttattaggcgaggcgcggacgttcgagtcgtttcgggttatacgtcggtttatttttcgagaatttagttcggtcgcggcggggaaaggggtcggcgttattaggtcgtcgtttttaggcgcgatgaatcgtgtttttttttagtgcgtagtttaggtttggtcgtttcggttcgttcggggtgatttagggttcggtttcgttcgtttttttgttattttcggcgtttttcgtttacgagtttttcggttcggtcgttattttgttcggtcgcgtttcggcggtttaggtttcgttaggcgtttggtttcggtcgtcgcggttcgagttattgcgatatcgcggttcggggtcgggtttgcgtcgtcgtcgtcgtcgttattttttttcggtttcggcggttgtcgatatttattcgtatttttgtggtgttttaaaggttttcgcgacgttttcgtttggtttttgggtttgggtttcggcgaaagtttcgtttcgttaaggtttagttgcgttttttagttatcggggttgtttcgtttggagttgcgtgcgatacggcgttcgtttttttttttttttttgttcgttcggttttttttttttcgtcgtcgtcgtttgtattacgtaattttcgttttttcgttttttttgcgcggtttttcgttttttcggttttatcggtttcggcgatcgcgggggagaagttgttgggggagggtcggaacgtatcgttatcggcgttcggggcgggggagtcgggaaatcgtcgtcgttatcgtttcgttagttcgaggcgcgggaggggttcggaaagttttttttcgttcgttcgtcgttgtcggcggtttcgggggcgtttttttcgcggtcgaggttttcgttcgcgtggggaagtttttatttgcgagtttgcggtttttgttttcggtattcgagatattttcgattcggcgcgtcggattttttgttaggttttatagtttttttcgttttgggatcgtcgcggaggattcgttttcgttatttcggatttt

SEQ ID NO: 22008 - DNA, 1579 bp, Artificial Sequence
  chemically treated genomic DNA (Homo sapiens) CpG-island No: 22008
aaaatccgaaataacgaaaacgaatcctccgcgacgatcccaaaacgaaaaaaactataaaacctaacaaaaaatccgacgcgccgaatcgaaaatatctcgaataccgaaaacaaaaaccgcaaactcgcaaataaaaacttccccacgcgaacgaaaacctcgaccgcgaaaaaaacgcccccgaaaccgccgacaacgacgaacgaacgaaaaaaaactttccgaacccctcccgcgcctcgaactaacgaaacgataacgacgacgatttcccgactcccccgccccgaacgccgataacgatacgttccgaccctcccccaacaacttctcccccgcgatcgccgaaaccgataaaaccgaaaaaacgaaaaaccgcgcaaaaaaaacgaaaaaacgaaaattacgtaatacaaacgacgacgacgaaaaaaaaaaaaccgaacgaacaaaaaaaaaaaaaaaaacgaacgccgtatcgcacgcaactccaaacgaaacaaccccgataactaaaaaacgcaactaaaccttaacgaaacgaaactttcgccgaaacccaaacccaaaaaccaaacgaaaacgtcgcgaaaacctttaaaacaccacaaaaatacgaataaatatcgacaaccgccgaaaccgaaaaaaaataacgacgacgacgacgacgcaaacccgaccccgaaccgcgatatcgcaataactcgaaccgcgacgaccgaaaccaaacgcctaacgaaacctaaaccgccgaaacgcgaccgaacaaaataacgaccgaaccgaaaaactcgtaaacgaaaaacgccgaaaataacaaaaaaacgaacgaaaccgaaccctaaatcaccccgaacgaaccgaaacgaccaaacctaaactacgcactaaaaaaaaacacgattcatcgcgcctaaaaacgacgacctaataacgccgacccctttccccgccgcgaccgaactaaattctcgaaaaataaaccgacgtataacccgaaacgactcgaacgtccgcgcctcgcctaataaaacgacctccgcgaaacgccgaaacccgtacccttaccccctcgcgcccacgcttcttcccgacgctactttccgaccgacgcgtattcccctataaactctaaactcaaacgcaaaaacaaccgcgaaaccgaactctctcgctttccgattccctacccgcgactctcgaattccccgcctacattattacgaacgtacaaaacgctattattaaataacaatcgcccttttaccccgttctcctaaaaaaacgaaccgaaacatacgcgcaaaaatactaacccgacgaccgaaccgaacaaaaccccccgacgcccgcctatcgctcgctaatcgaaccgaaccctacgctacgacctcgacgcgcccccgatcccaacgaaaacgcgcgccctaaccctaaaaataaccgtacgcccgccaaaccgctaaaacttaaaatccccaaactcgaaaatcgtcgcttttttttcccttaaaatctaaaaaacccccgtttctaccacccgtacaatattatataacgcaaacataaaata

SEQ ID NO: 22009 - DNA, 1068 bp, Artificial Sequence
  chemically treated genomic DNA (Homo sapiens) CpG-island No: 22009
tcgtacgcgttttttagtcgcggtcgttcgtttgtcgcggttatttcggtttttgtttttgttttttagtgatcggattaaggcgttgagcgaggttttgtttgcggggcggttatgcggcggtgataggagcgcgatcgatacgtacgggtttttcgttttttttcgtttttcgttcgttcgttagttttttttagtcgaggttgtttcgcggcggtcgtagttcgcgcgcggtttatattcgttttttttcggtattttcggtttcggagttgtttggaggcggtcgtattcgggtgagtttttttcgttttattttcgcgtttttcgttttcgtttcgggggttattgcgagcgggggtttttattagagattttgtttcgtcggggtttgtagggataggggtttgggagtcgcggttcgtcgcgcgcggtgtggggttttggggggcgttcgtgtcgtttttttttatttttatttttatcgtttcgtcgggtttcgagtttcgtcggttttggtagtggtcgaaacgaggcgatgggggtggggcggtacggacgcggtcgcgggggacgatagtggtacgcgcgcgttttagtgcgcgtgggggaggggcgcgcgcgtcgatcggcgtgcggtgggggggcgtttcgcgcgtgcgatttcgcgcgcgagcgagcgagcggttttgcgggttgcgtatgtttcgtcgcgttgattggtcggttaggcggtgcgggggcgcgcgcggtgttaggttcgagtcgtcgtggggtcgcgttcgtttggtgtatttggggtttttgcgtcggggtagtagacgcgcgggattggttaatcggcgcgggggcggggtcgcgcgttgtttggtaattgcggcgggcgggggagcgggagcgttgtttttcgtttcgtttcgtttttaggtggagttcgtagtgggttttgtttcgggtcggttcggcgcgtttgtttcgcggggtttgttttttgggggaaataaatataatgatcggaaggaaaattttagttttaggttatgaaaattaagtcgtttgggtttagtt

SEQ ID NO: 22010 - DNA, 1068 bp, Artificial Sequence
  chemically treated genomic DNA (Homo sapiens) CpG-island No: 22010
aactaaacccaaacgacttaattttcataacctaaaactaaaattttccttccgatcattatatttatttcccccaaaaaacaaaccccgcgaaacaaacgcgccgaaccgacccgaaacaaaacccactacgaactccacctaaaaacgaaacgaaacgaaaaacaacgctcccgctcccccgcccgccgcaattaccaaacaacgcgcgaccccgcccccgcgccgattaaccaatcccgcgcgtctactaccccgacgcaaaaaccccaaatacaccaaacgaacgcgaccccacgacgactcgaacctaacaccgcgcgcgcccccgcaccgcctaaccgaccaatcaacgcgacgaaacatacgcaacccgcaaaaccgctcgctcgctcgcgcgcgaaatcgcacgcgcgaaacgcccccccaccgcacgccgatcgacgcgcgcgcccctcccccacgcgcactaaaacgcgcgcgtaccactatcgtcccccgcgaccgcgtccgtaccgccccacccccatcgcctcgtttcgaccactaccaaaaccgacgaaactcgaaacccgacgaaacgataaaaataaaaataaaaaaaaacgacacgaacgccccccaaaaccccacaccgcgcgcgacgaaccgcgactcccaaacccctatccctacaaaccccgacgaaacaaaatctctaataaaaacccccgctcgcaataacccccgaaacgaaaacgaaaaacgcgaaaataaaacgaaaaaaactcacccgaatacgaccgcctccaaacaactccgaaaccgaaaataccgaaaaaaaacgaatataaaccgcgcgcgaactacgaccgccgcgaaacaacctcgactaaaaaaaactaacgaacgaacgaaaaacgaaaaaaaacgaaaaacccgtacgtatcgatcgcgctcctatcaccgccgcataaccgccccgcaaacaaaacctcgctcaacgccttaatccgatcactaaaaaacaaaaacaaaaaccgaaataaccgcgacaaacgaacgaccgcgactaaaaaacgcgtacga

SEQ ID NO: 22011 - DNA, 1068 bp, Artificial Sequence
  chemically treated genomic DNA (Homo sapiens) CpG-island No: 22011
ggttgaatttagacggtttaatttttatggtttaaagttgaagtttttttttcggttattgtgtttattttttttaaagaataggtttcgcggggtaggcgcgtcgggtcggttcgggataaagtttattgcggattttatttgggagcggggcggggcgggggatagcgttttcgttttttcgttcgtcgtagttattaggtaacgcgcggtttcgttttcgcgtcggttggttaatttcgcgcgtttgttgtttcggcgtaggagttttagatatattaggcgagcgcgattttacgacggttcgggtttggtatcgcgcgcgttttcgtatcgtttagtcggttaattagcgcggcggggtatgcgtagttcgtagggtcgttcgttcgttcgcgcgcgggatcgtacgcgcgaggcgtttttttatcgtacgtcggtcggcgcgcgcgttttttttttacgcgtattgaggcgcgcgcgtgttattgtcgtttttcgcgatcgcgttcgtgtcgttttatttttatcgtttcgtttcggttattgttaaggtcggcggggttcgagattcggcgaggcggtgggggtgggggtagggggaggcggtacgggcgttttttaaggttttatatcgcgcgcggcgggtcgcggtttttaggtttttgtttttgtaggtttcggcggggtaaagtttttaataaaggttttcgttcgtaatggttttcgaggcgggggcggggggcgcggggatgaggcgagagggatttattcgagtgcggtcgtttttaggtagtttcggggtcgggggtgtcgaggggaggcgagtgtgggtcgcgcgcgggttgcggtcgtcgcggagtagtttcggttgaggggagttggcgagcggacgggaggcgagagggggcgaggggttcgtgcgtgtcggtcgcgtttttgttatcgtcgtatggtcgtttcgtaggtagggtttcgtttagcgttttgattcgattattgggggatagaggtagaggtcggggtgatcgcggtaggcgggcggtcgcggttggagagcgcgtgcgg

SEQ ID NO: 22012 - DNA, 1068 bp, Artificial Sequence
  chemically treated genomic DNA (Homo sapiens) CpG-island No: 22012
ccgcacgcgctctccaaccgcgaccgcccgcctaccgcgatcaccccgacctctacctctatcccccaataatcgaatcaaaacgctaaacgaaaccctacctacgaaacgaccatacgacgataacaaaaacgcgaccgacacgcacgaacccctcgccccctctcgcctcccgtccgctcgccaactcccctcaaccgaaactactccgcgacgaccgcaacccgcgcgcgacccacactcgcctcccctcgacacccccgaccccgaaactacctaaaaacgaccgcactcgaataaatccctctcgcctcatccccgcgccccccgcccccgcctcgaaaaccattacgaacgaaaacctttattaaaaactttaccccgccgaaacctacaaaaacaaaaacctaaaaaccgcgacccgccgcgcgcgatataaaaccttaaaaaacgcccgtaccgcctccccctacccccacccccaccgcctcgccgaatctcgaaccccgccgaccttaacaataaccgaaacgaaacgataaaaataaaacgacacgaacgcgatcgcgaaaaacgacaataacacgcgcgcgcctcaatacgcgtaaaaaaaaaacgcgcgcgccgaccgacgtacgataaaaaaacgcctcgcgcgtacgatcccgcgcgcgaacgaacgaacgaccctacgaactacgcataccccgccgcgctaattaaccgactaaacgatacgaaaacgcgcgcgataccaaacccgaaccgtcgtaaaatcgcgctcgcctaatatatctaaaactcctacgccgaaacaacaaacgcgcgaaattaaccaaccgacgcgaaaacgaaaccgcgcgttacctaataactacgacgaacgaaaaaacgaaaacgctatcccccgccccgccccgctcccaaataaaatccgcaataaactttatcccgaaccgacccgacgcgcctaccccgcgaaacctattctttaaaaaaaataaacacaataaccgaaaaaaaaacttcaactttaaaccataaaaattaaaccgtctaaattcaacc

SEQ ID NO: 22013 - DNA, 558 bp, Artificial Sequence
  chemically treated genomic DNA (Homo sapiens) CpG-island No: 22013
  unsure (102, 105, 214, 287..288, 293, 302, 308)
cgtttttacgttttttagataatagttttagtttttttaggtttttttcgggtatcggtttcgtggtcgtttttttacgaagaggagttattttcggttttnaanggatcggatcgagggtagtggcgagcgtattatttgatcgggtattattcggattttataattgtttttgttttttttcgcggaattggaatttaatagtcgtagagtntttttggaattatgtgttgttgtcgttttcgtcgtcgtcgtcgttgttttcgtcgtcgttcgcgcgtcgtttnngcgtnatttatagnttgagnatggtgataggatttagtaatacgaaattcggcgtttagagttgttttgtcgtcgtcgttatagatattatagttatcgttttgttttcgatagtgtatatagtttcggttatttcgtatatttttcgacgttttaagttttcgaggttttcgcggattatttagttaattataaagttgtagtttttttcgttttcgttttgatgtatagttttttgattggcgggttgcgtgtttttatgtgatcgga

SEQ ID NO: 22014 - DNA, 558 bp, Artificial Sequence
  chemically treated genomic DNA (Homo sapiens) CpG-island No: 22014
  unsure (251, 257, 266, 271..272, 345, 454, 457)
tccgatcacataaaaacacgcaacccgccaatcaaaaaactatacatcaaaacgaaaacgaaaaaaactacaactttataattaactaaataatccgcgaaaacctcgaaaacttaaaacgtcgaaaaatatacgaaataaccgaaactatatacactatcgaaaacaaaacgataactataatatctataacgacgacgacaaaacaactctaaacgccgaatttcgtattactaaatcctatcaccatnctcaanctataaatnacgcnnaaacgacgcgcgaacgacgacgaaaacaacgacgacgacgacgaaaacgacaacaacacataattccaaaaanactctacgactattaaattccaattccgcgaaaaaaaacaaaaacaattataaaatccgaataatacccgatcaaataatacgctcgccactaccctcgatccgatccnttnaaaaccgaaaataactcctcttcgtaaaaaaacgaccacgaaaccgatacccgaaaaaaacctaaaaaaactaaaactattatctaaaaaacgtaaaaacg

SEQ ID NO: 22015 - DNA, 558 bp, Artificial Sequence
  chemically treated genomic DNA (Homo sapiens) CpG-island No: 22015
  unsure (251, 257, 266, 271..272, 345, 454, 457)
ttcggttatatggggatacgtagttcgttaattaggaggttgtatattagggcgggggcgggaggagttgtagttttgtgattggttgaatggttcgcggaggtttcgggggtttggggcgtcggggagtgtgcgaggtggtcggggttgtgtgtattatcggagataaagcggtggttgtggtgtttgtgacggcggcggtagagtagttttaaacgtcgaatttcgtgttgttgaattttgttattatntttaanttatgggtngcgtnngggcggcgcgcgggcggcggcggaggtagcggcggcggcggcggaggcggtagtagtatatggttttaagagngttttgcggttgttgggttttaatttcgcggggagggataaaggtagttgtgagattcgggtagtgttcggttaggtggtgcgttcgttattgttttcgattcggtttnttngaagtcgggagtagttttttttcgtggggaggcggttacgggatcgatgttcgggaagggtttggggaggttgaggttgttgtttgagggacgtgggggcg

SEQ ID NO: 22016 - DNA, 558 bp, Artificial Sequence
  chemically treated genomic DNA (Homo sapiens) CpG-island No: 22016
  unsure (102, 105, 214, 287..288, 293, 302, 308)
cgcccccacgtccctcaaacaacaacctcaacctccccaaacccttcccgaacatcgatcccgtaaccgcctccccacgaaaaaaaactactcccgacttcnaanaaaccgaatcgaaaacaataacgaacgcaccacctaaccgaacactacccgaatctcacaactacctttatccctccccgcgaaattaaaacccaacaaccgcaaaacnctcttaaaaccatatactactaccgcctccgccgccgccgccgctacctccgccgccgcccgcgcgccgcccnnacgcnacccataanttaaanataataacaaaattcaacaacacgaaattcgacgtttaaaactactctaccgccgccgtcacaaacaccacaaccaccgctttatctccgataatacacacaaccccgaccacctcgcacactccccgacgccccaaacccccgaaacctccgcgaaccattcaaccaatcacaaaactacaactcctcccgcccccgccctaatatacaacctcctaattaacgaactacgtatccccatataaccgaa

SEQ ID NO: 22017 - DNA, 600 bp, Artificial Sequence
  chemically treated genomic DNA (Homo sapiens) CpG-island No: 22017
  unsure (55, 88, 98, 102, 119, 122, 137, 199, 219, 225, 297, 304..305)
  unsure (314..315, 324..325, 327..328, 351..352, 360..361, 367, 374)
  unsure (453, 488, 492, 533, 555, 566)
cggtttcgtttttgttacgtgatagcgtgcgtttttttttttgtttttttgattntttttcgttatttaaagaaatagtatcgggggncgggtcgagncgancgtagtcgggacgtaangtntgcggtgcggatcgngaggagttattttgtttcgtcgtcggggagttaggtttttaaatcgaagaagttttggcgtngttttttttttttttcgggntttggntagggcgaaggaacgggcgtgcggtcgatcgagcgatcggttggcggtttttttttttgttttggtatttangtttttnnggggcgtannggcggtcgnnnnntcgcgcgcgcgttcggtggtcgnnttgcgttnnngcgtncgcgttnttttttttcgtacgtagaattcgggcggcggtttatgcgtttgcgattcgacgaggagtcgttcgggtggtcggcggtngcgggtagtttttcgttcgtttcgggggaggcggncgtngtagcggtcgcgggatttggagcggtcggggaggcgggggntgtcggggtcggtttggaggtnttggcgttatntttcggggtttgtaaggatttagttgggggggta

SEQ ID NO: 22018 - DNA, 600 bp, Artificial Sequence
  chemically treated genomic DNA (Homo sapiens) CpG-island No: 22018
  unsure (35, 46, 68, 109, 113, 148, 227, 234, 239..240, 249..250, 273..274)
  unsure (276..277, 286..287, 296..297, 304, 376, 382, 402, 464, 479)
  unsure (482, 499, 503, 513, 546)
tacccccccaactaaatccttacaaaccccgaaanataacgccaanacctccaaaccgaccccgacancccccgcctccccgaccgctccaaatcccgcgaccgctacnacgnccgcctcccccgaaacgaacgaaaaactacccgcnaccgccgaccacccgaacgactcctcgtcgaatcgcaaacgcataaaccgccgcccgaattctacgtacgaaaaaaaanaacgcgnacgcnnnaacgcaanncgaccaccgaacgcgcgcgcgannnnncgaccgccnntacgccccnnaaaaacntaaataccaaaacaaaaaaaaaaaccgccaaccgatcgctcgatcgaccgcacgcccgttccttcgccctanccaaancccgaaaaaaaaaaaaaacnacgccaaaacttcttcgatttaaaaacctaactccccgacgacgaaacaaaataactcctcncgatccgcaccgcanacnttacgtcccgactacgntcgnctcgacccgncccccgatactatttctttaaataacgaaaaanaatcaaaaaaacaaaaaaaaaaacgcacgctatcacgtaacaaaaacgaaaccg

SEQ ID NO: 22019 - DNA, 600 bp, Artificial Sequence
  chemically treated genomic DNA (Homo sapiens) CpG-island No: 22019
  unsure (35, 46, 68, 109, 113, 148, 227, 234, 239..240, 249..250, 273..274)
  unsure (276..277, 286..287, 296..297, 304, 376, 382, 402, 464, 479)
  unsure (482, 499, 503, 513, 546)
tgtttttttaattgggtttttgtaggtttcgaagngtggcgttagngtttttaagtcggtttcggtanttttcgttttttcggtcgttttaaatttcgcggtcgttgtngcgntcgtttttttcggagcgggcggagagttgttcgtngtcgtcgattattcggacgatttttcgtcgaatcgtaaacgtataggtcgtcgttcgagttttgcgtacgagaagaaangacgcgngcgtnnnagcgtaanncggttatcgggcgcgcgcgcggnnnnncggtcgttnntgcgttttnnaagagtntggatgttagagtaggagaaagagtcgttaatcgatcgttcgatcgatcgtacgttcgttttttcgttttanttaganttcgggagggggggagggtngcgttagggttttttcgatttaggggtttgatttttcggcgacgagataagatggttttttncggttcgtatcgtangtnttacgtttcggttgcgntcgnttcggttcgnttttcggtattgtttttttaaatggcggagagnggttaggaaagtaggaagagaggcgtacgttgttacgtgataggggcgggatcg

SEQ ID NO: 22020 - DNA, 600 bp, Artificial Sequence
  chemically treated genomic DNA (Homo sapiens) CpG-island No: 22020
  unsure (55, 88, 98, 102, 119, 122, 137, 199, 219, 225, 297, 304..305)
  unsure (314..315, 324..325, 327..328, 351..352, 360..361, 367, 374)
  unsure (453, 488, 492, 533, 555, 566)
cgatcccgcccctatcacgtaacaacgtacgcctctcttcctactttcctaaccnctctccgccatttaaaaaaacaataccgaaaancgaaccgaancgancgcaaccgaaacgtaanacntacgatacgaaccgnaaaaaaccatcttatctcgtcgccgaaaaatcaaacccctaaatcgaaaaaaccctaacgcnaccctccccccctcccgaantctaantaaaacgaaaaaacgaacgtacgatcgatcgaacgatcgattaacgactctttctcctactctaacatccanactcttnnaaaacgcannaacgaccgnnnnnccgcgcgcgcgcccgataaccgnnttacgctnnnacgcncgcgtcntttcttctcgtacgcaaaactcgaacgacgacctatacgtttacgattcgacgaaaaatcgtccgaataatcgacgacnacgaacaactctccgcccgctccgaaaaaaacgancgcnacaacgaccgcgaaatttaaaacgaccgaaaaaacgaaaantaccgaaaccgacttaaaaacnctaacgccacncttcgaaacctacaaaaacccaattaaaaaaaca

SEQ ID NO: 22021 - DNA, 548 bp, Artificial Sequence
  chemically treated genomic DNA (Homo sapiens) CpG-island No: 22021
ttagtcgacgattttgtttttgtagtaggcgatttcgaagcgttttttggcgcgttttattcgtattacggttatattggttaggcggatttggttggtgggggtgaagatcgatatcgcggttgtttaaagatttagaagtcggtaaattagggttgattcgcgtcgtttagtttgaaggttattagcgtttcgcggtaacgatcgagcggcgcgcggtattgatttaattataagtgcgcggcgtcgcgatttattagttttaggtagtcgttatagcgtgtttggtaggtttatttattgcgtaggcgttaggtggagtagaagtcgggaggggagaagtgagcgatgacgtttgcgtattgtggtttttatcgttatttttttacgtttaaaaagggaggtgtttttttttggcgttttattttcgttaatgagttgagagttttgataggatgttcgcggatgtttagtgatcgggttgaaatatagcgttggtattatttcgtttcgcggaatttaagggttagatttattttataatagaa

SEQ ID NO: 22022 - DNA, 548 bp, Artificial Sequence
  chemically treated genomic DNA (Homo sapiens) CpG-island No: 22022
ttctattataaaataaatctaacccttaaattccgcgaaacgaaataataccaacgctatatttcaacccgatcactaaacatccgcgaacatcctatcaaaactctcaactcattaacgaaaataaaacgccaaaaaaaaacacctccctttttaaacgtaaaaaaataacgataaaaaccacaatacgcaaacgtcatcgctcacttctcccctcccgacttctactccacctaacgcctacgcaataaataaacctaccaaacacgctataacgactacctaaaactaataaatcgcgacgccgcgcacttataattaaatcaataccgcgcgccgctcgatcgttaccgcgaaacgctaataaccttcaaactaaacgacgcgaatcaaccctaatttaccgacttctaaatctttaaacaaccgcgatatcgatcttcacccccaccaaccaaatccgcctaaccaatataaccgtaatacgaataaaacgcgccaaaaaacgcttcgaaatcgcctactacaaaaacaaaatcgtcgactaa

SEQ ID NO: 22023 - DNA, 548 bp, Artificial Sequence
  chemically treated genomic DNA (Homo sapiens) CpG-island No: 22023
ttttattataaagtgggtttggtttttgaatttcgcggaacgaggtggtgttaacgttgtgttttaattcggttattaaatattcgcgagtattttgttagagtttttagtttattggcgaaagtaaaacgttaaggaaaagtatttttttttttgggcgtggaaagatggcggtaaaagttataatgcgtaggcgttatcgtttattttttttttttcggtttttgttttatttgacgtttgcgtagtaagtaagtttgttagatacgttgtggcggttgtttgaagttagtgagtcgcggcgtcgcgtatttgtggttgggttagtgtcgcgcgtcgttcggtcgttatcgcgaggcgttggtggtttttaggttggacggcgcgggttagttttggtttgtcggtttttgggtttttgaatagtcgcgatgtcgatttttatttttattaattagattcgtttaattaatgtggtcgtggtacggatgaagcgcgttaggaagcgtttcgaaatcgtttgttatagaaataaggtcgtcggttgg

SEQ ID NO: 22024 - DNA, 548 bp, Artificial Sequence
  chemically treated genomic DNA (Homo sapiens) CpG-island No: 22024
ccaaccgacgaccttatttctataacaaacgatttcgaaacgcttcctaacgcgcttcatccgtaccacgaccacattaattaaacgaatctaattaataaaaataaaaatcgacatcgcgactattcaaaaacccaaaaaccgacaaaccaaaactaacccgcgccgtccaacctaaaaaccaccaacgcctcgcgataacgaccgaacgacgcgcgacactaacccaaccacaaatacgcgacgccgcgactcactaacttcaaacaaccgccacaacgtatctaacaaacttacttactacgcaaacgtcaaataaaacaaaaaccgaaaaaaaaaaaataaacgataacgcctacgcattataacttttaccgccatctttccacgcccaaaaaaaaaaatacttttccttaacgttttactttcgccaataaactaaaaactctaacaaaatactcgcgaatatttaataaccgaattaaaacacaacgttaacaccacctcgttccgcgaaattcaaaaaccaaacccactttataataaaa

SEQ ID NO: 22025 - DNA, 545 bp, Artificial Sequence
  chemically treated genomic DNA (Homo sapiens) CpG-island No: 22025
aatagagttcgttatttgttttgggaacggcggtgggtgttttaggaggcggattttcggtgtatttttgcgcgtgtgtatttttttttgcgtgcgtgttcgcgcgtgcgtgttcgtatatgcgttattttcgtattgttttcgttttttgcgtttttttaggttatcgtttgttttagtttttaggttttggtttttagtggatgagaattatcgagtttgcggggttggacgttgatcgttcgggttagtatttaggcgggcgggagttgtgcggtttagggttcgcgcgggtcgggtagaggttcgagcggattttcgagcgtgaatttcggagttagcgttgggttagaggggttaggcgggaggtggtggcggaggcgaaggggcgacgggatttgggtttggttcgtgtgtgttttcggcggtttgcgtcggtcgtcgttgtacggtgagttttagggaggcggatttgggtttcgagaaggatattcgtttggatttgtttcgtagttcggttcgggtttcgggagtagaatagtttt

SEQ ID NO: 22026 - DNA, 545 bp, Artificial Sequence
  chemically treated genomic DNA (Homo sapiens) CpG-island No: 22026
aaaactattctactcccgaaacccgaaccgaactacgaaacaaatccaaacgaatatccttctcgaaacccaaatccgcctccctaaaactcaccgtacaacgacgaccgacgcaaaccgccgaaaacacacacgaaccaaacccaaatcccgtcgccccttcgcctccgccaccacctcccgcctaacccctctaacccaacgctaactccgaaattcacgctcgaaaatccgctcgaacctctacccgacccgcgcgaaccctaaaccgcacaactcccgcccgcctaaatactaacccgaacgatcaacgtccaaccccgcaaactcgataattctcatccactaaaaaccaaaacctaaaaactaaaacaaacgataacctaaaaaaacgcaaaaaacgaaaacaatacgaaaataacgcatatacgaacacgcacgcgcgaacacgcacgcaaaaaaaaatacacacgcgcaaaaatacaccgaaaatccgcctcctaaaacacccaccgccgttcccaaaacaaataacgaactctatt

SEQ ID NO: 22027 - DNA, 545 bp, Artificial Sequence
  chemically treated genomic DNA (Homo sapiens) CpG-island No: 22027
aaggttgttttgttttcgaggttcgggtcgggttacggggtaaatttaggcgggtgtttttttcggggtttagattcgtttttttggggtttatcgtatagcgacggtcggcgtaggtcgtcgaggatatatacgggttaggtttaggtttcgtcgttttttcgttttcgttattatttttcgtttggtttttttggtttagcgttggtttcggggtttacgttcgggggttcgttcgagtttttattcggttcgcgcgaattttgggtcgtatagttttcgttcgtttaggtgttggttcgggcggttagcgtttagtttcgtagattcggtgatttttatttattagaggttaaagtttgggaattagagtaagcggtgatttgaagaggcgtaggaagcgagggtagtgcggaggtggcgtatgtgcgagtacgtacgcgcgaatacgtacgtagggagaggtgtatacgcgtaggagtgtatcggaagttcgttttttgggatatttatcgtcgtttttaggataagtaacggattttatt

SEQ ID NO: 22028 - DNA, 545 bp, Artificial Sequence
  chemically treated genomic DNA (Homo sapiens) CpG-island No: 22028
aataaaatccgttacttatcctaaaaacgacgataaatatcccaaaaaacgaacttccgatacactcctacgcgtatacacctctccctacgtacgtattcgcgcgtacgtactcgcacatacgccacctccgcactaccctcgcttcctacgcctcttcaaatcaccgcttactctaattcccaaactttaacctctaataaataaaaatcaccgaatctacgaaactaaacgctaaccgcccgaaccaacacctaaacgaacgaaaactatacgacccaaaattcgcgcgaaccgaataaaaactcgaacgaacccccgaacgtaaaccccgaaaccaacgctaaaccaaaaaaaccaaacgaaaaataataacgaaaacgaaaaaacgacgaaacctaaacctaacccgtatatatcctcgacgacctacgccgaccgtcgctatacgataaaccccaaaaaaacgaatctaaaccccgaaaaaaacacccgcctaaatttaccccgtaacccgacccgaacctcgaaaacaaaacaacctt

SEQ ID NO: 22029 - DNA, 556 bp, Artificial Sequence
  chemically treated genomic DNA (Homo sapiens) CpG-island No: 22029
tcggcgcggcgattttagtcgcgtcgcgtttgcgtgggtttagcgttttatgggagttgtagtttcgttatgaggtcgcgcgtcgcgttttttttagagtaggtaattttaggcggcggagtcggaatagtttggaggcgagaagttgggaaggaaagtagagggagtcgaagcgggacgtatagagtcgtagttgtaggtagacggagtggacgtttaggtagagtggagagacgttttgggtttgagagttgatttatgttattgtttcgatttcggaggcgtggaggggtcgcgggttaggcggattttttcgtggttgtaaggtgcgggttagttttacgtgtatttttgatttttgcgagtttcgttggttgcgtttgtataatgggtcgaacggtaagagtaataatattttttcggcgttttcgcgcggattttatttatgcgaaatgtcgtttttttttgacgttcggagtaggcgggtaggtgcggggtatttgcgttggtggggtcgttagttagttggttggtttcggggcgttagttgggtttt

SEQ ID NO: 22030 - DNA, 556 bp, Artificial Sequence
  chemically treated genomic DNA (Homo sapiens) CpG-island No: 22030
aaaacccaactaacgccccgaaaccaaccaactaactaacgaccccaccaacgcaaataccccgcacctacccgcctactccgaacgtcaaaaaaaaacgacatttcgcataaataaaatccgcgcgaaaacgccgaaaaaatattattactcttaccgttcgacccattatacaaacgcaaccaacgaaactcgcaaaaatcaaaaatacacgtaaaactaacccgcaccttacaaccacgaaaaaatccgcctaacccgcgacccctccacgcctccgaaatcgaaacaataacataaatcaactctcaaacccaaaacgtctctccactctacctaaacgtccactccgtctacctacaactacgactctatacgtcccgcttcgactccctctactttccttcccaacttctcgcctccaaactattccgactccgccgcctaaaattacctactctaaaaaaaacgcgacgcgcgacctcataacgaaactacaactcccataaaacgctaaacccacgcaaacgcgacgcgactaaaatcgccgcgccga

SEQ ID NO: 22031 - DNA, 556 bp, Artificial Sequence
  chemically treated genomic DNA (Homo sapiens) CpG-island No: 22031
ggagtttagttggcgtttcggagttagttagttggttagcggttttattagcgtaagtgtttcgtatttgttcgtttgtttcgagcgttaagagaaggcggtatttcgtatgggtaaaattcgcgcggggacgtcgggagaatgttgttgtttttgtcgttcggtttattgtatagacgtagttagcgaggttcgtagaggttagggatgtacgtaggattggttcgtattttgtagttacggaaagattcgtttggttcgcggtttttttacgttttcgaggtcgagatagtgatataagttaatttttaagtttagggcgtttttttattttgtttagacgtttatttcgtttgtttgtagttacggttttgtgcgtttcgtttcgattttttttgtttttttttttagtttttcgtttttagattgtttcggtttcgtcgtttgaaattatttgttttgggggaggcgcggcgcgcggttttatgacggaattataatttttatgaggcgttgggtttacgtaggcgcggcgcggttgaagtcgtcgcgtcgg

SEQ ID NO: 22032 - DNA, 556 bp, Artificial Sequence
  chemically treated genomic DNA (Homo sapiens) CpG-island No: 22032
ccgacgcgacgacttcaaccgcgccgcgcctacgtaaacccaacgcctcataaaaattataattccgtcataaaaccgcgcgccgcgcctcccccaaaacaaataatttcaaacgacgaaaccgaaacaatctaaaaacgaaaaactaaaaaaaaaaacaaaaaaaatcgaaacgaaacgcacaaaaccgtaactacaaacaaacgaaataaacgtctaaacaaaataaaaaaacgccctaaacttaaaaattaacttatatcactatctcgacctcgaaaacgtaaaaaaaccgcgaaccaaacgaatctttccgtaactacaaaatacgaaccaatcctacgtacatccctaacctctacgaacctcgctaactacgtctatacaataaaccgaacgacaaaaacaacaacattctcccgacgtccccgcgcgaattttacccatacgaaataccgccttctcttaacgctcgaaacaaacgaacaaatacgaaacacttacgctaataaaaccgctaaccaactaactaactccgaaacgccaactaaactcc

SEQ ID NO: 22033 - DNA, 937 bp, Artificial Sequence
  chemically treated genomic DNA (Homo sapiens) CpG-island No: 22033
ttgcggagttattcggtttatgaacgagtcgtttcgcgtttttcgtttttagaaagaggtttttaagaggcgagttttgcgttatttatttattttgatcgcgagtcgggaggaaatcgtatttgttcggttcgggggcggaggcgtttattatttttttggttttttcgaagcgtcgtaggggtgtttggtgcgtttttagtaatttttagcgcgggtttttagattttggttagtttagtttcgtttatacgcgtaagtggttggttcgtggagtttgttaatcggtgttagtcgttgtgcgattggtcggtgggataaaagcgcggaagggttttttttcgtggtgtgtagtcggtttggcgtgattttcgtttgatttaggtgagatatttgcgttcgggagagcgggtcgggtttcgttatttttttagggcggttgtggggtttgcgcggtttcgcgtttttggtttaggaggattcgtcgttcgatttttagattagtcgattttcggtttttcgtttttgcgttcgtcgtttttcgcgtatcgtcgagttcgcgtttttttcgtgtttaaatcgcggcggggttgcggtcgttggttttgggtttcgcgtttttagcgttttcggggtgttttttagtgtagtttgttcggtgggcgtcgaggtttcgcgtttcgggtcgtttcgggattttgcgttttttttatcgtagtcggttttgcggggcgagttttaggagaattagttcggatttcgttagttttttgtattgggcgtgtgggtttttgcgggtttagtcggcgtcgcggggtcgggggcgcgcgtcgtcggcgttcgtggttatagtaaagatttggatttgagttttaatttttttattaattttttttttttagagtacggtaggggtttgcgttgtcgttttgaggtt

SEQ ID NO: 22034 - DNA, 937 bp, Artificial Sequence
  chemically treated genomic DNA (Homo sapiens) CpG-island No: 22034
aacctcaaaacgacaacgcaaacccctaccgtactctaaaaaaaaaaaattaataaaaaaattaaaactcaaatccaaatctttactataaccacgaacgccgacgacgcgcgcccccgaccccgcgacgccgactaaacccgcaaaaacccacacgcccaatacaaaaaactaacgaaatccgaactaattctcctaaaactcgccccgcaaaaccgactacgataaaaaaaacgcaaaatcccgaaacgacccgaaacgcgaaacctcgacgcccaccgaacaaactacactaaaaaacaccccgaaaacgctaaaaacgcgaaacccaaaaccaacgaccgcaaccccgccgcgatttaaacacgaaaaaaacgcgaactcgacgatacgcgaaaaacgacgaacgcaaaaacgaaaaaccgaaaatcgactaatctaaaaatcgaacgacgaatcctcctaaaccaaaaacgcgaaaccgcgcaaaccccacaaccgccctaaaaaaataacgaaacccgacccgctctcccgaacgcaaatatctcacctaaatcaaacgaaaatcacgccaaaccgactacacaccacgaaaaaaaacccttccgcgcttttatcccaccgaccaatcgcacaacgactaacaccgattaacaaactccacgaaccaaccacttacgcgtataaacgaaactaaactaaccaaaatctaaaaacccgcgctaaaaattactaaaaacgcaccaaacacccctacgacgcttcgaaaaaaccaaaaaaataataaacgcctccgcccccgaaccgaacaaatacgatttcctcccgactcgcgatcaaaataaataaataacgcaaaactcgcctcttaaaaacctctttctaaaaacgaaaaacgcgaaacgactcgttcataaaccgaataactccgcaa

SEQ ID NO: 22035 - DNA, 937 bp, Artificial Sequence
  chemically treated genomic DNA (Homo sapiens) CpG-island No: 22035
ggttttaagacggtagcgtaggtttttgtcgtattttgggaaagaaaaattagtgaaaaaattaaggtttaagtttaggtttttgttgtaattacgagcgtcggcggcgcgcgttttcgatttcgcggcgtcggttgagttcgtagggatttatacgtttagtgtaggaggttggcgggattcgggttggtttttttggagttcgtttcgtagggtcggttgcggtgaagagagcgtagggtttcgaggcgattcgaggcgcggggtttcggcgtttatcgggtaggttatattgaagggtatttcgaagacgttgggggcgcggggtttagggttaacggtcgtaatttcgtcgcgatttgggtacggagaggacgcgggttcggcggtgcgcgaagggcgacgggcgtaggggcgggagatcgagagtcggttggtttaagagtcgggcggcggatttttttgggttaggggcgcggagtcgcgtaggttttatagtcgttttggggagatggcggagttcggttcgttttttcgagcgtaggtattttatttggattaggcgagggttacgttaagtcggttatatattacggaaaggagttttttcgcgtttttattttatcgattaatcgtatagcgattagtatcgattgataagttttacggattagttatttgcgcgtatgggcgggattaagttagttagagtttagaagttcgcgttaagggttgttagggacgtattaaatatttttacggcgtttcggaggagttaaaggaataatgggcgttttcgttttcgggtcgggtagatgcggttttttttcgattcgcgattaaaatgggtgagtagcgtagagttcgttttttggaggtttttttttgaaggcggaggacgcggggcggttcgtttatgggtcgggtggtttcgtag

SEQ ID NO: 22036 - DNA, 937 bp, Artificial Sequence
  chemically treated genomic DNA (Homo sapiens) CpG-island No: 22036
ctacgaaaccacccgacccataaacgaaccgccccgcgtcctccgccttcaaaaaaaaacctccaaaaaacgaactctacgctactcacccattttaatcgcgaatcgaaaaaaaaccgcatctacccgacccgaaaacgaaaacgcccattattcctttaactcctccgaaacgccgtaaaaatatttaatacgtccctaacaacccttaacgcgaacttctaaactctaactaacttaatcccgcccatacgcgcaaataactaatccgtaaaacttatcaatcgatactaatcgctatacgattaatcgataaaataaaaacgcgaaaaaactcctttccgtaatatataaccgacttaacgtaaccctcgcctaatccaaataaaatacctacgctcgaaaaaacgaaccgaactccgccatctccccaaaacgactataaaacctacgcgactccgcgcccctaacccaaaaaaatccgccgcccgactcttaaaccaaccgactctcgatctcccgcccctacgcccgtcgcccttcgcgcaccgccgaacccgcgtcctctccgtacccaaatcgcgacgaaattacgaccgttaaccctaaaccccgcgcccccaacgtcttcgaaatacccttcaatataacctacccgataaacgccgaaaccccgcgcctcgaatcgcctcgaaaccctacgctctcttcaccgcaaccgaccctacgaaacgaactccaaaaaaaccaacccgaatcccgccaacctcctacactaaacgtataaatccctacgaactcaaccgacgccgcgaaatcgaaaacgcgcgccgccgacgctcgtaattacaacaaaaacctaaacttaaaccttaattttttcactaatttttctttcccaaaatacgacaaaaacctacgctaccgtcttaaaacc

SEQ ID NO: 22037 - DNA, 529 bp, Artificial Sequence
  chemically treated genomic DNA (Homo sapiens) CpG-island No: 22037
gttttgcgaaacgggatacggtagtgtaacgggaataatcggatatcgaggttttcgaaggttgaggtcgcggtagaggcggcggtacggtgacgggcgcgatttcggtttttcggttttttaaggggcggtttcgggatatttgagtttcgcggggtcgtgaacgtttagtatagtttcgggtcggaattacgatttattatatcgcgttggcgttgggaacggcgtcggtgacggatcgggggtcggaagtgaaggacgggggaggatcgttgttttcggcgtcgtaattgttgttatttttttcgcgttatggttgcgttcggtcgttaggtaagttcgagttgggcgcgcgggttttttcgggtcgtaggcgggcgggtagcgacgtagaggaatcgcggtcgtcgagtgttttacggttaggtcgtggagttttttcggaggttcgtgtacgttgatttggttttggtattttggattcgtggttttgtttaattattgtgggatatagagttgatattttttt

SEQ ID NO: 22038 - DNA, 529 bp, Artificial Sequence
  chemically treated genomic DNA (Homo sapiens) CpG-island No: 22038
aaaaaaatatcaactctatatcccacaataattaaacaaaaccacgaatccaaaataccaaaaccaaatcaacgtacacgaacctccgaaaaaactccacgacctaaccgtaaaacactcgacgaccgcgattcctctacgtcgctacccgcccgcctacgacccgaaaaaacccgcgcgcccaactcgaacttacctaacgaccgaacgcaaccataacgcgaaaaaaataacaacaattacgacgccgaaaacaacgatcctcccccgtccttcacttccgacccccgatccgtcaccgacgccgttcccaacgccaacgcgatataataaatcgtaattccgacccgaaactatactaaacgttcacgaccccgcgaaactcaaatatcccgaaaccgccccttaaaaaaccgaaaaaccgaaatcgcgcccgtcaccgtaccgccgcctctaccgcgacctcaaccttcgaaaacctcgatatccgattattcccgttacactaccgtatcccgtttcgcaaaac

SEQ ID NO: 22039 - DNA, 529 bp, Artificial Sequence
  chemically treated genomic DNA (Homo sapiens) CpG-island No: 22039
aaaaaaatgttaattttatattttataataattgagtagagttacgggtttaggatgttaaaattaggttagcgtgtacggattttcgggagggttttacgatttggtcgtgaaatattcggcggtcgcggtttttttgcgtcgttgttcgttcgtttgcgattcggagaagttcgcgcgtttagttcgagtttatttgacggtcgaacgtagttatagcgcggagaagatggtagtagttacggcgtcggaagtagcggttttttttcgttttttattttcggttttcggttcgttatcgacgtcgtttttagcgttagcgcggtgtggtggatcgtgatttcggttcggagttgtgttgagcgtttacggtttcgcggggtttaggtgtttcggggtcgttttttagaaagtcggaaggtcggagtcgcgttcgttatcgtgtcgtcgtttttgtcgcggttttagttttcgggggtttcggtgttcggttgttttcgttgtattgtcgtgtttcgtttcgtagagt

SEQ ID NO: 22040 - DNA, 529 bp, Artificial Sequence
  chemically treated genomic DNA (Homo sapiens) CpG-island No: 22040
actctacgaaacgaaacacgacaatacaacgaaaacaaccgaacaccgaaacccccgaaaactaaaaccgcgacaaaaacgacgacacgataacgaacgcgactccgaccttccgactttctaaaaaacgaccccgaaacacctaaaccccgcgaaaccgtaaacgctcaacacaactccgaaccgaaatcacgatccaccacaccgcgctaacgctaaaaacgacgtcgataacgaaccgaaaaccgaaaataaaaaacgaaaaaaaaccgctacttccgacgccgtaactactaccatcttctccgcgctataactacgttcgaccgtcaaataaactcgaactaaacgcgcgaacttctccgaatcgcaaacgaacgaacaacgacgcaaaaaaaccgcgaccgccgaatatttcacgaccaaatcgtaaaaccctcccgaaaatccgtacacgctaacctaattttaacatcctaaacccgtaactctactcaattattataaaatataaaattaacattttttt

SEQ ID NO: 22041 - DNA, 1218 bp, Artificial Sequence
  chemically treated genomic DNA (Homo sapiens) CpG-island No: 22041
gcgcgtacgtcgggttttagcggcgcgtgtagttagtcgtcgggattttcgttttgtagtggttcgggttttacgtttacgttggcgacgtttacggtttttagtttcgcggttagggttgggttgtttagtacgtaggttttgggcgcgggggcgtcggttaggcgttggcgtaggtagagcgcggtgtagtaggtcgtgtcgaagatttttaggttggcgtcgggtttcgcggggtcgtcgaagtttaggcgtcgtagtttttcggcgtaggtagcgcgggttttgttgttgttgttggtgatgaagtttaggcgtttgtcgcgggttcgtagcgttcgtagggtttcgggcgcgttaggtacggcggttttttcgcgttatagtacgtcgtcgtagtcgaatagtagcgtgtttacgtcggttagtagcgtttgtgttcgttcggcgtttagtcgtacgtagcgggcgtcgtcgttatcggttttcgtcgtcgttatcgtcgttcgtcggtcgtcgtcgttcgtcggtcgtttttcgtagtcgttcgtcgcggcgtttttttcgttttcggcgcgtttattggtttagcgtttcgcgttcgtcgtttattggtttgtattttcgttaattcgttttcgtttttcgcgggttgcgggagtttagcgttaatcggtgaggttcggcgcggggagaggggcgattattggttatcggttttgggacgtttcggtgattggttggtagggttttaatcggtattcggagtgaagcgttcgttgcggaaatgcggtagaggggagagtagcgtaggcgtaaggtcgttgttttcgggttgtcgcgggtcgtttatttattggaagcgagtggttagtttaggtgacgaggttttttacggagtgattcgggttaggtcggttgtttattggtcggtttttttcgcgggtatgggcggggttttcgtaggagcgtcgcgggagggggtcggggtattttcgtcggtcgtgttcgtgtttttgtgtcgtggacgcgttcgggatacggggttattacgtgggtcgtttatcggttagtttcgcgagttagttcggggtttttttttcggtaggcgtgagtacgcgttttagttttttgtaaaaacgcgttttcggttttttggaggtaatacgaattagttattattaggttgggggattagggtttaaggatattgtttag

SEQ ID NO: 22042 - DNA, 1218 bp, Artificial Sequence
  chemically treated genomic DNA (Homo sapiens) CpG-island No: 22042
ctaaacaatatccttaaaccctaatcccccaacctaataataactaattcgtattacctccaaaaaaccgaaaacgcgtttttacaaaaaactaaaacgcgtactcacgcctaccgaaaaaaaaaccccgaactaactcgcgaaactaaccgataaacgacccacgtaataaccccgtatcccgaacgcgtccacgacacaaaaacacgaacacgaccgacgaaaataccccgaccccctcccgcgacgctcctacgaaaaccccgcccatacccgcgaaaaaaaccgaccaataaacaaccgacctaacccgaatcactccgtaaaaaacctcgtcacctaaactaaccactcgcttccaataaataaacgacccgcgacaacccgaaaacaacgaccttacgcctacgctactctcccctctaccgcatttccgcaacgaacgcttcactccgaataccgattaaaaccctaccaaccaatcaccgaaacgtcccaaaaccgataaccaataatcgcccctctccccgcgccgaacctcaccgattaacgctaaactcccgcaacccgcgaaaaacgaaaacgaattaacgaaaatacaaaccaataaacgacgaacgcgaaacgctaaaccaataaacgcgccgaaaacgaaaaaaacgccgcgacgaacgactacgaaaaacgaccgacgaacgacgacgaccgacgaacgacgataacgacgacgaaaaccgataacgacgacgcccgctacgtacgactaaacgccgaacgaacacaaacgctactaaccgacgtaaacacgctactattcgactacgacgacgtactataacgcgaaaaaaccgccgtacctaacgcgcccgaaaccctacgaacgctacgaacccgcgacaaacgcctaaacttcatcaccaacaacaacaacaaaacccgcgctacctacgccgaaaaactacgacgcctaaacttcgacgaccccgcgaaacccgacgccaacctaaaaatcttcgacacgacctactacaccgcgctctacctacgccaacgcctaaccgacgcccccgcgcccaaaacctacgtactaaacaacccaaccctaaccgcgaaactaaaaaccgtaaacgtcgccaacgtaaacgtaaaacccgaaccactacaaaacgaaaatcccgacgactaactacacgcgccgctaaaacccgacgtacgcgc

SEQ ID NO: 22043 - DNA, 1218 bp, Artificial Sequence
  chemically treated genomic DNA (Homo sapiens) CpG-island No: 22043
ttagatagtgtttttagattttaattttttagtttggtaatggttggttcgtgttatttttaaggaatcgggaacgcgtttttgtaaaggattgaggcgcgtatttacgtttgtcggggaaggagtttcgggttggttcgcgggattggtcggtaagcgatttacgtggtggtttcgtgtttcgagcgcgtttacggtatagaggtacgggtacggtcgacgaaggtgtttcggttttttttcgcggcgtttttgcgagagtttcgtttatgttcgcgggagagatcggttaatggatagtcggtttggttcgggttatttcgtgaagggtttcgttatttaggttgattattcgtttttaatgggtgagcggttcgcggtagttcgggaatagcggttttgcgtttgcgttgtttttttttttgtcgtattttcgtagcgagcgttttatttcgaatgtcggttggagttttgttagttaattatcggggcgttttaaggtcggtagttaatgatcgttttttttttcgcgtcgggttttatcgattggcgttgagttttcgtagttcgcgggaggcgggggcggattggcgaaggtgtaggttaatgggcggcgggcgcgaggcgttgggttaatgagcgcgtcgggggcggggagggcgtcgcggcgggcggttgcgaggagcggtcggcgggcggcggcggtcggcgggcggcgatggcggcggcggaggtcggtggcgacgacgttcgttgcgtgcggttgagcgtcgagcgggtataggcgttgttggtcgacgtggatacgttgttgttcgattgcgacggcgtgttgtggcgcggggagatcgtcgtgtttggcgcgttcgaggttttgcgggcgttgcgagttcgcggtaagcgtttgggttttattattaataatagtagtaagattcgcgttgtttacgtcgagaagttgcggcgtttgggtttcggcggtttcgcggggttcggcgttagtttggaggttttcggtacggtttattgtatcgcgttttatttgcgttagcgtttggtcggcgttttcgcgtttaaggtttacgtgttgggtagtttagttttggtcgcggagttggaggtcgtgggcgtcgttagcgtgggcgtggggttcgagttattgtagggcgagggtttcggcgattggttgtacgcgtcgttggagttcgacgtgcgcgt

SEQ ID NO: 22044 - DNA, 1218 bp, Artificial Sequence
  chemically treated genomic DNA (Homo sapiens) CpG-island No: 22044
acgcgcacgtcgaactccaacgacgcgtacaaccaatcgccgaaaccctcgccctacaataactcgaaccccacgcccacgctaacgacgcccacgacctccaactccgcgaccaaaactaaactacccaacacgtaaaccttaaacgcgaaaacgccgaccaaacgctaacgcaaataaaacgcgatacaataaaccgtaccgaaaacctccaaactaacgccgaaccccgcgaaaccgccgaaacccaaacgccgcaacttctcgacgtaaacaacgcgaatcttactactattattaataataaaacccaaacgcttaccgcgaactcgcaacgcccgcaaaacctcgaacgcgccaaacacgacgatctccccgcgccacaacacgccgtcgcaatcgaacaacaacgtatccacgtcgaccaacaacgcctatacccgctcgacgctcaaccgcacgcaacgaacgtcgtcgccaccgacctccgccgccgccatcgccgcccgccgaccgccgccgcccgccgaccgctcctcgcaaccgcccgccgcgacgccctccccgcccccgacgcgctcattaacccaacgcctcgcgcccgccgcccattaacctacaccttcgccaatccgcccccgcctcccgcgaactacgaaaactcaacgccaatcgataaaacccgacgcgaaaaaaaaaacgatcattaactaccgaccttaaaacgccccgataattaactaacaaaactccaaccgacattcgaaataaaacgctcgctacgaaaatacgacaaaaaaaaaaacaacgcaaacgcaaaaccgctattcccgaactaccgcgaaccgctcacccattaaaaacgaataatcaacctaaataacgaaacccttcacgaaataacccgaaccaaaccgactatccattaaccgatctctcccgcgaacataaacgaaactctcgcaaaaacgccgcgaaaaaaaaccgaaacaccttcgtcgaccgtacccgtacctctataccgtaaacgcgctcgaaacacgaaaccaccacgtaaatcgcttaccgaccaatcccgcgaaccaacccgaaactccttccccgacaaacgtaaatacgcgcctcaatcctttacaaaaacgcgttcccgattccttaaaaataacacgaaccaaccattaccaaactaaaaaattaaaatctaaaaacactatctaa

SEQ ID NO: 22045 - DNA, 747 bp, Artificial Sequence
  chemically treated genomic DNA (Homo sapiens) CpG-island No: 22045
ggaagcgttggggcgcggttgtttagtagtcgttagttcgttcgtttttcgcgttttttggtttttaaattcgagtgtagtttcgaatataggtttttttgtcgtttcgttttttggttggtaatttgttttatcgtaattacgttttttttatagtttcgttttattttcgtttttagcgcgttcggtttcgtttttgttttttaaggttatatcgttatttaggttcggtttttcgtttgttcgttaattcgtttcggttttgtttcgttttttttttgtcgtttttttacgttggtttcggcgcggttcgttgttatgacgatatggtcgtaaattcgttatttttttgcggcgcgttgcgatatggagggcgcgatggtagtgcgggtgacggtcgtttatacggtagaagtttaggtcgaagtcgggcgggaagcgggcgagggtgtagttgcggcggtggcggcggttttggtttttagcggttttttcggtttttcggcgttttttagcgaggaaggtaatcgggtcgattcggagggtgcggtcggggtgcgggtagtttatttcgggttggtagaggttcggatggttcgagttgcgggttcgatcgatttttttagatttagatatttcgcggatttcgcgggatttttatagttttttacgaaatttttaggtttgttgcgatttttacgggttttttttgcggggcgtttgttattttttttttttggtgtgcgt

SEQ ID NO: 22046 - DNA, 747 bp, Artificial Sequence
  chemically treated genomic DNA (Homo sapiens) CpG-island No: 22046
acgcacaccaaaaaaaaaaaataacaaacgccccgcaaaaaaaacccgtaaaaatcgcaacaaacctaaaaatttcgtaaaaaactataaaaatcccgcgaaatccgcgaaatatctaaatctaaaaaaatcgatcgaacccgcaactcgaaccatccgaacctctaccaacccgaaataaactacccgcaccccgaccgcaccctccgaatcgacccgattaccttcctcgctaaaaaacgccgaaaaaccgaaaaaaccgctaaaaaccaaaaccgccgccaccgccgcaactacaccctcgcccgcttcccgcccgacttcgacctaaacttctaccgtataaacgaccgtcacccgcactaccatcgcgccctccatatcgcaacgcgccgcaaaaaaataacgaatttacgaccatatcgtcataacaacgaaccgcgccgaaaccaacgtaaaaaaacgacaaaaaaaaaacgaaacaaaaccgaaacgaattaacgaacaaacgaaaaaccgaacctaaataacgatataaccttaaaaaacaaaaacgaaaccgaacgcgctaaaaacgaaaataaaacgaaactataaaaaaaacgtaattacgataaaacaaattaccaaccaaaaaacgaaacgacaaaaaaacctatattcgaaactacactcgaatttaaaaaccaaaaaacgcgaaaaacgaacgaactaacgactactaaacaaccgcgccccaacgcttcc

SEQ ID NO: 22047 - DNA, 747 bp, Artificial Sequence
  chemically treated genomic DNA (Homo sapiens) CpG-island No: 22047
acgtatattagagaggggggatgataggcgtttcgtaggagaggttcgtgagggtcgtagtaaatttgggggtttcgtggagggttgtgagggtttcgcgagattcgcgaggtgtttgggtttgggagggtcggtcgagttcgtagttcgggttattcgggtttttgttagttcgggatgaattgttcgtatttcggtcgtatttttcgggtcggttcggttatttttttcgttgaagggcgtcgggaggtcgaggaagtcgttgggggttaaggtcgtcgttatcgtcgtaattgtattttcgttcgtttttcgttcggtttcggtttgggtttttgtcgtatgagcggtcgttattcgtattgttatcgcgttttttatgtcgtaacgcgtcgtaggaagatggcggatttacgattatgtcgttataataacgggtcgcgtcgaggttagcgtgagggaacggtaagaggagggcggggtagaatcggagcggattgacggataggcggggagtcgggtttggatagcggtgtggttttaaagggtagaggcggggtcgggcgcgttgagagcgaagatggggcgggattgtggggagggcgtggttacggtggagtagattgttagttagggggcggggcggtagaaggatttatgttcgaggttgtattcggatttgagagttagagaacgcgaggggcgagcggattggcggttgttaggtagtcgcgttttagcgttttt

SEQ ID NO: 22048 - DNA, 747 bp, Artificial Sequence
  chemically treated genomic DNA (Homo sapiens) CpG-island No: 22048
aaaaacgctaaaacgcgactacctaacaaccgccaatccgctcgcccctcgcgttctctaactctcaaatccgaatacaacctcgaacataaatccttctaccgccccgccccctaactaacaatctactccaccgtaaccacgccctccccacaatcccgccccatcttcgctctcaacgcgcccgaccccgcctctaccctttaaaaccacaccgctatccaaacccgactccccgcctatccgtcaatccgctccgattctaccccgccctcctcttaccgttccctcacgctaacctcgacgcgacccgttattataacgacataatcgtaaatccgccatcttcctacgacgcgttacgacataaaaaacgcgataacaatacgaataacgaccgctcatacgacaaaaacccaaaccgaaaccgaacgaaaaacgaacgaaaatacaattacgacgataacgacgaccttaacccccaacgacttcctcgacctcccgacgcccttcaacgaaaaaaataaccgaaccgacccgaaaaatacgaccgaaatacgaacaattcatcccgaactaacaaaaacccgaataacccgaactacgaactcgaccgaccctcccaaacccaaacacctcgcgaatctcgcgaaaccctcacaaccctccacgaaacccccaaatttactacgaccctcacgaacctctcctacgaaacgcctatcatcccccctctctaatatacgt

SEQ ID NO: 22049 - DNA, 774 bp, Artificial Sequence
  chemically treated genomic DNA (Homo sapiens) CpG-island No: 22049
gggcgcgcggggtcgtaggtcgggggtttagcgggttttttttattttttaggaaagacgcggtgtcggtcgtggatatttatttgtatttagatttcgaggacgtttttagtcgcgagtttttcgtggttaagttttcggttttcggtatcggtgagcgggtttcgttttttttttttcgtcgagttttgacgtttttattttttttcgtagtagtatagaatttggtgttgatttcgttgtacgcggcgtcgtattaagtcgtggcggagatcgacgcgttttacgacgtgtatttggacgtgatcgataagtggggtatcgacgtaagtttatttttcggtttcggggtttttgtaggcgcgtttcgggggtttggtttatgagggcgggatttcgacggtttttgcggcggtttagatacggtttcgcggcgttcgtaggatatgttgtttttgggcgattttaacgtcgattgtagttatgtgcgggcgtaggattgggtcgttattcgtttgaggagtagtgaggtttttaagtggtttatttttgatagcgtcgatattacggtgggtaatttagattgcgtttacgatcgtattgtggtttgtggcgttcgtttgcgtcggagtttgaagttttagtcggttatcgtgtacgatttttaggaggaattcggtttggattagatttaggcgagtgggtcgtggggcggtgttggttttgggtttttatcgttcgggcgtacgtaggtagtagggagggtttagcgtt

SEQ ID NO: 22050 - DNA, 774 bp, Artificial Sequence
  chemically treated genomic DNA (Homo sapiens) CpG-island No: 22050
aacgctaaaccctccctactacctacgtacgcccgaacgataaaaacccaaaaccaacaccgccccacgacccactcgcctaaatctaatccaaaccgaattcctcctaaaaatcgtacacgataaccgactaaaacttcaaactccgacgcaaacgaacgccacaaaccacaatacgatcgtaaacgcaatctaaattacccaccgtaatatcgacgctatcaaaaataaaccacttaaaaacctcactactcctcaaacgaataacgacccaatcctacgcccgcacataactacaatcgacgttaaaatcgcccaaaaacaacatatcctacgaacgccgcgaaaccgtatctaaaccgccgcaaaaaccgtcgaaatcccgccctcataaaccaaacccccgaaacgcgcctacaaaaaccccgaaaccgaaaaataaacttacgtcgataccccacttatcgatcacgtccaaatacacgtcgtaaaacgcgtcgatctccgccacgacttaatacgacgccgcgtacaacgaaatcaacaccaaattctatactactacgaaaaaaaataaaaacgtcaaaactcgacgaaaaaaaaaaaacgaaacccgctcaccgataccgaaaaccgaaaacttaaccacgaaaaactcgcgactaaaaacgtcctcgaaatctaaatacaaataaatatccacgaccgacaccgcgtctttcctaaaaaataaaaaaaacccgctaaacccccgacctacgaccccgcgcgccc

SEQ ID NO: 22051 - DNA, 774 bp, Artificial Sequence
  chemically treated genomic DNA (Homo sapiens) CpG-island No: 22051
ggcgttggattttttttgttgtttgcgtgcgttcgggcggtggggatttaagattagtatcgttttacggtttattcgtttgagtttggtttaggtcgaattttttttggaagtcgtgtacggtggtcgattggggttttaggtttcggcgtaggcgggcgttataggttataatgcggtcgtaggcgtagtttgagttgtttatcgtggtgtcggcgttgttagggatgagttatttgaagattttattgttttttagacggatggcggtttagttttgcgttcgtatatagttgtagtcggcgttgaagtcgtttaggaatagtatgttttgcgggcgtcgcggagtcgtgtttgagtcgtcgtaggagtcgtcgaggtttcgtttttatgaattagattttcggggcgcgtttgtagggatttcgggatcgaggggtgggtttacgtcggtgttttatttgtcgattacgtttaggtatacgtcgtagagcgcgtcgattttcgttacggtttgatgcggcgtcgcgtgtagcgggattagtattaggttttgtgttgttgcgggaaggggtgggggcgttagagttcggcgggaggggaggggcggggttcgtttatcggtgtcgggggtcgagaatttgattacgaagggttcgcggttgaagacgttttcggggtttgggtataggtaggtgtttacgatcgatatcgcgttttttttaggagatggggaggattcgttgagttttcgatttgcggtttcgcgcgttt

SEQ ID NO: 22052 - DNA, 774 bp, Artificial Sequence
  chemically treated genomic DNA (Homo sapiens) CpG-island No: 22052
aaacgcgcgaaaccgcaaatcgaaaactcaacgaatcctccccatctcctaaaaaaaacgcgatatcgatcgtaaacacctacctatacccaaaccccgaaaacgtcttcaaccgcgaacccttcgtaatcaaattctcgacccccgacaccgataaacgaaccccgcccctcccctcccgccgaactctaacgcccccaccccttcccgcaacaacacaaaacctaatactaatcccgctacacgcgacgccgcatcaaaccgtaacgaaaatcgacgcgctctacgacgtatacctaaacgtaatcgacaaataaaacaccgacgtaaacccacccctcgatcccgaaatccctacaaacgcgccccgaaaatctaattcataaaaacgaaacctcgacgactcctacgacgactcaaacacgactccgcgacgcccgcaaaacatactattcctaaacgacttcaacgccgactacaactatatacgaacgcaaaactaaaccgccatccgtctaaaaaacaataaaatcttcaaataactcatccctaacaacgccgacaccacgataaacaactcaaactacgcctacgaccgcattataacctataacgcccgcctacgccgaaacctaaaaccccaatcgaccaccgtacacgacttccaaaaaaaattcgacctaaaccaaactcaaacgaataaaccgtaaaacgatactaatcttaaatccccaccgcccgaacgcacgcaaacaacaaaaaaaatccaacgcc

SEQ ID NO: 22053 - DNA, 1005 bp, Artificial Sequence
  chemically treated genomic DNA (Homo sapiens) CpG-island No: 22053
cgttcgcgtcgcgtttagacgcgtttattttgaggtataggttagtgtgcggggagggttcgggcggcgcgggagggttcggttaggcggcgtttattttagtatggtatttagttggtcggttaggtcgtcgaatatgttgtcgatgtcgtttaggatgttgttagtgttttttttcgtcgtcgagtcgttgcggggcgcggggtaaggggcgtgagtgggcggggcgggtttggttacgtttatttcgattaggatacgtttacgtttcgtattttcgtcggttttcgtttatcgtacgacgatttcggcggagtttcgtttacggtacgtttatttttgtcgagtttcgtttatttttgtcgagtttcgtttatttttgtcgagtttcgtttatttttgtcgagtttcgtttttcgttcgttaggtttcgtttcgtatttatcgcgggttttgcgcgtttttttgtcggatttttttttttatcgtttgtagcgtcgcggttaggtacgcgtttgttttttttagtttttgtcgggcgttgttttttggcgaggcgttttcgggcggggcggggggcgcggcggcggcggcggcggcggcggcggcggttcgcgggggtttggcgggtacgtgtagcgcgggcgcgtcgggggacgggggtttggcggggttggcgtttagcgagggcggcgtatcgggcggtttggcgagggcggcgggcggttgtcgcgcgggcgagggtgcgggtgaagggtcggcgttgttcgaaggtagtttcgcgatcgttttgacgggtttgggcgttgtgggcggcggcggcggtttgggagatacgggcggtggcgtgtcgtgggcgcgttttatttttgcggggaggattacgttggtatcgagcgggtacgagtttcgtcgtcgcgttttttgttttagtttttcgcggttttttttttagcggatcgggaaagattttgtttattttgtttttagttttggatggatgag

SEQ ID NO: 22054 - DNA, 1005 bp, Artificial Sequence
  chemically treated genomic DNA (Homo sapiens) CpG-island No: 22054
ctcatccatccaaaactaaaaacaaaataaacaaaatctttcccgatccgctaaaaaaaaaaccgcgaaaaactaaaacaaaaaacgcgacgacgaaactcgtacccgctcgataccaacgtaatcctccccgcaaaaataaaacgcgcccacgacacgccaccgcccgtatctcccaaaccgccgccgccgcccacaacgcccaaacccgtcaaaacgatcgcgaaactaccttcgaacaacgccgacccttcacccgcaccctcgcccgcgcgacaaccgcccgccgccctcgccaaaccgcccgatacgccgccctcgctaaacgccaaccccgccaaacccccgtcccccgacgcgcccgcgctacacgtacccgccaaacccccgcgaaccgccgccgccgccgccgccgccgccgccgcgccccccgccccgcccgaaaacgcctcgccaaaaaacaacgcccgacaaaaactaaaaaaaacaaacgcgtacctaaccgcgacgctacaaacgataaaaaaaaaaatccgacaaaaaaacgcgcaaaacccgcgataaatacgaaacgaaacctaacgaacgaaaaacgaaactcgacaaaaataaacgaaactcgacaaaaataaacgaaactcgacaaaaataaacgaaactcgacaaaaataaacgtaccgtaaacgaaactccgccgaaatcgtcgtacgataaacgaaaaccgacgaaaatacgaaacgtaaacgtatcctaatcgaaataaacgtaaccaaacccgccccgcccactcacgccccttaccccgcgccccgcaacgactcgacgacgaaaaaaaacactaacaacatcctaaacgacatcgacaacatattcgacgacctaaccgaccaactaaataccatactaaaataaacgccgcctaaccgaaccctcccgcgccgcccgaaccctccccgcacactaacctatacctcaaaataaacgcgtctaaacgcgacgcgaacg

SEQ ID NO: 22055 - DNA, 1005 bp, Artificial Sequence
  chemically treated genomic DNA (Homo sapiens) CpG-island No: 22055
tttatttatttagggttgggggtaaggtgagtagggtttttttcggttcgttggggaggaagtcgcgggaggttggggtagggggcgcggcggcggaattcgtgttcgttcggtgttagcgtggtttttttcgtagaggtgaagcgcgtttacggtacgttatcgttcgtgttttttaagtcgtcgtcgtcgtttatagcgtttaagttcgttaaggcggtcgcggggttgttttcgggtagcgtcggttttttattcgtattttcgttcgcgcgatagtcgttcgtcgttttcgttaagtcgttcggtacgtcgttttcgttgggcgttagtttcgttaagttttcgtttttcggcgcgttcgcgttgtacgtgttcgttaagttttcgcgagtcgtcgtcgtcgtcgtcgtcgtcgtcgtcgcgtttttcgtttcgttcgaaggcgtttcgttaggggatagcgttcggtagaaattggaggagataagcgcgtgtttggtcgcggcgttgtaggcggtggaggagaagattcggtaggaggacgcgtagggttcgcggtaggtgcggggcggggtttggcgggcggagggcggggttcggtagagatgggcggggttcggtagagatgggcggggttcggtagagatgggcggggttcggtagagatgggcgtgtcgtgagcggggtttcgtcgaggtcgtcgtgcggtaggcggaagtcgacggagatgcgggacgtgggcgtgttttggtcggggtgggcgtggttagattcgtttcgtttatttacgttttttgtttcgcgtttcgtagcgattcggcggcggaaaagagtattggtagtattttggacgatatcggtagtatgttcgacgatttggtcgattagttggatgttatgttggagtgaacgtcgtttggtcgggttttttcgcgtcgttcgggtttttttcgtatattgatttatattttaggatgggcgcgtttgggcgcggcgcgagcg

SEQ ID NO: 22056 - DNA, 1005 bp, Artificial Sequence
  chemically treated genomic DNA (Homo sapiens) CpG-island No: 22056
cgctcgcgccgcgcccaaacgcgcccatcctaaaatataaatcaatatacgaaaaaaacccgaacgacgcgaaaaaacccgaccaaacgacgttcactccaacataacatccaactaatcgaccaaatcgtcgaacatactaccgatatcgtccaaaatactaccaatactcttttccgccgccgaatcgctacgaaacgcgaaacaaaaaacgtaaataaacgaaacgaatctaaccacgcccaccccgaccaaaacacgcccacgtcccgcatctccgtcgacttccgcctaccgcacgacgacctcgacgaaaccccgctcacgacacgcccatctctaccgaaccccgcccatctctaccgaaccccgcccatctctaccgaaccccgcccatctctaccgaaccccgccctccgcccgccaaaccccgccccgcacctaccgcgaaccctacgcgtcctcctaccgaatcttctcctccaccgcctacaacgccgcgaccaaacacgcgcttatctcctccaatttctaccgaacgctatcccctaacgaaacgccttcgaacgaaacgaaaaacgcgacgacgacgacgacgacgacgacgacgactcgcgaaaacttaacgaacacgtacaacgcgaacgcgccgaaaaacgaaaacttaacgaaactaacgcccaacgaaaacgacgtaccgaacgacttaacgaaaacgacgaacgactatcgcgcgaacgaaaatacgaataaaaaaccgacgctacccgaaaacaaccccgcgaccgccttaacgaacttaaacgctataaacgacgacgacgacttaaaaaacacgaacgataacgtaccgtaaacgcgcttcacctctacgaaaaaaaccacgctaacaccgaacgaacacgaattccgccgccgcgccccctaccccaacctcccgcgacttcctccccaacgaaccgaaaaaaaccctactcaccttacccccaaccctaaataaataaa

SEQ ID NO: 22057 - DNA, 524 bp, Artificial Sequence
  chemically treated genomic DNA (Homo sapiens) CpG-island No: 22057
tcgttcggcgtcgggtggggggtttcgcgtcggggaggggttttcggggtttttattcgcgtttcgcgttttcggtatttattggttttttcgggtcgcggtttttgtagtagtttttgcgcggtttttacgtttttcgtttttatcgtttgtattagtttttgttttttttttatggcgcggtcggggtcgtagcgacgcggttgcgttcgtgagttcggcgcggtttagaggcggcggcggtttcgcggtatcggtcgtttttttcgtcgtttttttcgtcgttttttcgtcgttcgtcgttttttcgtttttttcgggtttcggtttgggttcgggttttcggcgcggagggggcggggagcgcgttacgggcgggggggggttcgggggcggaggaggaggaagaataaaaaaattttagcgtatatttaaattaacgcgatacgtaagaacgaatcgatatttagagaaacggggagtaataattgaagagggattaatagcgtagtaaatattttata

SEQ ID NO: 22058 - DNA, 524 bp, Artificial Sequence
  chemically treated genomic DNA (Homo sapiens) CpG-island No: 22058
tataaaatatttactacgctattaatccctcttcaattattactccccgtttctctaaatatcgattcgttcttacgtatcgcgttaatttaaatatacgctaaaatttttttattcttcctcctcctccgcccccgaacccccccccgcccgtaacgcgctccccgccccctccgcgccgaaaacccgaacccaaaccgaaacccgaaaaaaacgaaaaaacgacgaacgacgaaaaaacgacgaaaaaaacgacgaaaaaaacgaccgataccgcgaaaccgccgccgcctctaaaccgcgccgaactcacgaacgcaaccgcgtcgctacgaccccgaccgcgccataaaaaaaaaacaaaaactaatacaaacgataaaaacgaaaaacgtaaaaaccgcgcaaaaactactacaaaaaccgcgacccgaaaaaaccaataaataccgaaaacgcgaaacgcgaataaaaaccccgaaaacccctccccgacgcgaaaccccccacccgacgccgaacga

SEQ ID NO: 22059 - DNA, 524 bp, Artificial Sequence
  chemically treated genomic DNA (Homo sapiens) CpG-island No: 22059
tgtgaagtatttgttacgttgttggtttttttttagttattgtttttcgtttttttgagtgtcggttcgtttttgcgtgtcgcgttagtttgggtgtgcgttggggtttttttgtttttttttttttttcgttttcgggttttttttcgttcgtgacgcgtttttcgtttttttcgcgtcgggagttcgagtttaagtcggagttcgaggagggcgaaggggcggcgggcggcgaggaggcggcgggggaggcggcgggggaggcggtcggtgtcgcggggtcgtcgtcgtttttgagtcgcgtcgagtttacgagcgtagtcgcgtcgttgcggtttcggtcgcgttatggggaaggagtaggagttggtgtaggcggtgaaggcggaggacgtagggatcgcgtagaggttgttgtagaggtcgcggttcgggaaggttagtgagtgtcgggggcgcggggcgcgggtgggagtttcgggggttttttttcggcgcggagttttttattcggcgtcgggcgg

SEQ ID NO: 22060 - DNA, 524 bp, Artificial Sequence
  chemically treated genomic DNA (Homo sapiens) CpG-island No: 22060
ccgcccgacgccgaataaaaaactccgcgccgaaaaaaaacccccgaaactcccacccgcgccccgcgcccccgacactcactaaccttcccgaaccgcgacctctacaacaacctctacgcgatccctacgtcctccgccttcaccgcctacaccaactcctactccttccccataacgcgaccgaaaccgcaacgacgcgactacgctcgtaaactcgacgcgactcaaaaacgacgacgaccccgcgacaccgaccgcctcccccgccgcctcccccgccgcctcctcgccgcccgccgccccttcgccctcctcgaactccgacttaaactcgaactcccgacgcgaaaaaaacgaaaaacgcgtcacgaacgaaaaaaaacccgaaaacgaaaaaaaaaaaaaaacaaaaaaaccccaacgcacacccaaactaacgcgacacgcaaaaacgaaccgacactcaaaaaaacgaaaaacaataactaaaaaaaaaccaacaacgtaacaaatacttcaca

SEQ ID NO: 22061 - DNA, 1536 bp, Artificial Sequence
  chemically treated genomic DNA (Homo sapiens) CpG-island No: 22061
atcgtaattttaaaattggcgcggtttttttagatcgtagatttcgggttttgggtcgtaggcggggtcggatacgtgatcgtcggggttttcgggcgtgaggtcggtagatattttaggttggacggtttttattttttcggatacgtttgtaggggttacgaatgtaaatttttttcgagacgtttttgagttttcgatttttagattttaattcggttcgaacggttttttagttcgaaatacggttggattataatcggtcgatgtttcggtttatttttttagtttttttggttcgtcgtacggaatttttaggggttgcgtcggcgggcgagtcgagggtgagaagttgggcgaggttttagaagtgaaggggtagtttcggtttagattgtgtatatacgatttttgaaaagtaaacgttcgcggggttgggcgattttgggtgggacgcgttcgggttagtttcgtaggcgggtgtgtacgtttcggttaagttgaggtgtagagaggcgattcgggcgtcgcgttttcgtttttcgttttcgaggatagtgacgcgcgtggggaggacggcgcggtcgtagagcgtcgtttagagtcgcgtatacgcgatttgttaggagttcgcgggtagataatcggcggggaaggacgagagggggcgtagacgagggagggaaagatgggtttgtttgatagcgcgcggcggtcgagagtttttaggatatttttgcgttcggagcgtttcgttttcggggtatttggagggcgcgtcgtattttgtatttgtattttaggttttttatcgtttcgatttcgtcgttttcgggttttcggtagggggttttcggcgtagttgttttcgatttattagtttttcggttattatcggggtgcgggatgcggagttcgcgcgtcgtcgtcggttttcggttgtgtttcgcggttcggttcgtagcgtcgcgttttcgtagtttttttacgtgttagtttaggcgggtggaatatagagatattaaatattgaagacgcgcggcgacgtgttcgtagcgcgacgtaggtttcgtttttcgtttttgtgttcgcgcgttttcgagttcgtttcgtttatttgcgcgtgcgcgtcgtcggtcgttttcggtagtgttttcgtcgcgttttttttagttgcgttagagggggcgcggtttatagcgttgggttaatatttcgtcgtcgttcggagtcgggttttgttcgcgttttcgcgagagagtcgttattttttcggtgttcgggagaggggtcgggcgggacggtatagtaatcggaggaattttgattttttgtttcgtaagtttagtatcggttttgtcgttttgtttcgaagggttaattaggttattttttgtttcgggacggagagcgttttggaaaaggcggaggggtcggtgaggagtagggtttttttcgtttcggggttttgagtttttttgtgatcgttatttttttgtagcgtataattgggttggttattaataattgttcgat

SEQ ID NO: 22062 - DNA, 1536 bp, Artificial Sequence
  chemically treated genomic DNA (Homo sapiens) CpG-island No: 22062
atcgaacaattattaataaccaacccaattatacgctacaaaaaaataacgatcacaaaaaaactcaaaaccccgaaacgaaaaaaaccctactcctcaccgacccctccgccttttccaaaacgctctccgtcccgaaacaaaaaataacctaattaacccttcgaaacaaaacgacaaaaccgatactaaacttacgaaacaaaaaatcaaaattcctccgattactataccgtcccgcccgacccctctcccgaacaccgaaaaaataacgactctctcgcgaaaacgcgaacaaaacccgactccgaacgacgacgaaatattaacccaacgctataaaccgcgccccctctaacgcaactaaaaaaaacgcgacgaaaacactaccgaaaacgaccgacgacgcgcacgcgcaaataaacgaaacgaactcgaaaacgcgcgaacacaaaaacgaaaaacgaaacctacgtcgcgctacgaacacgtcgccgcgcgtcttcaatatttaatatctctatattccacccgcctaaactaacacgtaaaaaaactacgaaaacgcgacgctacgaaccgaaccgcgaaacacaaccgaaaaccgacgacgacgcgcgaactccgcatcccgcaccccgataataaccgaaaaactaataaatcgaaaacaactacgccgaaaaccccctaccgaaaacccgaaaacgacgaaatcgaaacgataaaaaacctaaaatacaaatacaaaatacgacgcgccctccaaataccccgaaaacgaaacgctccgaacgcaaaaatatcctaaaaactctcgaccgccgcgcgctatcaaacaaacccatctttccctccctcgtctacgccccctctcgtccttccccgccgattatctacccgcgaactcctaacaaatcgcgtatacgcgactctaaacgacgctctacgaccgcgccgtcctccccacgcgcgtcactatcctcgaaaacgaaaaacgaaaacgcgacgcccgaatcgcctctctacacctcaacttaaccgaaacgtacacacccgcctacgaaactaacccgaacgcgtcccacccaaaatcgcccaaccccgcgaacgtttacttttcaaaaatcgtatatacacaatctaaaccgaaactaccccttcacttctaaaacctcgcccaacttctcaccctcgactcgcccgccgacgcaacccctaaaaattccgtacgacgaaccaaaaaaactaaaaaaataaaccgaaacatcgaccgattataatccaaccgtatttcgaactaaaaaaccgttcgaaccgaattaaaatctaaaaatcgaaaactcaaaaacgtctcgaaaaaaatttacattcgtaacccctacaaacgtatccgaaaaaataaaaaccgtccaacctaaaatatctaccgacctcacgcccgaaaaccccgacgatcacgtatccgaccccgcctacgacccaaaacccgaaatctacgatctaaaaaaaccgcgccaattttaaaattacgat

SEQ ID NO: 22063 - DNA, 1536 bp, Artificial Sequence
  chemically treated genomic DNA (Homo sapiens) CpG-island No: 22063
atcgagtaattattaatggttaatttaattatacgttataaggaaatgacggttatagggaagtttaaagtttcgaagcgagggaagttttgttttttatcggttttttcgttttttttagggcgtttttcgtttcgaggtaggagatggtttggttgatttttcgagataaggcggtaaaatcggtgttgggtttgcggggtagggaattaaggttttttcggttgttgtatcgtttcgttcggtttttttttcgggtatcggagagatgacggttttttcgcgagagcgcgagtaagattcggtttcgggcggcggcgggatgttagtttagcgttgtagatcgcgttttttttggcgtagttgggagaggcgcggcggaggtattgtcgggagcggtcggcggcgcgtacgcgtaggtgagcggggcgggttcgggagcgcgcgggtataagggcgaggggcggggtttgcgtcgcgttgcgggtacgtcgtcgcgcgtttttagtatttaatgtttttgtgttttattcgtttgggttagtacgtgggggagttgcggaagcgcggcgttgcgggtcgggtcgcggggtatagtcgggggtcggcggcggcgcgcggatttcgtatttcgtatttcgatggtagtcgaggagttggtaggtcgggggtagttgcgtcggggattttttgtcggagattcgaaggcggcggggtcggggcgatggggagtttgaggtgtaggtgtagggtgcgacgcgttttttaggtatttcgggggcgggacgtttcggacgtagaggtgttttgggggttttcggtcgtcgcgcgttgttaggtaggtttatttttttttttttcgtttgcgttttttttcgttttttttcgtcggttgtttgttcgcgggtttttgatagatcgcgtgtgcgcggttttgggcggcgttttgcggtcgcgtcgttttttttacgcgcgttattgttttcgggggcggggggcgagggcgcgacgttcgggtcgtttttttgtattttaatttaatcggagcgtgtatattcgtttgcgaggttgattcgagcgcgttttatttaaggtcgtttagtttcgcgggcgtttattttttaaaggtcgtgtgtatatagtttgagtcggagttgtttttttatttttggagtttcgtttaattttttattttcggttcgttcgtcggcgtagtttttgggagtttcgtgcggcgagttaggggaattgggaagatgggtcgggatatcggtcggttgtgatttaatcgtgtttcgggttgagggatcgttcgaatcgaattggggtttggaggtcggaggtttaggggcgtttcggggggaatttgtattcgtagtttttgtaggcgtgttcggaggggtggaggtcgtttagtttggggtgtttgtcgattttacgttcgggggtttcgacggttacgtgttcggtttcgtttgcggtttagggttcggggtttgcgatttggagggatcgcgttagttttggggttacgat

SEQ ID NO: 22064 - DNA, 1536 bp, Artificial Sequence
  chemically treated genomic DNA (Homo sapiens) CpG-island No: 22064
atcgtaaccccaaaactaacgcgatccctccaaatcgcaaaccccgaaccctaaaccgcaaacgaaaccgaacacgtaaccgtcgaaacccccgaacgtaaaatcgacaaacaccccaaactaaacgacctccacccctccgaacacgcctacaaaaactacgaatacaaattccccccgaaacgcccctaaacctccgacctccaaaccccaattcgattcgaacgatccctcaacccgaaacacgattaaatcacaaccgaccgatatcccgacccatcttcccaattcccctaactcgccgcacgaaactcccaaaaactacgccgacgaacgaaccgaaaataaaaaattaaacgaaactccaaaaataaaaaaacaactccgactcaaactatatacacacgacctttaaaaaataaacgcccgcgaaactaaacgaccttaaataaaacgcgctcgaatcaacctcgcaaacgaatatacacgctccgattaaattaaaatacaaaaaaacgacccgaacgtcgcgccctcgccccccgcccccgaaaacaataacgcgcgtaaaaaaaacgacgcgaccgcaaaacgccgcccaaaaccgcgcacacgcgatctatcaaaaacccgcgaacaaacaaccgacgaaaaaaaacgaaaaaaaacgcaaacgaaaaaaaaaaaaataaacctacctaacaacgcgcgacgaccgaaaacccccaaaacacctctacgtccgaaacgtcccgcccccgaaatacctaaaaaacgcgtcgcaccctacacctacacctcaaactccccatcgccccgaccccgccgccttcgaatctccgacaaaaaatccccgacgcaactacccccgacctaccaactcctcgactaccatcgaaatacgaaatacgaaatccgcgcgccgccgccgacccccgactataccccgcgacccgacccgcaacgccgcgcttccgcaactcccccacgtactaacccaaacgaataaaacacaaaaacattaaatactaaaaacgcgcgacgacgtacccgcaacgcgacgcaaaccccgcccctcgcccttatacccgcgcgctcccgaacccgccccgctcacctacgcgtacgcgccgccgaccgctcccgacaatacctccgccgcgcctctcccaactacgccaaaaaaaacgcgatctacaacgctaaactaacatcccgccgccgcccgaaaccgaatcttactcgcgctctcgcgaaaaaaccgtcatctctccgatacccgaaaaaaaaaccgaacgaaacgatacaacaaccgaaaaaaccttaattccctaccccgcaaacccaacaccgattttaccgccttatctcgaaaaatcaaccaaaccatctcctacctcgaaacgaaaaacgccctaaaaaaaacgaaaaaaccgataaaaaacaaaacttccctcgcttcgaaactttaaacttccctataaccgtcatttccttataacgtataattaaattaaccattaataattactcgat

SEQ ID NO: 22065 - DNA, 610 bp, Artificial Sequence
  chemically treated genomic DNA (Homo sapiens) CpG-island No: 22065
cgtagtcgttgttatagcggtttacgaagggcgggtagtcgttgagtaggatatataagatgacgtttaggttttataggtcgtagcgtttgtcgtagatgttagttttttcgttgaaggtttttattattttcggggttatgtatttcgtcgagtcgtattgcgggcgggggaggggcgcgttagtcggggttttttagtattacgtgggaatcgagttcgggtaattgcgggttatttgcgttagtcggttcggatttcgtttcgtcgggttcgattaattagcggttgtcgggaacgcgttttcgtttaattagtaggtgtagagttcgtttttttttcgtcgcggtttcgttttattcggttaaatatcgacgcgttggggcgtttgttcgaggtttcgtcgcgatatttcgtttaattaattagcggttgttgttaggcggaagttcgagtttcgcggtttggagttgttggatggtttaggtttcgcgaggttatgtaatcgtagagtaggcggtcgagtttttagtttttttcgcgggtttttatcggagtgagtagtttcggggtggagataggggagtagttttcgttgagtttgatgtcg

SEQ ID NO: 22066 - DNA, 610 bp, Artificial Sequence
  chemically treated genomic DNA (Homo sapiens) CpG-island No: 22066
cgacatcaaactcaacgaaaactactcccctatctccaccccgaaactactcactccgataaaaacccgcgaaaaaaactaaaaactcgaccgcctactctacgattacataacctcgcgaaacctaaaccatccaacaactccaaaccgcgaaactcgaacttccgcctaacaacaaccgctaattaattaaacgaaatatcgcgacgaaacctcgaacaaacgccccaacgcgtcgatatttaaccgaataaaacgaaaccgcgacgaaaaaaaaacgaactctacacctactaattaaacgaaaacgcgttcccgacaaccgctaattaatcgaacccgacgaaacgaaatccgaaccgactaacgcaaataacccgcaattacccgaactcgattcccacgtaatactaaaaaaccccgactaacgcgcccctcccccgcccgcaatacgactcgacgaaatacataaccccgaaaataataaaaaccttcaacgaaaaaactaacatctacgacaaacgctacgacctataaaacctaaacgtcatcttatatatcctactcaacgactacccgcccttcgtaaaccgctataacaacgactacg

SEQ ID NO: 22067 - DNA, 610 bp, Artificial Sequence
  chemically treated genomic DNA (Homo sapiens) CpG-island No: 22067
cggtattaaatttaacggggattgtttttttatttttatttcggagttgtttatttcggtgagggttcgcggggagggttgggggttcggtcgtttgttttgcggttgtataatttcgcggagtttgggttatttagtagttttaggtcgcggagttcgggttttcgtttagtaatagtcgttgattggttgggcggggtgtcgcggcggggtttcgagtaggcgttttaacgcgtcggtgtttggtcgggtggggcggggtcgcggcgggggaggggcgagttttgtatttgttgattgggcgggggcgcgttttcggtagtcgttgattggtcgggttcggcggggcggggttcgagtcggttggcgtaggtgattcgtagttattcgggttcggtttttacgtaatgttgggaaatttcggttgacgcgtttttttttcgttcgtagtgcggttcggcggagtatatggtttcggaggtagtggaggtttttagcgaggaggttagtatttacgataagcgttgcgatttgtggagtttgggcgttattttgtatattttatttagcggttattcgtttttcgtgggtcgttgtggtagcgattgcg

SEQ ID NO: 22068 - DNA, 610 bp, Artificial Sequence
  chemically treated genomic DNA (Homo sapiens) CpG-island No: 22068
cgcaatcgctaccacaacgacccacgaaaaacgaataaccgctaaataaaatatacaaaataacgcccaaactccacaaatcgcaacgcttatcgtaaatactaacctcctcgctaaaaacctccactacctccgaaaccatatactccgccgaaccgcactacgaacgaaaaaaaaacgcgtcaaccgaaatttcccaacattacgtaaaaaccgaacccgaataactacgaatcacctacgccaaccgactcgaaccccgccccgccgaacccgaccaatcaacgactaccgaaaacgcgcccccgcccaatcaacaaatacaaaactcgcccctcccccgccgcgaccccgccccacccgaccaaacaccgacgcgttaaaacgcctactcgaaaccccgccgcgacaccccgcccaaccaatcaacgactattactaaacgaaaacccgaactccgcgacctaaaactactaaataacccaaactccgcgaaattatacaaccgcaaaacaaacgaccgaacccccaaccctccccgcgaaccctcaccgaaataaacaactccgaaataaaaataaaaaaacaatccccgttaaatttaataccg

SEQ ID NO: 22069 - DNA, 930 bp, Artificial Sequence
  chemically treated genomic DNA (Homo sapiens) CpG-island No: 22069
cggtcggttcgggtagtttcgggtgtagggcgggggttaggtacgagtttcgggagtcgattttaggggcgggtttcgcgttttttacgtcggttatttcggtggtttagttcggagcgtttttaaatcgatttcgggttttattttgaacgaacggtggaaattttgaagttcggttggttttttttgtattattttttgttcgggtttcgttagcgggggaggggatcgagggttcggggggaggttcgagggcgggcggtcgggcggggggcggtcgaggaggggattttgcgggcgggagtagataaagggagggcggtgagcggagttcggtttgttaggagcgcggatcgggcgggggcggcgagggtttcgcggggttcgtttttcgttatcgggtcggtgttttcggggtcgttttggggttcgtatttatcggggtcgggtttgggtcggggtcgtagtgtcgtcgtcgttttacgtcgcgtagttcggatttcgtttcgcggatcgcgcggggaatagcgtcgtcgtcgtcgttagcgcggatttttttatttgggttatcgtcgttgagaggagtcgggcgcgtcgtcgtcgtcgttatttttataggttcggatttgttttggtttcgttttcgacgtaggtttcgttcggttttattttttgcgtacgacgtgggcggagttagaagagggcgtttttcgggaatttagtgcggttgcgcgtttcggcggtggggcgtgttcgaaacggttagcgtacgtttgcgtagtgcggcgtacgggggtttcggtgcggaatttaggtagcgattttgcggcgcgttcggagttggtttgtttttgtcgtttgaggttcgcggggttcgtgggatttgcgaggttttgggtcgtgttttatcgtttggttttatatagggta

SEQ ID NO: 22070 - DNA, 930 bp, Artificial Sequence
  chemically treated genomic DNA (Homo sapiens) CpG-island No: 22070
taccctatataaaaccaaacgataaaacacgacccaaaacctcgcaaatcccacgaaccccgcgaacctcaaacgacaaaaacaaaccaactccgaacgcgccgcaaaatcgctacctaaattccgcaccgaaacccccgtacgccgcactacgcaaacgtacgctaaccgtttcgaacacgccccaccgccgaaacgcgcaaccgcactaaattcccgaaaaacgccctcttctaactccgcccacgtcgtacgcaaaaaataaaaccgaacgaaacctacgtcgaaaacgaaaccaaaacaaatccgaacctataaaaataacgacgacgacgacgcgcccgactcctctcaacgacgataacccaaataaaaaaatccgcgctaacgacgacgacgacgctattccccgcgcgatccgcgaaacgaaatccgaactacgcgacgtaaaacgacgacgacactacgaccccgacccaaacccgaccccgataaatacgaaccccaaaacgaccccgaaaacaccgacccgataacgaaaaacgaaccccgcgaaaccctcgccgcccccgcccgatccgcgctcctaacaaaccgaactccgctcaccgccctccctttatctactcccgcccgcaaaatcccctcctcgaccgccccccgcccgaccgcccgccctcgaacctccccccgaaccctcgatcccctcccccgctaacgaaacccgaacaaaaaataatacaaaaaaaaccaaccgaacttcaaaatttccaccgttcgttcaaaataaaacccgaaatcgatttaaaaacgctccgaactaaaccaccgaaataaccgacgtaaaaaacgcgaaacccgcccctaaaatcgactcccgaaactcgtacctaacccccgccctacacccgaaactacccgaaccgaccg

SEQ ID NO: 22071 - DNA, 930 bp, Artificial Sequence
  chemically treated genomic DNA (Homo sapiens) CpG-island No: 22071
tgttttgtgtggggttaggcggtaggatacggtttagggtttcgtaggttttacgggtttcgcgagttttaggcggtaaaaataggttagtttcgggcgcgtcgtagggtcgttgtttaggtttcgtatcgagattttcgtgcgtcgtattgcgtaggcgtgcgttagtcgtttcggatacgttttatcgtcggagcgcgtagtcgtattgggttttcggagagcgtttttttttggtttcgtttacgtcgtgcgtagggggtgaggtcgggcggagtttgcgtcgggggcggggttagagtaggttcgggtttataaaggtggcggcggcggcgacgcgttcggttttttttagcggcggtggtttaggtagaggggttcgcgttggcggcggcggcggcgttgtttttcgcgcggttcgcggagcggggttcgggttgcgcgacgtggggcggcggcggtattgcggtttcggtttaagttcgatttcggtgagtgcgaattttagggcggtttcgaggatatcgattcggtagcgggaaacgggtttcgcggagttttcgtcgttttcgttcggttcgcgtttttggtaggtcgggtttcgtttatcgttttttttttgtttgttttcgttcgtagggtttttttttcggtcgtttttcgttcggtcgttcgttttcgggttttttttcgggttttcggttttttttttcgttggcggggttcggatagaagatggtgtagaagaaattagtcgaattttagggtttttatcgttcgtttaaggtgaggttcggggtcggtttgggggcgtttcgggttggattatcggaatggtcggcgtggggggcgcggggttcgtttttaagatcggttttcggggttcgtgtttggttttcgttttatattcggggttgttcgggtcggtcg

SEQ ID NO: 22072 - DNA, 930 bp, Artificial Sequence
  chemically treated genomic DNA (Homo sapiens) CpG-island No: 22072
cgaccgacccgaacaaccccgaatataaaacgaaaaccaaacacgaaccccgaaaaccgatcttaaaaacgaaccccgcgccccccacgccgaccattccgataatccaacccgaaacgcccccaaaccgaccccgaacctcaccttaaacgaacgataaaaaccctaaaattcgactaatttcttctacaccatcttctatccgaaccccgccaacgaaaaaaaaaaccgaaaacccgaaaaaaaacccgaaaacgaacgaccgaacgaaaaacgaccgaaaaaaaaaccctacgaacgaaaacaaacaaaaaaaaaacgataaacgaaacccgacctaccaaaaacgcgaaccgaacgaaaacgacgaaaactccgcgaaacccgtttcccgctaccgaatcgatatcctcgaaaccgccctaaaattcgcactcaccgaaatcgaacttaaaccgaaaccgcaataccgccgccgccccacgtcgcgcaacccgaaccccgctccgcgaaccgcgcgaaaaacaacgccgccgccgccgccaacgcgaacccctctacctaaaccaccgccgctaaaaaaaaccgaacgcgtcgccgccgccgccacctttataaacccgaacctactctaaccccgcccccgacgcaaactccgcccgacctcaccccctacgcacgacgtaaacgaaaccaaaaaaaaacgctctccgaaaacccaatacgactacgcgctccgacgataaaacgtatccgaaacgactaacgcacgcctacgcaatacgacgcacgaaaatctcgatacgaaacctaaacaacgaccctacgacgcgcccgaaactaacctatttttaccgcctaaaactcgcgaaacccgtaaaacctacgaaaccctaaaccgtatcctaccgcctaaccccacacaaaaca

SEQ ID NO: 22073 - DNA, 732 bp, Artificial Sequence
  chemically treated genomic DNA (Homo sapiens) CpG-island No: 22073
agtttcgcgtcggttgacgttcggtcggtgtagagaaggtttagttcggggttcggtttatttatggagcgtcgtgaggacgttcggttagaggaggtttcgttgagtcgggggcggggtaggtgaacggaatttggtagtgtttttcgaagaatagggtcgataacgcgatttatcgggttcgaaagaaggttaggtttagttatcgttcgtcgcgggtaggtttaaatcgtagcggtgaggttagtcggtacgtaattcggtagttacgattttttttagtttagtgggcggttatttacggtgttcggtgttaaggagacggtcggcgggaggttgacgagagtcgggaggcgttagcgaaggaagagaaaaatcgaagacgaagttattatagcgtcgtagcgcggcgcggcgtttgttttataggagagggcgtaggcgtcgaggatttcggggcgcgcggcgttatatcgcggttgggttggtcgtcgagatcgtttgacggtaggtcgagaacggttgggcgggtttaggtcgggaggcggtaaggagttgtcgggggcggttggtcgggggatcggggggtcggaagagttttcgtttttttttagttttgaaagcgtcgcgttgtttcgttaattgggtgtcggatttcgattggtttagaaaggttttttaggtagcggtgttttaagtcgagtgaaagattttagttaaaaagtttggaaa

SEQ ID NO: 22074 - DNA, 732 bp, Artificial Sequence
  chemically treated genomic DNA (Homo sapiens) CpG-island No: 22074
tttccaaactttttaactaaaatctttcactcgacttaaaacaccgctacctaaaaaacctttctaaaccaatcgaaatccgacacccaattaacgaaacaacgcgacgctttcaaaactaaaaaaaaacgaaaactcttccgaccccccgatcccccgaccaaccgcccccgacaactccttaccgcctcccgacctaaacccgcccaaccgttctcgacctaccgtcaaacgatctcgacgaccaacccaaccgcgatataacgccgcgcgccccgaaatcctcgacgcctacgccctctcctataaaacaaacgccgcgccgcgctacgacgctataataacttcgtcttcgatttttctcttccttcgctaacgcctcccgactctcgtcaacctcccgccgaccgtctccttaacaccgaacaccgtaaataaccgcccactaaactaaaaaaaatcgtaactaccgaattacgtaccgactaacctcaccgctacgatttaaacctacccgcgacgaacgataactaaacctaaccttctttcgaacccgataaatcgcgttatcgaccctattcttcgaaaaacactaccaaattccgttcacctaccccgcccccgactcaacgaaacctcctctaaccgaacgtcctcacgacgctccataaataaaccgaaccccgaactaaaccttctctacaccgaccgaacgtcaaccgacgcgaaact

SEQ ID NO: 22075 - DNA, 732 bp, Artificial Sequence
  chemically treated genomic DNA (Homo sapiens) CpG-island No: 22075
tttttaggttttttaattggggttttttattcggtttagggtatcgttgtttgaaagatttttttaggttagtcggggttcggtatttagttgacgagatagcgcggcgtttttagagttggggagaggcgaaaattttttcggtttttcgatttttcggttagtcgttttcggtagttttttgtcgtttttcggtttgggttcgtttagtcgttttcggtttgtcgttaggcgatttcggcggttagtttagtcgcgatgtgacgtcgcgcgtttcggggttttcggcgtttgcgtttttttttataaagtagacgtcgcgtcgcgttgcgacgttgtagtggtttcgttttcggttttttttttttttcgttaacgtttttcggttttcgttagtttttcgtcggtcgtttttttaatatcgaatatcgtgagtagtcgtttattgaattggaaagggtcgtggttatcggattgcgtgtcggttggttttatcgttgcggtttgggtttgttcgcggcgggcggtgattgggtttggttttttttcgggttcggtggatcgcgttgtcgattttgtttttcgggagatattattaggtttcgtttatttgtttcgttttcgatttagcgaggttttttttggtcgggcgtttttacggcgttttataagtgagtcgaatttcgggttgggttttttttgtatcggtcgagcgttagtcggcgcggagtt

SEQ ID NO: 22076 - DNA, 732 bp, Artificial Sequence
  chemically treated genomic DNA (Homo sapiens) CpG-island No: 22076
aactccgcgccgactaacgctcgaccgatacaaaaaaaacccaacccgaaattcgactcacttataaaacgccgtaaaaacgcccgaccaaaaaaaacctcgctaaatcgaaaacgaaacaaataaacgaaacctaataatatctcccgaaaaacaaaatcgacaacgcgatccaccgaacccgaaaaaaaaccaaacccaatcaccgcccgccgcgaacaaacccaaaccgcaacgataaaaccaaccgacacgcaatccgataaccacgaccctttccaattcaataaacgactactcacgatattcgatattaaaaaaacgaccgacgaaaaactaacgaaaaccgaaaaacgttaacgaaaaaaaaaaaaaaccgaaaacgaaaccactacaacgtcgcaacgcgacgcgacgtctactttataaaaaaaaacgcaaacgccgaaaaccccgaaacgcgcgacgtcacatcgcgactaaactaaccgccgaaatcgcctaacgacaaaccgaaaacgactaaacgaacccaaaccgaaaaacgacaaaaaactaccgaaaacgactaaccgaaaaatcgaaaaaccgaaaaaattttcgcctctccccaactctaaaaacgccgcgctatctcgtcaactaaataccgaaccccgactaacctaaaaaaatctttcaaacaacgataccctaaaccgaataaaaaaccccaattaaaaaacctaaaaa

SEQ ID NO: 22077 - DNA, 513 bp, Artificial Sequence
  chemically treated genomic DNA (Homo sapiens) CpG-island No: 22077
gtttttttttattaattttaattttttaatattttttttatttatttttaaatattttttattcgttttgttaattttcgtttttttttttttgtcggatttcgttttttgatttttgtttcgtttcgtagttttttagttttcggagttttattttgttttttagttttgtttcgttttagcgtttatttatttattttttaattttttttatttttattttcgggtcgtttagtttaattttttatttagtttgttttttttattttcgtagtttttttttttattaagtttcgttttttattaagtttcgtttatttttttaagtttttcgttttggtttcgttttatattttttattatttttcggttttttttcgagtttcgtttttacgttggtttcgtttagcgggggagttcgtttttattttttgttttttttgggtttaggcgatgtcgtcgttattagttacgcggagtagttttagttcgtcgtggttattaagggtttta

SEQ ID NO: 22078 - DNA, 513 bp, Artificial Sequence
  chemically treated genomic DNA (Homo sapiens) CpG-island No: 22078
taaaacccttaataaccacgacgaactaaaactactccgcgtaactaataacgacgacatcgcctaaacccaaaaaaaacaaaaaataaaaacgaactcccccgctaaacgaaaccaacgtaaaaacgaaactcgaaaaaaaaccgaaaaataataaaaaatataaaacgaaaccaaaacgaaaaacttaaaaaaataaacgaaacttaataaaaaacgaaacttaataaaaaaaaaaactacgaaaataaaaaaaacaaactaaataaaaaattaaactaaacgacccgaaaataaaaataaaaaaaattaaaaaataaataaataaacgctaaaacgaaacaaaactaaaaaacaaaataaaactccgaaaactaaaaaactacgaaacgaaacaaaaatcaaaaaacgaaatccgacaaaaaaaaaaaaacgaaaattaacaaaacgaataaaaaatatttaaaaataaataaaaaaaatattaaaaaattaaaattaataaaaaaaaac

SEQ ID NO: 22079 - DNA, 513 bp, Artificial Sequence
  chemically treated genomic DNA (Homo sapiens) CpG-island No: 22079
tggggtttttggtggttacgacgggttggggttgtttcgcgtggttggtgacggcggtatcgtttggatttagggagaataggaggtgagggcggattttttcgttgggcggggttaacgtgggggcggggttcggggaggggtcggagagtggtaggggatgtggggcggagttaaaacgaaagatttggggaagtgggcgaggtttaatgaggggcggggtttagtgagggaggagattgcgggaatgggaggggtaaattgagtgaagggttgggttgagcgattcgggaatgaaaatgggaggggttgaggagtgggtgggtgggcgttggaacgaggtaagattaagaggtagagtgaggtttcgagagttgggaggttgcgaagcggggtagggattaaggggcggggttcggtagagagaaggaggcggggattggtagagcgggtgggagatgtttggggatgggtaggggaggtgttgagaggttggagttgataggagggggt

SEQ ID NO: 22080 - DNA, 513 bp, Artificial Sequence
  chemically treated genomic DNA (Homo sapiens) CpG-island No: 22080
accccctcctatcaactccaacctctcaacacctcccctacccatccccaaacatctcccacccgctctaccaatccccgcctccttctctctaccgaaccccgccccttaatccctaccccgcttcgcaacctcccaactctcgaaacctcactctacctcttaatcttacctcgttccaacgcccacccacccactcctcaacccctcccattttcattcccgaatcgctcaacccaacccttcactcaatttacccctcccattcccgcaatctcctccctcactaaaccccgcccctcattaaacctcgcccacttccccaaatctttcgttttaactccgccccacatcccctaccactctccgacccctccccgaaccccgcccccacgttaaccccgcccaacgaaaaaatccgccctcacctcctattctccctaaatccaaacgataccgccgtcaccaaccacgcgaaacaaccccaacccgtcgtaaccaccaaaaacccca

SEQ ID NO: 22081 - DNA, 533 bp, Artificial Sequence
  chemically treated genomic DNA (Homo sapiens) CpG-island No: 22081
ttaatgcgttcgatttttattatttattttttagttttttatcgtcgaagatttgtgtttgatttttttggcgttttttttatttttttttttcggagtatttttttacgttttttgatacgattattttttttttttattattatatcgtttttttatttttttttttttttttgattgtcgcgcgtgttatatatttttgttcgtatcgtatttttttttttttattttattcgattttttttttgtatttagtcgattttttttatttttttttttttatttttttcgttttttttttttaattttatcgtttttttatattttttttttttttatatttttatatttatttcgttttttattaattttttttttttttttttattttttcgtatttttttttttttttagtttattgtttttttttattatattttttacgtcgattttatttttttttattacgttattcgttttttttatatgtttttttttatatgtttttatatttttttattttattttatatt

SEQ ID NO: 22082 - DNA, 533 bp, Artificial Sequence
  chemically treated genomic DNA (Homo sapiens) CpG-island No: 22082
aatataaaataaaataaaaaaatataaaaacatataaaaaaaaacatataaaaaaaacgaataacgtaataaaaaaaaataaaatcgacgtaaaaaatataataaaaaaaaacaataaactaaaaaaaaaaaaaaatacgaaaaaataaaaaaaaaaaaaaaaaattaataaaaaacgaaataaatataaaaatataaaaaaaaaaaaaatataaaaaaacgataaaattaaaaaaaaaaaacgaaaaaaataaaaaaaaaaaaataaaaaaaatcgactaaatacaaaaaaaaaatcgaataaaataaaaaaaaaaaaatacgatacgaacaaaaatatataacacgcgcgacaatcaaaaaaaaaaaaaaaaataaaaaaacgatataataataaaaaaaaaaaataatcgtatcaaaaaacgtaaaaaaatactccgaaaaaaaaaaataaaaaaaacgccaaaaaaatcaaacacaaatcttcgacgataaaaaactaaaaaataaataataaaaatcgaacgcattaa

SEQ ID NO: 22083 - DNA, 533 bp, Artificial Sequence
  chemically treated genomic DNA (Homo sapiens) CpG-island No: 22083
ggtgtgaagtgaggtgaggaagtgtagaagtatataaagaagaatatgtgggagaagcgggtagcgtgataagagggagtggagtcgacgtggagggtgtgatgagagagggtagtagattaggagaggggaggagtgcggaggggtaggaggaaaggaggaaggttaatgggggacgaggtaaatgtagaagtgtagaggaaagaaaggtgtaggagggcggtggggttgagaggaagagacgagaggagtggagggagggagataaaggaaatcggttaggtgtaagaggaagatcgggtgaggtgaaggggagagagtgcggtgcgaatagaagtatatggtacgcgcggtagttagagggggaaaagagaatgagaggacggtgtggtggtaggaggagggggtggtcgtgttaagaagcgtagagaaatgtttcgagggaggagggtggagagagcgttagaagggttagatataggttttcggcggtgaagagttagagggtagatggtgagggtcggacgtattag

SEQ ID NO: 22084 - DNA, 533 bp, Artificial Sequence
  chemically treated genomic DNA (Homo sapiens) CpG-island No: 22084
ctaatacgtccgaccctcaccatctaccctctaactcttcaccgccgaaaacctatatctaacccttctaacgctctctccaccctcctccctcgaaacatttctctacgcttcttaacacgaccaccccctcctcctaccaccacaccgtcctctcattctcttttccccctctaactaccgcgcgtaccatatacttctattcgcaccgcactctctccccttcacctcacccgatcttcctcttacacctaaccgatttcctttatctccctccctccactcctctcgtctcttcctctcaaccccaccgccctcctacacctttctttcctctacacttctacatttacctcgtcccccattaaccttcctcctttcctcctacccctccgcactcctcccctctcctaatctactaccctctctcatcacaccctccacgtcgactccactccctcttatcacgctacccgcttctcccacatattcttctttatatacttctacacttcctcacctcacttcacacc

SEQ ID NO: 22085 - DNA, 840 bp, Artificial Sequence
  chemically treated genomic DNA (Homo sapiens) CpG-island No: 22085
acggggttatcggagggagatttaaggaaggatcgatgcggggcggtaataggcgggtttcgcggttatttgaaggagggtgacgtggcggtgaagggcgcgcgaagggtcgggcggggcggagtttggacgagtggtagggacggaggaggtgcggcggaatgaagagtgttggcggggtcgggtgagagtgacggagcggcgattgagtgagggtggggaggggagtggcggcggggaagtgtgcggtaggtgtggagagggggtggatgcgtcgcgagaggtgggcgacgtgggagggaggtggtggtgggggtgcgtgcgggcgggtcgaggggggtgggtcgaggagggggatcggcgtgtgtcgcgtgggagtggcgcgggagtgcgggagaggcggggtcggtggtcgttcgggttgtgtgcggggcgcgtgtcgtgtaggagtggtggtcgcgaggggcgcgtggcgggggggagtgggcgtggggggggggggtgcgggggtgtgggggggggggcggtgggggtgggggggggtggagagggggggggggggggggggggatgggggtggcgggggggggggggcggggagggggggggggtgggcgggggtggtgggggacggttggggggtgggggggggcggggggggggggggggggggatgggggggaggtggggagggggggggaggggtgaggtgggcgggggagggggggggtggggggggaggggtgggtgggtggtggggcggggggtggggggaggggggggtggcgggtggggggggggtgggggggtgcggggggggggggttaggaagagtataat

SEQ ID NO: 22086 - DNA, 840 bp, Artificial Sequence
  chemically treated genomic DNA (Homo sapiens) CpG-island No: 22086
attatactcttcctaaccccccccccccgcacccccccaccccccccccacccgccacccccccctccccccaccccccgccccaccacccacccacccctccccccccaccccccccctcccccgcccacctcacccctccccccccctccccacctcccccccatccccccccccccccccccccgcccccccccaccccccaaccgtcccccaccacccccgcccaccccccccccctccccgcccccccccccccgccacccccatccccccccccccccccccccctctccacccccccccacccccaccgcccccccccccacacccccgcaccccccccccccacgcccactcccccccgccacgcgcccctcgcgaccaccactcctacacgacacgcgccccgcacacaacccgaacgaccaccgaccccgcctctcccgcactcccgcgccactcccacgcgacacacgccgatccccctcctcgacccacccccctcgacccgcccgcacgcacccccaccaccacctccctcccacgtcgcccacctctcgcgacgcatccaccccctctccacacctaccgcacacttccccgccgccactcccctccccaccctcactcaatcgccgctccgtcactctcacccgaccccgccaacactcttcattccgccgcacctcctccgtccctaccactcgtccaaactccgccccgcccgacccttcgcgcgcccttcaccgccacgtcaccctccttcaaataaccgcgaaacccgcctattaccgccccgcatcgatccttccttaaatctccctccgataaccccgt

SEQ ID NO: 22087 - DNA, 840 bp, Artificial Sequence
  chemically treated genomic DNA (Homo sapiens) CpG-island No: 22087
gttatgttttttttggtttttttttttcgtatttttttattttttttttattcgttatttttttttttttttatttttcgttttattatttatttatttttttttttttattttttttttttttcgtttattttatttttttttttttttttttattttttttttattttttttttttttttttttcgtttttttttattttttaatcgttttttattattttcgtttatttttttttttttttcgttttttttttttcgttatttttatttttttttttttttttttttttttttatttttttttatttttatcgtttttttttttatattttcgtattttttttttttacgtttattttttttcgttacgcgtttttcgcgattattatttttgtacggtacgcgtttcgtatataattcgggcgattatcggtttcgtttttttcgtattttcgcgttatttttacgcggtatacgtcggttttttttttcggtttatttttttcgattcgttcgtacgtatttttattattattttttttttacgtcgtttatttttcgcggcgtatttattttttttttatatttgtcgtatattttttcgtcgttatttttttttttatttttatttagtcgtcgtttcgttatttttattcggtttcgttaatattttttatttcgtcgtatttttttcgtttttattattcgtttaagtttcgtttcgttcgatttttcgcgcgttttttatcgttacgttatttttttttaaatggtcgcggggttcgtttattgtcgtttcgtatcgatttttttttaagttttttttcgataatttcgt

SEQ ID NO: 22088 - DNA, 840 bp, Artificial Sequence
  chemically treated genomic DNA (Homo sapiens) CpG-island No: 22088
acgaaattatcgaaaaaaaacttaaaaaaaaatcgatacgaaacgacaataaacgaaccccgcgaccatttaaaaaaaaataacgtaacgataaaaaacgcgcgaaaaatcgaacgaaacgaaacttaaacgaataataaaaacgaaaaaaatacgacgaaataaaaaatattaacgaaaccgaataaaaataacgaaacgacgactaaataaaaataaaaaaaaaaataacgacgaaaaaatatacgacaaatataaaaaaaaaataaatacgccgcgaaaaataaacgacgtaaaaaaaaaataataataaaaatacgtacgaacgaatcgaaaaaaataaaccgaaaaaaaaaaccgacgtataccgcgtaaaaataacgcgaaaatacgaaaaaaacgaaaccgataatcgcccgaattatatacgaaacgcgtaccgtacaaaaataataatcgcgaaaaacgcgtaacgaaaaaaaataaacgtaaaaaaaaaaaatacgaaaatataaaaaaaaaaacgataaaaataaaaaaaaataaaaaaaaaaaaaaaaaaaaaaaaaaataaaaataacgaaaaaaaaaaaacgaaaaaaaaaaaaaaataaacgaaaataataaaaaacgattaaaaaataaaaaaaaacgaaaaaaaaaaaaaaaaaaaataaaaaaaaaataaaaaaaaaaaaaaaaaaataaaataaacgaaaaaaaaaaaaaataaaaaaaaaaaaataaataaataataaaacgaaaaataaaaaaaaaaaaaaataacgaataaaaaaaaaataaaaaaatacgaaaaaaaaaaaccaaaaaaaacataac

SEQ ID NO: 22089 - DNA, 559 bp, Artificial Sequence
  chemically treated genomic DNA (Homo sapiens) CpG-island No: 22089
gcgtttcgatttaggtacgtcgttattttattcgcgtatataattcggcggtagaaaagcgtttggcggcgattatcgtttaggatagttagcgtgcgaatgtttatgaagtgcgtgttgaagtttagcgtgcgcgttttaaattgttagcgtgggtcgattattacgattggttttttttcgtaaattacggaaattcgtattttgcgtttggattttaaaaagggtaatttcgacgttaataattatcgtacgggtattgcggaatatattaagtaggttattgttgagtaggaacgtttgggattggatgtgttggtatatggcgaggtcgagcgtaatgatatggtggaatattttggcgagtatttcgacggatttgtttttacgtaaaacggtttggtatagagttacggttttcgttgcgtgaagtatcgattgttattggtgatattagtcgttcggtatcgattatcgtggaatgggttaaatattttttaaatttgttattataattcgtgtaaagggtattttaatcgggtcggggaataaattttgt

SEQ ID NO: 22090 - DNA, 559 bp, Artificial Sequence
  chemically treated genomic DNA (Homo sapiens) CpG-island No: 22090
acaaaatttattccccgacccgattaaaataccctttacacgaattataataacaaatttaaaaaatatttaacccattccacgataatcgataccgaacgactaatatcaccaataacaatcgatacttcacgcaacgaaaaccgtaactctataccaaaccgttttacgtaaaaacaaatccgtcgaaatactcgccaaaatattccaccatatcattacgctcgacctcgccatataccaacacatccaatcccaaacgttcctactcaacaataacctacttaatatattccgcaatacccgtacgataattattaacgtcgaaattaccctttttaaaatccaaacgcaaaatacgaatttccgtaatttacgaaaaaaaaccaatcgtaataatcgacccacgctaacaatttaaaacgcgcacgctaaacttcaacacgcacttcataaacattcgcacgctaactatcctaaacgataatcgccgccaaacgcttttctaccgccgaattatatacgcgaataaaataacgacgtacctaaatcgaaacgc

SEQ ID NO: 22091 - DNA, 559 bp, Artificial Sequence
  chemically treated genomic DNA (Homo sapiens) CpG-island No: 22091
ataaaatttgtttttcggttcggttaagatattttttatacgggttgtggtgataggtttggggaatatttggtttattttacggtaatcggtgtcgggcggttaatgttattaatgataatcggtgttttacgtagcgggaatcgtagttttgtattaaatcgttttgcgtaaagataaattcgtcgaggtgttcgttaaagtattttattatgttattacgttcggtttcgttatgtattagtatatttagttttaaacgtttttgtttaataatggtttgtttgatatgtttcgtaatgttcgtgcggtagttgttggcgtcgagattgttttttttgaaatttagacgtagggtacgaattttcgtggtttgcgggaaggaattaatcgtggtggtcggtttacgttggtagtttaaaacgcgtacgttgggttttagtacgtattttatagatattcgtacgttggttgttttgggcggtgatcgtcgttagacgtttttttatcgtcggattatgtacgcgggtagagtgacgacgtgtttgaatcggggcgt

SEQ ID NO: 22092 - DNA, 559 bp, Artificial Sequence
  chemically treated genomic DNA (Homo sapiens) CpG-island No: 22092
acgccccgattcaaacacgtcgtcactctacccgcgtacataatccgacgataaaaaaacgtctaacgacgatcaccgcccaaaacaaccaacgtacgaatatctataaaatacgtactaaaacccaacgtacgcgttttaaactaccaacgtaaaccgaccaccacgattaattccttcccgcaaaccacgaaaattcgtaccctacgtctaaatttcaaaaaaaacaatctcgacgccaacaactaccgcacgaacattacgaaacatatcaaacaaaccattattaaacaaaaacgtttaaaactaaatatactaatacataacgaaaccgaacgtaataacataataaaatactttaacgaacacctcgacgaatttatctttacgcaaaacgatttaatacaaaactacgattcccgctacgtaaaacaccgattatcattaataacattaaccgcccgacaccgattaccgtaaaataaaccaaatattccccaaacctatcaccacaacccgtataaaaaatatcttaaccgaaccgaaaaacaaattttat

SEQ ID NO: 22093 - DNA, 817 bp, Artificial Sequence
  chemically treated genomic DNA (Homo sapiens) CpG-island No: 22093
ggggatggggcgtgtttagtattacggttcgttttatttatgtattcgttggtcgaattcgacgttcgttattgtcgagtttcgtttaggttttgttttttcgtagtcggttaggtcgagaggaggcgtggttattgtcgcgtcggggcggtttggcggaggggggggaggttttttttcgtttcgtgatattttgggcgagttcgcgggcgggttgtgggtcgcgagtcgtcgtgggagcgcgtgtcgcggtttttaggagtcgtcggtcgacgtttcgtttcgtttttttggcgtttaggtttcgcgcgagttcgcgtacgcgcgcgcgcgtattcgttagaggtttgtttgaggttcgcggggattgggcgggcggaggtcgggttgtcgaagtgtgaggggaggagttcgagtcgtcgttgttgtcgtcgttaagggagaggagtatgtttgtaattcgagttaagaaagtgaagatggttattaaattatgtttcgagtgcgattaataggtgggtgtcgggggtcgggcgcgcgggcgggcggtagtggtttggcggtcgttgtttgtggaggggggtttcgtcgggttttcggaggtcgagcggtgggtagattttggggttcgtcggcggcggcggggattcggggtcggtcgggttgtatcgaggggtttttcgggaaaagttcggggtcgtggttcgttagcgtttatttggcggcggttagacggttaagtttttttttgttgtgtttcggttattggaggagcgcgtttttggtgggtttatcgggcggttgtttggagttttag

SEQ ID NO: 22094 - DNA, 817 bp, Artificial Sequence
  chemically treated genomic DNA (Homo sapiens) CpG-island No: 22094
ctaaaactccaaacaaccgcccgataaacccaccaaaaacgcgctcctccaataaccgaaacacaacaaaaaaaaacttaaccgtctaaccgccgccaaataaacgctaacgaaccacgaccccgaacttttcccgaaaaacccctcgatacaacccgaccgaccccgaatccccgccgccgccgacgaaccccaaaatctacccaccgctcgacctccgaaaacccgacgaaacccccctccacaaacaacgaccgccaaaccactaccgcccgcccgcgcgcccgacccccgacacccacctattaatcgcactcgaaacataatttaataaccatcttcactttcttaactcgaattacaaacatactcctctcccttaacgacgacaacaacgacgactcgaactcctcccctcacacttcgacaacccgacctccgcccgcccaatccccgcgaacctcaaacaaacctctaacgaatacgcgcgcgcgcgtacgcgaactcgcgcgaaacctaaacgccaaaaaaacgaaacgaaacgtcgaccgacgactcctaaaaaccgcgacacgcgctcccacgacgactcgcgacccacaacccgcccgcgaactcgcccaaaatatcacgaaacgaaaaaaaacctcccccccctccgccaaaccgccccgacgcgacaataaccacgcctcctctcgacctaaccgactacgaaaaaacaaaacctaaacgaaactcgacaataacgaacgtcgaattcgaccaacgaatacataaataaaacgaaccgtaatactaaacacgccccatcccc

SEQ ID NO: 22095 - DNA, 817 bp, Artificial Sequence
  chemically treated genomic DNA (Homo sapiens) CpG-island No: 22095
ttggggttttagatagtcgttcggtgagtttattaaaggcgcgtttttttagtggtcgggatatagtaagaaggggtttggtcgtttggtcgtcgttaggtggacgttggcgggttacggtttcgggtttttttcgggaaatttttcggtgtagttcgatcggtttcggattttcgtcgtcgtcggcgggttttaggatttgtttatcgttcggttttcgggagttcggcgaggtttttttttatagataacggtcgttaagttattgtcgttcgttcgcgcgttcggttttcggtatttatttgttggtcgtattcggggtatgatttggtggttatttttatttttttggttcgagttgtagatatgttttttttttttagcggcggtagtagcgacggttcgggtttttttttttatatttcggtagttcggttttcgttcgtttagttttcgcgggttttaaataagtttttggcgggtgcgcgcgcgcgcgtgcgcgagttcgcgcgggatttgggcgttaagggggcggggcggagcgtcggtcggcggtttttggggatcgcgatacgcgtttttacggcggttcgcgatttatagttcgttcgcgagttcgtttagagtattacgagacgaggggagatttttttttttttcgttagatcgtttcggcgcggtagtggttacgttttttttcggtttggtcgattacgagggggtaaggtttgggcgggattcggtagtaacgggcgtcgagttcgattaacgaatgtataggtagggcgggtcgtagtgttgggtacgttttattttt

SEQ ID NO: 22096 - DNA, 817 bp, Artificial Sequence
  chemically treated genomic DNA (Homo sapiens) CpG-island No: 22096
aaaaataaaacgtacccaacactacgacccgccctacctatacattcgttaatcgaactcgacgcccgttactaccgaatcccgcccaaaccttaccccctcgtaatcgaccaaaccgaaaaaaaacgtaaccactaccgcgccgaaacgatctaacgaaaaaaaaaaaaatctcccctcgtctcgtaatactctaaacgaactcgcgaacgaactataaatcgcgaaccgccgtaaaaacgcgtatcgcgatccccaaaaaccgccgaccgacgctccgccccgcccccttaacgcccaaatcccgcgcgaactcgcgcacgcgcgcgcgcgcacccgccaaaaacttatttaaaacccgcgaaaactaaacgaacgaaaaccgaactaccgaaatataaaaaaaaaaacccgaaccgtcgctactaccgccgctaaaaaaaaaaaacatatctacaactcgaaccaaaaaaataaaaataaccaccaaatcataccccgaatacgaccaacaaataaataccgaaaaccgaacgcgcgaacgaacgacaataacttaacgaccgttatctataaaaaaaaacctcgccgaactcccgaaaaccgaacgataaacaaatcctaaaacccgccgacgacgacgaaaatccgaaaccgatcgaactacaccgaaaaatttcccgaaaaaaacccgaaaccgtaacccgccaacgtccacctaacgacgaccaaacgaccaaaccccttcttactatatcccgaccactaaaaaaacgcgcctttaataaactcaccgaacgactatctaaaaccccaa

SEQ ID NO: 22097 - DNA, 566 bp, Artificial Sequence
  chemically treated genomic DNA (Homo sapiens) CpG-island No: 22097
tagatagcggggtttgcgtttcgttgtcgggtttttcgttataaattcgattgtagtaggcgttggcggaatgaacggaaagttttttttggtttatttttttatttacggatagggttggttgtttttagggacgtgtgttatcgtcgtttgttatcgttttttttgttattttatttaagtttacggtcgagaagttttttttgaagtaggttttaaatttcgttcggttttagcgtttttcgttattttttcgtcgttcgtcgtttgggaagggcgcgggttttatttgagggtttagggtcgcgaggcggaagtttagttttggttttgcgcggtcgaatttattttagtatgtcgggttcggcgaggtttaggcgcggggttaggcgttcgattagtttcgattttatggcgtcggtattaaagcgaataattttcgtgaacgtcgcgggttaacgaaattcgcgcgtaaaggttgtatcggttagtgagagttaggttttattttcggcgtatttggattggttaggataggacgttgagatcgttttataaattaatta

SEQ ID NO: 22098 - DNA, 566 bp, Artificial Sequence
  chemically treated genomic DNA (Homo sapiens) CpG-island No: 22098
taattaatttataaaacgatctcaacgtcctatcctaaccaatccaaatacgccgaaaataaaacctaactctcactaaccgatacaacctttacgcgcgaatttcgttaacccgcgacgttcacgaaaattattcgctttaataccgacgccataaaatcgaaactaatcgaacgcctaaccccgcgcctaaacctcgccgaacccgacatactaaaataaattcgaccgcgcaaaaccaaaactaaacttccgcctcgcgaccctaaaccctcaaataaaacccgcgcccttcccaaacgacgaacgacgaaaaaataacgaaaaacgctaaaaccgaacgaaatttaaaacctacttcaaaaaaaacttctcgaccgtaaacttaaataaaataacaaaaaaaacgataacaaacgacgataacacacgtccctaaaaacaaccaaccctatccgtaaataaaaaaataaaccaaaaaaaactttccgttcattccgccaacgcctactacaatcgaatttataacgaaaaacccgacaacgaaacgcaaaccccgctatcta

SEQ ID NO: 22099 - DNA, 566 bp, Artificial Sequence
  chemically treated genomic DNA (Homo sapiens) CpG-island No: 22099
tgattggtttgtgggacggttttaacgttttgttttaattaatttagatgcgtcgggggtggggtttggtttttattggtcggtgtagtttttgcgcgcgggtttcgttgattcgcggcgtttacgggaattgttcgttttagtgtcggcgttatggggtcggagttgatcgggcgtttagtttcgcgtttgggtttcgtcgagttcgatatgttgaggtgagttcggtcgcgtaagattagggttgggttttcgtttcgcggttttgggtttttaggtgaggttcgcgttttttttaggcgacgggcggcgggggagtgacggggagcgttggggtcgggcggggtttagggtttattttaagaaaaatttttcggtcgtgagtttgaatgagatggtaagaagggcgatagtaaacggcgatggtatacgtttttgggaatagttagttttgttcgtgggtagaaaaatgagttagggagaatttttcgtttatttcgttaacgtttattgtagtcgggtttatagcggggaattcgataacgaggcgtagatttcgttgtttg

SEQ ID NO: 22100 - DNA, 566 bp, Artificial Sequence
  chemically treated genomic DNA (Homo sapiens) CpG-island No: 22100
caaacaacgaaatctacgcctcgttatcgaattccccgctataaacccgactacaataaacgttaacgaaataaacgaaaaattctccctaactcatttttctacccacgaacaaaactaactattcccaaaaacgtataccatcgccgtttactatcgcccttcttaccatctcattcaaactcacgaccgaaaaatttttcttaaaataaaccctaaaccccgcccgaccccaacgctccccgtcactcccccgccgcccgtcgcctaaaaaaaacgcgaacctcacctaaaaacccaaaaccgcgaaacgaaaacccaaccctaatcttacgcgaccgaactcacctcaacatatcgaactcgacgaaacccaaacgcgaaactaaacgcccgatcaactccgaccccataacgccgacactaaaacgaacaattcccgtaaacgccgcgaatcaacgaaacccgcgcgcaaaaactacaccgaccaataaaaaccaaaccccacccccgacgcatctaaattaattaaaacaaaacgttaaaaccgtcccacaaaccaatca

SEQ ID NO: 22101 - DNA, 1012 bp, Artificial Sequence
  chemically treated genomic DNA (Homo sapiens) CpG-island No: 22101
gttgttattgttttgtcgttgtcgagtcggttatttgggtattcgcggagtcgcgtcgttgttatcgtttcggcggtttttcggagtgcgcggagggggcggcggaggagcgagatatttatagtaatcgaggatgcgaggggcgtttagtagtagcgagtgtttgggagttaggaggaggttttcgcgcgtcggtaatttttagtgttaggcgttttgtagttttcgcgcgtcgcgtttgggttcgtatcgttttcgtagtgagggttcgttcgagcggtaagtttttttcggcggttaagtcgatatttttttttcgtttcgtcgtttatttcgggtagtagtcgcggaataatggagagcgtagttagtagttttggagacggcgttcgggggaggacgcgtcgtcgtcgtcgtcgttgtcgttagggtaggcgcgcgtcgcgtggagtcgggcgggtgcgagggcgcgcggcggggggtggggggtacgcgtcgcgcggggggcgggggtagtggggggcgcgcgcgcgggttcggggagttcgcggggagagttcggcgttcggcgtagcgcggcgcggttaagtttcgcgtttttttcgttttttttcggcgcgttcgttttcgtttcgtcgttcgtattcgttgggggcgtttagaaagatgtatagaggtaacggttaggggagcggaggtttaagttatatgtttgcgttttcgggggttagagttcgttagttttcgcggatttcggttcgcggttagttcgagcggttcgggtgagtagcggtatagcggttttttcgtttcgcggttttcgttcgtcgagacgtggttttaagaagtggtgtcgtagtcggggtagaggcggaggaagtcgagtcgggtaagtcgggaaggttgcggagacgttttgtcggggtaggtgttgtagttttagttagcggtttttacggagggggcgggaggggggtttttttttttaaatttgttttggttatcgattttt

SEQ ID NO: 22102 - DNA, 1012 bp, Artificial Sequence
  chemically treated genomic DNA (Homo sapiens) CpG-island No: 22102
aaaaatcgataaccaaaacaaatttaaaaaaaaaaacccccctcccgccccctccgtaaaaaccgctaactaaaactacaacacctaccccgacaaaacgtctccgcaaccttcccgacttacccgactcgacttcctccgcctctaccccgactacgacaccacttcttaaaaccacgtctcgacgaacgaaaaccgcgaaacgaaaaaaccgctataccgctactcacccgaaccgctcgaactaaccgcgaaccgaaatccgcgaaaactaacgaactctaacccccgaaaacgcaaacatataacttaaacctccgctcccctaaccgttacctctatacatctttctaaacgcccccaacgaatacgaacgacgaaacgaaaacgaacgcgccgaaaaaaaacgaaaaaaacgcgaaacttaaccgcgccgcgctacgccgaacgccgaactctccccgcgaactccccgaacccgcgcgcgcgccccccactacccccgccccccgcgcgacgcgtaccccccaccccccgccgcgcgccctcgcacccgcccgactccacgcgacgcgcgcctaccctaacgacaacgacgacgacgacgacgcgtcctcccccgaacgccgtctccaaaactactaactacgctctccattattccgcgactactacccgaaataaacgacgaaacgaaaaaaaaatatcgacttaaccgccgaaaaaaacttaccgctcgaacgaaccctcactacgaaaacgatacgaacccaaacgcgacgcgcgaaaactacaaaacgcctaacactaaaaattaccgacgcgcgaaaacctcctcctaactcccaaacactcgctactactaaacgcccctcgcatcctcgattactataaatatctcgctcctccgccgccccctccgcgcactccgaaaaaccgccgaaacgataacaacgacgcgactccgcgaatacccaaataaccgactcgacaacgacaaaacaataacaac

SEQ ID NO: 22103 - DNA, 1012 bp, Artificial Sequence
  chemically treated genomic DNA (Homo sapiens) CpG-island No: 22103
gggaatcgataattagaataggtttgaaaaaaaaagtttttttttcgtttttttcgtagagatcgttagttgaggttgtaatatttgtttcggtaaagcgttttcgtagttttttcggtttgttcgattcggtttttttcgtttttgtttcggttgcggtattattttttggagttacgtttcggcgagcgggggtcgcggagcgagggggtcgttgtgtcgttatttattcgagtcgttcgggttggtcgcgagtcgggattcgcgagggttggcgggttttggttttcgaggacgtagatatgtggtttgaattttcgtttttttagtcgttgtttttgtgtatttttttgggcgtttttagcgaatgcgagcggcgaggcgagggcgagcgcgtcgaggaagggcgggagaggcgcggagtttggtcgcgtcgcgttgcgtcgagcgtcgggtttttttcgcgagtttttcgggttcgcgcgcgcgttttttattgttttcgtttttcgcgcggcgcgtgttttttatttttcgtcgcgcgttttcgtattcgttcggttttacgcggcgcgcgtttgttttggcggtagcggcggcggcggcggcgcgttttttttcgaacgtcgtttttagggttgttggttgcgttttttattgtttcgcggttgttgttcggggtgggcggcgaggcgggggggaggtgtcggtttggtcgtcggggagggtttatcgttcgggcggatttttattgcgagagcgatgcgggtttaggcgcggcgcgcgggggttgtagggcgtttagtattgggggttgtcggcgcgcgggggtttttttttggtttttaggtattcgttgttgttgggcgtttttcgtattttcggttattatggatatttcgttttttcgtcgtttttttcgcgtatttcgggaggtcgtcggggcggtagtagcggcgcggtttcgcgggtgtttaggtgatcggttcggtagcggtagagtagtggtagt

SEQ ID NO: 22104 - DNA, 1012 bp, Artificial Sequence
  chemically treated genomic DNA (Homo sapiens) CpG-island No: 22104
actaccactactctaccgctaccgaaccgatcacctaaacacccgcgaaaccgcgccgctactaccgccccgacgacctcccgaaatacgcgaaaaaaacgacgaaaaaacgaaatatccataataaccgaaaatacgaaaaacgcccaacaacaacgaatacctaaaaaccaaaaaaaaacccccgcgcgccgacaacccccaatactaaacgccctacaacccccgcgcgccgcgcctaaacccgcatcgctctcgcaataaaaatccgcccgaacgataaaccctccccgacgaccaaaccgacacctcccccccgcctcgccgcccaccccgaacaacaaccgcgaaacaataaaaaacgcaaccaacaaccctaaaaacgacgttcgaaaaaaaacgcgccgccgccgccgccgctaccgccaaaacaaacgcgcgccgcgtaaaaccgaacgaatacgaaaacgcgcgacgaaaaataaaaaacacgcgccgcgcgaaaaacgaaaacaataaaaaacgcgcgcgcgaacccgaaaaactcgcgaaaaaaacccgacgctcgacgcaacgcgacgcgaccaaactccgcgcctctcccgcccttcctcgacgcgctcgccctcgcctcgccgctcgcattcgctaaaaacgcccaaaaaaatacacaaaaacaacgactaaaaaaacgaaaattcaaaccacatatctacgtcctcgaaaaccaaaacccgccaaccctcgcgaatcccgactcgcgaccaacccgaacgactcgaataaataacgacacaacgaccccctcgctccgcgacccccgctcgccgaaacgtaactccaaaaaataataccgcaaccgaaacaaaaacgaaaaaaaccgaatcgaacaaaccgaaaaaactacgaaaacgctttaccgaaacaaatattacaacctcaactaacgatctctacgaaaaaaacgaaaaaaaaactttttttttcaaacctattctaattatcgattccc

SEQ ID NO: 22105 - DNA, 573 bp, Artificial Sequence
  chemically treated genomic DNA (Homo sapiens) CpG-island No: 22105
gttcgtcgtcgtttcgggtggttttttttttttgtttggtttcgcgcgttttagttttgcgggaggcggcggcgagaagttgcggttttgggtgcggtgcggggcgttcgggcgataggcgggcgtaaggcgggcgcgtagtagatcggttggcgtcgtattatgttttttagcgcggtcgtagtttacgtcggtgcgtattgggacgttgtggtttttttcgcgttttttaattttttcgttgcgttcggttttggtaatttgggtaagagttttttgatcgagaatttgttgcgggtcgggggcgttttaacgtttaggttgtagtcgttcgcgttttacgattcggcgatcgttttggttatcgcgggcgcgtagtttcggtttttgtttgttagtttagtttttttaaagttgtgtttcgtagtcgaataagttagtttcgtcggggcgttttacggaacgcggtgggttttttaagtgtttagtttttttgcggatagtgcgaggttgtcgggtcgggtttcgggggatcgagattgtattttttagtttttagcgttaggtgagtta

SEQ ID NO: 22106 - DNA, 573 bp, Artificial Sequence
  chemically treated genomic DNA (Homo sapiens) CpG-island No: 22106
taactcacctaacgctaaaaactaaaaaatacaatctcgatcccccgaaacccgacccgacaacctcgcactatccgcaaaaaaactaaacacttaaaaaacccaccgcgttccgtaaaacgccccgacgaaactaacttattcgactacgaaacacaactttaaaaaaactaaactaacaaacaaaaaccgaaactacgcgcccgcgataaccaaaacgatcgccgaatcgtaaaacgcgaacgactacaacctaaacgttaaaacgcccccgacccgcaacaaattctcgatcaaaaaactcttacccaaattaccaaaaccgaacgcaacgaaaaaattaaaaaacgcgaaaaaaaccacaacgtcccaatacgcaccgacgtaaactacgaccgcgctaaaaaacataatacgacgccaaccgatctactacgcgcccgccttacgcccgcctatcgcccgaacgccccgcaccgcacccaaaaccgcaacttctcgccgccgcctcccgcaaaactaaaacgcgcgaaaccaaacaaaaaaaaaaaaccacccgaaacgacgacgaac

SEQ ID NO: 22107 - DNA, 573 bp, Artificial Sequence
  chemically treated genomic DNA (Homo sapiens) CpG-island No: 22107
tggtttatttggcgttgaaggttggaaggtatagtttcggtttttcggagttcggttcggtagtttcgtattgttcgtagagggattgagtatttgaaaagtttatcgcgtttcgtagggcgtttcggcggggttaatttgttcggttgcggggtatagttttaggggaattgggttagtaggtaggggtcggagttgcgcgttcgcggtggttagggcggtcgtcgggtcgtggggcgcgggcggttgtagtttgggcgttggggcgttttcgattcgtagtaaattttcgattaggaaatttttgtttaggttgttaaagtcgggcgtagcggggaggttgaggagcgcggaggaagttataacgttttagtacgtatcggcgtgggttgcgatcgcgttggggagtatagtgcggcgttaatcggtttgttgcgcgttcgttttgcgttcgtttgtcgttcgggcgtttcgtatcgtatttagagtcgtagtttttcgtcgtcgtttttcgtagggttggagcgcgcggagttaggtagggaggaaaggttattcgggacggcggcggat

SEQ ID NO: 22108 - DNA, 573 bp, Artificial Sequence
  chemically treated genomic DNA (Homo sapiens) CpG-island No: 22108
atccgccgccgtcccgaataacctttcctccctacctaactccgcgcgctccaaccctacgaaaaacgacgacgaaaaactacgactctaaatacgatacgaaacgcccgaacgacaaacgaacgcaaaacgaacgcgcaacaaaccgattaacgccgcactatactccccaacgcgatcgcaacccacgccgatacgtactaaaacgttataacttcctccgcgctcctcaacctccccgctacgcccgactttaacaacctaaacaaaaatttcctaatcgaaaatttactacgaatcgaaaacgccccaacgcccaaactacaaccgcccgcgccccacgacccgacgaccgccctaaccaccgcgaacgcgcaactccgacccctacctactaacccaattcccctaaaactataccccgcaaccgaacaaattaaccccgccgaaacgccctacgaaacgcgataaacttttcaaatactcaatccctctacgaacaatacgaaactaccgaaccgaactccgaaaaaccgaaactataccttccaaccttcaacgccaaataaacca

SEQ ID NO: 22109 - DNA, 505 bp, Artificial Sequence
  chemically treated genomic DNA (Homo sapiens) CpG-island No: 22109
ggttgcgtgcgaagtttttaattaggtttaaggagtcgtagagtcggggtttcgggttcgtaggatttagaagttacgcgtttcgcgtttttcgtttcgtcgttgtttgttcggtcgatttatttggtgtcgcgtgcgttggcggttcgcgcggtagttaagttaaaggtcgaggtcgaggtcgagcgcggcgtttagtagtacggcgggggttagtagggcgggcgtcggtcgtagcgcgtttcgttttagtagtagtcgcgcgtcgtttttgtaggtcgtttcgtcgcgggttattcggggcgtttaggttgtcgtttcgtcgtatttcgtcgtttgttgtatcgttttcgttagggcggcgacgcgggatttggagttcgggcgggttaggggcgcggttcgtttcgtagattttttggtttgtgtagtttttcgatttttgtttttttttttttttttgtttcgtcgagtcggagggaggagtttggattatcgtttaaaa

SEQ ID NO: 22110 - DNA, 505 bp, Artificial Sequence
  chemically treated genomic DNA (Homo sapiens) CpG-island No: 22110
ttttaaacgataatccaaactcctccctccgactcgacgaaacaaaaaaaaaaaaaaaaacaaaaatcgaaaaactacacaaaccaaaaaatctacgaaacgaaccgcgcccctaacccgcccgaactccaaatcccgcgtcgccgccctaacgaaaacgatacaacaaacgacgaaatacgacgaaacgacaacctaaacgccccgaataacccgcgacgaaacgacctacaaaaacgacgcgcgactactactaaaacgaaacgcgctacgaccgacgcccgccctactaacccccgccgtactactaaacgccgcgctcgacctcgacctcgacctttaacttaactaccgcgcgaaccgccaacgcacgcgacaccaaataaatcgaccgaacaaacaacgacgaaacgaaaaacgcgaaacgcgtaacttctaaatcctacgaacccgaaaccccgactctacgactccttaaacctaattaaaaacttcgcacgcaacc

SEQ ID NO: 22111 - DNA, 505 bp, Artificial Sequence
  chemically treated genomic DNA (Homo sapiens) CpG-island No: 22111
ttttgagcggtgatttaggttttttttttcggttcggcgaagtagggaaggggagagaagtaggagtcgggagattgtataggttagaaagtttgcggagcgggtcgcgtttttggttcgttcgggttttaagtttcgcgtcgtcgttttggcggggacggtgtagtaggcggcgggatgcggcggggcggtagtttgagcgtttcggatggttcgcggcggggcggtttgtaagagcgacgcgcggttgttgttggggcgggacgcgttgcggtcggcgttcgttttgttggttttcgtcgtgttgttgggcgtcgcgttcggtttcggtttcggtttttggtttggttgtcgcgcgggtcgttagcgtacgcgatattaggtgggtcggtcgagtagatagcggcggggcggggagcgcggggcgcgtggtttttgggttttgcgggttcggagtttcggttttgcgattttttgagtttggttgggaatttcgtacgtaatt

SEQ ID NO: 22112 - DNA, 505 bp, Artificial Sequence
  chemically treated genomic DNA (Homo sapiens) CpG-island No: 22112
aattacgtacgaaattcccaaccaaactcaaaaaatcgcaaaaccgaaactccgaacccgcaaaacccaaaaaccacgcgccccgcgctccccgccccgccgctatctactcgaccgacccacctaatatcgcgtacgctaacgacccgcgcgacaaccaaaccaaaaaccgaaaccgaaaccgaacgcgacgcccaacaacacgacgaaaaccaacaaaacgaacgccgaccgcaacgcgtcccgccccaacaacaaccgcgcgtcgctcttacaaaccgccccgccgcgaaccatccgaaacgctcaaactaccgccccgccgcatcccgccgcctactacaccgtccccgccaaaacgacgacgcgaaacttaaaacccgaacgaaccaaaaacgcgacccgctccgcaaactttctaacctatacaatctcccgactcctacttctctccccttccctacttcgccgaaccgaaaaaaaaaacctaaatcaccgctcaaaa

SEQ ID NO: 22113 - DNA, 588 bp, Artificial Sequence
  chemically treated genomic DNA (Homo sapiens) CpG-island No: 22113
aaggtgtaggcgagagttttagggcgggggtttcgcgtttcggtcgttcggcgcggcgttgggcgtatttttttgttgtaggttcgtaggggcgggggtagttggaggtgcggttcgcggggtacggcgttttttttttttcgtttcggggttcgggataggtcggggcgcgtagttttattttggtttcgatttggttgtcgtattggtcggtttggatgtgtacgattttttttatattgggcgcgtttggcgggcggttgcggacgggcgcgggcgggtcgggttggttgttgagggtcggggatcgcggtcgcgcgtttttatagtcgcggtttcgtttttcgtatcggttgatgttatcgcgggtggttaatcgggaggcgtcgtcgtagagtttcgttcggttcgtaggtttcgtatcgcgcgttttcgttcgtcgcgcgtaatgcggcgtttttttcgtagttagtttttgcgatagttttattttgcggttttgtacggagggttttttttttttacgtcggtttagagattaattcgtattattttagttttttgttttttggtagataaggtgttttg

SEQ ID NO: 22114 - DNA, 588 bp, Artificial Sequence
  chemically treated genomic DNA (Homo sapiens) CpG-island No: 22114
caaaacaccttatctaccaaaaaacaaaaaactaaaataatacgaattaatctctaaaccgacgtaaaaaaaaaaaaccctccgtacaaaaccgcaaaataaaactatcgcaaaaactaactacgaaaaaaacgccgcattacgcgcgacgaacgaaaacgcgcgatacgaaacctacgaaccgaacgaaactctacgacgacgcctcccgattaaccacccgcgataacatcaaccgatacgaaaaacgaaaccgcgactataaaaacgcgcgaccgcgatccccgaccctcaacaaccaacccgacccgcccgcgcccgtccgcaaccgcccgccaaacgcgcccaatataaaaaaaatcgtacacatccaaaccgaccaatacgacaaccaaatcgaaaccaaaataaaactacgcgccccgacctatcccgaaccccgaaacgaaaaaaaaaaaacgccgtaccccgcgaaccgcacctccaactacccccgcccctacgaacctacaacaaaaaaatacgcccaacgccgcgccgaacgaccgaaacgcgaaacccccgccctaaaactctcgcctacacctt

SEQ ID NO: 22115 - DNA, 588 bp, Artificial Sequence
  chemically treated genomic DNA (Homo sapiens) CpG-island No: 22115
tagagtattttgtttgttaaaagatagggagttgggatggtgcgggttggtttttaaatcggcgtggggaaaaaagatttttcgtataaagtcgtagggtggggttgtcgtaagggttggttgcgggaggggcgtcgtattgcgcgcggcgggcggggacgcgcggtgcggagtttgcgggtcgggcggggttttgcggcggcgtttttcgattggttattcgcggtgatattagtcgatgcgaagggcggggtcgcggttataagagcgcgcggtcgcggttttcgatttttagtagttagttcggttcgttcgcgttcgttcgtagtcgttcgttagacgcgtttagtatgagggagatcgtgtatatttaggtcggttagtgcggtaattagatcggggttaaggtgaggttgcgcgtttcggtttgtttcgggtttcggggcgggaggagggaggcgtcgtgtttcgcgggtcgtatttttagttgttttcgtttttgcgaatttgtaataaagggatgcgtttagcgtcgcgtcgggcggtcgggacgcggggttttcgttttgggattttcgtttgtatttt

SEQ ID NO: 22116 - DNA, 588 bp, Artificial Sequence
  chemically treated genomic DNA (Homo sapiens) CpG-island No: 22116
aaaatacaaacgaaaatcccaaaacgaaaaccccgcgtcccgaccgcccgacgcgacgctaaacgcatccctttattacaaattcgcaaaaacgaaaacaactaaaaatacgacccgcgaaacacgacgcctccctcctcccgccccgaaacccgaaacaaaccgaaacgcgcaacctcaccttaaccccgatctaattaccgcactaaccgacctaaatatacacgatctccctcatactaaacgcgtctaacgaacgactacgaacgaacgcgaacgaaccgaactaactactaaaaatcgaaaaccgcgaccgcgcgctcttataaccgcgaccccgcccttcgcatcgactaatatcaccgcgaataaccaatcgaaaaacgccgccgcaaaaccccgcccgacccgcaaactccgcaccgcgcgtccccgcccgccgcgcgcaatacgacgcccctcccgcaaccaacccttacgacaaccccaccctacgactttatacgaaaaatcttttttccccacgccgatttaaaaaccaacccgcaccatcccaactccctatcttttaacaaacaaaatactcta

SEQ ID NO: 22117 - DNA, 690 bp, Artificial Sequence
  chemically treated genomic DNA (Homo sapiens) CpG-island No: 22117
ggcgcgttattttggatatgtcgtttgggatcggttatcgggagttttttttttcgttttttcggttagtatcgggtttattttttcggatcgggaggtttttcgatcggggatatttttacgtgtcgagggtaaggttgattttaggagggtaaggtttacgcgttcgacgcggcgcgcgtaggaatcgaatagttcgggggtttcggagttattcgcgtattttgattacgtcgttttcgtttttttttcgtatttttcgtatttttcgtattttgcgtttttcggtcgtattttcgtcgggcgttcgttggttggttagtttattattttacgttattcgtttttaaagttcggtatttatttgtttcgcgcggtaggcgcgtcgtatttagtagtagaatttttagtagtgcgatagagatttcgtagtttaggtcggttatgatttcgggacgtttcggtttcggtggggaaaacgacggtggggagcggcggttttaggcgtttaagttcggcgtagtgcgttcgttttggtttatttatttgcgcgcgggcggatcggttcgagtttcgtttgcgtagtaggatcgcgagttgattcggtgcgtttttttttttttttttttttttttttttgttttagcgatcgttttttttttttagggtgtagggttttcggtatcgggt

SEQ ID NO: 22118 - DNA, 690 bp, Artificial Sequence
  chemically treated genomic DNA (Homo sapiens) CpG-island No: 22118
acccgataccgaaaaccctacaccctaaaaaaaaaaaacgatcgctaaaacaaaaaaaaaaaaaaaaaaaaaaaaaaaaacgcaccgaatcaactcgcgatcctactacgcaaacgaaactcgaaccgatccgcccgcgcgcaaataaataaaccaaaacgaacgcactacgccgaacttaaacgcctaaaaccgccgctccccaccgtcgttttccccaccgaaaccgaaacgtcccgaaatcataaccgacctaaactacgaaatctctatcgcactactaaaaattctactactaaatacgacgcgcctaccgcgcgaaacaaataaataccgaactttaaaaacgaataacgtaaaataataaactaaccaaccaacgaacgcccgacgaaaatacgaccgaaaaacgcaaaatacgaaaaatacgaaaaatacgaaaaaaaaacgaaaacgacgtaatcaaaatacgcgaataactccgaaacccccgaactattcgattcctacgcgcgccgcgtcgaacgcgtaaaccttaccctcctaaaatcaaccttaccctcgacacgtaaaaatatccccgatcgaaaaacctcccgatccgaaaaaataaacccgatactaaccgaaaaaacgaaaaaaaaaactcccgataaccgatcccaaacgacatatccaaaataacgcgcc

SEQ ID NO: 22119 - DNA, 690 bp, Artificial Sequence
  chemically treated genomic DNA (Homo sapiens) CpG-island No: 22119
attcggtgtcgggagttttgtattttgggagggagaggcggtcgttgaggtaggaagaggaggaggagagagaggagggacgtatcgggttagttcgcgattttgttgcgtaggcggggttcgggtcggttcgttcgcgcgtaggtgagtgagttagggcggacgtattgcgtcgggtttgggcgtttggggtcgtcgttttttatcgtcgttttttttatcgaggtcgaggcgtttcggagttatggtcggtttgaattgcggggtttttatcgtattgttaggggttttgttgttgggtgcggcgcgtttgtcgcgcggggtaggtgagtgtcgggttttggaggcggatggcgtggagtggtgagttagttagttagcggacgttcggcggagatgcggtcgagggacgtagggtgcggagggtgcggagggtgcggagagagggcggggacggcgtagttaaaatgcgcgggtggtttcgggattttcggattgttcggtttttgcgcgcgtcgcgtcgggcgcgtgggttttgtttttttggagttaattttgttttcggtacgtgagagtgttttcgatcggggagtttttcggttcgggaggatgagttcggtgttggtcgagaaggcgggaaaaggagttttcggtagtcgattttaggcgatatgtttaaggtggcgcgtt

SEQ ID NO: 22120 - DNA, 690 bp, Artificial Sequence
  chemically treated genomic DNA (Homo sapiens) CpG-island No: 22120
aacgcgccaccttaaacatatcgcctaaaatcgactaccgaaaactccttttcccgccttctcgaccaacaccgaactcatcctcccgaaccgaaaaactccccgatcgaaaacactctcacgtaccgaaaacaaaattaactccaaaaaaacaaaacccacgcgcccgacgcgacgcgcgcaaaaaccgaacaatccgaaaatcccgaaaccacccgcgcattttaactacgccgtccccgccctctctccgcaccctccgcaccctccgcaccctacgtccctcgaccgcatctccgccgaacgtccgctaactaactaactcaccactccacgccatccgcctccaaaacccgacactcacctaccccgcgcgacaaacgcgccgcacccaacaacaaaacccctaacaatacgataaaaaccccgcaattcaaaccgaccataactccgaaacgcctcgacctcgataaaaaaaacgacgataaaaaacgacgaccccaaacgcccaaacccgacgcaatacgtccgccctaactcactcacctacgcgcgaacgaaccgacccgaaccccgcctacgcaacaaaatcgcgaactaacccgatacgtccctcctctctctcctcctcctcttcctacctcaacgaccgcctctccctcccaaaatacaaaactcccgacaccgaat

SEQ ID NO: 22121 - DNA, 538 bp, Artificial Sequence
  chemically treated genomic DNA (Homo sapiens) CpG-island No: 22121
gcggggcgtaagagtagttggttttcgttcgcggtggatattttagtttttatttttttaggggagtgacgacgtgcgaggttattttatgttgtgtttcgttatatcgacgtacgaaaggtgtacgttttacgttttttcgttttacgagataatttgtttcgaggtggtgggtataatttatttttattcggtgtacgggattatatttcgtcgtgtttaattatattgttgtttcgtataaaaacgagaagacggtttttcgtattcgtgtcgatcgggtttttacgtcgggtcgagtcgagttttaacgacgttttgcgcgcgtttcgtttatttatttattcgatttatgtcgagggagcggtattttcgcgcgattttaatcgtaagggtatagacgagacgaattttatatcggtcggtacgttcgacgcgggacggtacgatattgttatgtaggttagggaagacgcggtcgcggttcgatacgagtatattaggtaagatgatttcggcgggtttcgtttgtattcga

SEQ ID NO: 22122 - DNA, 538 bp, Artificial Sequence
  chemically treated genomic DNA (Homo sapiens) CpG-island No: 22122
tcgaatacaaacgaaacccgccgaaatcatcttacctaatatactcgtatcgaaccgcgaccgcgtcttccctaacctacataacaatatcgtaccgtcccgcgtcgaacgtaccgaccgatataaaattcgtctcgtctatacccttacgattaaaatcgcgcgaaaataccgctccctcgacataaatcgaataaataaataaacgaaacgcgcgcaaaacgtcgttaaaactcgactcgacccgacgtaaaaacccgatcgacacgaatacgaaaaaccgtcttctcgtttttatacgaaacaacaatataattaaacacgacgaaatataatcccgtacaccgaataaaaataaattatacccaccacctcgaaacaaattatctcgtaaaacgaaaaaacgtaaaacgtacacctttcgtacgtcgatataacgaaacacaacataaaataacctcgcacgtcgtcactcccctaaaaaaataaaaactaaaatatccaccgcgaacgaaaaccaactactcttacgccccgc

SEQ ID NO: 22123 - DNA, 538 bp, Artificial Sequence
  chemically treated genomic DNA (Homo sapiens) CpG-island No: 22123
tcgagtgtagacgaggttcgtcggggttattttgtttgatatgttcgtgtcggatcgcgatcgcgttttttttgatttgtatagtagtatcgtgtcgtttcgcgtcggacgtgtcgatcgatatgaggttcgtttcgtttatatttttgcgattgagatcgcgcgggggtgtcgttttttcgatatagatcggataagtgggtaaacgaagcgcgcgtaggacgtcgttgggattcgattcgattcggcgtagaggttcgatcgatacgagtgcgaggagtcgttttttcgtttttatacgagataatagtgtgattgagtacgacggggtgtggtttcgtgtatcgaataaaaatgggttgtatttattatttcggggtagattatttcgtagggcgagggaacgtggagcgtgtatttttcgtgcgtcggtatgacgagatatagtatagggtgatttcgtacgtcgttatttttttgggagaataagggttggaatgtttatcgcgaacgagaattagttgtttttgcgtttcgt

SEQ ID NO: 22124 - DNA, 538 bp, Artificial Sequence
  chemically treated genomic DNA (Homo sapiens) CpG-island No: 22124
acgaaacgcaaaaacaactaattctcgttcgcgataaacattccaacccttattctcccaaaaaaataacgacgtacgaaatcaccctatactatatctcgtcataccgacgcacgaaaaatacacgctccacgttccctcgccctacgaaataatctaccccgaaataataaatacaacccatttttattcgatacacgaaaccacaccccgtcgtactcaatcacactattatctcgtataaaaacgaaaaaacgactcctcgcactcgtatcgatcgaacctctacgccgaatcgaatcgaatcccaacgacgtcctacgcgcgcttcgtttacccacttatccgatctatatcgaaaaaacgacacccccgcgcgatctcaatcgcaaaaatataaacgaaacgaacctcatatcgatcgacacgtccgacgcgaaacgacacgatactactatacaaatcaaaaaaaacgcgatcgcgatccgacacgaacatatcaaacaaaataaccccgacgaacctcgtctacactcga

SEQ ID NO: 22125 - DNA, 587 bp, Artificial Sequence
  chemically treated genomic DNA (Homo sapiens) CpG-island No: 22125
ggcgtcgagcgcgttttgtcgtttatcgcggtcggcggttgcggcgtttttttagtattagtgtcgcgattcgtaggttcgtcgtttacgtatattcgtcgttcggttgcgttatatacgtaggagatagttttcgttgtttatcgttcgttcggtttttatagatttacggttatttatatatagtttttggtttacgttattgatcgacgtttatattttagagatcggacgagttagatttttattatttattagggatatagtcgagagagacgacgcgtttcgttagagcggatatattcgagcgttgtttcgattagtttggtcgatattcgttagttttttatacgattgacgtcgaattattttttcgtagacgaggcgtttatatagttcgtgtagtttttatattacgagttagatgatacgcgacgggtcgcgcgtgattcgtgagtttacgcgtttcgataatgtagatcgtttattacgagttatatacgtttcgttttacgttatttttttttttttgtcgcgttgtatattgacgcgcgtagttattatcgtagtttttgtatttagttttt

SEQ ID NO: 22126 - DNA, 587 bp, Artificial Sequence
  chemically treated genomic DNA (Homo sapiens) CpG-island No: 22126
aaaaactaaatacaaaaactacgataataactacgcgcgtcaatatacaacgcgacaaaaaaaaaaaaataacgtaaaacgaaacgtatataactcgtaataaacgatctacattatcgaaacgcgtaaactcacgaatcacgcgcgacccgtcgcgtatcatctaactcgtaatataaaaactacacgaactatataaacgcctcgtctacgaaaaaataattcgacgtcaatcgtataaaaaactaacgaatatcgaccaaactaatcgaaacaacgctcgaatatatccgctctaacgaaacgcgtcgtctctctcgactatatccctaataaataataaaaatctaactcgtccgatctctaaaatataaacgtcgatcaataacgtaaaccaaaaactatatataaataaccgtaaatctataaaaaccgaacgaacgataaacaacgaaaactatctcctacgtatataacgcaaccgaacgacgaatatacgtaaacgacgaacctacgaatcgcgacactaatactaaaaaaacgccgcaaccgccgaccgcgataaacgacaaaacgcgctcgacgcc

SEQ ID NO: 22127 - DNA, 587 bp, Artificial Sequence
  chemically treated genomic DNA (Homo sapiens) CpG-island No: 22127
ggggattgggtatagaggttgcggtggtgattgcgcgcgttagtgtgtagcgcggtaaagagaagggagtggcgtgggacgaggcgtgtgtgattcgtggtagacggtttatattgtcgaggcgcgtagatttacgggttacgcgcggttcgtcgcgtgttatttgattcgtggtgtaggagttatacgagttgtgtgaacgtttcgtttgcggagaagtggttcgacgttagtcgtgtggggagttagcgagtgtcgattagattagtcgagataacgttcgagtgtgttcgttttagcgaggcgcgtcgtttttttcgattgtgtttttagtgggtggtgaggatttggttcgttcggtttttagagtgtaggcgtcggttagtagcgtggattaggggttatgtgtgagtgatcgtgggtttgtgggagtcgagcgggcggtgagtagcgagggttgttttttgcgtgtgtagcgtagtcgaacggcgggtgtacgtaggcggcgagtttgcgggtcgcggtattggtattaggggggcgtcgtagtcgtcggtcgcggtgggcggtagggcgcgttcggcgtt

SEQ ID NO: 22128 - DNA, 587 bp, Artificial Sequence
  chemically treated genomic DNA (Homo sapiens) CpG-island No: 22128
aacgccgaacgcgccctaccgcccaccgcgaccgacgactacgacgcccccctaataccaataccgcgacccgcaaactcgccgcctacgtacacccgccgttcgactacgctacacacgcaaaaaacaaccctcgctactcaccgcccgctcgactcccacaaacccacgatcactcacacataacccctaatccacgctactaaccgacgcctacactctaaaaaccgaacgaaccaaatcctcaccacccactaaaaacacaatcgaaaaaaacgacgcgcctcgctaaaacgaacacactcgaacgttatctcgactaatctaatcgacactcgctaactccccacacgactaacgtcgaaccacttctccgcaaacgaaacgttcacacaactcgtataactcctacaccacgaatcaaataacacgcgacgaaccgcgcgtaacccgtaaatctacgcgcctcgacaatataaaccgtctaccacgaatcacacacgcctcgtcccacgccactcccttctctttaccgcgctacacactaacgcgcgcaatcaccaccgcaacctctatacccaatcccc

SEQ ID NO: 22129 - DNA, 661 bp, Artificial Sequence
  chemically treated genomic DNA (Homo sapiens) CpG-island No: 22129
  unsure (459, 525)
tatttattgtcgtgatcgtgatattcgtcggtcgttgtggttggggtcggttaagtcgaatatcggttatacgtaagcggcggcgggtgtggttggtgtgattaagatggtgatggcgatgcggtacgggtagttgttacgtacgttgtacgtggaatcgtcgtcgtcgtaggtggattggtcggcggggacggtttaattttttacggagaatacgttttggtttaggagtggtcgtgttcgtcgggtgggggtgtcgtcgttcgggattagtggtattaacgcgtacgttattttcgaatagttttcgggagtgtcgagttagtttgcggggtcgggttcgggttttgtcgtggatgtttcggtggtgtcgtggatggtgtcgggtaaaatattcgaagcgttattcgcgtaggtaacggcgttgatgatttatttggacgagcgatttgatgtttnttcgttggatgttgggtattcgttggcgttgatacggtcggcgttggatgagcgagcggtggtgtntggggtcgaatcgtgaaacgttgttgtgcggtgtgaaagcgttgtttgtcggttatgaggtttttgggttggtgatcggatttgtgggggtttgggggtcggatcgggttttgtgtttttcgggtagggtggttag

SEQ ID NO: 22130 - DNA, 661 bp, Artificial Sequence
  chemically treated genomic DNA (Homo sapiens) CpG-island No: 22130
  unsure (137, 203)
ctaaccaccctacccgaaaaacacaaaacccgatccgacccccaaacccccacaaatccgatcaccaacccaaaaacctcataaccgacaaacaacgctttcacaccgcacaacaacgtttcacgattcgaccccanacaccaccgctcgctcatccaacgccgaccgtatcaacgccaacgaatacccaacatccaacgaanaaacatcaaatcgctcgtccaaataaatcatcaacgccgttacctacgcgaataacgcttcgaatattttacccgacaccatccacgacaccaccgaaacatccacgacaaaacccgaacccgaccccgcaaactaactcgacactcccgaaaactattcgaaaataacgtacgcgttaataccactaatcccgaacgacgacacccccacccgacgaacacgaccactcctaaaccaaaacgtattctccgtaaaaaattaaaccgtccccgccgaccaatccacctacgacgacgacgattccacgtacaacgtacgtaacaactacccgtaccgcatcgccatcaccatcttaatcacaccaaccacacccgccgccgcttacgtataaccgatattcgacttaaccgaccccaaccacaacgaccgacgaatatcacgatcacgacaataaata

SEQ ID NO: 22131 - DNA, 661 bp, Artificial Sequence
  chemically treated genomic DNA (Homo sapiens) CpG-island No: 22131
  unsure (137, 203)
ttggttattttgttcggaaaatataaagttcgattcggtttttaagtttttatagattcggttattaatttagaagttttatgatcggtagatagcgtttttatatcgtataataacgttttacggttcgattttangtattatcgttcgtttatttagcgtcgatcgtgttaacgttagcgagtatttaatatttagcgagnagatattaggtcgttcgtttagataggttattaacgtcgttgtttgcgcggatagcgtttcgggtgttttgttcgatattatttacggtattatcggaatatttacgatagaattcgaattcggtttcgtagattgattcggtattttcgggggttgttcgaggatgacgtgcgcgttagtattattgatttcgaacgacgatatttttattcgacgaatacgattatttttgggttagggcgtgtttttcgtaaggagttgaatcgttttcgtcgattaatttatttacggcgacggcgattttacgtgtaacgtgcgtggtagttgttcgtgtcgtatcgttattattattttgattatattagttatattcgtcgtcgtttgcgtatgatcgatgttcgatttgatcgattttaattataacggtcggcgagtattacgattacggtagtaggtg

SEQ ID NO: 22132 - DNA, 661 bp, Artificial Sequence
  chemically treated genomic DNA (Homo sapiens) CpG-island No: 22132
  unsure (459, 525)
cacctactaccgtaatcgtaatactcgccgaccgttataattaaaatcgatcaaatcgaacatcgatcatacgcaaacgacgacgaatataactaatataatcaaaataataataacgatacgacacgaacaactaccacgcacgttacacgtaaaatcgccgtcgccgtaaataaattaatcgacgaaaacgattcaactccttacgaaaaacacgccctaacccaaaaataatcgtattcgtcgaataaaaatatcgtcgttcgaaatcaataatactaacgcgcacgtcatcctcgaacaacccccgaaaataccgaatcaatctacgaaaccgaattcgaattctatcgtaaatattccgataataccgtaaataatatcgaacaaaacacccgaaacgctatccgcgcaaacaacgacgttaataacctatctaaacgaacgacctaatatctnctcgctaaatattaaatactcgctaacgttaacacgatcgacgctaaataaacgaacgataatacntaaaatcgaaccgtaaaacgttattatacgatataaaaacgctatctaccgatcataaaacttctaaattaataaccgaatctataaaaacttaaaaaccgaatcgaactttatattttccgaacaaaataaccaa

SEQ ID NO: 22133 - DNA, 613 bp, Artificial Sequence
  chemically treated genomic DNA (Homo sapiens) CpG-island No: 22133
ggggcgggtagcggaggtggaggcgttttttttggatttttagttttttttcgcggcgtttttatttttcgggcgcgtttttgtatttattttgttaggggtttcggaagcggcgaagggagttgcgtttagagagattgagagcggcggttttcggggtcgtttagtcgtttatcgttcgtagttagcgttttttttttttagttcgggaaggttagcgtgtgggtagttcggttcgcgtttttgcgtttattgaggttttttgtcggttttttagttttcgtttgtttagcgttcggtcgcgacgtttcggcgtcggtttttttagtttagtcggtaggacgcgttcgggagtttcgtacgcgagttgtcggttttttgtttgggggtttgtttttttgcgatttagagtacgcggagggaattaagttagagttcgaggtagttgtgcggttgtcggggggatttttaaggggggcggggtaaaaggacggattagtagggcggtggagcggtttttaaatttttcgcgtttcgtagtttttcgtttaggtttttttgttttttacgtttgtcggtttttgggagaggttggtttttgggggtttttagg

SEQ ID NO: 22134 - DNA, 613 bp, Artificial Sequence
  chemically treated genomic DNA (Homo sapiens) CpG-island No: 22134
cctaaaaacccccaaaaaccaacctctcccaaaaaccgacaaacgtaaaaaacaaaaaaacctaaacgaaaaactacgaaacgcgaaaaatttaaaaaccgctccaccgccctactaatccgtccttttaccccgccccccttaaaaatccccccgacaaccgcacaactacctcgaactctaacttaattccctccgcgtactctaaatcgcaaaaaaacaaacccccaaacaaaaaaccgacaactcgcgtacgaaactcccgaacgcgtcctaccgactaaactaaaaaaaccgacgccgaaacgtcgcgaccgaacgctaaacaaacgaaaactaaaaaaccgacaaaaaacctcaataaacgcaaaaacgcgaaccgaactacccacacgctaaccttcccgaactaaaaaaaaaaaacgctaactacgaacgataaacgactaaacgaccccgaaaaccgccgctctcaatctctctaaacgcaactcccttcgccgcttccgaaacccctaacaaaataaatacaaaaacgcgcccgaaaaataaaaacgccgcgaaaaaaaactaaaaatccaaaaaaaacgcctccacctccgctacccgcccc

SEQ ID NO: 22135 - DNA, 613 bp, Artificial Sequence
  chemically treated genomic DNA (Homo sapiens) CpG-island No: 22135
tttggaaatttttaaaggttaattttttttaggggtcgataaacgtaaagggtagggagatttaagcggggagttgcggagcgcggggagtttgaaagtcgttttatcgttttattagttcgtttttttgtttcgttttttttagggattttttcggtaatcgtatagttgtttcggattttgatttaatttttttcgcgtgttttgaatcgtagagaggtaaatttttaaataaagagtcggtagttcgcgtgcggggttttcgggcgcgttttgtcggttgggttgggagagtcggcgtcggggcgtcgcggtcgagcgttgggtaggcggggattagagggtcggtaggaagttttagtgggcgtaggggcgcgggtcgggttgtttatacgttgattttttcgggttgggagggaggagcgttggttgcgggcggtgggcggttgggcggtttcgggagtcgtcgtttttagtttttttaggcgtagtttttttcgtcgttttcggagtttttggtagggtaagtgtagaagcgcgttcgaggagtgggggcgtcgcgggagggggttgggggtttaggagaggcgtttttattttcgttgttcgtttt

SEQ ID NO: 22136 - DNA, 613 bp, Artificial Sequence
  chemically treated genomic DNA (Homo sapiens) CpG-island No: 22136
aaaacgaacaacgaaaataaaaacgcctctcctaaacccccaaccccctcccgcgacgcccccactcctcgaacgcgcttctacacttaccctaccaaaaactccgaaaacgacgaaaaaaactacgcctaaaaaaactaaaaacgacgactcccgaaaccgcccaaccgcccaccgcccgcaaccaacgctcctccctcccaacccgaaaaaatcaacgtataaacaacccgacccgcgcccctacgcccactaaaacttcctaccgaccctctaatccccgcctacccaacgctcgaccgcgacgccccgacgccgactctcccaacccaaccgacaaaacgcgcccgaaaaccccgcacgcgaactaccgactctttatttaaaaatttacctctctacgattcaaaacacgcgaaaaaaattaaatcaaaatccgaaacaactatacgattaccgaaaaaatccctaaaaaaaacgaaacaaaaaaacgaactaataaaacgataaaacgactttcaaactccccgcgctccgcaactccccgcttaaatctccctaccctttacgtttatcgacccctaaaaaaaattaacctttaaaaatttccaaa

SEQ ID NO: 22137 - DNA, 518 bp, Artificial Sequence
  chemically treated genomic DNA (Homo sapiens) CpG-island No: 22137
aagtaagcgtatagagtaagcgttcgtttgtatcgttattttaggaagtcggttttttgttttttcgttgcgtagtatatcgtatcgttttggaaagtcgtttttattgggggtcgtcgcggtttttttttttttcgcggttaatatcgacgttgttaagaagttgtagttcgtagttagtttcggttttatttattcgagggggcgttcgagtttcggttagattatatgttttaggatgtcgtgtatttttattttaggatgcgacgttttcgttttcgttaggtagtttcgttagagaggatagggggacgaggtgttcggtatgattcgcgcgataggcggtcgcgggttttgttgggaaatgaagttttaaagcgttagtgttttttgcgagatcgtttagagcgttgaaagtaattcggtcgttagggttataataaatttgttggtagcggcggtattagaattatagagttgtgattgttcgttggaggtgttttagtatttgaaataat

SEQ ID NO: 22138 - DNA, 518 bp, Artificial Sequence
  chemically treated genomic DNA (Homo sapiens) CpG-island No: 22138
attatttcaaatactaaaacacctccaacgaacaatcacaactctataattctaataccgccgctaccaacaaatttattataaccctaacgaccgaattactttcaacgctctaaacgatctcgcaaaaaacactaacgctttaaaacttcatttcccaacaaaacccgcgaccgcctatcgcgcgaatcataccgaacacctcgtccccctatcctctctaacgaaactacctaacgaaaacgaaaacgtcgcatcctaaaataaaaatacacgacatcctaaaacatataatctaaccgaaactcgaacgccccctcgaataaataaaaccgaaactaactacgaactacaacttcttaacaacgtcgatattaaccgcgaaaaaaaaaaaaaccgcgacgacccccaataaaaacgactttccaaaacgatacgatatactacgcaacgaaaaaacaaaaaaccgacttcctaaaataacgatacaaacgaacgcttactctatacgcttactt

SEQ ID NO: 22139 - DNA, 518 bp, Artificial Sequence
  chemically treated genomic DNA (Homo sapiens) CpG-island No: 22139
gttgttttagatgttagaatatttttaacgagtagttatagttttgtagttttagtgtcgtcgttgttagtaagtttgttgtgattttggcggtcgagttatttttagcgttttgggcggtttcgtaagaaatattgacgttttgggattttattttttagtaagattcgcggtcgtttatcgcgcgagttatgtcgggtatttcgtttttttgttttttttggcggagttgtttggcggaagcgggaacgtcgtattttgaggtaaaggtgtacggtattttgggatatgtagtttggtcggggttcggacgttttttcggatgaatgggatcgaagttgattgcgaattatagttttttggtagcgtcggtgttggtcgcgggagaaggggagatcgcggcggtttttagtgagagcggttttttaggacggtgcgatgtgttgcgtagcgaagaggtaggaggtcggttttttggggtagcggtataggcgggcgtttattttgtgcgtttgttt

SEQ ID NO: 22140 - DNA, 518 bp, Artificial Sequence
  chemically treated genomic DNA (Homo sapiens) CpG-island No: 22140
aaacaaacgcacaaaataaacgcccgcctataccgctaccccaaaaaaccgacctcctacctcttcgctacgcaacacatcgcaccgtcctaaaaaaccgctctcactaaaaaccgccgcgatctccccttctcccgcgaccaacaccgacgctaccaaaaaactataattcgcaatcaacttcgatcccattcatccgaaaaaacgtccgaaccccgaccaaactacatatcccaaaataccgtacacctttacctcaaaatacgacgttcccgcttccgccaaacaactccgccaaaaaaaacaaaaaaacgaaatacccgacataactcgcgcgataaacgaccgcgaatcttactaaaaaataaaatcccaaaacgtcaatatttcttacgaaaccgcccaaaacgctaaaaataactcgaccgccaaaatcacaacaaacttactaacaacgacgacactaaaactacaaaactataactactcgttaaaaatattctaacatctaaaacaac

SEQ ID NO: 22141 - DNA, 638 bp, Artificial Sequence
  chemically treated genomic DNA (Homo sapiens) CpG-island No: 22141
tttagcgtggtggtgttcgttagtgtgtcgttattggcggtgaatagttcgttatttatcgtggtattcgtggtcgtattatcggcgtttagcgtgaatgaattgtttttttttagtattagggtattcgtttgatcgttttcgatattgaatgttttttcgtcgtttcgggtattattgatagcggtatcggaatcggttagtagtatatcgttattttttatggatacggtggtggcggtgttatcgttgcggatatttagcgtttcgttattatttacgcgggtattagtggttgtgtgttcggttagtatatttaggcgttcgttattttttagtacgatattattagttttattttttataatagagaatgtttttaggcggtttatgtcggtaacggttgtagtcgtattggtaattagtgcgtcgttttgttttagggtgatattcgtggttgtattatcggcgtttatttgtagtttggttttttgattaacggtggtattttcggttatattttcgtttttgataatttggtagtcgttattgtttataatagtgttagacgttgtatcgtcgttgtgtatatattggtattttttatttagcggtgttttcgtgggtgatttgtttag

SEQ ID NO: 22142 - DNA, 638 bp, Artificial Sequence
  chemically treated genomic DNA (Homo sapiens) CpG-island No: 22142
ctaaacaaatcacccacgaaaacaccgctaaataaaaaataccaatatatacacaacgacgatacaacgtctaacactattataaacaataacgactaccaaattatcaaaaacgaaaatataaccgaaaataccaccgttaatcaaaaaaccaaactacaaataaacgccgataatacaaccacgaatatcaccctaaaacaaaacgacgcactaattaccaatacgactacaaccgttaccgacataaaccgcctaaaaacattctctattataaaaaataaaactaataatatcgtactaaaaaataacgaacgcctaaatatactaaccgaacacacaaccactaatacccgcgtaaataataacgaaacgctaaatatccgcaacgataacaccgccaccaccgtatccataaaaaataacgatatactactaaccgattccgataccgctatcaataatacccgaaacgacgaaaaaacattcaatatcgaaaacgatcaaacgaataccctaatactaaaaaaaaacaattcattcacgctaaacgccgataatacgaccacgaataccacgataaataacgaactattcaccgccaataacgacacactaacgaacaccaccacgctaaa

SEQ ID NO: 22143 - DNA, 638 bp, Artificial Sequence
  chemically treated genomic DNA (Homo sapiens) CpG-island No: 22143
ttgaataggttatttacggaaatatcgttgaatggggaatattagtatgtgtataacggcggtatagcgtttgatattgttgtgaatagtgacggttgttagattgttaaaaacgggggtgtggtcgggaatattatcgttaattagaaggttagattgtaggtggacgtcggtggtatagttacgaatgttattttgaagtagggcggcgtattggttattagtacggttgtaatcgttatcggtataaatcgtttgggagtattttttgttgtggagggtaaagttgataatgtcgtattggaaaatggcggacgtttggatgtgttgatcggatatatagttattaatattcgcgtggatgatggcggaacgttggatgttcgtaacggtggtatcgttattatcgtatttatgggaaatggcggtgtattgttggtcgatttcggtgtcgttgttagtggtattcggagcgacggaaaggtatttagtatcggaggcggttaggcggatgttttgatgttggaaaaaggtagtttatttacgttgaacgtcggtgatacggttacggatattacggtaaatggcggattgtttatcgttagtggcggtatattggcgggtattattacgttgaa

SEQ ID NO: 22144 - DNA, 638 bp, Artificial Sequence
  chemically treated genomic DNA (Homo sapiens) CpG-island No: 22144
ttcaacgtaataatacccgccaatataccgccactaacgataaacaatccgccatttaccgtaatatccgtaaccgtatcaccgacgttcaacgtaaataaactacctttttccaacatcaaaacatccgcctaaccgcctccgatactaaatacctttccgtcgctccgaataccactaacaacgacaccgaaatcgaccaacaatacaccgccatttcccataaatacgataataacgataccaccgttacgaacatccaacgttccgccatcatccacgcgaatattaataactatatatccgatcaacacatccaaacgtccgccattttccaatacgacattatcaactttaccctccacaacaaaaaatactcccaaacgatttataccgataacgattacaaccgtactaataaccaatacgccgccctacttcaaaataacattcgtaactataccaccgacgtccacctacaatctaaccttctaattaacgataatattcccgaccacacccccgtttttaacaatctaacaaccgtcactattcacaacaatatcaaacgctataccgccgttatacacatactaatattccccattcaacgatatttccgtaaataacctattcaa

SEQ ID NO: 22145 - DNA, 539 bp, Artificial Sequence
  chemically treated genomic DNA (Homo sapiens) CpG-island No: 22145
  unsure (48..49, 240, 347)
aaagtcgtttagttttcggaggcgttttttaatttgtaggcgtttttnnatagcggtgatttcgtatattatggttattatcgtttgttttattatttcgcgggtgatgaaattttttagtatttgtgttattcgcgtgtttcgttgggcgttttgtttacggaatatttttatttgtttagttacgtcgttgtatacgttttgcggtatattcgagggttttaggttgacggaggcggncgttacgttgtcgcgggtttagagtagtataatgttgtaggtcgttgtaagagtcgttttgatggacggggaggtgggagatataggcggtagggtcggaggcgcgntatagtgttcgttatttttatatagtaggttagcgtttgttagggttttttcgcgtttatttattattttcggttcgttaagggttggttcgcggagtttaagatgttatttattatttttttcgtaaaggttaggcgttttcgtagaggttttcgtttttttaatttcgtgaggttgattaggtggatttt

SEQ ID NO: 22146 - DNA, 539 bp, Artificial Sequence
  chemically treated genomic DNA (Homo sapiens) CpG-island No: 22146
  unsure (193, 300, 491..)
aaaatccacctaatcaacctcacgaaattaaaaaaacgaaaacctctacgaaaacgcctaacctttacgaaaaaaataataaataacatcttaaactccgcgaaccaacccttaacgaaccgaaaataataaataaacgcgaaaaaaccctaacaaacgctaacctactatataaaaataacgaacactatancgcgcctccgaccctaccgcctatatctcccacctccccgtccatcaaaacgactcttacaacgacctacaacattatactactctaaacccgcgacaacgtaacgnccgcctccgtcaacctaaaaccctcgaatataccgcaaaacgtatacaacgacgtaactaaacaaataaaaatattccgtaaacaaaacgcccaacgaaacacgcgaataacacaaatactaaaaaatttcatcacccgcgaaataataaaacaaacgataataaccataatatacgaaatcaccgctatnnaaaaacgcctacaaattaaaaaacgcctccgaaaactaaacgacttt

SEQ ID NO: 22147 - DNA, 539 bp, Artificial Sequence
  chemically treated genomic DNA (Homo sapiens) CpG-island No: 22147
  unsure (193, 300, 491..)
aagatttatttggttaattttacggggttgaagaagcgggagtttttgcggaagcgtttggtttttgcggaggaggtgatggatgatattttggatttcgcggattaatttttgacgggtcgaaagtggtggatgggcgcggaggaattttggtagacgttggtttgttgtatggaggtggcgaatattgtgncgcgttttcgattttgtcgtttatgttttttattttttcgtttattaggacggtttttgtaacggtttgtagtattatgttgttttgggttcgcgatagcgtggcgntcgttttcgttaatttggagttttcggatgtgtcgtaggacgtgtatagcggcgtggttgggtaggtggaggtgtttcgtaggtaagacgtttagcggggtacgcgggtggtataggtgttggaaggttttattattcgcgaggtggtgaagtagacggtgatgattatggtgtacggggttatcgttatnngggggcgtttgtagattgagaagcgttttcgggagttgaacgatttt

SEQ ID NO: 22148 - DNA, 539 bp, Artificial Sequence
  chemically treated genomic DNA (Homo sapiens) CpG-island No: 22148
  unsure (48..49, 240, 347)
aaaatcgttcaactcccgaaaacgcttctcaatctacaaacgcccccnnataacgataaccccgtacaccataatcatcaccgtctacttcaccacctcgcgaataataaaaccttccaacacctataccacccgcgtaccccgctaaacgtcttacctacgaaacacctccacctacccaaccacgccgctatacacgtcctacgacacatccgaaaactccaaattaacgaaaacgancgccacgctatcgcgaacccaaaacaacataatactacaaaccgttacaaaaaccgtcctaataaacgaaaaaataaaaaacataaacgacaaaatcgaaaacgcgncacaatattcgccacctccatacaacaaaccaacgtctaccaaaattcctccgcgcccatccaccactttcgacccgtcaaaaattaatccgcgaaatccaaaatatcatccatcacctcctccgcaaaaaccaaacgcttccgcaaaaactcccgcttcttcaaccccgtaaaattaaccaaataaatctt

SEQ ID NO: 22149 - DNA, 564 bp, Artificial Sequence
  chemically treated genomic DNA (Homo sapiens) CpG-island No: 22149
  unsure (134, 165, 167, 202, 240, 304, 306, 312, 383)
ttttcgcggtttttcgagttttgagtgttgtttttagttttttttttttcgcgacgtttttcgttcggttgttcgtagtatttttaaggtcgtttttcgaatttttcgggcgcgagggtttaggcgttagttgnttcgttttgtttacgtttttttagggatttntnggttttggcggtcgtcgcgatagatttatttacgncggatcgcggagtaggacgttcgcggcgcgtagggttngtagttatgtttgcgtcgagtgaacgtattgtttgggtagtttcggttcgagttcgggtttttntntcgcgncggcgcgtttaggtgttcgtttagtagtggtcgagtcgggtagcgatttttacgcgcgtttttagtttttntgaattcgcgttttttcggcgcgttcgtttattcgttgtcgggtcggggcgggcgaggttaggtagagatacgtttttcgcggagagttcgttttagttgggcgtcgttttttgcgtgaaaatgggttcgggggttgagttagaagttcgttttttattattatcgtaggttattgtaaaa

SEQ ID NO: 22150 - DNA, 564 bp, Artificial Sequence
  chemically treated genomic DNA (Homo sapiens) CpG-island No: 22150
  unsure (182, 253, 259, 261, 325, 363, 398, 400, 431)
ttttacaataacctacgataataataaaaaacgaacttctaactcaacccccgaacccattttcacgcaaaaaacgacgcccaactaaaacgaactctccgcgaaaaacgtatctctacctaacctcgcccgccccgacccgacaacgaataaacgaacgcgccgaaaaaacgcgaattcanaaaaactaaaaacgcgcgtaaaaatcgctacccgactcgaccactactaaacgaacacctaaacgcgccgncgcgananaaaaacccgaactcgaaccgaaactacccaaacaatacgttcactcgacgcaaacataactacnaaccctacgcgccgcgaacgtcctactccgcgatccgncgtaaataaatctatcgcgacgaccgccaaaaccnanaaatccctaaaaaaacgtaaacaaaacgaancaactaacgcctaaaccctcgcgcccgaaaaattcgaaaaacgaccttaaaaatactacgaacaaccgaacgaaaaacgtcgcgaaaaaaaaaaaactaaaaacaacactcaaaactcgaaaaaccgcgaaaa

SEQ ID NO: 22151 - DNA, 564 bp, Artificial Sequence
  chemically treated genomic DNA (Homo sapiens) CpG-island No: 22151
  unsure (182, 253, 259, 261, 325, 363, 398, 400, 431)
ttttgtagtgatttgcgatggtggtggggagcgggtttttagtttagttttcgggtttatttttacgtagggagcggcgtttagttggggcgggtttttcgcgaggggcgtgtttttgtttggtttcgttcgtttcggttcggtagcgaatgagcgggcgcgtcgggagggcgcgagtttangggggttggggacgcgcgtggggatcgttattcggttcggttattgttgggcggatatttgggcgcgtcgncgcggngnaggagttcggattcgggtcgaggttgtttaggtaatgcgtttattcggcgtaaatatggttgtnggttttgcgcgtcgcgggcgttttgtttcgcgattcgncgtaagtgggtttgtcgcggcggtcgttagggttnanggatttttgagaaggcgtgggtagagcgggntagttggcgtttgggttttcgcgttcgggggattcggggagcggttttgggggtgttgcgagtaatcgggcgaggggcgtcgcggagaagggagggttgagggtagtatttagggttcgggaggtcgcgggga

SEQ ID NO: 22152 - DNA, 564 bp, Artificial Sequence
  chemically treated genomic DNA (Homo sapiens) CpG-island No: 22152
  unsure (134, 165, 167, 202, 240, 304, 306, 312, 383)
tccccgcgacctcccgaaccctaaatactaccctcaaccctcccttctccgcgacgcccctcgcccgattactcgcaacacccccaaaaccgctccccgaatcccccgaacgcgaaaacccaaacgccaactancccgctctacccacgccttctcaaaaatccntnaaccctaacgaccgccgcgacaaacccacttacgncgaatcgcgaaacaaaacgcccgcgacgcgcaaaaccnacaaccatatttacgccgaataaacgcattacctaaacaacctcgacccgaatccgaactcctncnccgcgncgacgcgcccaaatatccgcccaacaataaccgaaccgaataacgatccccacgcgcgtccccaacccccntaaactcgcgccctcccgacgcgcccgctcattcgctaccgaaccgaaacgaacgaaaccaaacaaaaacacgcccctcgcgaaaaacccgccccaactaaacgccgctccctacgtaaaaataaacccgaaaactaaactaaaaacccgctccccaccaccatcgcaaatcactacaaaa

SEQ ID NO: 22153 - DNA, 524 bp, Artificial Sequence
  chemically treated genomic DNA (Homo sapiens) CpG-island No: 22153
  unsure (66, 80, 91, 185)
cggttcggagtagcgtttcgagttttttaagttcgggcgcggaggcgggggcgggcgcggcggagncggggttcgggttnggattcgtttngttcgtcgggggagtcgtcggtagtggttaagaaggcggcgcggcggacggcggttcgagagtagcgttcgcgttgcggttcgcgggatcgcgntcgcgatcgttcgggtcggttcggaggagcgtttgtcgtcgtcgtcgtcgtcgcgcgtttagcgaggtgagtgttcgttcgcggtcgggtagtttcggagtcgtagcggttcgcgcgggtcggaggtggagaaagaggtttcgtcgcggtcgcgttttcggtttttttgtggtcggcgttgtttggggtcggggcgcgggtacgttcggcgcgggttcgggtttgggatttcggtgtcgttggatacgcggcgttttcggttggtagttttggcgagtagcgagttttcgttttagtttgatattgagttagaatcgtttttttttagaagacggaagt

SEQ ID NO: 22154 - DNA, 524 bp, Artificial Sequence
  chemically treated genomic DNA (Homo sapiens) CpG-island No: 22154
  unsure (340, 434, 445, 459)
acttccgtcttctaaaaaaaaacgattctaactcaatatcaaactaaaacgaaaactcgctactcgccaaaactaccaaccgaaaacgccgcgtatccaacgacaccgaaatcccaaacccgaacccgcgccgaacgtacccgcgccccgaccccaaacaacgccgaccacaaaaaaaccgaaaacgcgaccgcgacgaaacctctttctccacctccgacccgcgcgaaccgctacgactccgaaactacccgaccgcgaacgaacactcacctcgctaaacgcgcgacgacgacgacgacgacaaacgctcctccgaaccgacccgaacgatcgcgancgcgatcccgcgaaccgcaacgcgaacgctactctcgaaccgccgtccgccgcgccgccttcttaaccactaccgacgactcccccgacgaacnaaacgaatccnaacccgaaccccgnctccgccgcgcccgcccccgcctccgcgcccgaacttaaaaaactcgaaacgctactccgaaccg

SEQ ID NO: 22155 - DNA, 524 bp, Artificial Sequence
  chemically treated genomic DNA (Homo sapiens) CpG-island No: 22155
  unsure (340, 434, 445, 459)
attttcgttttttaaagaaaaacggttttaatttaatgttaaattaggacggaaattcgttgttcgttaaagttgttaatcggagacgtcgcgtgtttaacggtatcggggttttagattcgaattcgcgtcgagcgtgttcgcgtttcggttttaggtagcgtcggttataaagggatcggggacgcggtcgcggcggggtttttttttttattttcgattcgcgcgagtcgttgcggtttcgggattgttcggtcgcgggcgaatatttatttcgttaggcgcgcggcggcggcggcggcggtaggcgttttttcgggtcggttcgggcggtcgcggncgcggtttcgcgggtcgtagcgcgggcgttattttcgggtcgtcgttcgtcgcgtcgtttttttggttattgtcggcggttttttcggcgggtngggcgggtttnggttcgggtttcgntttcgtcgcgttcgttttcgttttcgcgttcgggtttggggggttcggggcgttatttcgggtcg

SEQ ID NO: 22156 - DNA, 524 bp, Artificial Sequence
  chemically treated genomic DNA (Homo sapiens) CpG-island No: 22156
  unsure (66, 80, 91, 185)
cgacccgaaataacgccccgaaccccccaaacccgaacgcgaaaacgaaaacgaacgcgacgaaancgaaacccgaaccnaaacccgcccnacccgccgaaaaaaccgccgacaataaccaaaaaaacgacgcgacgaacgacgacccgaaaataacgcccgcgctacgacccgcgaaaccgcgnccgcgaccgcccgaaccgacccgaaaaaacgcctaccgccgccgccgccgccgcgcgcctaacgaaataaatattcgcccgcgaccgaacaatcccgaaaccgcaacgactcgcgcgaatcgaaaataaaaaaaaaaaccccgccgcgaccgcgtccccgatccctttataaccgacgctacctaaaaccgaaacgcgaacacgctcgacgcgaattcgaatctaaaaccccgataccgttaaacacgcgacgtctccgattaacaactttaacgaacaacgaatttccgtcctaatttaacattaaattaaaaccgtttttctttaaaaaacgaaaat

SEQ ID NO: 22157 - DNA, 647 bp, Artificial Sequence
  chemically treated genomic DNA (Homo sapiens) CpG-island No: 22157
  unsure (236, 507, 539)
gtgggggcggagatttcgttcggtcgttcgtttttcgttagcggcggaggcggttttttcgtttgcgcgggggaggtcggggtttcggcgtttattcgaatgcgcgtttttttcgttgcggcgagtttatcgcggggtcgcgacgtttttttcgggttcgggatttcggggtcgggcgcggcgtttttttcggatcgatcgtttagtttcggttttcgtttatacggttacgggtnagggtcgggttaggtcgagaggtgttttcgattttgggtcgggataaagaggttgtcgtagtaagttaaagataattcgggttgttgcgcgtcgagtaggttacggggtgggaggagatggaggagtttttataggggatcggttttcgggtcgagcgcggggtcgttttaattcggtcggttgtttgaggcggtcgcgagcgcgggagttggagcgttgttagtcgcgttgagtttgcgtttggcgatcgcgatgtaggaggttcggganttgagggaggacggcgagagcggaggttcgtngattcgtatcgtcggggtaggtattcgggtttcgggggtagtaacgtcggggtttttgtagaacggggattgtttggggaagtggttttcgtatagtgttcggagagg

SEQ ID NO: 22158 - DNA, 647 bp, Artificial Sequence
  chemically treated genomic DNA (Homo sapiens) CpG-island No: 22158
  unsure (109, 141, 412)
cctctccgaacactatacgaaaaccacttccccaaacaatccccgttctacaaaaaccccgacgttactacccccgaaacccgaatacctaccccgacgatacgaatcnacgaacctccgctctcgccgtcctccctcaantcccgaacctcctacatcgcgatcgccaaacgcaaactcaacgcgactaacaacgctccaactcccgcgctcgcgaccgcctcaaacaaccgaccgaattaaaacgaccccgcgctcgacccgaaaaccgatcccctataaaaactcctccatctcctcccaccccgtaacctactcgacgcgcaacaacccgaattatctttaacttactacgacaacctctttatcccgacccaaaatcgaaaacacctctcgacctaacccgaccctnacccgtaaccgtataaacgaaaaccgaaactaaacgatcgatccgaaaaaaacgccgcgcccgaccccgaaatcccgaacccgaaaaaaacgtcgcgaccccgcgataaactcgccgcaacgaaaaaaacgcgcattcgaataaacgccgaaaccccgacctcccccgcgcaaacgaaaaaaccgcctccgccgctaacgaaaaacgaacgaccgaacgaaatctccgcccccac

SEQ ID NO: 22159 - DNA, 647 bp, Artificial Sequence
  chemically treated genomic DNA (Homo sapiens) CpG-island No: 22159
  unsure (109, 141, 412)
ttttttcgggtattgtgcgggagttatttttttaaatagttttcgttttgtaagggtttcggcgttgttgttttcgagattcgggtgtttgtttcggcggtgcgggttngcgggttttcgttttcgtcgtttttttttagntttcgggttttttgtatcgcggtcgttaggcgtaggtttagcgcggttgatagcgttttagttttcgcgttcgcggtcgttttaggtagtcgatcgggttggggcggtttcgcgttcggttcgggagtcgattttttgtgagggtttttttatttttttttatttcgtgatttgttcgacgcgtaatagttcgagttgtttttaatttgttgcggtagtttttttgtttcgatttagggtcgggggtatttttcggtttggttcggttttngttcgtagtcgtgtgagcgggggtcgggattgggcggtcggttcgggaggggcgtcgcgttcgatttcggagtttcgagttcgaggggagcgtcgcggtttcgcggtgggttcgtcgtagcggagggggcgcgtattcgggtgagcgtcggggtttcggtttttttcgcgtagacgaaggggtcgttttcgtcgttggcgggggacgagcggtcgaacggagttttcgtttttat

SEQ ID NO: 22160 - DNA, 647 bp, Artificial Sequence
  chemically treated genomic DNA (Homo sapiens) CpG-island No: 22160
  unsure (236, 507, 539)
ataaaaacgaaaactccgttcgaccgctcgtcccccgccaacgacgaaaacgaccccttcgtctacgcgaaaaaaaccgaaaccccgacgctcacccgaatacgcgccccctccgctacgacgaacccaccgcgaaaccgcgacgctcccctcgaactcgaaactccgaaatcgaacgcgacgcccctcccgaaccgaccgcccaatcccgacccccgctcacacgactacgaacnaaaaccgaaccaaaccgaaaaatacccccgaccctaaatcgaaacaaaaaaactaccgcaacaaattaaaaacaactcgaactattacgcgtcgaacaaatcacgaaataaaaaaaaataaaaaaaccctcacaaaaaatcgactcccgaaccgaacgcgaaaccgccccaacccgatcgactacctaaaacgaccgcgaacgcgaaaactaaaacgctatcaaccgcgctaaacctacgcctaacgaccgcgatacaaaaaacccgaaanctaaaaaaaaacgacgaaaacgaaaacccgcnaacccgcaccgccgaaacaaacacccgaatctcgaaaacaacaacgccgaaacccttacaaaacgaaaactatttaaaaaaataactcccgcacaatacccgaaaaaa

SEQ ID NO: 22161 - DNA, 514 bp, Artificial Sequence
  chemically treated genomic DNA (Homo sapiens) CpG-island No: 22161
agattggtagggttattacgcgtttgttgatttcgcgtagatattttcgaaaatttgtttaataggggtttcgtatgtgtcggagtggtttaagttgtcgtttgtggtgatatggggggggcgtagagttgattgttatggggtgttgtcggcgggatttatagtgattattcgtgtgtgcgatgtagacgtttttgtattggaggcggtagattgtgtagtgagttttgttttcgatgcgtgttgatagtcggttattcgatgtcgcgtcgagtgttgtttcgggtttgcgttggagagttttgtagttgtatgttaggaacgagttgcgtgttgttgtcgtagtgttcgcgtataatgggtatgcgttgagttttagaagagtgttgacgagtgttcggacgtttgcgagttattggcgtatgcgattatgtgttttgtttgaattcgtatagtatgacgttagcgatacgatttcgtgttttgaaatcgtattgtgttgtaaaagcgagaa

SEQ ID NO: 22162 - DNA, 514 bp, Artificial Sequence
  chemically treated genomic DNA (Homo sapiens) CpG-island No: 22162
ttctcgcttttacaacacaatacgatttcaaaacacgaaatcgtatcgctaacgtcatactatacgaattcaaacaaaacacataatcgcatacgccaataactcgcaaacgtccgaacactcgtcaacactcttctaaaactcaacgcatacccattatacgcgaacactacgacaacaacacgcaactcgttcctaacatacaactacaaaactctccaacgcaaacccgaaacaacactcgacgcgacatcgaataaccgactatcaacacgcatcgaaaacaaaactcactacacaatctaccgcctccaatacaaaaacgtctacatcgcacacacgaataatcactataaatcccgccgacaacaccccataacaatcaactctacgccccccccatatcaccacaaacgacaacttaaaccactccgacacatacgaaacccctattaaacaaattttcgaaaatatctacgcgaaatcaacaaacgcgtaataaccctaccaatct

SEQ ID NO: 22163 - DNA, 514 bp, Artificial Sequence
  chemically treated genomic DNA (Homo sapiens) CpG-island No: 22163
ttttcgtttttgtagtataatgcgattttaggatacgaaatcgtgtcgttgacgttatgttgtgcgaatttaggtaaagtatataatcgtatgcgttagtagttcgtaaacgttcgagtattcgttagtatttttttaagatttagcgtatgtttattgtgcgcgagtattgcgatagtaatacgtagttcgtttttgatatataattatagggttttttaacgtagattcgggatagtattcggcgcgatatcggatgatcgattattagtacgtatcgagggtaagatttattgtataatttatcgtttttaatgtaagagcgtttatatcgtatatacgagtgattattatgggtttcgtcgatagtattttatgataattagttttgcgttttttttatgttattataagcgatagtttgagttatttcgatatatgcgaagtttttgttgagtagattttcgagagtatttacgcgagattagtagacgcgtggtagttttattaattt

SEQ ID NO: 22164 - DNA, 514 bp, Artificial Sequence
  chemically treated genomic DNA (Homo sapiens) CpG-island No: 22164
aaattaataaaactaccacgcgtctactaatctcgcgtaaatactctcgaaaatctactcaacaaaaacttcgcatatatcgaaataactcaaactatcgcttataataacataaaaaaaacgcaaaactaattatcataaaatactatcgacgaaacccataataatcactcgtatatacgatataaacgctcttacattaaaaacgataaattatacaataaatcttaccctcgatacgtactaataatcgatcatccgatatcgcgccgaatactatcccgaatctacgttaaaaaaccctataattatatatcaaaaacgaactacgtattactatcgcaatactcgcgcacaataaacatacgctaaatcttaaaaaaatactaacgaatactcgaacgtttacgaactactaacgcatacgattatatactttacctaaattcgcacaacataacgtcaacgacacgatttcgtatcctaaaatcgcattatactacaaaaacgaaaa

SEQ ID NO: 22165 - DNA, 506 bp, Artificial Sequence
  chemically treated genomic DNA (Homo sapiens) CpG-island No: 22165
ttgttttattttcgaaaattttcgggtagatttcgtggttaattcggggttattgaatgtggcgataaggcgttaagtcgaagttatttttcgcgtcgtagaggtatatagcggttttagggcggaagtgttaatttcggttcggaattgtcggggcggaattatgttttaaggattcgttttatattagatggttatggagcgatatattttcgggtttgttcgggttttgttttttcggttgcggatattatttcgtacgtcgattcgcgttgtgtgacgtttcgaaagttttgtagcggagaaattattttgattttttatcgtacggcggattttttcgatcgtaggtattttatagtggtttcggtagaagttacgtcgttttatagtgtttatagtgtttatcgttgtttatcgttgggtcgagtttcgtgtgtgttattatagttgtttgtttagttatcgcgatatttatagatttatgtgatttttttatttttttt

SEQ ID NO: 22166 - DNA, 506 bp, Artificial Sequence
  chemically treated genomic DNA (Homo sapiens) CpG-island No: 22166
aaaaaaaataaaaaaatcacataaatctataaatatcgcgataactaaacaaacaactataataacacacacgaaactcgacccaacgataaacaacgataaacactataaacactataaaacgacgtaacttctaccgaaaccactataaaatacctacgatcgaaaaaatccgccgtacgataaaaaatcaaaataatttctccgctacaaaactttcgaaacgtcacacaacgcgaatcgacgtacgaaataatatccgcaaccgaaaaaacaaaacccgaacaaacccgaaaatatatcgctccataaccatctaatataaaacgaatccttaaaacataattccgccccgacaattccgaaccgaaattaacacttccgccctaaaaccgctatatacctctacgacgcgaaaaataacttcgacttaacgccttatcgccacattcaataaccccgaattaaccacgaaatctacccgaaaattttcgaaaataaaacaa

SEQ ID NO: 22167 - DNA, 506 bp, Artificial Sequence
  chemically treated genomic DNA (Homo sapiens) CpG-island No: 22167
agagagaatgagaagattatatggatttgtgagtatcgcggtgattagatagataattgtggtgatatatacgagattcgatttagcggtagataacgatggatattatggatattgtgaagcggcgtaatttttatcggaattattatggggtgtttacgatcgaagaaattcgtcgtgcggtgaaaagttagagtggttttttcgttgtaagattttcggaacgttatataacgcgaatcgacgtgcggaatggtattcgtaatcgagaaggtagagttcggataaattcgaaaatatgtcgttttatggttatttggtgtgaaacgaatttttgaagtataatttcgtttcgataatttcgggtcggaattaatattttcgttttaaaatcgttatgtgtttttgcggcgcgggaaatggtttcggtttggcgttttgtcgttatatttaatgatttcgggttaattacgaggtttattcgggaattttcgagggtggggtaa

SEQ ID NO: 22168 - DNA, 506 bp, Artificial Sequence
  chemically treated genomic DNA (Homo sapiens) CpG-island No: 22168
ttaccccaccctcgaaaattcccgaataaacctcgtaattaacccgaaatcattaaatataacgacaaaacgccaaaccgaaaccatttcccgcgccgcaaaaacacataacgattttaaaacgaaaatattaattccgacccgaaattatcgaaacgaaattatacttcaaaaattcgtttcacaccaaataaccataaaacgacatattttcgaatttatccgaactctaccttctcgattacgaataccattccgcacgtcgattcgcgttatataacgttccgaaaatcttacaacgaaaaaaccactctaacttttcaccgcacgacgaatttcttcgatcgtaaacaccccataataattccgataaaaattacgccgcttcacaatatccataatatccatcgttatctaccgctaaatcgaatctcgtatatatcaccacaattatctatctaatcaccgcgatactcacaaatccatataatcttctcattctctct

SEQ ID NO: 22169 - DNA, 509 bp, Artificial Sequence
  chemically treated genomic DNA (Homo sapiens) CpG-island No: 22169
  unsure (30, 49, 333, 354, 365, 436)
ttttgcgtgggcgaatttttcgtgtcgtgngacgcgcgggcgtttaggnttatatagtttagttagtgatgttaagcgcgggcggggtcgttagttgaggggttagtaggtttatgcgtttgacgtttgcgtacgcgtttaggttgtgcgtttttcgttttttttttttttttatttttttttacgttttgttcgtttttcgttttttttcgataatcgttttttttattttttatttttattttcgtttttttttttttttttttcgtatgcgttatatggttttttcggtttagttaagagtttggaattacgtgatttgtttatttgtantgtcgcggagcgttttatttncggtttttttngtggttagaagaaagtggtttatttgtcgttagttagagatttcgcggatttgtttttattcgtaggagangattaatttttttaggcggtagaagggacggggatagaggggggaggggatttgagggaaggaagggaaaagt

SEQ ID NO: 22170 - DNA, 509 bp, Artificial Sequence
  chemically treated genomic DNA (Homo sapiens) CpG-island No: 22170
  unsure (74, 145, 156, 177, 461, 480)
acttttcccttccttccctcaaatcccctcccccctctatccccgtcccttctaccgcctaaaaaaattaatcntctcctacgaataaaaacaaatccgcgaaatctctaactaacgacaaataaaccactttcttctaaccacnaaaaaaaccgnaaataaaacgctccgcgacantacaaataaacaaatcacgtaattccaaactcttaactaaaccgaaaaaaccatataacgcatacgaaaaaaaaaaaaaaaaaaacgaaaataaaaataaaaaataaaaaaaacgattatcgaaaaaaaacgaaaaacgaacaaaacgtaaaaaaaaataaaaaaaaaaaaaaaacgaaaaacgcacaacctaaacgcgtacgcaaacgtcaaacgcataaacctactaacccctcaactaacgaccccgcccgcgcttaacatcactaactaaactatataancctaaacgcccgcgcgtcncacgacacgaaaaattcgcccacgcaaaa

SEQ ID NO: 22171 - DNA, 509 bp, Artificial Sequence
  chemically treated genomic DNA (Homo sapiens) CpG-island No: 22171
  unsure (74, 145, 156, 177, 461, 480)
gtttttttttttttttttttaaatttttttttttttttattttcgttttttttgtcgtttgaaagggttaattnttttttgcgggtaaaaataggttcgcggagtttttaattggcgatagatgggttatttttttttggttatnaaaggggtcgngaatggagcgtttcgcggtantataaatgggtaggttacgtggttttaggtttttggttggatcgggaagattatatggcgtatgcgggggaggaaggaggaggggcgggggtaggggtggagggtgaggggagcggttgtcggaggagggcgggagacgagtaaggcgtggggagaagtggggaggaggggagaacggggagcgtatagtttggacgcgtgcgtaggcgttaggcgtatagatttgttagttttttagttagcggtttcgttcgcgtttagtattattaattgggttatataantttgagcgttcgcgcgttntacgatacgaggaattcgtttacgtagga

SEQ ID NO: 22172 - DNA, 509 bp, Artificial Sequence
  chemically treated genomic DNA (Homo sapiens) CpG-island No: 22172
  unsure (30, 49, 333, 354, 365, 436)
tcctacgtaaacgaattcctcgtatcgtanaacgcgcgaacgctcaaanttatataacccaattaataatactaaacgcgaacgaaaccgctaactaaaaaactaacaaatctatacgcctaacgcctacgcacgcgtccaaactatacgctccccgttctcccctcctccccacttctccccacgccttactcgtctcccgccctcctccgacaaccgctcccctcaccctccacccctacccccgcccctcctccttcctcccccgcatacgccatataatcttcccgatccaaccaaaaacctaaaaccacgtaacctacccatttatantaccgcgaaacgctccattcncgacccctttnataaccaaaaaaaaataacccatctatcgccaattaaaaactccgcgaacctatttttacccgcaaaaaanaattaaccctttcaaacgacaaaaaaaacgaaaataaaaaaaaaaaaaaatttaaaaaaaaaaaaaaaaaaac

SEQ ID NO: 22173 - DNA, 631 bp, Artificial Sequence
  chemically treated genomic DNA (Homo sapiens) CpG-island No: 22173
  unsure (125, 133, 147, 167, 352, 359, 368, 397, 452, 457, 503, 508)
  unsure (561)
tttatttcgtcgcgttagatcgttagtttttagttttcgcgtcggaggggcggtgttttgcggggacgcgagttcgtattggtttgcgtggtcgttagggcggtgaaatgacggtttcggggcgngggttttngcggtttggttggncggcgtcgtttcgttttttngtcgttcgtgttgattgaggcgttgtagttaggagtcgcggtcggttgtttagcgttcgtcgttttcgcgcgttcgtagtcgttttcgcgtcgatatgcgtttggtcgtcgtcgcgaacgaggcgtatacggtttttttggcggtttcggggttgttgggttgtaagtagtgcggcgggggtcgncgattanggacgaggntatttgggcgaggggttgagcgggtcgtntgggtatttgggcgggtgggtattcggtcgagttgttttgtgtaatacggaggtntacgnttgtttttttatagtcgttttcggttagtattcgaaaacgtttttntagantagggcgggttttcggggagtagcgtttcggtttttttgcgtttttcgggggnaaggggttgtttgcggtgggtgggagatttgcgtatcgtgagtcgtttttgggtagaaaatgttaagttg

SEQ ID NO: 22174 - DNA, 631 bp, Artificial Sequence
  chemically treated genomic DNA (Homo sapiens) CpG-island No: 22174
  unsure (71, 124, 129, 175, 180, 235, 264, 273, 280, 465, 485, 499)
  unsure (507)
caacttaacattttctacccaaaaacgactcacgatacgcaaatctcccacccaccgcaaacaaccccttncccccgaaaaacgcaaaaaaaccgaaacgctactccccgaaaacccgccctantctanaaaaacgttttcgaatactaaccgaaaacgactataaaaaaacaancgtanacctccgtattacacaaaacaactcgaccgaatacccacccgcccaaatacccanacgacccgctcaacccctcgcccaaatancctcgtccntaatcgncgacccccgccgcactacttacaacccaacaaccccgaaaccgccaaaaaaaccgtatacgcctcgttcgcgacgacgaccaaacgcatatcgacgcgaaaacgactacgaacgcgcgaaaacgacgaacgctaaacaaccgaccgcgactcctaactacaacgcctcaatcaacacgaacgacnaaaaaacgaaacgacgccgnccaaccaaaccgcnaaaacccncgccccgaaaccgtcatttcaccgccctaacgaccacgcaaaccaatacgaactcgcgtccccgcaaaacaccgcccctccgacgcgaaaactaaaaactaacgatctaacgcgacgaaataaa

SEQ ID NO: 22175 - DNA, 631 bp, Artificial Sequence
  chemically treated genomic DNA (Homo sapiens) CpG-island No: 22175
  unsure (71, 124, 129, 175, 180, 235, 264, 273, 280, 465, 485, 499)
  unsure (507)
tagtttagtattttttgtttagggacgatttacggtgcgtaggttttttatttatcgtaggtaattttttnttttcgaggggcgtaggagggtcgggacgttgtttttcgggagttcgttttantttgngggagcgttttcggatgttgatcgggagcgattgtgaggaggtaancgtgnattttcgtgttgtatagggtagttcggtcgggtgtttattcgtttaggtatttangcggttcgtttagtttttcgtttaggtantttcgtttntggtcgncggttttcgtcgtattgtttgtagtttagtagtttcgagatcgttaaaggggtcgtgtacgtttcgttcgcggcggcggttaagcgtatgtcggcgcggggacggttgcggacgcgcggaggcggcgagcgttgggtagtcggtcgcggtttttggttgtagcgttttagttagtacggacggtnggggggcggggcggcgtcgnttaattaagtcgtnggggtttncgtttcggggtcgttattttatcgttttggcggttacgtaagttaatgcgggttcgcgttttcgtaaagtatcgttttttcggcgcggaggttgggaattggcggtttgacgcggcgaggtgaa

SEQ ID NO: 22176 - DNA, 631 bp, Artificial Sequence
  chemically treated genomic DNA (Homo sapiens) CpG-island No: 22176
  unsure (125, 133, 147, 167, 352, 359, 368, 397, 452, 457, 503, 508)
  unsure (561)
ttcacctcgccgcgtcaaaccgccaattcccaacctccgcgccgaaaaaacgatactttacgaaaacgcgaacccgcattaacttacgtaaccgccaaaacgataaaataacgaccccgaaacgnaaaccccnacgacttaattaancgacgccgccccgccccccnaccgtccgtactaactaaaacgctacaaccaaaaaccgcgaccgactacccaacgctcgccgcctccgcgcgtccgcaaccgtccccgcgccgacatacgcttaaccgccgccgcgaacgaaacgtacacgacccctttaacgatctcgaaactactaaactacaaacaatacgacgaaaaccgncgaccanaaacgaaantacctaaacgaaaaactaaacgaaccgcntaaatacctaaacgaataaacacccgaccgaactaccctatacaacacgaaaatncacgnttacctcctcacaatcgctcccgatcaacatccgaaaacgctcccncaaantaaaacgaactcccgaaaaacaacgtcccgaccctcctacgcccctcgaaaanaaaaaattacctacgataaataaaaaacctacgcaccgtaaatcgtccctaaacaaaaaatactaaacta

SEQ ID NO: 22177 - DNA, 545 bp, Artificial Sequence
  chemically treated genomic DNA (Homo sapiens) CpG-island No: 22177
  unsure (530..)
cggtggtcgagtcgtaaggtatggttattttgtcgtagattttcggtagttagaacgggaaagtcgaatatgtatattttgaaggttggaaagtgtgggagaacgttagcgcgttgtagtaaataatgtttttgatgagtgaaaagaatgagtgatgtcgtcgagatattagattttttgcgtttgtttttatagggtgagcgtttgattgaagtttttgtcggtataggtaaaatttttacgattgcggcgttttatttgcgtttgttatttggattaggcggtttcgtcgttttttttcgttcgttgatcgttgaagaattgttggtggttatttttatcgaggttgttacggtagaattgcgcggtcgtattcgtaataatatttacgaagtgcgtatcggttgtttgcgtgaaattatcgataatttattgtacgaacgtttgttggaagagatcgacgataaagcgtaagtcgcgtagtggttgttgttagtcgaacggtagatggatgaagcggagatgttaanntttcgaattttatt

SEQ ID NO: 22178 - DNA, 545 bp, Artificial Sequence
  chemically treated genomic DNA (Homo sapiens) CpG-island No: 22178
  unsure (15..)
aataaaattcgaaannttaacatctccgcttcatccatctaccgttcgactaacaacaaccactacgcgacttacgctttatcgtcgatctcttccaacaaacgttcgtacaataaattatcgataatttcacgcaaacaaccgatacgcacttcgtaaatattattacgaatacgaccgcgcaattctaccgtaacaacctcgataaaaataaccaccaacaattcttcaacgatcaacgaacgaaaaaaaacgacgaaaccgcctaatccaaataacaaacgcaaataaaacgccgcaatcgtaaaaattttacctataccgacaaaaacttcaatcaaacgctcaccctataaaaacaaacgcaaaaaatctaatatctcgacgacatcactcattcttttcactcatcaaaaacattatttactacaacgcgctaacgttctcccacactttccaaccttcaaaatatacatattcgactttcccgttctaactaccgaaaatctacgacaaaataaccataccttacgactcgaccaccg

SEQ ID NO: 22179 - DNA, 545 bp, Artificial Sequence
  chemically treated genomic DNA (Homo sapiens) CpG-island No: 22179
  unsure (15..)
aatggagttcggaannttagtattttcgttttatttatttgtcgttcggttaataataattattgcgcggtttgcgttttatcgtcgattttttttagtaggcgttcgtatagtggattgtcggtggttttacgtagatagtcgatgcgtatttcgtggatattgttacggatacgatcgcgtaattttgtcgtggtagtttcggtaaaggtgattattagtagttttttaacggttagcgggcggggaaaggcggcggaatcgtttagtttaagtaataggcgtaaatagagcgtcgtaatcgtaaaggttttgtttgtgtcggtagaggttttaattaggcgtttattttgtaagggtaagcgtaaaggatttagtgtttcggcgatattatttattttttttatttattaggggtattgtttgttgtaacgcgttgacgtttttttatattttttagtttttagggtgtatatattcggttttttcgttttggttgtcggaaatttgcgatagaatagttatgttttgcggttcgattatcg

SEQ ID NO: 22180 - DNA, 545 bp, Artificial Sequence
  chemically treated genomic DNA (Homo sapiens) CpG-island No: 22180
  unsure (530..)
cgataatcgaaccgcaaaacataactattctatcgcaaatttccgacaaccaaaacgaaaaaaccgaatatatacaccctaaaaactaaaaaatataaaaaaacgtcaacgcgttacaacaaacaatacccctaataaataaaaaaaataaataatatcgccgaaacactaaatcctttacgcttacccttacaaaataaacgcctaattaaaacctctaccgacacaaacaaaacctttacgattacgacgctctatttacgcctattacttaaactaaacgattccgccgcctttccccgcccgctaaccgttaaaaaactactaataatcacctttaccgaaactaccacgacaaaattacgcgatcgtatccgtaacaatatccacgaaatacgcatcgactatctacgtaaaaccaccgacaatccactatacgaacgcctactaaaaaaaatcgacgataaaacgcaaaccgcgcaataattattattaaccgaacgacaaataaataaaacgaaaatactaannttccgaactccatt

SEQ ID NO: 22181 - DNA, 725 bp, Artificial Sequence
  chemically treated genomic DNA (Homo sapiens) CpG-island No: 22181
tcgttacgtagcgcgttttgtttttttggcgtaatgtcgatacggtagtaattggtcgcgcgtagaattcgtggaaagagtgtaatattcggcggatggaagaagataacgttcgtttggcgcggcgtagtagcggtggcggcgcggtgttttacgatttcggtaatatttgttttatttttatggttggtaagtcggagtacgataaaattatttttacgtcgattgtgtttaatgcgttgaacgcgttcggcgttagcgtcgaagcgttcggacgtaacgatttggtggtgaaaatcgtcgaaggcgatcgtaaagttttaggttcggtttatcgcgaaattaaagatcgcggtttttattacggtattttgttatttaatgtcgattttagtcgtttggtaaattattttaattcggataaaaagaaattggcggcgaaaggtattacgtcggtacgttttcgcgtgattaattttatcgagttggtggtcggggattatttatgagtaagtttgcgaagttataatcgaggtttttttcgtttattatgggtttgagacgatttttgttcggattcgtttatcggattcgttgaattttttcgtatgtatcgggttataatagcgggggcggttgtaatataggtcggattttttattatattgttgtttcggtagtcggataagttgttgtagttgatgcgggtttttttgatttagtag

SEQ ID NO: 22182 - DNA, 725 bp, Artificial Sequence
  chemically treated genomic DNA (Homo sapiens) CpG-island No: 22182
ctactaaatcaaaaaaacccgcatcaactacaacaacttatccgactaccgaaacaacaatataataaaaaatccgacctatattacaaccgcccccgctattataacccgatacatacgaaaaaattcaacgaatccgataaacgaatccgaacaaaaatcgtctcaaacccataataaacgaaaaaaacctcgattataacttcgcaaacttactcataaataatccccgaccaccaactcgataaaattaatcacgcgaaaacgtaccgacgtaatacctttcgccgccaatttctttttatccgaattaaaataatttaccaaacgactaaaatcgacattaaataacaaaataccgtaataaaaaccgcgatctttaatttcgcgataaaccgaacctaaaactttacgatcgccttcgacgattttcaccaccaaatcgttacgtccgaacgcttcgacgctaacgccgaacgcgttcaacgcattaaacacaatcgacgtaaaaataattttatcgtactccgacttaccaaccataaaaataaaacaaatattaccgaaatcgtaaaacaccgcgccgccaccgctactacgccgcgccaaacgaacgttatcttcttccatccgccgaatattacactctttccacgaattctacgcgcgaccaattactaccgtatcgacattacgccaaaaaaacaaaacgcgctacgtaacga

SEQ ID NO: 22183 - DNA, 725 bp, Artificial Sequence
  chemically treated genomic DNA (Homo sapiens) CpG-island No: 22183
ttgttgaattaagagaattcgtattagttgtagtagtttattcggttgtcggggtagtagtatgatgaggagttcggtttgtattataatcgttttcgttattatgattcggtgtatgcgagggaatttagcggattcgatggacgggttcgagtagaggtcgttttaaatttataatgggcgaaaaaggtttcggttatggtttcgtaaatttgtttatgggtgattttcggttattagttcggtgaggttggttacgcgggaacgtatcgacgtaatgtttttcgtcgttagtttttttttattcggattgagatagtttgttaggcggttgaggtcggtattgagtagtaaggtgtcgtggtggaagtcgcgatttttggtttcgcgataggtcgagtttgagattttgcggtcgttttcgacggtttttattattagatcgttacgttcggacgtttcggcgttgacgtcgagcgcgtttagcgtattgagtataatcgacgtggagatagttttatcgtatttcggtttgttagttataaaggtaaagtaggtattgtcgagatcgtggaatatcgcgtcgttatcgttattgcgtcgcgttaggcggacgttatttttttttattcgtcgggtattatattttttttacgggttttgcgcgcgattaattattatcgtgtcggtattgcgttagagaaatagaacgcgttgcgtggcgg

SEQ ID NO: 22184 - DNA, 725 bp, Artificial Sequence
  chemically treated genomic DNA (Homo sapiens) CpG-island No: 22184
ccgccacgcaacgcgttctatttctctaacgcaataccgacacgataataattaatcgcgcgcaaaacccgtaaaaaaaatataatacccgacgaataaaaaaaaataacgtccgcctaacgcgacgcaataacgataacgacgcgatattccacgatctcgacaatacctactttacctttataactaacaaaccgaaatacgataaaactatctccacgtcgattatactcaatacgctaaacgcgctcgacgtcaacgccgaaacgtccgaacgtaacgatctaataataaaaaccgtcgaaaacgaccgcaaaatctcaaactcgacctatcgcgaaaccaaaaatcgcgacttccaccacgacaccttactactcaataccgacctcaaccgcctaacaaactatctcaatccgaataaaaaaaaactaacgacgaaaaacattacgtcgatacgttcccgcgtaaccaacctcaccgaactaataaccgaaaatcacccataaacaaatttacgaaaccataaccgaaacctttttcgcccattataaatttaaaacgacctctactcgaacccgtccatcgaatccgctaaattccctcgcatacaccgaatcataataacgaaaacgattataatacaaaccgaactcctcatcatactactaccccgacaaccgaataaactactacaactaatacgaattctcttaattcaacaa

SEQ ID NO: 22185 - DNA, 507 bp, Artificial Sequence
  chemically treated genomic DNA (Homo sapiens) CpG-island No: 22185
  unsure (372..)
tacgttgttgtttttttcgtgttgatgagcgttagcggtatgtcgtagatggtcgtagtggtataggtggatttttcgcgtcggcgtgtatatcgggtttatttggttatgtatttgttttacgggtagggcgtacgatgttagttagcggcggttttttttatttattcggttagttaggattttattttttagtcggtcgagtatttgtattagtatcggcgggaatattatattgttatcgttttcgtcgtcggattgttgaagggtatacgttaggttgcggcgttgcgttttcgttagtttatcggtggtagtttcgattttgatgagtggcgtgaaagttttcggttgataaatcgtttggatgtnngttttgtcgttttgtatcgtgggtagacggaacgttttttatttcgattaagggatttggcggtttttagatagcgagattgaaattggaattcgatttttagcggtcgattttagaggatttttttaatattt

SEQ ID NO: 22186 - DNA, 507 bp, Artificial Sequence
  chemically treated genomic DNA (Homo sapiens) CpG-island No: 22186
  unsure (135..)
aaatattaaaaaaatcctctaaaatcgaccgctaaaaatcgaattccaatttcaatctcgctatctaaaaaccgccaaatcccttaatcgaaataaaaaacgttccgtctacccacgatacaaaacgacaaaacnnacatccaaacgatttatcaaccgaaaactttcacgccactcatcaaaatcgaaactaccaccgataaactaacgaaaacgcaacgccgcaacctaacgtatacccttcaacaatccgacgacgaaaacgataacaatataatattcccgccgatactaatacaaatactcgaccgactaaaaaataaaatcctaactaaccgaataaataaaaaaaaccgccgctaactaacatcgtacgccctacccgtaaaacaaatacataaccaaataaacccgatatacacgccgacgcgaaaaatccacctataccactacgaccatctacgacataccgctaacgctcatcaacacgaaaaaaacaacaacgta

SEQ ID NO: 22187 - DNA, 507 bp, Artificial Sequence
  chemically treated genomic DNA (Homo sapiens) CpG-island No: 22187
  unsure (135..)
ggatattaaggggattttttagagtcggtcgttaggaatcgagttttaattttagtttcgttgtttggaaatcgttaagttttttggtcgggatgggaggcgtttcgtttgtttacgatatagaacgatagagtnngtatttagacgatttattagtcgggagtttttacgttatttattagggtcgaaattgttatcggtgagttggcgaaaacgtagcgtcgtagtttggcgtatgttttttagtagttcggcggcgaagacggtggtagtgtggtgttttcgtcggtgttggtgtagatgttcgatcggttggaaagtgaaattttggttgatcgggtgagtgaggaaagtcgtcgttggttggtatcgtgcgttttgttcgtggagtagatgtataattagatggattcggtgtatacgtcggcgcgaaaaatttatttgtattattgcgattatttgcggtatgtcgttggcgtttattagtacggaaggggtaatagcgtg

SEQ ID NO: 22188 - DNA, 507 bp, Artificial Sequence
  chemically treated genomic DNA (Homo sapiens) CpG-island No: 22188
  unsure (372..)
cacgctattaccccttccgtactaataaacgccaacgacataccgcaaataatcgcaataatacaaataaatttttcgcgccgacgtatacaccgaatccatctaattatacatctactccacgaacaaaacgcacgataccaaccaacgacgactttcctcactcacccgatcaaccaaaatttcactttccaaccgatcgaacatctacaccaacaccgacgaaaacaccacactaccaccgtcttcgccgccgaactactaaaaaacatacgccaaactacgacgctacgttttcgccaactcaccgataacaatttcgaccctaataaataacgtaaaaactcccgactaataaatcgtctaaatacnnactctatcgttctatatcgtaaacaaacgaaacgcctcccatcccgaccaaaaaacttaacgatttccaaacaacgaaactaaaattaaaactcgattcctaacgaccgactctaaaaaatccccttaatatcc

SEQ ID NO: 22189 - DNA, 571 bp, Artificial Sequence
  chemically treated genomic DNA (Homo sapiens) CpG-island No: 22189
gttttgtaaggttgggaagttaaatttttgcgcgtaggaaaagttaatattagcgatagttattttcgtttgcgtgacggagaggtatttttgtttggttgaattttttcgacggtttttttagaggatttttagtattttcgcgcgggtgttggtgggtttagaatcgttcgcgtaggggaatattagttggcgtggcgaatcgttggcgaaatttaatcgcgtttagcgtaaagcgtttcgtcgcgatatttagatggtattttaggattttattagcgtcgtgaattcgcgtaaaatcgtgcgcgagattttgcgtgaatcgatgcgttatttgttattattgaaaaaattcgaataattggcgcgcgttagcgaaatgttgaaggcggtcgatttcgatgatagcgttttcgataaacgtttatcgtagttaagcggcggttagttttagcgcgtttgtttggttcgcgcgttggcggtcgaatcgaaattattgattttggatgaagtcgtttttaattttgatttcgtgttataggcgggtgttattcgtttgttgaaaaagtta

SEQ ID NO: 22190 - DNA, 571 bp, Artificial Sequence
  chemically treated genomic DNA (Homo sapiens) CpG-island No: 22190
taactttttcaacaaacgaataacacccgcctataacacgaaatcaaaattaaaaacgacttcatccaaaatcaataatttcgattcgaccgccaacgcgcgaaccaaacaaacgcgctaaaactaaccgccgcttaactacgataaacgtttatcgaaaacgctatcatcgaaatcgaccgccttcaacatttcgctaacgcgcgccaattattcgaattttttcaataataacaaataacgcatcgattcacgcaaaatctcgcgcacgattttacgcgaattcacgacgctaataaaatcctaaaataccatctaaatatcgcgacgaaacgctttacgctaaacgcgattaaatttcgccaacgattcgccacgccaactaatattcccctacgcgaacgattctaaacccaccaacacccgcgcgaaaatactaaaaatcctctaaaaaaaccgtcgaaaaaattcaaccaaacaaaaatacctctccgtcacgcaaacgaaaataactatcgctaatattaacttttcctacgcgcaaaaatttaacttcccaaccttacaaaac

SEQ ID NO: 22191 - DNA, 571 bp, Artificial Sequence
  chemically treated genomic DNA (Homo sapiens) CpG-island No: 22191
tagtttttttagtaggcgaatgatattcgtttgtaatacgagattaaggttagaaacggttttatttagaattagtagtttcggttcgatcgttagcgcgcgagttaggtagacgcgttggagttggtcgtcgtttaattgcggtgggcgtttgtcgagaacgttgttatcgagatcgatcgtttttagtatttcgttggcgcgcgttagttgttcggatttttttagtgatagtaggtggcgtatcggtttacgtaggatttcgcgtacggttttgcgcggatttacggcgttgatggagttttgaaatattatttgaatatcgcggcggaacgttttacgttgggcgcgattgagtttcgttagcggttcgttacgttagttaatatttttttgcgcgggcgattttaaatttattagtattcgcgcgagggtattggggattttttagagaggtcgtcgaaggagtttagttaaatagaaatgttttttcgttacgtagacgaaggtagttgtcgttgatattggttttttttgcgcgtagggatttaattttttagttttgtagggt

SEQ ID NO: 22192 - DNA, 571 bp, Artificial Sequence
  chemically treated genomic DNA (Homo sapiens) CpG-island No: 22192
accctacaaaactaaaaaattaaatccctacgcgcaaaaaaaaccaatatcaacgacaactaccttcgtctacgtaacgaaaaaacatttctatttaactaaactccttcgacgacctctctaaaaaatccccaataccctcgcgcgaatactaataaatttaaaatcgcccgcgcaaaaaaatattaactaacgtaacgaaccgctaacgaaactcaatcgcgcccaacgtaaaacgttccgccgcgatattcaaataatatttcaaaactccatcaacgccgtaaatccgcgcaaaaccgtacgcgaaatcctacgtaaaccgatacgccacctactatcactaaaaaaatccgaacaactaacgcgcgccaacgaaatactaaaaacgatcgatctcgataacaacgttctcgacaaacgcccaccgcaattaaacgacgaccaactccaacgcgtctacctaactcgcgcgctaacgatcgaaccgaaactactaattctaaataaaaccgtttctaaccttaatctcgtattacaaacgaatatcattcgcctactaaaaaaacta

SEQ ID NO: 22193 - DNA, 688 bp, Artificial Sequence
  chemically treated genomic DNA (Homo sapiens) CpG-island No: 22193
ttttagcgcggtttgtattggttaattgattaatgttatcgtatagcgtcgattcgttgtattgtacgcgttgttgtgtacgggtttacgtcggaacgttaatcggttgaggcgtcgtcgcggttgacgggcgaagttattataagttatgtgggtttgtgtgcgttatgtataattttcggttgtattttgcgcgtatgtatacgttggcgttttgttgtttttattttgaatttcgttaatttggtatttagcggcggtttgtttttaagcgtcgttttcggtgcgacgttttggaggttgggtagtcgttaacgcgcgcgtttaatattataattttcgtcgttgtaataatttggcgttattgtttggttcgtgatattcgtaatcgagttacggtttttcgtttagcgcgaagtaagtttgtcgtttaattgtcggtgggtatattttgtttgttacggtttcgttgataacgattttggttcgttggttttaacgtaacgttcgtcgtttggagtttgtttaagcgggttttatttgttgtgtaagttttttttcgtttgcggtatgcgtatgcgttttgttttaacgcggtttttgttaagttattttatacgttttcgtttattttgtttatatgcgtaaatttgtacgtattacgtattttgatgtattgttagatttg

SEQ ID NO: 22194 - DNA, 688 bp, Artificial Sequence
  chemically treated genomic DNA (Homo sapiens) CpG-island No: 22194
caaatctaacaatacatcaaaatacgtaatacgtacaaatttacgcatataaacaaaataaacgaaaacgtataaaataacttaacaaaaaccgcgttaaaacaaaacgcatacgcataccgcaaacgaaaaaaaacttacacaacaaataaaacccgcttaaacaaactccaaacgacgaacgttacgttaaaaccaacgaaccaaaatcgttatcaacgaaaccgtaacaaacaaaatatacccaccgacaattaaacgacaaacttacttcgcgctaaacgaaaaaccgtaactcgattacgaatatcacgaaccaaacaataacgccaaattattacaacgacgaaaattataatattaaacgcgcgcgttaacgactacccaacctccaaaacgtcgcaccgaaaacgacgcttaaaaacaaaccgccgctaaataccaaattaacgaaattcaaaataaaaacaacaaaacgccaacgtatacatacgcgcaaaatacaaccgaaaattatacataacgcacacaaacccacataacttataataacttcgcccgtcaaccgcgacgacgcctcaaccgattaacgttccgacgtaaacccgtacacaacaacgcgtacaatacaacgaatcgacgctatacgataacattaatcaattaaccaatacaaaccgcgctaaaa

SEQ ID NO: 22195 - DNA, 688 bp, Artificial Sequence
  chemically treated genomic DNA (Homo sapiens) CpG-island No: 22195
taagtttggtagtatattaaaatgcgtggtgcgtgtaagtttgcgtatataagtaaaataaacgggggcgtgtaggatagtttagtagaggtcgcgttagggtaaggcgtatacgtatatcgtaggcggaaaagggtttgtataataagtaaggttcgtttgggtaaattttaggcggcgggcgttacgttagggttaacgggttaaaatcgttgttagcggggtcgtggtaggtaaaatgtgtttatcggtagttgggcggtaggtttatttcgcgttaagcgaaagatcgtaattcggttgcggatattacgggttaggtaatggcgttaaattgttataacggcggaagttgtggtattgagcgcgcgcgttagcggttgtttaatttttaaaacgtcgtatcggaggcggcgtttgggagtaggtcgtcgttgggtattaggttagcggggtttaaggtaagggtagtaaaacgttagcgtgtatatacgcgtagggtatagtcgggggttatatatagcgtatatagatttatatggtttgtggtggtttcgttcgttaatcgcggcggcgttttagtcggttggcgtttcggcgtgggttcgtgtatagtagcgcgtgtagtgtaacgaatcggcgttatacgatggtattagttagttagttagtgtaggtcgcgttgggg

SEQ ID NO: 22196 - DNA, 688 bp, Artificial Sequence
  chemically treated genomic DNA (Homo sapiens) CpG-island No: 22196
ccccaacgcgacctacactaactaactaactaataccatcgtataacgccgattcgttacactacacgcgctactatacacgaacccacgccgaaacgccaaccgactaaaacgccgccgcgattaacgaacgaaaccaccacaaaccatataaatctatatacgctatatataacccccgactataccctacgcgtatatacacgctaacgttttactacccttaccttaaaccccgctaacctaatacccaacgacgacctactcccaaacgccgcctccgatacgacgttttaaaaattaaacaaccgctaacgcgcgcgctcaataccacaacttccgccgttataacaatttaacgccattacctaacccgtaatatccgcaaccgaattacgatctttcgcttaacgcgaaataaacctaccgcccaactaccgataaacacattttacctaccacgaccccgctaacaacgattttaacccgttaaccctaacgtaacgcccgccgcctaaaatttacccaaacgaaccttacttattatacaaacccttttccgcctacgatatacgtatacgccttaccctaacgcgacctctactaaactatcctacacgcccccgtttattttacttatatacgcaaacttacacgcaccacgcattttaatatactaccaaactta

SEQ ID NO: 22197 - DNA, 663 bp, Artificial Sequence
  chemically treated genomic DNA (Homo sapiens) CpG-island No: 22197
gtagttcgtcggcgcggtagtttagttatagtatcggtttttcgagtagttaggttatcgcggtcgtcgttcggttcgcggttttttttatttgtaatttcgcgtttttcgtcgttttagttttttgcgttttttttttttgttgttgtcgttttgcgggggatgtttggggcggtgtcggcgacggcggcgtttgtttttcggcggtaggagtcgggtattttttttcggcgtgtttcggaggcgtcgggttcgttatttttagttgtgtttttagatagggacggggtcgggcgcgcgcgcgggcgcgtttgggtgtgggtgtcgtcgagggcggggcgtcggtggcggtaggtttcggagcggggcgcgtatcgcggggtataggcggttgggggttttgtgacgttataggttacggagggggagtcgttcgggaaagtgggtgcggtcgagttcgcgtaggggcggggtcgggcgtcgggagttgggcggtgttttcggggggttttgggtttttggagggttttttcgggattcgaggaaaacgatttttttttttgtagcggcgggagagggcgaagtggaggattgttgttcggtttcgtatttaaaagagatttaaggttttaggtaaaatagattggatatttttattttttt

SEQ ID NO: 22198 - DNA, 663 bp, Artificial Sequence
  chemically treated genomic DNA (Homo sapiens) CpG-island No: 22198
aaaaaaataaaaatatccaatctattttacctaaaaccttaaatctcttttaaatacgaaaccgaacaacaatcctccacttcgccctctcccgccgctacaaaaaaaaaaatcgttttcctcgaatcccgaaaaaaccctccaaaaacccaaaaccccccgaaaacaccgcccaactcccgacgcccgaccccgcccctacgcgaactcgaccgcacccactttcccgaacgactccccctccgtaacctataacgtcacaaaacccccaaccgcctataccccgcgatacgcgccccgctccgaaacctaccgccaccgacgccccgccctcgacgacacccacacccaaacgcgcccgcgcgcgcgcccgaccccgtccctatctaaaaacacaactaaaaataacgaacccgacgcctccgaaacacgccgaaaaaaaatacccgactcctaccgccgaaaaacaaacgccgccgtcgccgacaccgccccaaacatcccccgcaaaacgacaacaacaaaaaaaaaaaacgcaaaaaactaaaacgacgaaaaacgcgaaattacaaataaaaaaaaccgcgaaccgaacgacgaccgcgataacctaactactcgaaaaaccgatactataactaaactaccgcgccgacgaactac

SEQ ID NO: 22199 - DNA, 663 bp, Artificial Sequence
  chemically treated genomic DNA (Homo sapiens) CpG-island No: 22199
gagaaagtgaaaatgtttaatttattttgtttggagttttgggttttttttggatacggaatcgagtagtagttttttatttcgttttttttcgtcgttgtaagggaaaaggtcgtttttttcgagtttcggagaggttttttaggaatttagagtttttcggggatatcgtttagttttcggcgttcggtttcgtttttgcgcgaattcggtcgtatttattttttcgggcggtttttttttcgtggtttgtggcgttataaggtttttagtcgtttgtgtttcgcggtgcgcgtttcgtttcgggatttgtcgttatcgacgtttcgttttcggcggtatttatatttaggcgcgttcgcgcgcgcgttcggtttcgtttttgtttggaagtatagttgaagatggcgagttcggcgttttcggagtacgtcgaggagggatgttcggtttttgtcgtcgaggagtaggcgtcgtcgtcgtcgatatcgttttaggtatttttcgtagagcggtagtagtaggaggaggaagcgtaggaagttggggcggcggagggcgcggggttgtaggtggaggaggtcgcgggtcgggcggcggtcgcggtaatttggttgttcggggagtcggtgttgtggttgggttgtcgcgtcgacgagttgt

SEQ ID NO: 22200 - DNA, 663 bp, Artificial Sequence
  chemically treated genomic DNA (Homo sapiens) CpG-island No: 22200
acaactcgtcgacgcgacaacccaaccacaacaccgactccccgaacaaccaaattaccgcgaccgccgcccgacccgcgacctcctccacctacaaccccgcgccctccgccgccccaacttcctacgcttcctcctcctactactaccgctctacgaaaaatacctaaaacgatatcgacgacgacgacgcctactcctcgacgacaaaaaccgaacatccctcctcgacgtactccgaaaacgccgaactcgccatcttcaactatacttccaaacaaaaacgaaaccgaacgcgcgcgcgaacgcgcctaaatataaataccgccgaaaacgaaacgtcgataacgacaaatcccgaaacgaaacgcgcaccgcgaaacacaaacgactaaaaaccttataacgccacaaaccacgaaaaaaaaaccgcccgaaaaaataaatacgaccgaattcgcgcaaaaacgaaaccgaacgccgaaaactaaacgatatccccgaaaaactctaaattcctaaaaaacctctccgaaactcgaaaaaaacgaccttttcccttacaacgacgaaaaaaaacgaaataaaaaactactactcgattccgtatccaaaaaaaacccaaaactccaaacaaaataaattaaacattttcactttctc

SEQ ID NO: 22201 - DNA, 601 bp, Artificial Sequence
  chemically treated genomic DNA (Homo sapiens) CpG-island No: 22201
gttagtcgttgtaggtgtggtgtggagtgcgcgtggtttgttgtgcggttgtttgttttttttcgttcggttcgttttttataggttggtgtagtgggtttcggttcggttcgtaggcgtagtggtgtgtttcgtggttggtggtgtggtcggttgggtcgttcggtttttcgcgagttgcgggtcgttgggttcgtttttgtgttttttttgtttcggtttcgtgtcgttattgtggttgtgagtgtattttgtcgtgatttttgtagatttttgttcgtttgtcgtcggttgttcgttttttgttttgtatgcgttttgtcgggttgtgcgtttttgtgtttgggttgttacgcggaatttgtattatagtttttttgttttttattttggtatgcggtcggtgttgatgcgtgtcgttggtgagtgtgtcgttggtgtgtttggttcgtcgttgtttggtcggtgtcgtgcgcgtggtatgtttgacgttgtcggttgtttcgtgtgttgttgggttgtcgttaggttggttgttgtgtttgggttggcgtgttttgtgttgtttttagtgtggtgtatgttgtttatgcgcgttttt

SEQ ID NO: 22202 - DNA, 601 bp, Artificial Sequence
  chemically treated genomic DNA (Homo sapiens) CpG-island No: 22202
aaaaacgcgcataaacaacatacaccacactaaaaacaacacaaaacacgccaacccaaacacaacaaccaacctaacgacaacccaacaacacacgaaacaaccgacaacgtcaaacataccacgcgcacgacaccgaccaaacaacgacgaaccaaacacaccaacgacacactcaccaacgacacgcatcaacaccgaccgcataccaaaataaaaaacaaaaaaactataatacaaattccgcgtaacaacccaaacacaaaaacgcacaacccgacaaaacgcatacaaaacaaaaaacgaacaaccgacgacaaacgaacaaaaatctacaaaaatcacgacaaaatacactcacaaccacaataacgacacgaaaccgaaacaaaaaaaacacaaaaacgaacccaacgacccgcaactcgcgaaaaaccgaacgacccaaccgaccacaccaccaaccacgaaacacaccactacgcctacgaaccgaaccgaaacccactacaccaacctataaaaaacgaaccgaacgaaaaaaaacaaacaaccgcacaacaaaccacgcgcactccacaccacacctacaacgactaac

SEQ ID NO: 22203 - DNA, 601 bp, Artificial Sequence
  chemically treated genomic DNA (Homo sapiens) CpG-island No: 22203
agagacgcgtatggataatatgtattatattagagatagtataaggtacgttagtttaaatataataattagtttagcgataatttagtagtatacgaagtaatcgatagcgttaaatatattacgcgtacgatatcgattagatagcggcgaattaagtatattagcgatatatttattagcgatacgtattaatatcgatcgtatgttaaaatggaggatagaagaattatggtataaatttcgcgtgataatttagatatagagacgtatagttcgataagacgtatataggataggagacggatagtcgacgataaacgaatagagatttatagaagttacgatagaatgtatttataattataatgacggtacgagatcgaggtagaagaggtataagaacgagtttagcgattcgtagttcgcggaaggtcgagcggtttagtcgattatattattaattacggagtatattattacgtttacgagtcgagtcgaggtttattatattagtttataggagacgagtcgagcgagaaaagataagtaatcgtatagtaagttacgcgtattttatattatatttgtaacgattgat

SEQ ID NO: 22204 - DNA, 601 bp, Artificial Sequence
  chemically treated genomic DNA (Homo sapiens) CpG-island No: 22204
atcaatcgttacaaatataatataaaatacgcgtaacttactatacgattacttatcttttctcgctcgactcgtctcctataaactaatataataaacctcgactcgactcgtaaacgtaataatatactccgtaattaataatataatcgactaaaccgctcgaccttccgcgaactacgaatcgctaaactcgttcttatacctcttctacctcgatctcgtaccgtcattataattataaatacattctatcgtaacttctataaatctctattcgtttatcgtcgactatccgtctcctatcctatatacgtcttatcgaactatacgtctctatatctaaattatcacgcgaaatttataccataattcttctatcctccattttaacatacgatcgatattaatacgtatcgctaataaatatatcgctaatatacttaattcgccgctatctaatcgatatcgtacgcgtaatatatttaacgctatcgattacttcgtatactactaaattatcgctaaactaattattatatttaaactaacgtaccttatactatctctaatataatacatattatccatacgcgtctct

SEQ ID NO: 22205 - DNA, 857 bp, Artificial Sequence
  chemically treated genomic DNA (Homo sapiens) CpG-island No: 22205
ttacggcgcgaaatatgaggagcgtcggtcgtgtgattatatgttcggtttatcgttatatgacgtcgggcgatacgggttatcgcgaggaagggttgagttagtatcgcgtatacgatagtcgtggatagttaattgtcgtgaaagatacgtagggttatgaaacgcggtatgaatataatatcgtcggtgatttgatcgtcgttattgtttcggacggtagtagaaacgggatatagtacgatgcgtggggaaaggtcgttcgtattacgtagggcgggttgacgcgtagtatggaatacgatgttgtcggacgggttattcgtttgattagtgaaaacggtagttatattatttttcgttacgatgtatttgatcggttgatataggaaatcggttttgacggtcgtatatagcgttattattacgaattgatcggtaaatttattcgaagcgaggatgagggtttggttatttattggttttatgacgaagtagatcgatttacgtatcgtatcgtgaagggtgaaatcggagagcggtggtagtatgacgaacgtggttggttgatagatattcgttatattcgcgatagggattacgtgtcggggtatataggtttgtagttatcggtcgttggacggtaaagtttttagaggatatatatcgaagtaattagtttcgttatcgttgatttaattcgaaaatcgtagggtcgaaattttgtaaatcgaagagagttacgggaacggtttacgagggttcgtagcgagaatcgatatatcgggttttatttttttttttattagattggttagtagaataataaaatcgtaagagataaaattcgacgataa

SEQ ID NO: 22206 - DNA, 857 bp, Artificial Sequence
  chemically treated genomic DNA (Homo sapiens) CpG-island No: 22206
ttatcgtcgaattttatctcttacgattttattattctactaaccaatctaataaaaaaaaaaataaaacccgatatatcgattctcgctacgaaccctcgtaaaccgttcccgtaactctcttcgatttacaaaatttcgaccctacgattttcgaattaaatcaacgataacgaaactaattacttcgatatatatcctctaaaaactttaccgtccaacgaccgataactacaaacctatataccccgacacgtaatccctatcgcgaatataacgaatatctatcaaccaaccacgttcgtcatactaccaccgctctccgatttcacccttcacgatacgatacgtaaatcgatctacttcgtcataaaaccaataaataaccaaaccctcatcctcgcttcgaataaatttaccgatcaattcgtaataataacgctatatacgaccgtcaaaaccgatttcctatatcaaccgatcaaatacatcgtaacgaaaaataatataactaccgttttcactaatcaaacgaataacccgtccgacaacatcgtattccatactacgcgtcaacccgccctacgtaatacgaacgacctttccccacgcatcgtactatatcccgtttctactaccgtccgaaacaataacgacgatcaaatcaccgacgatattatattcataccgcgtttcataaccctacgtatctttcacgacaattaactatccacgactatcgtatacgcgatactaactcaacccttcctcgcgataacccgtatcgcccgacgtcatataacgataaaccgaacatataatcacacgaccgacgctcctcatatttcgcgccgtaa

SEQ ID NO: 22207 - DNA, 857 bp, Artificial Sequence
  chemically treated genomic DNA (Homo sapiens) CpG-island No: 22207
ttatcgtcgggttttgttttttacggttttgttgttttgttggttaatttgataaagggggagatggggttcggtgtgtcgattttcgttgcgggttttcgtgggtcgttttcgtggtttttttcggtttatagggtttcggttttgcggttttcggattgggttagcggtggcggggttggttgtttcggtgtgtgttttttgggagttttgtcgtttagcggtcggtggttgtaggtttgtatgtttcggtacgtggtttttgtcgcggatatggcggatgtttgttagttagttacgttcgttatgttgttatcgtttttcggttttattttttacggtgcggtgcgtgagtcggtttgtttcgttatagggttagtgggtgattagatttttattttcgtttcggataagtttgtcggttagttcgtggtgataacgttgtgtgcggtcgttaaagtcggttttttgtattagtcggttaagtatatcgtaacggaaggtggtgtggttgtcgtttttattggttaggcggatgattcgttcggtagtatcgtattttatattgcgcgttagttcgttttgcgtggtacggacggtttttttttacgtatcgtattgtgtttcgtttttgttgtcgttcggggtaatgacggcggttaggttatcggcgatgttgtatttatatcgcgttttatggttttgcgtgttttttacggtaattaattgtttacggttgtcgtatgcgcggtattgatttagttttttttcgcggtgattcgtatcgttcgacgttatgtaacggtaaatcggatatgtggttatacgatcgacgttttttatgtttcgcgtcgtgg

SEQ ID NO: 22208 - DNA, 857 bp, Artificial Sequence
  chemically treated genomic DNA (Homo sapiens) CpG-island No: 22208
ccacgacgcgaaacataaaaaacgtcgatcgtataaccacatatccgatttaccgttacataacgtcgaacgatacgaatcaccgcgaaaaaaaactaaatcaataccgcgcatacgacaaccgtaaacaattaattaccgtaaaaaacacgcaaaaccataaaacgcgatataaatacaacatcgccgataacctaaccgccgtcattaccccgaacgacaacaaaaacgaaacacaatacgatacgtaaaaaaaaaccgtccgtaccacgcaaaacgaactaacgcgcaatataaaatacgatactaccgaacgaatcatccgcctaaccaataaaaacgacaaccacaccaccttccgttacgatatacttaaccgactaatacaaaaaaccgactttaacgaccgcacacaacgttatcaccacgaactaaccgacaaacttatccgaaacgaaaataaaaatctaatcacccactaaccctataacgaaacaaaccgactcacgcaccgcaccgtaaaaaataaaaccgaaaaacgataacaacataacgaacgtaactaactaacaaacatccgccatatccgcgacaaaaaccacgtaccgaaacatacaaacctacaaccaccgaccgctaaacgacaaaactcccaaaaaacacacaccgaaacaaccaaccccgccaccgctaacccaatccgaaaaccgcaaaaccgaaaccctataaaccgaaaaaaaccacgaaaacgacccacgaaaacccgcaacgaaaatcgacacaccgaaccccatctccccctttatcaaattaaccaacaaaacaacaaaaccgtaaaaaacaaaacccgacgataa

SEQ ID NO: 22209 - DNA, 628 bp, Artificial Sequence
  chemically treated genomic DNA (Homo sapiens) CpG-island No: 22209
  unsure (247)
cgtatttcggtcgttagcgggtaaaggtttgagcgtcgtagttttagtcgttggagttgattagttttttttttttttttaacgtgttacgtatcgcgttatcgaaagcgattagtcgttgtgggatgagtgtacgtagcgcggtattattcgttagtagatcgtgttttagtttttgaattaacgttttggcggtggtgggcggtacggaagtaattatattgagaaatttatattcgaaatttangcgggtggggagggggatggggattaattagcggcgtttatcgtttatcgttataaaatgtttaaatttgttgttgataattgagtatttttggttcggcggtttcgaagatgcggtgttcgttggtcggatgatttaatatacgtatattgttttacgtgtttttacgatttttagcgacgaatatagtcgtaggaagttgtcggaaatatagcggttcgcgttacggaagtcgagtatcgggttttttttatttggttcgtaacgtttattatcgattaggttggtatattcgttcgattttttattcgagagacggtttttttttttttttttatcgttattgttcgatttattatttcgtgttttttcgttcgtttt

SEQ ID NO: 22210 - DNA, 628 bp, Artificial Sequence
  chemically treated genomic DNA (Homo sapiens) CpG-island No: 22210
  unsure (382)
aaaacgaacgaaaaaacacgaaataataaatcgaacaataacgataaaaaaaaaaaaaaaaaccgtctctcgaataaaaaatcgaacgaatataccaacctaatcgataataaacgttacgaaccaaataaaaaaaacccgatactcgacttccgtaacgcgaaccgctatatttccgacaacttcctacgactatattcgtcgctaaaaatcgtaaaaacacgtaaaacaatatacgtatattaaatcatccgaccaacgaacaccgcatcttcgaaaccgccgaaccaaaaatactcaattatcaacaacaaatttaaacattttataacgataaacgataaacgccgctaattaatccccatccccctccccacccgcntaaatttcgaatataaatttctcaatataattacttccgtaccgcccaccaccgccaaaacgttaattcaaaaactaaaacacgatctactaacgaataataccgcgctacgtacactcatcccacaacgactaatcgctttcgataacgcgatacgtaacacgttaaaaaaaaaaaaaaaactaatcaactccaacgactaaaactacgacgctcaaacctttacccgctaacgaccgaaatacg

SEQ ID NO: 22211 - DNA, 628 bp, Artificial Sequence
  chemically treated genomic DNA (Homo sapiens) CpG-island No: 22211
  unsure (382)
aggacgagcggaggaatacgagataatgagtcgagtagtgacgatgagagagagagagagaatcgtttttcggatgagaaatcgaacgaatatgttaatttggtcggtggtgagcgttacgagttagatgaagagaattcgatgttcggttttcgtggcgcgggtcgttatgttttcgatagttttttgcgattgtgttcgtcgttggagatcgtgaaggtacgtgaaatagtgtgcgtatgttagattattcggttagcgaatatcgtattttcgaagtcgtcggattagaggtgtttagttattagtaataggtttgaatattttatggcggtgagcggtaagcgtcgttggttgatttttatttttttttttattcgtntggatttcgggtgtgggttttttaatgtgattattttcgtatcgtttattatcgttagggcgttgatttaggggttgaaatacgatttgttggcggatgatatcgcgttacgtgtatttattttataacggttgatcgttttcgatgacgcggtacgtagtacgttgaaagaggaggaaaaattggttaattttagcgattggggttacgacgtttaggtttttgttcgttggcgatcggagtacg

SEQ ID NO: 22212 - DNA, 628 bp, Artificial Sequence
  chemically treated genomic DNA (Homo sapiens) CpG-island No: 22212
  unsure (247)
cgtactccgatcgccaacgaacaaaaacctaaacgtcgtaaccccaatcgctaaaattaaccaatttttcctcctctttcaacgtactacgtaccgcgtcatcgaaaacgatcaaccgttataaaataaatacacgtaacgcgatatcatccgccaacaaatcgtatttcaacccctaaatcaacgccctaacgataataaacgatacgaaaataatcacattaaaaaacccacacccgaaatccanacgaataaaaaaaaaaataaaaatcaaccaacgacgcttaccgctcaccgccataaaatattcaaacctattactaataactaaacacctctaatccgacgacttcgaaaatacgatattcgctaaccgaataatctaacatacgcacactatttcacgtaccttcacgatctccaacgacgaacacaatcgcaaaaaactatcgaaaacataacgacccgcgccacgaaaaccgaacatcgaattctcttcatctaactcgtaacgctcaccaccgaccaaattaacatattcgttcgatttctcatccgaaaaacgattctctctctctctctcatcgtcactactcgactcattatctcgtattcctccgctcgtcct

SEQ ID NO: 22213 - DNA, 656 bp, Artificial Sequence
  chemically treated genomic DNA (Homo sapiens) CpG-island No: 22213
gcgaggtaacgcgtttcgttacgattagcgcggggtaggacgggtttgtagttttattaagcggttgcgtattttgtacgttgcggattcgtttcggatagttcgttggaatgtgtgagagtcgaatcggttattgtttattgcgtaaaaaacggggacgcggcggtttttttttggcggtattattgggaatgtttcgttggtgggatggtaagagcggtcgttgcgggtatgataggtagtagtggttttcggatgttcggaggtggatgtgggttgtcgcgttcgtacgattatcgacgtcgttgacgtggtgaacgtgcgcgtatatggcgaattcgagttgtggtttgcggtgagtaagtgttggtaattatcggtatgatcggttttggtttgtggttgttgttttttggttacggcggcgagaaagttagtatcgataacgtgtggcggtacggtggttttttcgttatcggttggaatgggttgattttgtcgttggcggtaattatgttttttttcggcggtttggagttgattgggattattgtcggtgaagcgcgcgattcggaaaaaagtattttaaaagcggtaaattaggtggtgtatcgtattttgttgttgtatatcggtttattggtggttttattggt

SEQ ID NO: 22214 - DNA, 656 bp, Artificial Sequence
  chemically treated genomic DNA (Homo sapiens) CpG-island No: 22214
accaataaaaccaccaataaaccgatatacaacaacaaaatacgatacaccacctaatttaccgcttttaaaatacttttttccgaatcgcgcgcttcaccgacaataatcccaatcaactccaaaccgccgaaaaaaaacataattaccgccaacgacaaaatcaacccattccaaccgataacgaaaaaaccaccgtaccgccacacgttatcgatactaactttctcgccgccgtaaccaaaaaacaacaaccacaaaccaaaaccgatcataccgataattaccaacacttactcaccgcaaaccacaactcgaattcgccatatacgcgcacgttcaccacgtcaacgacgtcgataatcgtacgaacgcgacaacccacatccacctccgaacatccgaaaaccactactacctatcatacccgcaacgaccgctcttaccatcccaccaacgaaacattcccaataataccgccaaaaaaaaaccgccgcgtccccgttttttacgcaataaacaataaccgattcgactctcacacattccaacgaactatccgaaacgaatccgcaacgtacaaaatacgcaaccgcttaataaaactacaaacccgtcctaccccgcgctaatcgtaacgaaacgcgttacctcgc

SEQ ID NO: 22215 - DNA, 656 bp, Artificial Sequence
  chemically treated genomic DNA (Homo sapiens) CpG-island No: 22215
gttagtaaaattattagtgaatcgatgtataatagtaggatgcgatatattatttgatttatcgtttttggaatgttttttttcggatcgcgcgttttatcggtagtaattttaattagttttagatcgtcgaaggagaatataattatcgttagcgataaaattagtttattttagtcggtggcgaagaaattatcgtatcgttatacgttgtcgatattggttttttcgtcgtcgtgattagaaaatagtagttataggttaaagtcgattatatcgatgattgttagtatttatttatcgtaaattataattcggattcgttatatacgcgtacgtttattacgttaacggcgtcgatgatcgtacgaacgcggtagtttatatttattttcgaatattcgggaattattattgtttattatgttcgtagcggtcgtttttgttattttattagcggaatatttttagtagtgtcgttaggaggaagtcgtcgcgttttcgttttttgcgtagtgggtaatgatcgattcggtttttatatattttagcgggttattcggagcggattcgtagcgtgtaaaatacgtaatcgtttgatggggttgtaaattcgttttgtttcgcgttaatcgtgacgaaacgcgttgtttcgt

SEQ ID NO: 22216 - DNA, 656 bp, Artificial Sequence
  chemically treated genomic DNA (Homo sapiens) CpG-island No: 22216
acgaaacaacgcgtttcgtcacgattaacgcgaaacaaaacgaatttacaaccccatcaaacgattacgtattttacacgctacgaatccgctccgaataacccgctaaaatatataaaaaccgaatcgatcattacccactacgcaaaaaacgaaaacgcgacgacttcctcctaacgacactactaaaaatattccgctaataaaataacaaaaacgaccgctacgaacataataaacaataataattcccgaatattcgaaaataaatataaactaccgcgttcgtacgatcatcgacgccgttaacgtaataaacgtacgcgtatataacgaatccgaattataatttacgataaataaatactaacaatcatcgatataatcgactttaacctataactactattttctaatcacgacgacgaaaaaaccaatatcgacaacgtataacgatacgataatttcttcgccaccgactaaaataaactaattttatcgctaacgataattatattctccttcgacgatctaaaactaattaaaattactaccgataaaacgcgcgatccgaaaaaaaacattccaaaaacgataaatcaaataatatatcgcatcctactattatacatcgattcactaataattttactaac

SEQ ID NO: 22217 - DNA, 626 bp, Artificial Sequence
  chemically treated genomic DNA (Homo sapiens) CpG-island No: 22217
agcgttcgggcgcggtgtttaatgtgttagttagcgttatcgtaatgttgtacggtttttcgtcggtcgaagtcgtcgcgttttatacgcgatattcgttataacggcgacgtgcgtgattcgcgtagtatacggaaatgatgtgttttacggaaaaatgtcgttagattcgtggttagcgaattgataaacgtttgttatttatcgttgggtagattaatagtagaaggtatataatgatcgaaattcgtagtttaagatcgtacgagaatagtcggtgaattacgttcgatagggcgtaaagattcggtttttaatattacgttattttaaatgtttgaaagtaggtcgtattgataaaaatatgtcgagaaatatttgttttagtcgatcggtcgtttttcgcgttagtcggaattcgtaaggtacgtaatttacgtatatacgtacgcgttggaaagattattataacgataatcggcgagtagcgcggttcggtaaaattttggaagaacggagtagtaggcgaaaggttagtatacggcgacgcgtagcgaagggcgatttagtaagagcgacgatacggatagacggattaaaggaaacgtgattcgcgttaggacgga

SEQ ID NO: 22218 - DNA, 626 bp, Artificial Sequence
  chemically treated genomic DNA (Homo sapiens) CpG-island No: 22218
tccgtcctaacgcgaatcacgtttcctttaatccgtctatccgtatcgtcgctcttactaaatcgcccttcgctacgcgtcgccgtatactaacctttcgcctactactccgttcttccaaaattttaccgaaccgcgctactcgccgattatcgttataataatctttccaacgcgtacgtatatacgtaaattacgtaccttacgaattccgactaacgcgaaaaacgaccgatcgactaaaacaaatatttctcgacatatttttatcaatacgacctactttcaaacatttaaaataacgtaatattaaaaaccgaatctttacgccctatcgaacgtaattcaccgactattctcgtacgatcttaaactacgaatttcgatcattatataccttctactattaatctacccaacgataaataacaaacgtttatcaattcgctaaccacgaatctaacgacatttttccgtaaaacacatcatttccgtatactacgcgaatcacgcacgtcgccgttataacgaatatcgcgtataaaacgcgacgacttcgaccgacgaaaaaccgtacaacattacgataacgctaactaacacattaaacaccgcgcccgaacgct

SEQ ID NO: 22219 - DNA, 626 bp, Artificial Sequence
  chemically treated genomic DNA (Homo sapiens) CpG-island No: 22219
ttcgttttggcgcgggttacgttttttttggttcgtttgttcgtgtcgtcgtttttgttggatcgtttttcgttgcgcgtcgtcgtgtgttggtttttcgtttgttgtttcgtttttttagggttttgtcgggtcgcgttgttcgtcggttgtcgttgtgatagtttttttagcgcgtgcgtgtgtgcgtgggttacgtgttttgcgggtttcgattggcgcggggggcggtcggtcggttgaggtaggtatttttcggtatgtttttgttagtgcggtttgtttttaggtatttggggtagcgtggtgttgggagtcgggtttttgcgttttatcgagcgtggtttatcggttgttttcgtgcggttttgggttgcgggtttcggttattgtgtgttttttgttgttagtttgtttagcggtgagtggtaggcgtttattaattcgttgattacgaatttgacggtattttttcgtgaggtatattattttcgtgtgttgcgcggattacgtacgtcgtcgttgtggcgagtatcgcgtatggagcgcggcggtttcgatcggcgaagagtcgtatagtattgcgatgacgttggttgatatattgggtatcgcgttcggacgtt

SEQ ID NO: 22220 - DNA, 626 bp, Artificial Sequence
  chemically treated genomic DNA (Homo sapiens) CpG-island No: 22220
aacgtccgaacgcgatacccaatatatcaaccaacgtcatcgcaatactatacgactcttcgccgatcgaaaccgccgcgctccatacgcgatactcgccacaacgacgacgtacgtaatccgcgcaacacacgaaaataatatacctcacgaaaaaataccgtcaaattcgtaatcaacgaattaataaacgcctaccactcaccgctaaacaaactaacaacaaaaaacacacaataaccgaaacccgcaacccaaaaccgcacgaaaacaaccgataaaccacgctcgataaaacgcaaaaacccgactcccaacaccacgctaccccaaatacctaaaaacaaaccgcactaacaaaaacataccgaaaaatacctacctcaaccgaccgaccgccccccgcgccaatcgaaacccgcaaaacacgtaacccacgcacacacgcacgcgctaaaaaaactatcacaacgacaaccgacgaacaacgcgacccgacaaaaccctaaaaaaacgaaacaacaaacgaaaaaccaacacacgacgacgcgcaacgaaaaacgatccaacaaaaacgacgacacgaacaaacgaaccaaaaaaaacgtaacccgcgccaaaacgaa

SEQ ID NO: 22221 - DNA, 949 bp, Artificial Sequence
  chemically treated genomic DNA (Homo sapiens) CpG-island No: 22221
cgtttatacgttcgggttgtcgttcgcgttaaaagtcgtgggcgtgtaggttcgggttgcgttttgtcgtcgtcgttatttcgcgcgcgttttttttcggcgtcggcgggttgttcgcggtgtcggttacgtttatcgttgtttatttagcgttagacgagtttacggtaatttcgatgatgtcgttgatcgcgtagtttgttaatcggttcgttcgttagcgttttcggcgatacgtggtcgaatttggcgttcgtcgattcgttcgagaagcgcgtatttggtattatgcgatttcgttttgttttacgatatatgttttagcgcggaggtgagttggtaggttttttttatgtcggtgtcggacggttcgtcgtcgatcgttattatgatatcgttttgtataattttttttcggttgatcgttttgatcgtttgcgttttcgagataaatattcgtattcggtcggtgtggtggtatacgttattttcgtttattatcgacgggtcgatcgtcgtggttttgattatcgaatttttcggcgttatgttgttcgtcgggaagtagatcgtttaggttagttttttcgtttgttgtttttttcggcggtaggattacgttattcggttttatttcgttttgttcgcgttatgtatttggcggaaggcgcgttcgtcgttcggagtttgttattatttaaggttttcgttttatcgttggtcgggtacggatattgcgtttagatttattaggttaagttttttcgtgtggttttgtttcggggtacggtcgtaagtaggggtttaggcggggatattcgggttgtggtgacgtgtttaagggcgataagcggagcgttataattatatttcgattatgtttttcgtgtgatgagataggagggtgaaaatgtatgggatttcgtagtatattatattgagagatgga

SEQ ID NO: 22222 - DNA, 949 bp, Artificial Sequence
  chemically treated genomic DNA (Homo sapiens) CpG-island No: 22222
tccatctctcaatataatatactacgaaatcccatacattttcaccctcctatctcatcacacgaaaaacataatcgaaatataattataacgctccgcttatcgcccttaaacacgtcaccacaacccgaatatccccgcctaaacccctacttacgaccgtaccccgaaacaaaaccacacgaaaaaacttaacctaataaatctaaacgcaatatccgtacccgaccaacgataaaacgaaaaccttaaataataacaaactccgaacgacgaacgcgccttccgccaaatacataacgcgaacaaaacgaaataaaaccgaataacgtaatcctaccgccgaaaaaaacaacaaacgaaaaaactaacctaaacgatctacttcccgacgaacaacataacgccgaaaaattcgataatcaaaaccacgacgatcgacccgtcgataataaacgaaaataacgtataccaccacaccgaccgaatacgaatatttatctcgaaaacgcaaacgatcaaaacgatcaaccgaaaaaaaattatacaaaacgatatcataataacgatcgacgacgaaccgtccgacaccgacataaaaaaaacctaccaactcacctccgcgctaaaacatatatcgtaaaacaaaacgaaatcgcataataccaaatacgcgcttctcgaacgaatcgacgaacgccaaattcgaccacgtatcgccgaaaacgctaacgaacgaaccgattaacaaactacgcgatcaacgacatcatcgaaattaccgtaaactcgtctaacgctaaataaacaacgataaacgtaaccgacaccgcgaacaacccgccgacgccgaaaaaaaacgcgcgcgaaataacgacgacgacaaaacgcaacccgaacctacacgcccacgacttttaacgcgaacgacaacccgaacgtataaacg

SEQ ID NO: 22223 - DNA, 949 bp, Artificial Sequence
  chemically treated genomic DNA (Homo sapiens) CpG-island No: 22223
tttattttttagtatgatgtgttgcggggttttatatatttttatttttttgttttattatacggggggtataatcggagtgtggttgtagcgtttcgtttatcgtttttggatacgttattatagttcggatattttcgtttgggtttttatttgcggtcgtgtttcgaagtaaagttatacgggggaatttggtttggtgaatttgagcgtaatgttcgtgttcggttaacggtggggcgagaattttgaatggtggtaggtttcgagcgacgggcgcgtttttcgttaggtgtatggcgcgagtaggacggggtagagtcggatgacgtgattttgtcgtcggagaaggtaataagcgaaagggttgatttggacggtttgtttttcgacgggtaatatagcgtcggaaggttcggtgattaaggttacggcgatcgattcgtcggtggtgggcgaagatggcgtatattattatatcggtcgggtgcgggtgtttgtttcggaagcgtaggcgattaaggcgattaatcgggaagagattgtgtagggcgatattatggtggcgatcggcggcgggtcgttcggtatcggtatggaagagatttattagtttattttcgcgttaaagtatatatcgtggggtaagacggagtcgtataatattagatgcgcgtttttcgggcgagtcgacgggcgttagattcggttacgtgtcgtcggaggcgttggcgggcgggtcgattggtaagttgcgcgattaacgatattatcgagattgtcgtggattcgtttgacgttaaatgggtagcgatgaacgtaatcggtatcgcggataattcgtcgacgtcggaagagggcgcgcgcgaggtggcggcggcggtagagcgtaattcggatttgtacgtttacgatttttagcgcggacgatagttcggacgtgtgggcg

SEQ ID NO: 22224 - DNA, 949 bp, Artificial Sequence
  chemically treated genomic DNA (Homo sapiens) CpG-island No: 22224
cgcccacacgtccgaactatcgtccgcgctaaaaatcgtaaacgtacaaatccgaattacgctctaccgccgccgccacctcgcgcgcgccctcttccgacgtcgacgaattatccgcgataccgattacgttcatcgctacccatttaacgtcaaacgaatccacgacaatctcgataatatcgttaatcgcgcaacttaccaatcgacccgcccgccaacgcctccgacgacacgtaaccgaatctaacgcccgtcgactcgcccgaaaaacgcgcatctaatattatacgactccgtcttaccccacgatatatactttaacgcgaaaataaactaataaatctcttccataccgataccgaacgacccgccgccgatcgccaccataatatcgccctacacaatctcttcccgattaatcgccttaatcgcctacgcttccgaaacaaacacccgcacccgaccgatataataatatacgccatcttcgcccaccaccgacgaatcgatcgccgtaaccttaatcaccgaaccttccgacgctatattacccgtcgaaaaacaaaccgtccaaatcaaccctttcgcttattaccttctccgacgacaaaatcacgtcatccgactctaccccgtcctactcgcgccatacacctaacgaaaaacgcgcccgtcgctcgaaacctaccaccattcaaaattctcgccccaccgttaaccgaacacgaacattacgctcaaattcaccaaaccaaattcccccgtataactttacttcgaaacacgaccgcaaataaaaacccaaacgaaaatatccgaactataataacgtatccaaaaacgataaacgaaacgctacaaccacactccgattataccccccgtataataaaacaaaaaaataaaaatatataaaaccccgcaacacatcatactaaaaaataaa

SEQ ID NO: 22225 - DNA, 518 bp, Artificial Sequence
  chemically treated genomic DNA (Homo sapiens) CpG-island No: 22225
gatatgggcggttcggtaaataaagtagcgtacgtattcggtgtgggtttgttgagtatttaaatttatggttcgatggcggcgattatggcggtaggtatggtgttatcgttggtaatgggtttggtaataatggtggcgcgtcgtaaattcgataaagcgtagtaggaaggtggtaaagtcgttttggtattgggattgtgttttatttcggaaggtgtaatttcgtttgttgttcgtgattcgatgcgtgtgttgtcgtgttgtatcgtgggtggggcgttgattggcgtaattttaatggcgattggtgcgaaattgatggtatcgtacggtggtttgtttgttttgttgatttttggcgttattacgtcggtattgggttatttggtagtaattattgtcggtacgttggtggcgggtttggtttatgtttttttgaaacgttcggaagtggacgtagtagcgaaagtagcgtaatataaggtgtgtttagggtagaaattttttgttttgta

SEQ ID NO: 22226 - DNA, 518 bp, Artificial Sequence
  chemically treated genomic DNA (Homo sapiens) CpG-island No: 22226
tacaaaacaaaaaatttctaccctaaacacaccttatattacgctactttcgctactacgtccacttccgaacgtttcaaaaaaacataaaccaaacccgccaccaacgtaccgacaataattactaccaaataacccaataccgacgtaataacgccaaaaatcaacaaaacaaacaaaccaccgtacgataccatcaatttcgcaccaatcgccattaaaattacgccaatcaacgccccacccacgatacaacacgacaacacacgcatcgaatcacgaacaacaaacgaaattacaccttccgaaataaaacacaatcccaataccaaaacgactttaccaccttcctactacgctttatcgaatttacgacgcgccaccattattaccaaacccattaccaacgataacaccatacctaccgccataatcgccgccatcgaaccataaatttaaatactcaacaaacccacaccgaatacgtacgctactttatttaccgaaccgcccatatc

SEQ ID NO: 22227 - DNA, 518 bp, Artificial Sequence
  chemically treated genomic DNA (Homo sapiens) CpG-island No: 22227
tataggataggaaatttttgttttgaatatattttgtattacgttgttttcgttattgcgtttattttcggacgttttaggaaggtataggttaaattcgttattagcgtatcggtaataattgttattaggtaatttaatatcggcgtaatagcgttagggattagtagaataaatagattatcgtgcggtgttattagtttcgtattaatcgttattgagattgcgttagttagcgttttatttacgatatagtacggtagtatacgtatcggattacgagtagtaaacggaattgtatttttcgaaatgaagtatagttttaatattagagcggttttgttatttttttgttgcgttttgtcgaatttgcgacgcgttattattgttgttagatttattgttagcggtggtattatatttgtcgttataatcgtcgttatcgggttataggtttgagtatttagtagatttatatcgaatgcgtacgttgttttgtttatcggatcgtttatgtt

SEQ ID NO: 22228 - DNA, 518 bp, Artificial Sequence
  chemically treated genomic DNA (Homo sapiens) CpG-island No: 22228
aacataaacgatccgataaacaaaacaacgtacgcattcgatataaatctactaaatactcaaacctataacccgataacgacgattataacgacaaatataataccaccgctaacaataaatctaacaacaataataacgcgtcgcaaattcgacaaaacgcaacaaaaaaataacaaaaccgctctaatattaaaactatacttcatttcgaaaaatacaattccgtttactactcgtaatccgatacgtatactaccgtactatatcgtaaataaaacgctaactaacgcaatctcaataacgattaatacgaaactaataacaccgcacgataatctatttattctactaatccctaacgctattacgccgatattaaattacctaataacaattattaccgatacgctaataacgaatttaacctataccttcctaaaacgtccgaaaataaacgcaataacgaaaacaacgtaatacaaaatatattcaaaacaaaaatttcctatcctata

SEQ ID NO: 22229 - DNA, 635 bp, Artificial Sequence
  chemically treated genomic DNA (Homo sapiens) CpG-island No: 22229
tagtcgtttaacggtacggttttatcgtcgtttttgtagtttttgacgaagacggaatcggtttttaggcgttcggtttatgcggtgcgcgcgggagaggtcgcgcgtttatatcgtcgcgttaaggtcgtattggttgtcgttggtaagttgtagcgtttgtttttttgatgtgaaacgcgtgattattagtatcggatcgaaaattttttcgcgatttaaggacgtattcgggtttatatttataaagatggtcgggtcgatggcggtagttagttcggcgttacggttatttaataatagttgttttttgttttcgttttttcgaattaaagttattgaatcgagtcggcgttggcgtcgtcgattaaggtgttttggtgggtgtcgatttagtggattgttcggttggtcgtttggttttgcgtgtttatcgcgttaaattatcgggaggtttttttcgaaggggtttcgggatgtattttttttttttaaagtcgggggggcgtgcgattatagggttttaaaagttttttgcggttcgagtagtttgtggtcgtaatatatatcgtgggtagaggatttataaacggggagggatattatacggttttttcggttttttttttttttgt

SEQ ID NO: 22230 - DNA, 635 bp, Artificial Sequence
  chemically treated genomic DNA (Homo sapiens) CpG-island No: 22230
acaaaaaaaaaaaaaaccgaaaaaaccgtataatatccctccccgtttataaatcctctacccacgatatatattacgaccacaaactactcgaaccgcaaaaaacttttaaaaccctataatcgcacgcccccccgactttaaaaaaaaaaaatacatcccgaaaccccttcgaaaaaaacctcccgataatttaacgcgataaacacgcaaaaccaaacgaccaaccgaacaatccactaaatcgacacccaccaaaacaccttaatcgacgacgccaacgccgactcgattcaataactttaattcgaaaaaacgaaaacaaaaaacaactattattaaataaccgtaacgccgaactaactaccgccatcgacccgaccatctttataaatataaacccgaatacgtccttaaatcgcgaaaaaattttcgatccgatactaataatcacgcgtttcacatcaaaaaaacaaacgctacaacttaccaacgacaaccaatacgaccttaacgcgacgatataaacgcgcgacctctcccgcgcgcaccgcataaaccgaacgcctaaaaaccgattccgtcttcgtcaaaaactacaaaaacgacgataaaaccgtaccgttaaacgacta

SEQ ID NO: 22231 - DNA, 635 bp, Artificial Sequence
  chemically treated genomic DNA (Homo sapiens) CpG-island No: 22231
gtaggggggagaagagtcgggaagatcgtgtggtattttttttcgtttataagttttttatttacggtgtatattgcggttataagttgttcgagtcgtaaaagatttttagggttttgtaatcgtacgttttttcggttttaaagagggaaggtgtatttcgaagttttttcggagagagtttttcggtaatttagcgcggtgaatacgtagggttaaacggttagtcgggtaatttattggatcggtatttattagggtattttaatcgacggcgttaacgtcgattcggtttaatagttttaattcgggaaggcgaaagtaaagggtaattgttgttggatggtcgtaacgtcgggttggttgtcgttatcggttcgattatttttgtggatgtggattcgaatgcgtttttaagtcgcgaagagattttcggttcggtgttggtggttacgcgttttatattagaagaataggcgttatagtttgttaacgatagttagtacggttttggcgcggcggtatggacgcgcgatttttttcgcgcgtatcgtatgagtcggacgtttgaaagtcggtttcgttttcgttaaaaattataaggacggcgataggatcgtgtcgttgggcggtta

SEQ ID NO: 22232 - DNA, 635 bp, Artificial Sequence
  chemically treated genomic DNA (Homo sapiens) CpG-island No: 22232
taaccgcccaacgacacgatcctatcgccgtccttataatttttaacgaaaacgaaaccgactttcaaacgtccgactcatacgatacgcgcgaaaaaaatcgcgcgtccataccgccgcgccaaaaccgtactaactatcgttaacaaactataacgcctattcttctaatataaaacgcgtaaccaccaacaccgaaccgaaaatctcttcgcgacttaaaaacgcattcgaatccacatccacaaaaataatcgaaccgataacgacaaccaacccgacgttacgaccatccaacaacaattaccctttactttcgccttcccgaattaaaactattaaaccgaatcgacgttaacgccgtcgattaaaataccctaataaataccgatccaataaattacccgactaaccgtttaaccctacgtattcaccgcgctaaattaccgaaaaactctctccgaaaaaacttcgaaatacaccttccctctttaaaaccgaaaaaacgtacgattacaaaaccctaaaaatcttttacgactcgaacaacttataaccgcaatatacaccgtaaataaaaaacttataaacgaaaaaaaataccacacgatcttcccgactcttctcccccctac

SEQ ID NO: 22233 - DNA, 904 bp, Artificial Sequence
  chemically treated genomic DNA (Homo sapiens) CpG-island No: 22233
ttttaattagttaattcgtatttatatatattttatatttttattattaatatttatagtttttttttcgcggtatttcgatttttatattattattattattttatcggcgcgttttcgtatttttttatttaatatacgtagtcgttattatcgattaataaaagtaattacgaatagtatcgacggttatttattttatttttagtagtttaataagtatatatatattatacgatcgaaaataataacgttataatataattaacgatatatacgtttttagatatatattaaaattttattacgcgatttaggaagagtataagaacgatatcgagataagatagattcgaattatatttcgtataataatacgcgagtcgagtaaagattaatacgagtaggattatacgaaatagtatataatatacgtatatattttaatacgattaaagttatattatataaaataagattataataaattatatttaaatacgcgagttatatattatcgcgcgaagttagaagtagtcgataataagtaagtatattataatatcgaagaacgtcgtatattaatatattcgagttaaaagcgaacgtatcgtagataacgttacgacgataatttcgagttatatacgttagttatagaaataatatacgtataataaaatcggaagtttaagataataacgtatgtaagcgtatcgatcgtaataataaatatatacggaagtatgtacgacgagtaatacgcgatatatttagtagatatttaaattatagtatcgaagtcgatacgagataatatttatcgttaatataatagtaacgaatatattaaatattagagcgacgaaaattatattatatacgaataaaacgtacgaattat

SEQ ID NO: 22234 - DNA, 904 bp, Artificial Sequence
  chemically treated genomic DNA (Homo sapiens) CpG-island No: 22234
ataattcgtacgttttattcgtatataatataattttcgtcgctctaatatttaatatattcgttactattatattaacgataaatattatctcgtatcgacttcgatactataatttaaatatctactaaatatatcgcgtattactcgtcgtacatacttccgtatatatttattattacgatcgatacgcttacatacgttattatcttaaacttccgattttattatacgtatattatttctataactaacgtatataactcgaaattatcgtcgtaacgttatctacgatacgttcgcttttaactcgaatatattaatatacgacgttcttcgatattataatatacttacttattatcgactacttctaacttcgcgcgataatatataactcgcgtatttaaatataatttattataatcttattttatataatataactttaatcgtattaaaatatatacgtatattatatactatttcgtataatcctactcgtattaatctttactcgactcgcgtattattatacgaaatataattcgaatctatcttatctcgatatcgttcttatactcttcctaaatcgcgtaataaaattttaatatatatctaaaaacgtatatatcgttaattatattataacgttattattttcgatcgtataatatatatatacttattaaactactaaaaataaaataaataaccgtcgatactattcgtaattacttttattaatcgataataacgactacgtatattaaataaaaaaatacgaaaacgcgccgataaaataataataataatataaaaatcgaaataccgcgaaaaaaaaactataaatattaataataaaaatataaaatatatataaatacgaattaactaattaaaa

SEQ ID NO: 22235 - DNA, 904 bp, Artificial Sequence
  chemically treated genomic DNA (Homo sapiens) CpG-island No: 22235
gtggttcgtgcgttttattcgtgtgtggtatggttttcgtcgttttggtgtttggtgtgttcgttgttgttgtgttggcggtgagtgttgtttcgtgtcggtttcggtgttgtggtttgggtgtttgttgagtgtgtcgcgtgttgttcgtcgtgtatgttttcgtgtgtgtttgttgttgcggtcggtgcgtttgtatgcgttgttgttttgggttttcggttttgttgtgcgtgtgttgtttttgtggttggcgtgtgtggttcggggttgtcgtcgtgacgttgtttgcggtgcgttcgtttttgattcgagtgtgttggtgtgcggcgtttttcggtgttgtggtgtgtttgtttgttgtcggttgtttttggtttcgcgcgatggtgtgtggttcgcgtgtttgggtgtggtttgttgtggttttgttttgtgtgatgtggttttagtcgtgttggggtgtgtgcgtgtgttgtgtgttgtttcgtgtggttttgttcgtgttggtttttgttcggttcgcgtgttgttgtgcggggtgtggttcgggtttgttttgtttcggtgtcgtttttgtgttttttttgggtcgcgtggtggggttttggtgtgtgtttgagggcgtgtgtgtcgttggttgtgttgtggcgttgttgttttcggtcgtgtggtgtgtgtgtgtttgttgggttgttgggggtggggtgggtggtcgtcggtgttgttcgtggttgtttttgttggtcggtggtggcggttgcgtgtgttgggtgggggggtgcgggggcgcgtcggtggggtggtggtggtggtgtgggggtcggggtgtcgcggggggggggttgtgggtgttggtggtgggggtgtggggtgtgtgtgggtgcgggttggttggttgggg

SEQ ID NO: 22236 - DNA, 904 bp, Artificial Sequence
  chemically treated genomic DNA (Homo sapiens) CpG-island No: 22236
ccccaaccaaccaacccgcacccacacacaccccacacccccaccaccaacacccacaaccccccccccgcgacaccccgacccccacaccaccaccaccaccccaccgacgcgcccccgcacccccccacccaacacacgcaaccgccaccaccgaccaacaaaaacaaccacgaacaacaccgacgaccacccaccccacccccaacaacccaacaaacacacacacaccacacgaccgaaaacaacaacgccacaacacaaccaacgacacacacgccctcaaacacacaccaaaaccccaccacgcgacccaaaaaaaacacaaaaacgacaccgaaacaaaacaaacccgaaccacaccccgcacaacaacacgcgaaccgaacaaaaaccaacacgaacaaaaccacacgaaacaacacacaacacacgcacacaccccaacacgactaaaaccacatcacacaaaacaaaaccacaacaaaccacacccaaacacgcgaaccacacaccatcgcgcgaaaccaaaaacaaccgacaacaaacaaacacaccacaacaccgaaaaacgccgcacaccaacacactcgaatcaaaaacgaacgcaccgcaaacaacgtcacgacgacaaccccgaaccacacacgccaaccacaaaaacaacacacgcacaacaaaaccgaaaacccaaaacaacaacgcatacaaacgcaccgaccgcaacaacaaacacacacgaaaacatacacgacgaacaacacgcgacacactcaacaaacacccaaaccacaacaccgaaaccgacacgaaacaacactcaccgccaacacaacaacaacgaacacaccaaacaccaaaacgacgaaaaccataccacacacgaataaaacgcacgaaccac

SEQ ID NO: 22237 - DNA, 515 bp, Artificial Sequence
  chemically treated genomic DNA (Homo sapiens) CpG-island No: 22237
  unsure (114, 174, 331)
ttgtcggtgtgtggattcgtttattagtatgttgtcgtagcgcgtagtttagcgataattggtcgatcgatatttggggttagtaacgattatcggtgtcggtggttttataanaattagttgcgtttagtattgtgtgtgtatatagattttagtgagtttagtttttaggtncggatattttagttatattcgattcgttttgaagcgtaggtagatatatatttacgcgttttttttgtcgacgttgagtttatagagattcggtggatattgagtatcgatatcgtttaagtgcgttggggttttaagttgtgaaattacgtcgttntttataattttgatatcgacgggtttcgttcgagtttagagatttttggtgattatttggggtcggggataatgttgagataagtttatttcggtaaattggtcgtgcgtttggatttatttttatttatttcggtttaataaattcgttcgatttttcgtgtgcgtggattcggtgttttata

SEQ ID NO: 22238 - DNA, 515 bp, Artificial Sequence
  chemically treated genomic DNA (Homo sapiens) CpG-island No: 22238
  unsure (185, 342, 402)
tataaaacaccgaatccacgcacacgaaaaatcgaacgaatttattaaaccgaaataaataaaaataaatccaaacgcacgaccaatttaccgaaataaacttatctcaacattatccccgaccccaaataatcaccaaaaatctctaaactcgaacgaaacccgtcgatatcaaaattataaanaacgacgtaatttcacaacttaaaaccccaacgcacttaaacgatatcgatactcaatatccaccgaatctctataaactcaacgtcgacaaaaaaaacgcgtaaatatatatctacctacgcttcaaaacgaatcgaatataactaaaatatccgnacctaaaaactaaactcactaaaatctatatacacacacaatactaaacgcaactaattnttataaaaccaccgacaccgataatcgttactaaccccaaatatcgatcgaccaattatcgctaaactacgcgctacgacaacatactaataaacgaatccacacaccgacaa

SEQ ID NO: 22239 - DNA, 515 bp, Artificial Sequence
  chemically treated genomic DNA (Homo sapiens) CpG-island No: 22239
  unsure (185, 342, 402)
tataaggtatcgggtttacgtatacggaagatcgaacgggtttattaagtcgaaatgaatggagataaatttaggcgtacggttaatttgtcgaggtgggtttgttttaatattgttttcgattttaaatggttattaggagtttttgggttcgggcgagattcgtcggtgttagagttataagnggcggcgtgattttatagtttggggttttagcgtatttgggcgatgtcgatatttagtgtttatcgggtttttatggatttagcgtcggtaaagagggcgcgtgagtatgtgtttgtttgcgttttagagcgggtcggatgtgattagggtgttcgngtttaagaattgggtttattgggatttatgtgtatatataatgttaaacgtaattggttnttatgaaattatcggtatcggtgatcgttgttagttttagatgtcggtcggttaattgtcgttagattacgcgttgcggtagtatattaatgagcgagtttatatatcggtag

SEQ ID NO: 22240 - DNA, 515 bp, Artificial Sequence
  chemically treated genomic DNA (Homo sapiens) CpG-island No: 22240
  unsure (114, 174, 331)
ctaccgatatataaactcgctcattaatatactaccgcaacgcgtaatctaacgacaattaaccgaccgacatctaaaactaacaacgatcaccgataccgataatttcataanaaccaattacgtttaacattatatatacacataaatcccaataaacccaattcttaaacncgaacaccctaatcacatccgacccgctctaaaacgcaaacaaacacatactcacgcgccctctttaccgacgctaaatccataaaaacccgataaacactaaatatcgacatcgcccaaatacgctaaaaccccaaactataaaatcacgccgccncttataactctaacaccgacgaatctcgcccgaacccaaaaactcctaataaccatttaaaatcgaaaacaatattaaaacaaacccacctcgacaaattaaccgtacgcctaaatttatctccattcatttcgacttaataaacccgttcgatcttccgtatacgtaaacccgataccttata

SEQ ID NO: 22241 - DNA, 942 bp, Artificial Sequence
  chemically treated genomic DNA (Homo sapiens) CpG-island No: 22241
tttatcggcgatgtttttttttagtaataggcgcgtttcggcgatgtatatttgtttttggttgtagaaaatgtttgttgcggtggcgtttgtcgtttgttgtaaattcgggtagttagcgaagaacgagtgttggacgtattttgcgcgttcgatttttagttagacgcgttttatgttgcgtgtcgatttagtagttttatttaagataagtttggtttttcggtacgggttgaatcggtaataggtaattgcggcgattaggaagtaagttcgggtttaattggaacgtagatagcgtttgttcggttttatgattaaaattcggttattaacggtgttaagcgacgaacgcgaggtttcgggagtaaggtcgggtttttttcgttagtttcgcgagacgaatcgtattgagcggtgattttttagacggttttagaattacgttgtttttcgtcgttagcgtcgggtcgagtttttagtaagttagtaatagcgggaagttttacggtacgatggcggtaattacgtcgatcggtttacgtacgattatcgttagtttatggttattggtggtcgttatttcgttatatattttgtcgatcgtttcggcgtattagcgaatggcgcgcgtcgcgtcgggaatattattacgtagattgtgacgaatcggtttgtcggtgtcgagagtttttagtagtgttagtttttcggcgtgggtttttattaaatcggcgagtttatttagtatcgttttacgtttagtcggagaagagagtgattagtcgtcgcgtttaaatacgtcgcgtgttgcgtttatcgtacggtcgatatcgacgtttttgtcgcgggtaattttcgttagcggtgtttgggtgatcggattaacggttttaaaggttttatttttcgtcgtagtagtatatttatcgttaataaata

SEQ ID NO: 22242 - DNA, 942 bp, Artificial Sequence
  chemically treated genomic DNA (Homo sapiens) CpG-island No: 22242
tatttattaacgataaatatactactacgacgaaaaataaaacctttaaaaccgttaatccgatcacccaaacaccgctaacgaaaattacccgcgacaaaaacgtcgatatcgaccgtacgataaacgcaacacgcgacgtatttaaacgcgacgactaatcactctcttctccgactaaacgtaaaacgatactaaataaactcgccgatttaataaaaacccacgccgaaaaactaacactactaaaaactctcgacaccgacaaaccgattcgtcacaatctacgtaataatattcccgacgcgacgcgcgccattcgctaatacgccgaaacgatcgacaaaatatataacgaaataacgaccaccaataaccataaactaacgataatcgtacgtaaaccgatcgacgtaattaccgccatcgtaccgtaaaacttcccgctattactaacttactaaaaactcgacccgacgctaacgacgaaaaacaacgtaattctaaaaccgtctaaaaaatcaccgctcaatacgattcgtctcgcgaaactaacgaaaaaaacccgaccttactcccgaaacctcgcgttcgtcgcttaacaccgttaataaccgaattttaatcataaaaccgaacaaacgctatctacgttccaattaaacccgaacttacttcctaatcgccgcaattacctattaccgattcaacccgtaccgaaaaaccaaacttatcttaaataaaactactaaatcgacacgcaacataaaacgcgtctaactaaaaatcgaacgcgcaaaatacgtccaacactcgttcttcgctaactacccgaatttacaacaaacgacaaacgccaccgcaacaaacattttctacaaccaaaaacaaatatacatcgccgaaacgcgcctattactaaaaaaaaacatcgccgataaa

SEQ ID NO: 22243 - DNA, 942 bp, Artificial Sequence
  chemically treated genomic DNA (Homo sapiens) CpG-island No: 22243
tatttattaacggtgaatatattgttgcggcggaaaatgaaatttttgaaatcgttgattcggttatttaggtatcgttggcgaaaattgttcgcggtaagagcgtcgatatcgatcgtgcgatgagcgtagtacgcggcgtatttgaacgcggcgattggttattttttttttcggttaaacgtaaagcggtattgaataaattcgtcgatttaatggaagtttacgtcgaagagttggtattgttggaaattttcgatatcggtaaatcgattcgttatagtttgcgtgatgatattttcggcgcggcgcgcgttattcgttggtacgtcgaagcgatcgataaagtgtatggcgaagtggcgattattagtagttatgagttggcgatgatcgtgcgtgaatcggtcggcgtgattgtcgttatcgtgtcgtggaatttttcgttgttgttgatttgttggaaattcggttcggcgttggcggcgggaaatagcgtgattttaaaatcgtttgaaaaattatcgtttagtgcgattcgtttcgcggggttggcgaaagaagttcggttttgttttcgggatttcgcgttcgtcgtttgatatcgttggtgatcgggttttggttatgaagtcgggtaggcgttgtttgcgttttagttagattcgaatttattttttgatcgtcgtagttgtttgttatcggtttaattcgtatcgggaaattaggtttgttttgaataggattgttgggtcgatacgtaatatgaaacgcgtttggttggaagtcgggcgcgtaaaatgcgtttaatattcgtttttcgttgattgttcggatttgtaataggcggtaagcgttatcgtagtaggtattttttataattagggataggtgtgtatcgtcggaacgcgtttgttgttggaagagagtatcgtcgatgaa

SEQ ID NO: 22244 - DNA, 942 bp, Artificial Sequence
  chemically treated genomic DNA (Homo sapiens) CpG-island No: 22244
ttcatcgacgatactctcttccaacaacaaacgcgttccgacgatacacacctatccctaattataaaaaatacctactacgataacgcttaccgcctattacaaatccgaacaatcaacgaaaaacgaatattaaacgcattttacgcgcccgacttccaaccaaacgcgtttcatattacgtatcgacccaacaatcctattcaaaacaaacctaatttcccgatacgaattaaaccgataacaaacaactacgacgatcaaaaaataaattcgaatctaactaaaacgcaaacaacgcctacccgacttcataaccaaaacccgatcaccaacgatatcaaacgacgaacgcgaaatcccgaaaacaaaaccgaacttctttcgccaaccccgcgaaacgaatcgcactaaacgataatttttcaaacgattttaaaatcacgctatttcccgccgccaacgccgaaccgaatttccaacaaatcaacaacaacgaaaaattccacgacacgataacgacaatcacgccgaccgattcacgcacgatcatcgccaactcataactactaataatcgccacttcgccatacactttatcgatcgcttcgacgtaccaacgaataacgcgcgccgcgccgaaaatatcatcacgcaaactataacgaatcgatttaccgatatcgaaaatttccaacaataccaactcttcgacgtaaacttccattaaatcgacgaatttattcaataccgctttacgtttaaccgaaaaaaaaaataaccaatcgccgcgttcaaatacgccgcgtactacgctcatcgcacgatcgatatcgacgctcttaccgcgaacaattttcgccaacgatacctaaataaccgaatcaacgatttcaaaaatttcattttccgccgcaacaatatattcaccgttaataaata

SEQ ID NO: 22245 - DNA, 822 bp, Artificial Sequence
  chemically treated genomic DNA (Homo sapiens) CpG-island No: 22245
tagcgcggttattagcggttggttgtggattatcgtattgttcgttaattcgtcgaggcgttggtagaaggtcgtagtaaagcgtaggttaatagtcgaaaggggtgaaaaaaattgtttttgttcgtaagttgcgtgagtcgaaaatggcgttgcggcggataaagtttttgtcgattaatttcgtaaaggcgaatcgtattggtagaagttggcgatattattttttgcgatggtgaagttatgaagggggtgtatcggtcgatgaaagcgttattatcggggaatcggtacggtgattcgtgaattcggcggcgattttgttttcgttatcggcggtatcgtattttttttgattggttggtgattgagtgtagcgttaatttcggcggatatttttggatcggatgatcgcgatggtggaaggcgtatagcgacgtaaacgtcgaacgaaattgttttgattattttgttgattgttttgattatgtttttttattggtaatcgttacgttgtggtcgtttttcgcgtggggcgtaatgtagttagcgtaacggtattggtggcgttgttggtttgtttgatttaattattattggcggtttgttgttagcgatcggcgtcgtcgggatgagcggatgttaagcgcgaatgtgattgttattagcggacgtgtagttgaagggtaggtgacgttgacgttttgtaacgtattgcgtattggcgtggagaaatgtcgtatggttggttgttattacggatgttaatgttaaaatattgttgggattgcgttttagagtttgcggaattcggtatttttt

SEQ ID NO: 22246 - DNA, 822 bp, Artificial Sequence
  chemically treated genomic DNA (Homo sapiens) CpG-island No: 22246
aaaaaataccgaattccgcaaactctaaaacgcaatcccaacaatattttaacattaacatccgtaataacaaccaaccatacgacatttctccacgccaatacgcaatacgttacaaaacgtcaacgtcacctacccttcaactacacgtccgctaataacaatcacattcgcgcttaacatccgctcatcccgacgacgccgatcgctaacaacaaaccgccaataataattaaatcaaacaaaccaacaacgccaccaataccgttacgctaactacattacgccccacgcgaaaaacgaccacaacgtaacgattaccaataaaaaaacataatcaaaacaatcaacaaaataatcaaaacaatttcgttcgacgtttacgtcgctatacgccttccaccatcgcgatcatccgatccaaaaatatccgccgaaattaacgctacactcaatcaccaaccaatcaaaaaaaatacgataccgccgataacgaaaacaaaatcgccgccgaattcacgaatcaccgtaccgattccccgataataacgctttcatcgaccgatacacccccttcataacttcaccatcgcaaaaaataatatcgccaacttctaccaatacgattcgcctttacgaaattaatcgacaaaaactttatccgccgcaacgccattttcgactcacgcaacttacgaacaaaaacaatttttttcacccctttcgactattaacctacgctttactacgaccttctaccaacgcctcgacgaattaacgaacaatacgataatccacaaccaaccgctaataaccgcgcta

SEQ ID NO: 22247 - DNA, 822 bp, Artificial Sequence
  chemically treated genomic DNA (Homo sapiens) CpG-island No: 22247
gaagaatatcgagtttcgtaaattttaaaacgtaattttaatagtgttttgatattagtattcgtggtggtagttagttatgcggtatttttttacgttagtgcgtaatacgttgtagaacgttaacgttatttgttttttaattgtacgttcgttggtggtaattatattcgcgtttagtattcgtttatttcggcgacgtcgatcgttgataataggtcgttaatagtggttggattagatagattagtagcgttattagtatcgttacgttgattgtattacgttttacgcggaaaacggttatagcgtggcggttgttagtaaaaagatatagttagggtaattagtagaatggttagggtaatttcgttcggcgtttgcgtcgttgtgcgttttttattatcgcgattattcgatttagaaatgttcgtcggggttaacgttatatttaattattagttagttagaaagaatacggtgtcgtcggtgacggaggtaaaatcgtcgtcggatttacggattatcgtgtcgatttttcggtgatggcgtttttatcgatcgatgtattttttttataattttattatcgtaggggataatatcgttagtttttattagtacgattcgtttttacgaagttggtcggtaggaattttgttcgtcgtagcgttattttcggtttacgtagtttgcgggtaaaggtagttttttttatttttttcgattgttggtttgcgttttattgcggttttttgttagcgtttcggcgaattagcgaatagtacggtgatttatagttaatcgttaatggtcgcgtta

SEQ ID NO: 22248 - DNA, 822 bp, Artificial Sequence
  chemically treated genomic DNA (Homo sapiens) CpG-island No: 22248
taacgcgaccattaacgattaactataaatcaccgtactattcgctaattcgccgaaacgctaacaaaaaaccgcaataaaacgcaaaccaacaatcgaaaaaaataaaaaaaactacctttacccgcaaactacgtaaaccgaaaataacgctacgacgaacaaaattcctaccgaccaacttcgtaaaaacgaatcgtactaataaaaactaacgatattatcccctacgataataaaattataaaaaaaatacatcgatcgataaaaacgccatcaccgaaaaatcgacacgataatccgtaaatccgacgacgattttacctccgtcaccgacgacaccgtattctttctaactaactaataattaaatataacgttaaccccgacgaacatttctaaatcgaataatcgcgataataaaaaacgcacaacgacgcaaacgccgaacgaaattaccctaaccattctactaattaccctaactatatctttttactaacaaccgccacgctataaccgttttccgcgtaaaacgtaatacaatcaacgtaacgatactaataacgctactaatctatctaatccaaccactattaacgacctattatcaacgatcgacgtcgccgaaataaacgaatactaaacgcgaatataattaccaccaacgaacgtacaattaaaaaacaaataacgttaacgttctacaacgtattacgcactaacgtaaaaaaataccgcataactaactaccaccacgaatactaatatcaaaacactattaaaattacgttttaaaatttacgaaactcgatattcttc

SEQ ID NO: 22249 - DNA, 613 bp, Artificial Sequence
  chemically treated genomic DNA (Homo sapiens) CpG-island No: 22249
gcgaaaatcgagatacgtttagagataggaggagggaagtgtaggtttcgttaataagtatttaggtttcgttcgttacgtcgttggttacgtttcggtcggttttttcgttcgcgcgtagtcgtttgtagattcggaagtggatggcgggagatatggcgtaattgcggcgcgtgagtttttttttgtttagattaatgttcgtttagcggtgtttttacgtttttgtattcgggatgtggggggcgtatagattttgaaattttcgtatcgttttttttatttcgagtaaattttgcgtttcgttagagtgttaaaatcgttttagggttggttttgttttcgtcgttttgtcgtagggttgcgtaggtagttgttttcgcgtcgttttttttttaaaattttttagtgattttttcgttagtttcgcgttacgtaaagtttcgtttgcgaggcggatttacgtttttcgggttttaagtttcgtttttgcggtttttggggcgtagcgtcgtagtcgttattcgggaggggtcgcgtttttgtttggtttggggattttgtagattttatttttgatttgtttgtcgcgtagttttttttgggtcgtttt

SEQ ID NO: 22250 - DNA, 613 bp, Artificial Sequence
  chemically treated genomic DNA (Homo sapiens) CpG-island No: 22250
aaaacgacccaaaaaaaactacgcgacaaacaaatcaaaaataaaatctacaaaatccccaaaccaaacaaaaacgcgacccctcccgaataacgactacgacgctacgccccaaaaaccgcaaaaacgaaacttaaaacccgaaaaacgtaaatccgcctcgcaaacgaaactttacgtaacgcgaaactaacgaaaaaatcactaaaaaattttaaaaaaaaaacgacgcgaaaacaactacctacgcaaccctacgacaaaacgacgaaaacaaaaccaaccctaaaacgattttaacactctaacgaaacgcaaaatttactcgaaataaaaaaaacgatacgaaaatttcaaaatctatacgccccccacatcccgaatacaaaaacgtaaaaacaccgctaaacgaacattaatctaaacaaaaaaaaactcacgcgccgcaattacgccatatctcccgccatccacttccgaatctacaaacgactacgcgcgaacgaaaaaaccgaccgaaacgtaaccaacgacgtaacgaacgaaacctaaatacttattaacgaaacctacacttccctcctcctatctctaaacgtatctcgattttcgc

SEQ ID NO: 22251 - DNA, 613 bp, Artificial Sequence
  chemically treated genomic DNA (Homo sapiens) CpG-island No: 22251
ggaacggtttaaggaggattacgcggtaggtagattaggggtggggtttgtagaatttttagattaggtagagacgcggtttttttcgaatggcggttgcggcgttgcgttttaggggtcgtaaggacgaggtttgggattcggagggcgtggattcgtttcgtaggcgggattttacgtggcgcggggttggcggaggggttattgaagggttttaagaggaaaacggcgcgaaagtagttgtttacgtagttttacggtagaacgacggagatagaattagttttagggcgattttaatattttgacgggacgtagaatttattcggggtggagagagcggtgcggggattttaaggtttgtacgttttttatatttcgggtatagaagcgtgagggtatcgttaagcgaatattaatttaaataaaggaaaatttacgcgtcgtagttgcgttatatttttcgttatttattttcgggtttgtaggcggttgcgcgcgaacggagaggtcggtcggggcgtggttagcgacgtggcgggcggggtttgaatatttattgacggggtttgtatttttttttttttatttttgggcgtgtttcggttttcgt

SEQ ID NO: 22252 - DNA, 613 bp, Artificial Sequence
  chemically treated genomic DNA (Homo sapiens) CpG-island No: 22252
acgaaaaccgaaacacgcccaaaaataaaaaaaaaaaaatacaaaccccgtcaataaatattcaaaccccgcccgccacgtcgctaaccacgccccgaccgacctctccgttcgcgcgcaaccgcctacaaacccgaaaataaataacgaaaaatataacgcaactacgacgcgtaaattttcctttatttaaattaatattcgcttaacgataccctcacgcttctatacccgaaatataaaaaacgtacaaaccttaaaatccccgcaccgctctctccaccccgaataaattctacgtcccgtcaaaatattaaaatcgccctaaaactaattctatctccgtcgttctaccgtaaaactacgtaaacaactactttcgcgccgttttcctcttaaaacccttcaataacccctccgccaaccccgcgccacgtaaaatcccgcctacgaaacgaatccacgccctccgaatcccaaacctcgtccttacgacccctaaaacgcaacgccgcaaccgccattcgaaaaaaaccgcgtctctacctaatctaaaaattctacaaaccccacccctaatctacctaccgcgtaatcctccttaaaccgttcc

SEQ ID NO: 22253 - DNA, 686 bp, Artificial Sequence
  chemically treated genomic DNA (Homo sapiens) CpG-island No: 22253
ttcgtaattttcgttatattattgtgtttattagtcgtgtttttttatgttgttgtaatatttgtttatttcgtttttaataaattttttattattatattattaacgtatttacgcgatagttattatatacgttgttataatatttttggcgcgttgtttttatattgtacgttgtagttttatatttttattattttatattttgttcgtttgcgtttttaatatgatttcgttttttttatacgtttcgcggtatatattcggttcgttgtttcgagatttgttttttttatattgtatattcgcggtttaatcggtcgtcgcgcgcgtagtacgcggcgcgttttttgtcgtttatttgggcgtcggttttttttcgcgtcgttttttatcggtttttattttggattttcggttatgtcgtttttcgcgttttcgtttttcgcgttttggtcggtagaagtcggggttatttaaggtttttattttttataacgggtcgcggttattattcggatttattttttaattaggaaattttacggggcgaaattaacgtttagcgtagatcggatattattgtttgacgttattatacgggtttagtttatatagaggtttttcgtaaatttcgttattatttagcgggttttcgttaggttttgggtcgttttgtttttttt

SEQ ID NO: 22254 - DNA, 686 bp, Artificial Sequence
  chemically treated genomic DNA (Homo sapiens) CpG-island No: 22254
aaaaaaaacaaaacgacccaaaacctaacgaaaacccgctaaataataacgaaatttacgaaaaacctctatataaactaaacccgtataataacgtcaaacaataatatccgatctacgctaaacgttaatttcgccccgtaaaatttcctaattaaaaaataaatccgaataataaccgcgacccgttataaaaaataaaaaccttaaataaccccgacttctaccgaccaaaacgcgaaaaacgaaaacgcgaaaaacgacataaccgaaaatccaaaataaaaaccgataaaaaacgacgcgaaaaaaaaccgacgcccaaataaacgacaaaaaacgcgccgcgtactacgcgcgcgacgaccgattaaaccgcgaatatacaatataaaaaaaacaaatctcgaaacaacgaaccgaatatataccgcgaaacgtataaaaaaaacgaaatcatattaaaaacgcaaacgaacaaaatataaaataataaaaatataaaactacaacgtacaatataaaaacaacgcgccaaaaatattataacaacgtatataataactatcgcgtaaatacgttaataatataataataaaaaatttattaaaaacgaaataaacaaatattacaacaacataaaaaaacacgactaataaacacaataatataacgaaaattacgaa

SEQ ID NO: 22255 - DNA, 686 bp, Artificial Sequence
  chemically treated genomic DNA (Homo sapiens) CpG-island No: 22255
gggggagataaagcggtttagggtttagcgggggttcgttgggtagtagcggggtttgcggggggtttttgtgtgggttgggttcgtgtagtggcgttaaatagtggtgttcggtttacgttgggcgttaatttcgtttcgtggagttttttggttgggaagtagattcgggtagtggtcgcggttcgttgtggagggtggaggttttggatagtttcggtttttgtcggttagggcgcggaaagcggaggcgcgaagggcggtatggtcgaaggtttaggatggaggtcgatgggagacggcgcgaagggaggtcggcgtttaagtaggcggtagagagcgcgtcgcgtgttgcgcgcgcggcggtcgattgggtcgcgagtgtgtagtgtaaagggggtaggtttcggggtagcgagtcgggtgtgtgtcgcggagcgtgtgaaaagggcggggttatgttgagggcgtaagcgggtagagtgtagagtggtggaggtgtagggttatagcgtgtagtgtaggggtagcgcgttaggggtgttgtagtagcgtgtgtagtggttgtcgcgtgggtgcgttagtggtgtgatggtgggaagtttgttgagggcggggtaagtaagtgttgtagtagtatggagaagtacggttagtgagtatagtagtgtagcgagagttgcgag

SEQ ID NO: 22256 - DNA, 686 bp, Artificial Sequence
  chemically treated genomic DNA (Homo sapiens) CpG-island No: 22256
ctcgcaactctcgctacactactatactcactaaccgtacttctccatactactacaacacttacttaccccgccctcaacaaacttcccaccatcacaccactaacgcacccacgcgacaaccactacacacgctactacaacacccctaacgcgctacccctacactacacgctataaccctacacctccaccactctacactctacccgcttacgccctcaacataaccccgcccttttcacacgctccgcgacacacacccgactcgctaccccgaaacctaccccctttacactacacactcgcgacccaatcgaccgccgcgcgcgcaacacgcgacgcgctctctaccgcctacttaaacgccgacctcccttcgcgccgtctcccatcgacctccatcctaaaccttcgaccataccgcccttcgcgcctccgctttccgcgccctaaccgacaaaaaccgaaactatccaaaacctccaccctccacaacgaaccgcgaccactacccgaatctacttcccaaccaaaaaactccacgaaacgaaattaacgcccaacgtaaaccgaacaccactatttaacgccactacacgaacccaacccacacaaaaaccccccgcaaaccccgctactacccaacgaacccccgctaaaccctaaaccgctttatctccccc

SEQ ID NO: 22257 - DNA, 541 bp, Artificial Sequence
  chemically treated genomic DNA (Homo sapiens) CpG-island No: 22257
gggacggcgggttttgttgattatttaggatttatatgatttgttgtaaattcgttaaggcgtgcgtcgatgtaacgttttgtcgttatggcgatgtttattttggtgagttgggttttgaaatagtggggggaagggggtaagatttcgcgagtagttgtgattagagtatttgttagtaaatcgtttacggtattcgtcgaattaacgcgtgtcgttaaggtcgtttattgtacgttgtacgaattgttgtagtgtatttttatcgtggagagttggcgtttgtatatgggggggggaacggggtggaggtataagatgtaagtatagaaatattaataatacggtgtattgggggggcgtttatggagggaattacgtagggagaaattggggttgatcgaagcgtgtgtgagttgtagggatggaggaaggaaggggattatggagggttgtgatatttgcgtaggagggatagcgtgtggtagcggggaagggttataaataaagcgagatttgaggcgtgaatgtagttgtagaa

SEQ ID NO: 22258 - DNA, 541 bp, Artificial Sequence
  chemically treated genomic DNA (Homo sapiens) CpG-island No: 22258
ttctacaactacattcacgcctcaaatctcgctttatttataacccttccccgctaccacacgctatccctcctacgcaaatatcacaaccctccataatccccttccttcctccatccctacaactcacacacgcttcgatcaaccccaatttctccctacgtaattccctccataaacgcccccccaatacaccgtattattaatatttctatacttacatcttatacctccaccccgttcccccccccatatacaaacgccaactctccacgataaaaatacactacaacaattcgtacaacgtacaataaacgaccttaacgacacgcgttaattcgacgaataccgtaaacgatttactaacaaatactctaatcacaactactcgcgaaatcttacccccttccccccactatttcaaaacccaactcaccaaaataaacatcgccataacgacaaaacgttacatcgacgcacgccttaacgaatttacaacaaatcatataaatcctaaataatcaacaaaacccgccgtccc

SEQ ID NO: 22259 - DNA, 541 bp, Artificial Sequence
  chemically treated genomic DNA (Homo sapiens) CpG-island No: 22259
ttttatagttatatttacgttttagatttcgttttatttataattttttttcgttattatacgttattttttttgcgtaggtattataattttttatagttttttttttttttttatttttgtaatttatatacgtttcggttagttttaatttttttttgcgtagttttttttataaacgtttttttaatgtatcgtgttgttggtatttttgtgtttatattttgtgtttttatttcgtttttttttttatatgtaaacgttagttttttacggtaagaatatattataatagttcgtgtagcgtgtagtaggcggttttggcgatacgcgttagttcggcgggtgtcgtaggcggtttattagtaaatgttttaattatagttgttcgcggaattttatttttttttttttattattttaaaatttagtttattagggtaagtatcgttatagcggtaaagcgttatatcggcgtacgttttggcgggtttatagtaaattatgtaaattttaggtggttagtaaggttcgtcgtttt

SEQ ID NO: 22260 - DNA, 541 bp, Artificial Sequence
  chemically treated genomic DNA (Homo sapiens) CpG-island No: 22260
aaaacgacgaaccttactaaccacctaaaatttacataatttactataaacccgccaaaacgtacgccgatataacgctttaccgctataacgatacttaccctaataaactaaattttaaaataataaaaaaaaaaaaataaaattccgcgaacaactataattaaaacatttactaataaaccgcctacgacacccgccgaactaacgcgtatcgccaaaaccgcctactacacgctacacgaactattataatatattcttaccgtaaaaaactaacgtttacatataaaaaaaaaaacgaaataaaaacacaaaatataaacacaaaaataccaacaacacgatacattaaaaaaacgtttataaaaaaaactacgcaaaaaaaaattaaaactaaccgaaacgtatataaattacaaaaataaaaaaaaaaaaaaaactataaaaaattataatacctacgcaaaaaaaataacgtataataacgaaaaaaaattataaataaaacgaaatctaaaacgtaaatataactataaaa

SEQ ID NO: 22261 - DNA, 805 bp, Artificial Sequence
  chemically treated genomic DNA (Homo sapiens) CpG-island No: 22261
ttgtattttttttagttcgattcgtttttttttgaacgtttggtttgcgtttagatttattttttttacgtttagtttttcgttgatatttatttttttgattattatttttttatcgtatttcgggggcgttgtgttgtcgttgtattgtcgcgttgacggttgatatcgcgagttcggtatcgttatatttagcgtttcgtgcgggcgtttaaggttatagatcgttcgttagtggtcgaaggcgcgttgtagtttatcgttgtttgcgaattattttttttgtagtattttcgtttttaggttgcggtgaaaacgttttagttttttttgcgtttgcggatgataaggtcgggagtgttttattcggatatttaggcgtattagttatagttttagcgtcgtttaggtgtcggtggtgtcgttttacggtgagtcgttatttatggttattcggttcggtaggtcgtaacgtttaaatacgttgaataagttggtgtggacgggttttaggcggtgaatcggtatagtggtttcgtttcgggaataacggattggttgttattagggtaagcgaatggaggtttacggttaagggaagatttattgcggcggtggttattattatgattaatttcggcgcgtatattgcggaaattacgcgtggtgcggtgttgtttatttataaaggttttcgtgaagtaggaattatggtttggcggtattagttagtcgtttatttattacgaggtagtatttaattggtttgttacgatcgattagagtgcgtatgatgaaatattta

SEQ ID NO: 22262 - DNA, 805 bp, Artificial Sequence
  chemically treated genomic DNA (Homo sapiens) CpG-island No: 22262
taaatatttcatcatacgcactctaatcgatcgtaacaaaccaattaaatactacctcgtaataaataaacgactaactaataccgccaaaccataattcctacttcacgaaaacctttataaataaacaacaccgcaccacgcgtaatttccgcaatatacgcgccgaaattaatcataataataaccaccgccgcaataaatcttcccttaaccgtaaacctccattcgcttaccctaataacaaccaatccgttattcccgaaacgaaaccactataccgattcaccgcctaaaacccgtccacaccaacttattcaacgtatttaaacgttacgacctaccgaaccgaataaccataaataacgactcaccgtaaaacgacaccaccgacacctaaacgacgctaaaactataactaatacgcctaaatatccgaataaaacactcccgaccttatcatccgcaaacgcaaaaaaaactaaaacgttttcaccgcaacctaaaaacgaaaatactacaaaaaaaataattcgcaaacaacgataaactacaacgcgccttcgaccactaacgaacgatctataaccttaaacgcccgcacgaaacgctaaatataacgataccgaactcgcgatatcaaccgtcaacgcgacaatacaacgacaacacaacgcccccgaaatacgataaaaaaataataatcaaaaaaataaatatcaacgaaaaactaaacgtaaaaaaaataaatctaaacgcaaaccaaacgttcaaaaaaaaacgaatcgaactaaaaaaaatacaa

SEQ ID NO: 22263 - DNA, 805 bp, Artificial Sequence
  chemically treated genomic DNA (Homo sapiens) CpG-island No: 22263
taggtattttattatgcgtattttagtcgatcgtgataaattagttgaatgttgtttcgtaatggatgagcggttggttgatgtcgttaagttataatttttgttttacgaaaatttttgtggatagatagtatcgtattacgcgtgattttcgtaatatacgcgtcggagttgattatgatggtgattatcgtcgtagtaaatttttttttggtcgtggatttttattcgtttattttggtggtagttaattcgttgttttcgggacggggttattgtatcgatttatcgtttgaaattcgtttatattaatttgtttagcgtgtttgagcgttacggtttgtcggatcggatgattatggataacggtttatcgtggggcgatattatcggtatttggacggcgttggagttgtggttgatgcgtttgggtattcgggtggggtattttcggttttattattcgtagacgtaggggaagttggagcgtttttatcgtagtttgaaggcggaagtgttgtagggaaaatggttcgtagatagcggtgaattgtagcgcgttttcgattattggcggacggtttataattttgaacgttcgtacgaggcgttggatatggcggtatcgggttcgcggtattagtcgttagcgcggtagtatagcggtaatataacgttttcggaatacgatgaaggggtgatggttaggaaagtggatattagcggaaagttgagcgtgaaaggggtaagtttgagcgtaggttaggcgtttaggggagaacgggtcgggttgaaggagatgtag

SEQ ID NO: 22264 - DNA, 805 bp, Artificial Sequence
  chemically treated genomic DNA (Homo sapiens) CpG-island No: 22264
ctacatctccttcaacccgacccgttctcccctaaacgcctaacctacgctcaaacttacccctttcacgctcaactttccgctaatatccactttcctaaccatcaccccttcatcgtattccgaaaacgttatattaccgctatactaccgcgctaacgactaataccgcgaacccgataccgccatatccaacgcctcgtacgaacgttcaaaattataaaccgtccgccaataatcgaaaacgcgctacaattcaccgctatctacgaaccattttccctacaacacttccgccttcaaactacgataaaaacgctccaacttcccctacgtctacgaataataaaaccgaaaataccccacccgaatacccaaacgcatcaaccacaactccaacgccgtccaaataccgataatatcgccccacgataaaccgttatccataatcatccgatccgacaaaccgtaacgctcaaacacgctaaacaaattaatataaacgaatttcaaacgataaatcgatacaataaccccgtcccgaaaacaacgaattaactaccaccaaaataaacgaataaaaatccacgaccaaaaaaaaatttactacgacgataatcaccatcataatcaactccgacgcgtatattacgaaaatcacgcgtaatacgatactatctatccacaaaaattttcgtaaaacaaaaattataacttaacgacatcaaccaaccgctcatccattacgaaacaacattcaactaatttatcacgatcgactaaaatacgcataataaaataccta

SEQ ID NO: 22265 - DNA, 990 bp, Artificial Sequence
  chemically treated genomic DNA (Homo sapiens) CpG-island No: 22265
agatagatagacgggaggtttcgcggcgcgtttttttaggaatgaaagggattcgcggggcgagtatttttaaattcggcgtttcggggatttgcgttgagatacgggtcgggcggcgtagtttgaggagaaagtcggttaggtttttgatatttagtcggattaattgcgcggagatttcgcgttgatatttatcgcgttttgtcgggtaattatttcgggtggtcgcggaagcgtttgggcgtcgtgggttttcgtagtaaacgcggggcgggagtacgatttagggtcggcgtaatgtgattggtttaggtttttttcggagttttttattggttttgggtatcgagtatgggcgttgcgttagtgcgcgttggcgtaaggttggtggaagtcgcgttgtgtaggttcgtgttcggttggcgcggcgtgggtaagttgtttgtcggttacggttttcggatttcggtcgttcgttttgtattaattttttgggagaggcggttcggggcgggggtgggtagtcggtttgcgttcgtggtttttacgtttttcggttttcgggggtcgtcgcgggcgcgggttggggttcggatttggtttttggtttttggttttggtgttttcgggagcgtgtttttgggttcggcgtcggtttttgtcgcgggaggtttttgggcggcgtggggtttttttttatgttttgtttttggttttaggcgttttttaggtttatggaaatcgtattcggggacgcggggaattggggaatatgtcgggttggggcggcgcgtttcggggggggggaaattcgggacgtttcgagcgtttattcggcgggacgcggtcgtgagttttgttcgcggtcgtgagttttgtttatcgttttcgcgtcgttttcggggttgttggggttcgggttttcgttgagagtcgtgggaaggtggtgtcggattgtggggtagtagtagggatgaggggttgattgat

SEQ ID NO: 22266 - DNA, 990 bp, Artificial Sequence
  chemically treated genomic DNA (Homo sapiens) CpG-island No: 22266
atcaatcaacccctcatccctactactaccccacaatccgacaccaccttcccacgactctcaacgaaaacccgaaccccaacaaccccgaaaacgacgcgaaaacgataaacaaaactcacgaccgcgaacaaaactcacgaccgcgtcccgccgaataaacgctcgaaacgtcccgaatttccccccccccgaaacgcgccgccccaacccgacatattccccaattccccgcgtccccgaatacgatttccataaacctaaaaaacgcctaaaaccaaaaacaaaacataaaaaaaaaccccacgccgcccaaaaacctcccgcgacaaaaaccgacgccgaacccaaaaacacgctcccgaaaacaccaaaaccaaaaaccaaaaaccaaatccgaaccccaacccgcgcccgcgacgacccccgaaaaccgaaaaacgtaaaaaccacgaacgcaaaccgactacccacccccgccccgaaccgcctctcccaaaaaattaatacaaaacgaacgaccgaaatccgaaaaccgtaaccgacaaacaacttacccacgccgcgccaaccgaacacgaacctacacaacgcgacttccaccaaccttacgccaacgcgcactaacgcaacgcccatactcgatacccaaaaccaataaaaaactccgaaaaaaacctaaaccaatcacattacgccgaccctaaatcgtactcccgccccgcgtttactacgaaaacccacgacgcccaaacgcttccgcgaccacccgaaataattacccgacaaaacgcgataaatatcaacgcgaaatctccgcgcaattaatccgactaaatatcaaaaacctaaccgactttctcctcaaactacgccgcccgacccgtatctcaacgcaaatccccgaaacgccgaatttaaaaatactcgccccgcgaatccctttcattcctaaaaaaacgcgccgcgaaacctcccgtctatctatct

SEQ ID NO: 22267 - DNA, 990 bp, Artificial Sequence
  chemically treated genomic DNA (Homo sapiens) CpG-island No: 22267
attaattaattttttatttttgttattgttttataattcggtattatttttttacgatttttagcggaggttcgggttttagtagtttcggaagcggcgcggaggcggtgggtagagtttacggtcgcgggtagaatttacggtcgcgtttcgtcgggtgggcgttcggaacgtttcgggttttttttttttcggagcgcgtcgttttaattcggtatgttttttagtttttcgcgttttcgagtgcggtttttataggtttggaaagcgtttagaattaaaggtagaatatgaggagagattttacgtcgtttaggggtttttcgcggtagaggtcgacgtcgagtttaaggatacgttttcggggatattaaagttaaaggttaaaggttaagttcgagttttagttcgcgttcgcggcgattttcggaggtcgaagggcgtgggaattacgggcgtaagtcggttgtttattttcgtttcgggtcgttttttttaggagattagtgtagggcgagcggtcggaattcgggaatcgtagtcgataggtagtttatttacgtcgcgttagtcgggtacgaatttgtataacgcgatttttattaattttgcgttagcgcgtattgacgtagcgtttatgttcggtatttaggattaatagaaagtttcgaaggggatttgggttaattatattgcgtcggttttgagtcgtgttttcgtttcgcgtttgttacggaggtttacgacgtttaggcgttttcgcgattattcggagtgattgttcggtagagcgcggtaggtgttaacgcggggttttcgcgtagttggttcggttgggtgttaaagatttggtcggttttttttttaggttgcgtcgttcggttcgtgttttagcgtaggttttcggggcgtcgagtttgggggtgttcgtttcgcgggttttttttatttttaggaaaacgcgtcgcggggtttttcgtttgtttgttt

SEQ ID NO: 22268 - DNA, 990 bp, Artificial Sequence
  chemically treated genomic DNA (Homo sapiens) CpG-island No: 22268
aaacaaacaaacgaaaaaccccgcgacgcgttttcctaaaaataaaaaaaacccgcgaaacgaacacccccaaactcgacgccccgaaaacctacgctaaaacacgaaccgaacgacgcaacctaaaaaaaaaaccgaccaaatctttaacacccaaccgaaccaactacgcgaaaaccccgcgttaacacctaccgcgctctaccgaacaatcactccgaataatcgcgaaaacgcctaaacgtcgtaaacctccgtaacaaacgcgaaacgaaaacacgactcaaaaccgacgcaatataattaacccaaatccccttcgaaactttctattaatcctaaataccgaacataaacgctacgtcaatacgcgctaacgcaaaattaataaaaatcgcgttatacaaattcgtacccgactaacgcgacgtaaataaactacctatcgactacgattcccgaattccgaccgctcgccctacactaatctcctaaaaaaaacgacccgaaacgaaaataaacaaccgacttacgcccgtaattcccacgcccttcgacctccgaaaatcgccgcgaacgcgaactaaaactcgaacttaacctttaacctttaactttaatatccccgaaaacgtatccttaaactcgacgtcgacctctaccgcgaaaaacccctaaacgacgtaaaatctctcctcatattctacctttaattctaaacgctttccaaacctataaaaaccgcactcgaaaacgcgaaaaactaaaaaacataccgaattaaaacgacgcgctccgaaaaaaaaaaaacccgaaacgttccgaacgcccacccgacgaaacgcgaccgtaaattctacccgcgaccgtaaactctacccaccgcctccgcgccgcttccgaaactactaaaacccgaacctccgctaaaaatcgtaaaaaaataataccgaattataaaacaataacaaaaataaaaaattaattaat

SEQ ID NO: 22269 - DNA, 535 bp, Artificial Sequence
  chemically treated genomic DNA (Homo sapiens) CpG-island No: 22269
gggttaggttgagtatttatagggggcgaaagaagggaaggagggaagagttggcgacgagcgcgtagggagcgcgataaattggggatgcgataattggaataattggggggcggaggagttgggtggcgtagatgatttgggtaattacgtgggtaagggtaggtggtacggtgaatacgttggtagggtgagtgaaacgagtaaacggagggtagcgaaggaatattgggaggaagtttgtacggcgtagtatcgcggcgggagaggcgtgacggtttatacgagatgaggggagaagagggcgtgaaaaaagggggttaaatggagtgcgggcgttggcgagacgatcgtttgtattacggaaaaataagggtgataaaattaaagcgggaaggtcggtgggagggtaaggataagtgtggtatgaaaagttcgagcggggacgtatcgggaaagtgtaatcgcgtagtacggatttattaatgaggtatacgtacgggtaattttgttaggaaggagatggggtgaaata

SEQ ID NO: 22270 - DNA, 535 bp, Artificial Sequence
  chemically treated genomic DNA (Homo sapiens) CpG-island No: 22270
tatttcaccccatctccttcctaacaaaattacccgtacgtatacctcattaataaatccgtactacgcgattacactttcccgatacgtccccgctcgaacttttcataccacacttatccttaccctcccaccgaccttcccgctttaattttatcacccttatttttccgtaatacaaacgatcgtctcgccaacgcccgcactccatttaacccccttttttcacgccctcttctcccctcatctcgtataaaccgtcacgcctctcccgccgcgatactacgccgtacaaacttcctcccaatattccttcgctaccctccgtttactcgtttcactcaccctaccaacgtattcaccgtaccacctacccttacccacgtaattacccaaatcatctacgccacccaactcctccgccccccaattattccaattatcgcatccccaatttatcgcgctccctacgcgctcgtcgccaactcttccctccttcccttctttcgccccctataaatactcaacctaaccc

SEQ ID NO: 22271 - DNA, 535 bp, Artificial Sequence
  chemically treated genomic DNA (Homo sapiens) CpG-island No: 22271
tattttattttattttttttttgataaggttattcgtacgtgtattttattagtaaattcgtattacgcggttatattttttcggtgcgttttcgttcgggttttttatgttatatttatttttgtttttttatcggttttttcgttttaattttgttatttttattttttcgtggtgtaaacggtcgtttcgttaacgttcgtattttatttaattttttttttttacgtttttttttttttttatttcgtataggtcgttacgtttttttcgtcgcggtattacgtcgtataaatttttttttaatattttttcgttgtttttcgtttgttcgttttatttattttattagcgtgtttatcgtgttatttgtttttatttacgtaattatttaaattatttgcgttatttaattttttcgttttttaattattttaattgtcgtatttttaatttgtcgcgttttttacgcgttcgtcgttagttttttttttttttttttttttcgttttttatgaatgtttaatttagttt

SEQ ID NO: 22272 - DNA, 535 bp, Artificial Sequence
  chemically treated genomic DNA (Homo sapiens) CpG-island No: 22272
aaactaaattaaacattcataaaaaacgaaaaaaaaaaaaaaaaaaaaaactaacgacgaacgcgtaaaaaacgcgacaaattaaaaatacgacaattaaaataattaaaaaacgaaaaaattaaataacgcaaataatttaaataattacgtaaataaaaacaaataacacgataaacacgctaataaaataaataaaacgaacaaacgaaaaacaacgaaaaaatattaaaaaaaaatttatacgacgtaataccgcgacgaaaaaaacgtaacgacctatacgaaataaaaaaaaaaaaaaacgtaaaaaaaaaaaattaaataaaatacgaacgttaacgaaacgaccgtttacaccacgaaaaaataaaaataacaaaattaaaacgaaaaaaccgataaaaaaacaaaaataaatataacataaaaaacccgaacgaaaacgcaccgaaaaaatataaccgcgtaatacgaatttactaataaaatacacgtacgaataaccttatcaaaaaaaaaataaaataaaata

SEQ ID NO: 22273 - DNA, 516 bp, Artificial Sequence
  chemically treated genomic DNA (Homo sapiens) CpG-island No: 22273
ggcgacgggaaataaatcgggggatttttgttgtaggtgtcgcgaaattggcgcgtatatattgaaaatacgggtcggtgtgtagcgtacggggcgcgggaattacgggttggtagtgggtcgggaggttgggggtggaatgtcggagagggacggggtaagttgggggcgggcgagaatcggggggcggttgggagcgcggagtgttatgatgatttgcgattcgtttgtagatgcgaattgttattgcgtggttgtagatatcgtttatgtgaaaagttacggataagttattgcgatattacggaaagttattgcgatgtattcgcggaggttgttgaatagggtcgatgtgcgtttatacgttcgcgcgtatattatttcgttgggcgttttggagtacgattttgtttcgtattcggttcgttttatattgggggggttgttcggtggttgtattcgggacgtgacggatttattttaataaattgaatattatatttaaagatttatttt

SEQ ID NO: 22274 - DNA, 516 bp, Artificial Sequence
  chemically treated genomic DNA (Homo sapiens) CpG-island No: 22274
aaaataaatctttaaatataatattcaatttattaaaataaatccgtcacgtcccgaatacaaccaccgaacaacccccccaatataaaacgaaccgaatacgaaacaaaatcgtactccaaaacgcccaacgaaataatatacgcgcgaacgtataaacgcacatcgaccctattcaacaacctccgcgaatacatcgcaataactttccgtaatatcgcaataacttatccgtaacttttcacataaacgatatctacaaccacgcaataacaattcgcatctacaaacgaatcgcaaatcatcataacactccgcgctcccaaccgccccccgattctcgcccgcccccaacttaccccgtccctctccgacattccacccccaacctcccgacccactaccaacccgtaattcccgcgccccgtacgctacacaccgacccgtattttcaatatatacgcgccaatttcgcgacacctacaacaaaaatcccccgatttatttcccgtcgcc

SEQ ID NO: 22275 - DNA, 516 bp, Artificial Sequence
  chemically treated genomic DNA (Homo sapiens) CpG-island No: 22275
aaaataagtttttagatgtgatatttagtttgttgaggtggattcgttacgtttcgggtgtagttatcggataatttttttaatataaagcgggtcgggtacgggataaagtcgtgttttaaagcgtttaacggagtaatgtacgcgcgggcgtataaacgtatatcggttttatttagtagttttcgcgagtatatcgtaatagtttttcgtggtatcgtaatagtttattcgtagttttttatataggcggtgtttgtagttacgtaatagtagttcgtatttgtaggcgggtcgtaggttattatggtatttcgcgtttttaatcgtttttcggttttcgttcgtttttaatttatttcgttttttttcgatattttatttttagtttttcgatttattgttaattcgtgattttcgcgtttcgtgcgttgtatatcgattcgtatttttagtatatgcgcgttaatttcgcgatatttgtagtaagaatttttcgatttgtttttcgtcgtt

SEQ ID NO: 22276 - DNA, 516 bp, Artificial Sequence
  chemically treated genomic DNA (Homo sapiens) CpG-island No: 22276
aacgacgaaaaacaaatcgaaaaattcttactacaaatatcgcgaaattaacgcgcatatactaaaaatacgaatcgatatacaacgcacgaaacgcgaaaatcacgaattaacaataaatcgaaaaactaaaaataaaatatcgaaaaaaaacgaaataaattaaaaacgaacgaaaaccgaaaaacgattaaaaacgcgaaataccataataacctacgacccgcctacaaatacgaactactattacgtaactacaaacaccgcctatataaaaaactacgaataaactattacgataccacgaaaaactattacgatatactcgcgaaaactactaaataaaaccgatatacgtttatacgcccgcgcgtacattactccgttaaacgctttaaaacacgactttatcccgtacccgacccgctttatattaaaaaaattatccgataactacacccgaaacgtaacgaatccacctcaacaaactaaatatcacatctaaaaacttatttt

SEQ ID NO: 22277 - DNA, 579 bp, Artificial Sequence
  chemically treated genomic DNA (Homo sapiens) CpG-island No: 22277
gtgtggtgggttgtgaaagttgatgagtacggatcgcggggtaacgggtttaaaaataggggttcgggttgcgtggtcgattgttaaaatgttgtataaggaatggtgtaagtaggggtaaagtttgcgttggatgttaggagttggcgggtggggcggattaggaatcggggcgtcggaatgggaatatttataaattacgaggagcgaaaagtgatagcgggggttagggcgtattgttggggggttataagggaacgagggacggaatggagggtaacgggcgagtgggaatggtgagtggggatgtagttgaaagagtgtgttggaggacgattgtatggcgggcgggatgcgggttggatttgaaagaggagttagttggggggtaggggagttaggttagggaaaggtagggagcgacgggcgatatagtggtcggggaagagggggtattacgggcgggtatcgcgacgtgggggtgggatcgggggaatatgatattatcgatgtggcggaaggagatgaagggaacgttgagaattttgggtggtaagcgcgaatgaattggaattagat

SEQ ID NO: 22278 - DNA, 579 bp, Artificial Sequence
  chemically treated genomic DNA (Homo sapiens) CpG-island No: 22278
atctaattccaattcattcgcgcttaccacccaaaattctcaacgttcccttcatctccttccgccacatcgataatatcatattcccccgatcccacccccacgtcgcgatacccgcccgtaataccccctcttccccgaccactatatcgcccgtcgctccctacctttccctaacctaactcccctaccccccaactaactcctctttcaaatccaacccgcatcccgcccgccatacaatcgtcctccaacacactctttcaactacatccccactcaccattcccactcgcccgttaccctccattccgtccctcgttcccttataaccccccaacaatacgccctaacccccgctatcacttttcgctcctcgtaatttataaatattcccattccgacgccccgattcctaatccgccccacccgccaactcctaacatccaacgcaaactttacccctacttacaccattccttatacaacattttaacaatcgaccacgcaacccgaacccctatttttaaacccgttaccccgcgatccgtactcatcaactttcacaacccaccacac

SEQ ID NO: 22279 - DNA, 579 bp, Artificial Sequence
  chemically treated genomic DNA (Homo sapiens) CpG-island No: 22279
atttagttttagtttattcgcgtttattatttaaaatttttaacgttttttttattttttttcgttatatcggtgatattatattttttcggttttatttttacgtcgcggtattcgttcgtggtattttttttttttcgattattatatcgttcgtcgttttttatttttttttggtttaatttttttgttttttaattagttttttttttaaatttagttcgtatttcgttcgttatgtaatcgttttttaatatatttttttagttgtatttttatttattatttttattcgttcgttgttttttatttcgtttttcgtttttttataattttttaataatacgttttaattttcgttattatttttcgtttttcgtagtttataaatgtttttatttcggcgtttcggtttttaattcgttttattcgttagtttttggtatttagcgtaagttttatttttatttatattattttttatataatattttgatagtcggttacgtaattcgaatttttgtttttaagttcgttgtttcgcggttcgtatttattagtttttataatttattatat

SEQ ID NO: 22280 - DNA, 579 bp, Artificial Sequence
  chemically treated genomic DNA (Homo sapiens) CpG-island No: 22280
atataataaattataaaaactaataaatacgaaccgcgaaacaacgaacttaaaaacaaaaattcgaattacgtaaccgactatcaaaatattatataaaaaataatataaataaaaataaaacttacgctaaataccaaaaactaacgaataaaacgaattaaaaaccgaaacgccgaaataaaaacatttataaactacgaaaaacgaaaaataataacgaaaattaaaacgtattattaaaaaattataaaaaaacgaaaaacgaaataaaaaacaacgaacgaataaaaataataaataaaaatacaactaaaaaaatatattaaaaaacgattacataacgaacgaaatacgaactaaatttaaaaaaaaaactaattaaaaaacaaaaaaattaaaccaaaaaaaaataaaaaacgacgaacgatataataatcgaaaaaaaaaaaataccacgaacgaataccgcgacgtaaaaataaaaccgaaaaaatataatatcaccgatataacgaaaaaaaataaaaaaaacgttaaaaattttaaataataaacgcgaataaactaaaactaaat

SEQ ID NO: 22281 - DNA, 657 bp, Artificial Sequence
  chemically treated genomic DNA (Homo sapiens) CpG-island No: 22281
  unsure (542)
gcgggtgcgttgggtgaagcggttgcgaaagcgagatttgcgtaaaagcggaagatgcgtagttcgaaaggggaggtagacgaaggtaattagcgtaataggattcgggggtttcgtggtgattggcggtgcgatttaggtaggttgggcgcgatcgggtaggcgggcggatggggtcgggattagcggggggggtgtataggtgcgggagggcgtatttaatagacgcgatgatgtaggtacggagacgtacggcgggcggatgtacgttaagggcgagttttgtagggcgtattgggtaaggggcgtggtgtcggggagcgacggatggatattgggtatttattgaagtgcgttatagtatttagacgcggattcggcgggcgcgcggttcgcggaaacgtaaggttcgggaatcgaaattcgtttgttgatagtattcgtatgcgtttatggaatttgtttaaatatcgttggttcgtattcgttagtcgcgacgtaagatcgacgggttcggttttttcggaaaagatttgaagaantttgttgcggtttttgtcgtcgtttttggtcgcgtagcggttgttttatcgttatcgagttattattacgatataggggagtaatgtttgtcgttatgataataaagttagatat

SEQ ID NO: 22282 - DNA, 657 bp, Artificial Sequence
  chemically treated genomic DNA (Homo sapiens) CpG-island No: 22282
  unsure (116)
atatctaactttattatcataacgacaaacattactcccctatatcgtaataataactcgataacgataaaacaaccgctacgcgaccaaaaacgacgacaaaaaccgcaacaaanttcttcaaatcttttccgaaaaaaccgaacccgtcgatcttacgtcgcgactaacgaatacgaaccaacgatatttaaacaaattccataaacgcatacgaatactatcaacaaacgaatttcgattcccgaaccttacgtttccgcgaaccgcgcgcccgccgaatccgcgtctaaatactataacgcacttcaataaatacccaatatccatccgtcgctccccgacaccacgccccttacccaatacgccctacaaaactcgcccttaacgtacatccgcccgccgtacgtctccgtacctacatcatcgcgtctattaaatacgccctcccgcacctatacaccccccccgctaatcccgaccccatccgcccgcctacccgatcgcgcccaacctacctaaatcgcaccgccaatcaccacgaaacccccgaatcctattacgctaattaccttcgtctacctcccctttcgaactacgcatcttccgcttttacgcaaatctcgctttcgcaaccgcttcacccaacgcacccgc

SEQ ID NO: 22283 - DNA, 657 bp, Artificial Sequence
  chemically treated genomic DNA (Homo sapiens) CpG-island No: 22283
  unsure (116)
atgtttagttttattattatagcggtaggtattatttttttgtatcgtaataataattcgatagcgatggggtagtcgttacgcggttaggagcgacgataggggtcgtagtaggnttttttaggtttttttcgaaggggtcgagttcgtcggttttacgtcgcgattagcgggtacgggttaacggtatttgagtaagttttatgggcgtatacgggtgttattaataagcgagtttcgattttcgggttttgcgttttcgcggatcgcgcgttcgtcgagttcgcgtttaagtattgtggcgtattttaatgggtatttaatgtttattcgtcgtttttcgatattacgttttttatttaatgcgttttgtaagattcgtttttagcgtgtattcgttcgtcgtacgttttcgtatttgtattatcgcgtttattaagtacgttttttcgtatttgtatatttttttcgttagtttcggttttattcgttcgtttattcggtcgcgtttagtttatttgggtcgtatcgttagttattacggggttttcgggttttattgcgttagttattttcgtttattttttttttcgggttacgtatttttcgtttttgcgtaggtttcgttttcgtaatcgttttatttagcgtattcgt

SEQ ID NO: 22284 - DNA, 657 bp, Artificial Sequence
  chemically treated genomic DNA (Homo sapiens) CpG-island No: 22284
  unsure (542)
acgaatacgctaaataaaacgattacgaaaacgaaacctacgcaaaaacgaaaaatacgtaacccgaaaaaaaaaataaacgaaaataactaacgcaataaaacccgaaaaccccgtaataactaacgatacgacccaaataaactaaacgcgaccgaataaacgaacgaataaaaccgaaactaacgaaaaaaatatacaaatacgaaaaaacgtacttaataaacgcgataatacaaatacgaaaacgtacgacgaacgaatacacgctaaaaacgaatcttacaaaacgcattaaataaaaaacgtaatatcgaaaaacgacgaataaacattaaatacccattaaaatacgccacaatacttaaacgcgaactcgacgaacgcgcgatccgcgaaaacgcaaaacccgaaaatcgaaactcgcttattaataacacccgtatacgcccataaaacttactcaaataccgttaacccgtacccgctaatcgcgacgtaaaaccgacgaactcgaccccttcgaaaaaaacctaaaaaancctactacgacccctatcgtcgctcctaaccgcgtaacgactaccccatcgctatcgaattattattacgatacaaaaaaataatacctaccgctataataataaaactaaacat

SEQ ID NO: 22285 - DNA, 1140 bp, Artificial Sequence
  chemically treated genomic DNA (Homo sapiens) CpG-island No: 22285
ggatatgaatatagaaggggtcgtatgtgttacgggatttgcgaattgcgtatcgttgcggggattgtgtggcgacggttacggttgaaaatatttggggttggcgttattaggggtaggggtgggagaagaggagaattgggtagagaggaggagacgcgtaatttggttcgatacggttgtgcggattattattcggttgcgtatcgtaggaaaattgcgtttaagagggatggaataaggagcgtatatgtttaagttagtttattcggagttaggggtattatattaggcggcgcggtagtttaggacgtataggcgtttgtaatcgagcgttgtataacgttaggagcgaaatagtttatatagcgtgagtagaacgacgcgggggtcgtagaatagattttcgttagtagtagggcgtattcgtagttgcggaatttttgttatcgataggaattcgtttgagtgttaattatattagtaattataaaagtatcggacgaagtcggatttgagggtagttagtagcgataattaatcggttttagtattattcgtagtaggcgggcgttgagtatttgataggattgtatttttttacgtttattcggttaggtagtaggcgtaggcgatataggtttaagtaggcgcgtacggataaggaaacgtatttttttataattagcgggttttcgttcgtattcgttttattagtagacgtaaaaagtatagtaggtataagagcgggataggcgagggggtagtttcggaaatagttttaagtaaaatattagttatttacgttttttgtttcgggcgggtaagtattcgaggcggatacgtcgttgggttggggtattatatgtgacgtttagttggttagtttgtaggtttaggtcgacgaaaattttcgacgagttagggtttttttaggcgatttttttaattacgttaagttgttttatttttaaacgtttgtaggcgatatgcgttgtggttcgtttcgtacgtttaatttttttgaagcgttgttagtaggcgttaggcgttagtagcggataaaatattaatcgttatagagcggtaaatttttcgttataggagtttatattgattttatagtatagtagtcgtatg

SEQ ID NO: 22286 - DNA, 1140 bp, Artificial Sequence
  chemically treated genomic DNA (Homo sapiens) CpG-island No: 22286
catacgactactatactataaaatcaatataaactcctataacgaaaaatttaccgctctataacgattaatattttatccgctactaacgcctaacgcctactaacaacgcttcaaaaaaattaaacgtacgaaacgaaccacaacgcatatcgcctacaaacgtttaaaaataaaacaacttaacgtaattaaaaaaatcgcctaaaaaaaccctaactcgtcgaaaattttcgtcgacctaaacctacaaactaaccaactaaacgtcacatataataccccaacccaacgacgtatccgcctcgaatacttacccgcccgaaacaaaaaacgtaaataactaatattttacttaaaactatttccgaaactaccccctcgcctatcccgctcttatacctactatactttttacgtctactaataaaacgaatacgaacgaaaacccgctaattataaaaaaatacgtttccttatccgtacgcgcctacttaaacctatatcgcctacgcctactacctaaccgaataaacgtaaaaaaatacaatcctatcaaatactcaacgcccgcctactacgaataatactaaaaccgattaattatcgctactaactaccctcaaatccgacttcgtccgatacttttataattactaatataattaacactcaaacgaattcctatcgataacaaaaattccgcaactacgaatacgccctactactaacgaaaatctattctacgacccccgcgtcgttctactcacgctatataaactatttcgctcctaacgttatacaacgctcgattacaaacgcctatacgtcctaaactaccgcgccgcctaatataatacccctaactccgaataaactaacttaaacatatacgctccttattccatccctcttaaacgcaattttcctacgatacgcaaccgaataataatccgcacaaccgtatcgaaccaaattacgcgtctcctcctctctacccaattctcctcttctcccacccctacccctaataacgccaaccccaaatattttcaaccgtaaccgtcgccacacaatccccgcaacgatacgcaattcgcaaatcccgtaacacatacgaccccttctatattcatatcc

SEQ ID NO: 22287 - DNA, 1140 bp, Artificial Sequence
  chemically treated genomic DNA (Homo sapiens) CpG-island No: 22287
tatacggttattgtgttgtaagattagtgtgagtttttatagcggagagtttatcgttttgtagcgattggtgttttattcgttattggcgtttaacgtttattggtagcgttttagaagggttgggcgtacggagcgggttataacgtatatcgtttgtaggcgtttgggggtagagtagtttggcgtaattgaagggatcgtttgggaaaattttgattcgtcgaagattttcgtcggtttgagtttgtaagttagttagttggacgttatatgtggtattttagtttagcggcgtgttcgtttcggatatttgttcgttcggggtaggaggcgtggatggttgatattttatttagagttattttcgggattgttttttcgtttatttcgtttttatgtttgttgtgttttttacgtttgttggtaaagcggatgcgggcgagagttcgttgattgtaaagaaatacgtttttttgttcgtacgcgtttgtttaagtttatatcgtttacgtttgttgtttaatcggatgaacgtaggagagtgtagttttgttaggtgtttagcgttcgtttgttacgggtagtgttagagtcggttggttgtcgttgttggttatttttagattcggtttcgttcggtgtttttatgattgttggtgtaattagtatttaggcgggtttttgtcgatagtaggaatttcgtaattgcgaatacgttttgttattagcgggagtttgttttgcggttttcgcgtcgttttgtttacgttgtataagttatttcgtttttggcgttatatagcgttcgattataagcgtttatgcgttttaagttgtcgcgtcgtttggtgtggtgtttttggtttcggataaattggtttaggtatatgcgttttttattttattttttttaggcgtagtttttttgcgatacgtagtcggataatggttcgtatagtcgtatcgggttaggttacgcgtttttttttttttgtttaatttttttttttttttatttttatttttagtagcgttagttttaggtatttttagtcgtaatcgtcgttatatagttttcgtagcggtacgtaattcgtaggtttcgtggtatatacggttttttttatatttatgttt

SEQ ID NO: 22288 - DNA, 1140 bp, Artificial Sequence
  chemically treated genomic DNA (Homo sapiens) CpG-island No: 22288
aaacataaatataaaaaaaaccgtatataccacgaaacctacgaattacgtaccgctacgaaaactatataacgacgattacgactaaaaatacctaaaactaacgctactaaaaataaaaataaaaaaaaaaaaaaattaaacaaaaaaaaaaaaacgcgtaacctaacccgatacgactatacgaaccattatccgactacgtatcgcaaaaaaactacgcctaaaaaaaataaaataaaaaacgcatatacctaaaccaatttatccgaaaccaaaaacaccacaccaaacgacgcgacaacttaaaacgcataaacgcttataatcgaacgctatataacgccaaaaacgaaataacttatacaacgtaaacaaaacgacgcgaaaaccgcaaaacaaactcccgctaataacaaaacgtattcgcaattacgaaattcctactatcgacaaaaacccgcctaaatactaattacaccaacaatcataaaaacaccgaacgaaaccgaatctaaaaataaccaacaacgacaaccaaccgactctaacactacccgtaacaaacgaacgctaaacacctaacaaaactacactctcctacgttcatccgattaaacaacaaacgtaaacgatataaacttaaacaaacgcgtacgaacaaaaaaacgtatttctttacaatcaacgaactctcgcccgcatccgctttaccaacaaacgtaaaaaacacaacaaacataaaaacgaaataaacgaaaaaacaatcccgaaaataactctaaataaaatatcaaccatccacgcctcctaccccgaacgaacaaatatccgaaacgaacacgccgctaaactaaaataccacatataacgtccaactaactaacttacaaactcaaaccgacgaaaatcttcgacgaatcaaaattttcccaaacgatcccttcaattacgccaaactactctacccccaaacgcctacaaacgatatacgttataacccgctccgtacgcccaacccttctaaaacgctaccaataaacgttaaacgccaataacgaataaaacaccaatcgctacaaaacgataaactctccgctataaaaactcacactaatcttacaacacaataaccgtata

SEQ ID NO: 22289 - DNA, 596 bp, Artificial Sequence
  chemically treated genomic DNA (Homo sapiens) CpG-island No: 22289
gcgagggatggtcgataaattaggggaaaattttagcgtagttttacggtgtagtattagaatattcgacgttcgggaaacggttcgggggagtttattcgttagcgatagtgaataggtaattttgattatttaaacggatatagatgcgggaacgggtgcgcgatttggaggtttgtagcgatagggtatagtcgaatgtttcgcgttagggcgaacgttgagagggaatcgacggtatggttagagcgaggagaaagggtatgatttagatcggtaagatgaaatacggtttgaagttagttgcgggggggcgtgggcgtgtatggttttattatgtagagattatcgcggtttaggtaagcggggagacgtaggggcggtagtattacgttagatggtcggattgtacgtataggagaagtgcggttgtgggggttggtataatacgcggtcgcgcgttttatgtaatatatgggacgataattggtatggtaggcgacgacgggttcgttcggcgttagttattacgaaattattaagtaacgattgtaataattagtatatcgattaataagtgagaatttgacgaaatt

SEQ ID NO: 22290 - DNA, 596 bp, Artificial Sequence
  chemically treated genomic DNA (Homo sapiens) CpG-island No: 22290
aatttcgtcaaattctcacttattaatcgatatactaattattacaatcgttacttaataatttcgtaataactaacgccgaacgaacccgtcgtcgcctaccataccaattatcgtcccatatattacataaaacgcgcgaccgcgtattataccaacccccacaaccgcacttctcctatacgtacaatccgaccatctaacgtaatactaccgcccctacgtctccccgcttacctaaaccgcgataatctctacataataaaaccatacacgcccacgcccccccgcaactaacttcaaaccgtatttcatcttaccgatctaaatcataccctttctcctcgctctaaccataccgtcgattccctctcaacgttcgccctaacgcgaaacattcgactataccctatcgctacaaacctccaaatcgcgcacccgttcccgcatctatatccgtttaaataatcaaaattacctattcactatcgctaacgaataaactcccccgaaccgtttcccgaacgtcgaatattctaatactacaccgtaaaactacgctaaaattttcccctaatttatcgaccatccctcgc

SEQ ID NO: 22291 - DNA, 596 bp, Artificial Sequence
  chemically treated genomic DNA (Homo sapiens) CpG-island No: 22291
agtttcgttaggtttttatttattggtcgatatgttaattattgtagtcgttgtttgatagtttcgtggtagttgacgtcgaacgggttcgtcgtcgtttgttatgttagttatcgttttatgtattatatggggcgcgcggtcgcgtattgtgttagtttttatagtcgtattttttttgtgcgtgtagttcggttatttggcgtggtattgtcgtttttacgttttttcgtttgtttgggtcgcggtggtttttgtatagtggggttatgtacgtttacgttttttcgtagttggttttaaatcgtgttttattttgtcggtttaggttatgtttttttttttcgttttaattatatcgtcggtttttttttaacgttcgttttggcgcggggtattcggttatgttttgtcgttgtaggtttttaagtcgcgtattcgttttcgtatttatgttcgtttgggtagttaaggttgtttatttattatcgttggcgggtgggttttttcgggtcgtttttcgggcgtcgagtattttagtattgtatcgtgggattacgttaaggtttttttttaatttgtcggttatttttcgt

SEQ ID NO: 22292 - DNA, 596 bp, Artificial Sequence
  chemically treated genomic DNA (Homo sapiens) CpG-island No: 22292
acgaaaaataaccgacaaattaaaaaaaaaccttaacgtaatcccacgatacaatactaaaatactcgacgcccgaaaaacgacccgaaaaaacccacccgccaacgataataaataaacaaccttaactacccaaacgaacataaatacgaaaacgaatacgcgacttaaaaacctacaacgacaaaacataaccgaataccccgcgccaaaacgaacgttaaaaaaaaaccgacgatataattaaaacgaaaaaaaaaaacataacctaaaccgacaaaataaaacacgatttaaaaccaactacgaaaaaacgtaaacgtacataaccccactatacaaaaaccaccgcgacccaaacaaacgaaaaaacgtaaaaacgacaataccacgccaaataaccgaactacacgcacaaaaaaaatacgactataaaaactaacacaatacgcgaccgcgcgccccatataatacataaaacgataactaacataacaaacgacgacgaacccgttcgacgtcaactaccacgaaactatcaaacaacgactacaataattaacatatcgaccaataaataaaaacctaacgaaact

SEQ ID NO: 22293 - DNA, 530 bp, Artificial Sequence
  chemically treated genomic DNA (Homo sapiens) CpG-island No: 22293
  unsure (472)
gagattacgattacgacgattacgtcgacgatttggaaaacgaggacgacgcgacggcgatatttacggcgttgttattgcgttcggtataagttaagcgatcgtttgttttgtttttttatttatgatttataggatttgttgtaaatcgttttcgttattcggcgatgtaacgttatgcgtaatcgcgttgcgtataggagattacgggttacgtatagaggggaggggtggcggtatttagtgtttacgagtggtagtagatgggcgcgggtttcgattaggtcgcgcgcggtggatcgggtggcgtaggggacgcgtaggggtgtggtggggtttgtggttgtttgggtcgcgagtttatcggtcgtggggcgtttgtgtgacgcggggtagcgggggtttgacggattattacgttagcgtttttcggcgttcggtcgtttttgtttggttaattgattattgttangtatagcgtcgattttaagtagattatcgaagaaagaagaatatatgtagggaggaat

SEQ ID NO: 22294 - DNA, 530 bp, Artificial Sequence
  chemically treated genomic DNA (Homo sapiens) CpG-island No: 22294
  unsure (59)
attcctccctacatatattcttctttcttcgataatctacttaaaatcgacgctatacntaacaataatcaattaaccaaacaaaaacgaccgaacgccgaaaaacgctaacgtaataatccgtcaaacccccgctaccccgcgtcacacaaacgccccacgaccgataaactcgcgacccaaacaaccacaaaccccaccacacccctacgcgtcccctacgccacccgatccaccgcgcgcgacctaatcgaaacccgcgcccatctactaccactcgtaaacactaaataccgccacccctcccctctatacgtaacccgtaatctcctatacgcaacgcgattacgcataacgttacatcgccgaataacgaaaacgatttacaacaaatcctataaatcataaataaaaaaacaaaacaaacgatcgcttaacttataccgaacgcaataacaacgccgtaaatatcgccgtcgcgtcgtcctcgttttccaaatcgtcgacgtaatcgtcgtaatcgtaatctc

SEQ ID NO: 22295 - DNA, 530 bp, Artificial Sequence
  chemically treated genomic DNA (Homo sapiens) CpG-island No: 22295
  unsure (59)
gtttttttttgtatatattttttttttttcggtagtttgtttaaaatcggcgttatatntggtagtagttagttagttaggtaggaacggtcgagcgtcggggggcgttgacgtagtggttcgttaggttttcgttgtttcgcgttatatagacgttttacggtcggtaggttcgcgatttaaatagttatagattttattatatttttgcgcgttttttgcgttattcgatttatcgcgcgcgatttagtcgaagttcgcgtttatttgttattattcgtgggtattaggtatcgttattttttttttttatacgtaattcgtggttttttgtacgtaacgcggttgcgtatggcgttatatcgtcgggtggcgaaggcggtttatagtaaattttgtaagttataggtggagaggtaaggtaagcggtcgtttaatttatatcgggcgtaatggtaacgtcgtaaatgtcgtcgtcgcgtcgttttcgttttttaggtcgtcggcgtagtcgtcgtagtcgtagtttt

SEQ ID NO: 22296 - DNA, 530 bp, Artificial Sequence
  chemically treated genomic DNA (Homo sapiens) CpG-island No: 22296
  unsure (472)
aaaactacgactacgacgactacgccgacgacctaaaaaacgaaaacgacgcgacgacgacatttacgacgttaccattacgcccgatataaattaaacgaccgcttaccttacctctccacctataacttacaaaatttactataaaccgccttcgccacccgacgatataacgccatacgcaaccgcgttacgtacaaaaaaccacgaattacgtataaaaaaaaaaaataacgatacctaatacccacgaataataacaaataaacgcgaacttcgactaaatcgcgcgcgataaatcgaataacgcaaaaaacgcgcaaaaatataataaaatctataactatttaaatcgcgaacctaccgaccgtaaaacgtctatataacgcgaaacaacgaaaacctaacgaaccactacgtcaacgccccccgacgctcgaccgttcctacctaactaactaactactaccanatataacgccgattttaaacaaactaccgaaaaaaaaaaaatatatacaaaaaaaaac

SEQ ID NO: 22297 - DNA, 651 bp, Artificial Sequence
  chemically treated genomic DNA (Homo sapiens) CpG-island No: 22297
  unsure (624..)
tttattatttggttcgaggatgcgttcgtggtgtcgtattcgattattatttgcgtaggagatgcgttcgtcgagtcgtattcgtttattatttgcgtaggaggatgcgtcgtcgagtcgtattcgtttattaattgcgtaggaggatgcgttcgtcggtcgtattcgtttattatttgcgtaggaggatgcgttcgtcgagtcgtatcgttgattatttgcgtaggaggatgcgttcgtcgagtcgtattcgtttttatttgtatacgaagatgcgttcgtcgagtcgtattcgtttattatttcgtaggaggatgcgttcgtcgagtcgtattcgtttattatttgcgtaggggatgcgttcgtcgagtcgtattcgtttattatttgtatacgaagatgcgtcgtcgagtggtattcgtgttttttttgcgcgcggagatggtttgtaaattgaatatttataggtggtcggttgttaattgattattgttatcgtatagcgtcgatttttgttatatgtttttaacggttatattgggggcgtggcgttagagagttgagggggtcgttgaaagggatgttattgaagattagattataacgtgtcggggtagaaaaggnnatatttaaaatgtggcgggcgaaaaa

SEQ ID NO: 22298 - DNA, 651 bp, Artificial Sequence
  chemically treated genomic DNA (Homo sapiens) CpG-island No: 22298
  unsure (27..)
tttttcgcccgccacattttaaatatnnccttttctaccccgacacgttataatctaatcttcaataacatccctttcaacgaccccctcaactctctaacgccacgcccccaatataaccgttaaaaacatataacaaaaatcgacgctatacgataacaataatcaattaacaaccgaccacctataaatattcaatttacaaaccatctccgcgcgcaaaaaaaacacgaataccactcgacgacgcatcttcgtatacaaataataaacgaatacgactcgacgaacgcatcccctacgcaaataataaacgaatacgactcgacgaacgcatcctcctacgaaataataaacgaatacgactcgacgaacgcatcttcgtatacaaataaaaacgaatacgactcgacgaacgcatcctcctacgcaaataatcaacgatacgactcgacgaacgcatcctcctacgcaaataataaacgaatacgaccgacgaacgcatcctcctacgcaattaataaacgaatacgactcgacgacgcatcctcctacgcaaataataaacgaatacgactcgacgaacgcatctcctacgcaaataataatcgaatacgacaccacgaacgcatcctcgaaccaaataataaa

SEQ ID NO: 22299 - DNA, 651 bp, Artificial Sequence
  chemically treated genomic DNA (Homo sapiens) CpG-island No: 22299
  unsure (27..)
tttttcgttcgttatattttaggtgtnnttttttttatttcggtacgttatgatttggtttttaataatattttttttagcgatttttttagttttttgacgttacgtttttagtgtagtcgttagaagtatgtaataaaaatcggcgttatacgatggtagtagttagttagtagtcggttatttgtaggtatttagtttgtaggttattttcgcgcgtaaggggggtacgggtgttattcgacgacgtattttcgtatgtaaatggtgaacgggtgcgattcgacgaacgtattttttacgtaaatggtgaacgggtgcgattcgacgaacgtatttttttacgaaatggtgaacgggtgcgattcgacgaacgtattttcgtatgtaaatgggaacgggtgcgattcgacgaacgtatttttttacgtaaatggttaacggtgcgattcgacgaacgtatttttttacgtaaatggtgaacgggtgcgatcgacgaacgtatttttttacgtaattggtgaacgggtgcgattcgacgacgtatttttttacgtaaatggtgaacgggtgcgattcgacgaacgtattttttacgtaaatggtgatcgggtgcgatattacgaacgtattttcgaattaaatggtgaa

SEQ ID NO: 22300 - DNA, 651 bp, Artificial Sequence
  chemically treated genomic DNA (Homo sapiens) CpG-island No: 22300
  unsure (624..)
ttcaccatttaattcgaaaatacgttcgtaatatcgcacccgatcaccatttacgtaaaaaatacgttcgtcgaatcgcacccgttcaccatttacgtaaaaaaatacgtcgtcgaatcgcacccgttcaccaattacgtaaaaaaatacgttcgtcgatcgcacccgttcaccatttacgtaaaaaaatacgttcgtcgaatcgcaccgttaaccatttacgtaaaaaaatacgttcgtcgaatcgcacccgttcccatttacatacgaaaatacgttcgtcgaatcgcacccgttcaccatttcgtaaaaaaatacgttcgtcgaatcgcacccgttcaccatttacgtaaaaaatacgttcgtcgaatcgcacccgttcaccatttacatacgaaaatacgtcgtcgaataacacccgtaccccccttacgcgcgaaaataacctacaaactaaatacctacaaataaccgactactaactaactactaccatcgtataacgccgatttttattacatacttctaacgactacactaaaaacgtaacgtcaaaaaactaaaaaaatcgctaaaaaaaatattattaaaaaccaaatcataacgtaccgaaataaaaaaaannacacctaaaatataacgaacgaaaaa

SEQ ID NO: 22301 - DNA, 732 bp, Artificial Sequence
  chemically treated genomic DNA (Homo sapiens) CpG-island No: 22301
  unsure (561)
ttattgttcggggatggggagtaagtttagttagtcgttgttttcggtgtcgcgtgcgtagttgtacgttatttttagacgaatcgatgattggatgatggtcgtcgtagtcgttatattgatgatacggatgtgttttttcgtaatattatgttatcggagagttgttaacgtatggttatcgtcgggtatggcgttgtttcgtagataggtagaatttgatggtatgtttgcgattaatgtaaacgtgtttatcggattatgcgttagaatgcgttgttgtttgagcgaaatttgttgtatcgttatcgaaacgggtatatataggtagagtggtcgtgaagaaagtaattagcgatggtgttttgacgggttcgagttttgttgtgaaacggagagagattgcgtgttacgttcgcgttggattgttgtgatcgtgggtattgtattgggcggttattatcggcggttttaatagtgaaatagtaaggacgttatgttgggagcggtggaacgtcgtttcggtaacgatttttttcgtttttagtggagtggttgatnggataatggtttatgttatcgggttatgaaatacgttagttcgttcggatgttgggatttgaatcgaagatacggtgcggagttcggagagtaacggaggttcggttattgttattgatttattgttatcgtatagcgtcgatttttcgtatagtacgtacgtgtttatat

SEQ ID NO: 22302 - DNA, 732 bp, Artificial Sequence
  chemically treated genomic DNA (Homo sapiens) CpG-island No: 22302
  unsure (172)
atataaacacgtacgtactatacgaaaaatcgacgctatacgataacaataaatcaataacaataaccgaacctccgttactctccgaactccgcaccgtatcttcgattcaaatcccaacatccgaacgaactaacgtatttcataacccgataacataaaccattatccnatcaaccactccactaaaaacgaaaaaaatcgttaccgaaacgacgttccaccgctcccaacataacgtccttactatttcactattaaaaccgccgataataaccgcccaatacaatacccacgatcacaacaatccaacgcgaacgtaacacgcaatctctctccgtttcacaacaaaactcgaacccgtcaaaacaccatcgctaattactttcttcacgaccactctacctatatatacccgtttcgataacgatacaacaaatttcgctcaaacaacaacgcattctaacgcataatccgataaacacgtttacattaatcgcaaacataccatcaaattctacctatctacgaaacaacgccatacccgacgataaccatacgttaacaactctccgataacataatattacgaaaaaacacatccgtatcatcaatataacgactacgacgaccatcatccaatcatcgattcgtctaaaaataacgtacaactacgcacgcgacaccgaaaacaacgactaactaaacttactccccatccccgaacaataa

SEQ ID NO: 22303 - DNA, 732 bp, Artificial Sequence
  chemically treated genomic DNA (Homo sapiens) CpG-island No: 22303
  unsure (172)
gtataagtacgtacgtattgtacggaaaatcggcgttatacgatggtagtaagttagtagtaatagtcggattttcgttatttttcggatttcgtatcgtgttttcggtttaagttttaatattcgggcgaattggcgtgttttatagttcggtagtatgaattattatttngttagttattttattggagacgaggaagatcgttgtcgaagcggcgttttatcgtttttagtatgacgtttttattgttttattgttgaagtcgtcggtagtgatcgtttagtgtagtgtttacgattatagtagtttagcgcgaacgtgatacgtagttttttttcgttttatagtagaattcgaattcgttagagtattatcgttgattgttttttttacggttattttgtttgtatgtgttcgtttcgatggcggtatagtaggtttcgtttaagtaatagcgtattttggcgtatgattcggtaaatacgtttgtattgatcgtaggtatattattaagttttgtttgtttgcgaagtagcgttatattcgacgataattatacgttggtagtttttcgataatatggtgttacggagaagtatattcgtattattagtgtgacgattgcggcggttattatttagttatcggttcgtttgagaatgacgtgtaattgcgtacgcgatatcggagataacggttgattaagtttattttttattttcgggtaataa

SEQ ID NO: 22304 - DNA, 732 bp, Artificial Sequence
  chemically treated genomic DNA (Homo sapiens) CpG-island No: 22304
  unsure (561)
ttattacccgaaaataaaaaataaacttaatcaaccgttatctccgatatcgcgtacgcaattacacgtcattctcaaacgaaccgataactaaataataaccgccgcaatcgtcacactaataatacgaatatacttctccgtaacaccatattatcgaaaaactaccaacgtataattatcgtcgaatataacgctacttcgcaaacaaacaaaacttaataatatacctacgatcaatacaaacgtatttaccgaatcatacgccaaaatacgctattacttaaacgaaacctactataccgccatcgaaacgaacacatacaaacaaaataaccgtaaaaaaaacaatcaacgataatactctaacgaattcgaattctactataaaacgaaaaaaaactacgtatcacgttcgcgctaaactactataatcgtaaacactacactaaacgatcactaccgacgacttcaacaataaaacaataaaaacgtcatactaaaaacgataaaacgccgcttcgacaacgatcttcctcgtctccaataaaataactaacnaaataataattcatactaccgaactataaaacacgccaattcgcccgaatattaaaacttaaaccgaaaacacgatacgaaatccgaaaaataacgaaaatccgactattactactaacttactaccatcgtataacgccgattttccgtacaatacgtacgtacttatac

SEQ ID NO: 22305 - DNA, 664 bp, Artificial Sequence
  chemically treated genomic DNA (Homo sapiens) CpG-island No: 22305
cgtcgggtatggttgatgcgtatatttatatttttgaatcgggtcgtagttattgggaaggttatgaaatcggtattcgcgtagcggtaaaaggtggtattattattatgatcgaaatgtcgtttaattagttgtttgtaacggttgatcgcgttttaattgaattgaagttcgatgtcgttaaaggtaagttgattattgatgcggtataattcggtggtttggtgttttataatatcgatcgtttgtatgagttggatgaagtgggcgttgtcggttttaaatgtttcgttgcgatttgtggcgatcgcggtatcgataacgattttcgtgatgtaaacgattggtagttttttaaaggtgcgtagaagttgggcgaattgggttagtcggtgttggtgtattgcgaaaacgcgttgatttgtgacgaattgggcgaagaagcgaagcgtgaaggtcgcgtaatcgtttatgattatgtggtttcgcgttcggtatttatcgaagtggaagtaattcgtcgcgtattgtatttggcgaaagttgttggttgtcgtttgtacgtttgttacgttagtagttcggaaggtgttgaggaagtgattcgtgtacgttaggaaggttagacgtatatgtgatgggattaggttattgtaaaaaaaaa

SEQ ID NO: 22306 - DNA, 664 bp, Artificial Sequence
  chemically treated genomic DNA (Homo sapiens) CpG-island No: 22306
tttttttttacaataacctaatcccatcacatatacgtctaaccttcctaacgtacacgaatcacttcctcaacaccttccgaactactaacgtaacaaacgtacaaacgacaaccaacaactttcgccaaatacaatacgcgacgaattacttccacttcgataaataccgaacgcgaaaccacataatcataaacgattacgcgaccttcacgcttcgcttcttcgcccaattcgtcacaaatcaacgcgttttcgcaatacaccaacaccgactaacccaattcgcccaacttctacgcacctttaaaaaactaccaatcgtttacatcacgaaaatcgttatcgataccgcgatcgccacaaatcgcaacgaaacatttaaaaccgacaacgcccacttcatccaactcatacaaacgatcgatattataaaacaccaaaccaccgaattataccgcatcaataatcaacttacctttaacgacatcgaacttcaattcaattaaaacgcgatcaaccgttacaaacaactaattaaacgacatttcgatcataataataataccaccttttaccgctacgcgaataccgatttcataaccttcccaataactacgacccgattcaaaaatataaatatacgcatcaaccatacccgacg

SEQ ID NO: 22307 - DNA, 664 bp, Artificial Sequence
  chemically treated genomic DNA (Homo sapiens) CpG-island No: 22307
tttttttttataatagtttggttttattatatgtacgtttgatttttttgacgtgtacgagttatttttttaatatttttcgggttgttgacgtggtaaacgtgtagacggtaattagtaattttcgttagatatagtacgcggcgaattgtttttatttcggtaaatatcggacgcgaagttatatagttatgagcggttacgcgatttttacgtttcgttttttcgtttagttcgttataaattagcgcgttttcgtagtgtattagtatcggttgatttagttcgtttagtttttgcgtatttttgaagaattgttagtcgtttatattacggaagtcgttgtcgatatcgcgatcgttataggtcgtaacgaagtatttgaagtcgataacgtttattttatttagtttatgtagacggtcgatgttgtaagatattaggttatcgagttgtgtcgtattaatagttagtttgtttttagcggtatcgaattttagtttaattgaagcgcggttaatcgttgtaggtagttggttgagcggtatttcgattatggtggtgatattattttttgtcgttgcgcgagtatcggttttataatttttttagtggttacgattcggtttagaaatatgggtgtgcgtattaattatgttcggcg

SEQ ID NO: 22308 - DNA, 664 bp, Artificial Sequence
  chemically treated genomic DNA (Homo sapiens) CpG-island No: 22308
cgccgaacataattaatacgcacacccatatttctaaaccgaatcgtaaccactaaaaaaattataaaaccgatactcgcgcaacgacaaaaaataatatcaccaccataatcgaaataccgctcaaccaactacctacaacgattaaccgcgcttcaattaaactaaaattcgataccgctaaaaacaaactaactattaatacgacacaactcgataacctaatatcttacaacatcgaccgtctacataaactaaataaaataaacgttatcgacttcaaatacttcgttacgacctataacgatcgcgatatcgacaacgacttccgtaatataaacgactaacaattcttcaaaaatacgcaaaaactaaacgaactaaatcaaccgatactaatacactacgaaaacgcgctaatttataacgaactaaacgaaaaaacgaaacgtaaaaatcgcgtaaccgctcataactatataacttcgcgtccgatatttaccgaaataaaaacaattcgccgcgtactatatctaacgaaaattactaattaccgtctacacgtttaccacgtcaacaacccgaaaaatattaaaaaaataactcgtacacgtcaaaaaaatcaaacgtacatataataaaaccaaactattataaaaaaaaa

SEQ ID NO: 22309 - DNA, 1032 bp, Artificial Sequence
  chemically treated genomic DNA (Homo sapiens) CpG-island No: 22309
ttaggggaattcggaaaattagtttcgcgcgtatcggagagggggaggggaggggacggtcgtcgggagtttttcgggttttcgggtaatcggcgtcgttttcgtatatcggacggtagtagtattcggtcggtcgggggtcgaggacgttgttcgggcgttcggcgagtttcggtcgcgttaggtcgttatcgtttttttttcgttgtttttagagtcgggcggtagggttattgtttcgatagcgtttgtcgcgtttttcgttcgcgacgtcgttgtcgtcgttattcggagtcggagtcgaggagtcgggtaggtttaatagcggtttttttttcgggtcgttcgtcgggtcgttcgttttttcgttcgttttttttcgttttttttattcgttttcgaattttttttttttttttttttcgttttttcgttatcgttttttcgttgttttgtttgttttttttcgttagcggcggtggtttttcgagacgcgtagggggcgggagtaggaggtagtttcgtttttttacgagtttgcggggtcgcggtaggggtcgagattgcgtttcgcgtcgtcgcgttatatttattcgagcgagagacggcgaggggagggaggacggagggagcggagagaaaggaggaggaatggggtaggggcggaggggagttattgttttataggtcgcggcggtaatagcgttatcgtttcggtcgcgacgggtgaagaggttgcgcgtcgcgattttgcggcgggggcgggggcggggcggtttttcgtcggtttcgttttaatcgttaatagtcgggtaggaggtttgcgcgggttagttagcgcgcgggggcggtgcgggtcgacgtcggcggttgggggtagcgggtcgggggtcgggggaggggtagtcggcggtcgtgggttcgcgtgtaaggcgcgtcgtgaggtttattttggtttaggtttttcgaggtttgttcgttgttttttgttcgtttttcgatttcgtattttcggattttcgagttttttag

SEQ ID NO: 22310 - DNA, 1032 bp, Artificial Sequence
  chemically treated genomic DNA (Homo sapiens) CpG-island No: 22310
ctaaaaaactcgaaaatccgaaaatacgaaatcgaaaaacgaacaaaaaacaacgaacaaacctcgaaaaacctaaaccaaaataaacctcacgacgcgccttacacgcgaacccacgaccgccgactacccctcccccgacccccgacccgctacccccaaccgccgacgtcgacccgcaccgcccccgcgcgctaactaacccgcgcaaacctcctacccgactattaacgattaaaacgaaaccgacgaaaaaccgccccgcccccgcccccgccgcaaaatcgcgacgcgcaacctcttcacccgtcgcgaccgaaacgataacgctattaccgccgcgacctataaaacaataactcccctccgcccctaccccattcctcctcctttctctccgctccctccgtcctccctcccctcgccgtctctcgctcgaataaatataacgcgacgacgcgaaacgcaatctcgacccctaccgcgaccccgcaaactcgtaaaaaaacgaaactacctcctactcccgccccctacgcgtctcgaaaaaccaccgccgctaacgaaaaaaaacaaacaaaacaacgaaaaaacgataacgaaaaaacgaaaaaaaaaaaaaaaaaaaattcgaaaacgaataaaaaaaacgaaaaaaaacgaacgaaaaaacgaacgacccgacgaacgacccgaaaaaaaaaccgctattaaacctacccgactcctcgactccgactccgaataacgacgacaacgacgtcgcgaacgaaaaacgcgacaaacgctatcgaaacaataaccctaccgcccgactctaaaaacaacgaaaaaaaaacgataacgacctaacgcgaccgaaactcgccgaacgcccgaacaacgtcctcgacccccgaccgaccgaatactactaccgtccgatatacgaaaacgacgccgattacccgaaaacccgaaaaactcccgacgaccgtcccctcccctccccctctccgatacgcgcgaaactaattttccgaattcccctaa

SEQ ID NO: 22311 - DNA, 1032 bp, Artificial Sequence
  chemically treated genomic DNA (Homo sapiens) CpG-island No: 22311
ttggggggttcgggagttcgggagtgcggggtcggggagcgggtagggagtagcgggtaggtttcgaggggtttgggttagagtgggttttacggcgcgttttgtacgcgaatttacggtcgtcggttgtttttttttcggttttcggttcgttgtttttagtcgtcgacgtcggttcgtatcgttttcgcgcgttgattggttcgcgtaggttttttgttcggttgttggcggttggggcgaagtcggcgggaggtcgtttcgttttcgttttcgtcgtagagtcgcggcgcgtagtttttttattcgtcgcggtcggggcggtggcgttgttgtcgtcgcggtttgtgaggtagtaattttttttcgtttttgttttattttttttttttttttttcgtttttttcgtttttttttttttcgtcgtttttcgttcgagtgaatgtggcgcggcggcgcgggacgtagtttcggtttttgtcgcggtttcgtaagttcgtgaggagacggagttgttttttgttttcgttttttgcgcgtttcggggagttatcgtcgttggcgaaggagaataagtagggtagcggagggacggtggcgggaaaacgggagagggaggagaagagggttcgagggcgagtagggaaagcggggagggacggacggaaggacggacggttcgacggacggttcggggagggggtcgttattgagtttgttcgatttttcggtttcggtttcgggtggcggcggtagcggcgtcgcggacgaagggcgcggtaagcgttatcgagataataattttgtcgttcggttttgggggtaacggagaggaagcggtggcggtttagcgcggtcgaggttcgtcgagcgttcgggtagcgttttcggttttcggtcggtcgggtgttgttgtcgttcggtgtgcgggggcggcgtcggttgttcggaaattcgaagggttttcggcggtcgttttttttttttttttttttcggtgcgcgcggagttggtttttcgggtttttttgg

SEQ ID NO: 22312 - DNA, 1032 bp, Artificial Sequence
  chemically treated genomic DNA (Homo sapiens) CpG-island No: 22312
ccaaaaaaacccgaaaaaccaactccgcgcgcaccgaaaaaaaaaaaaaaaaaaaacgaccgccgaaaacccttcgaatttccgaacaaccgacgccgcccccgcacaccgaacgacaacaacacccgaccgaccgaaaaccgaaaacgctacccgaacgctcgacgaacctcgaccgcgctaaaccgccaccgcttcctctccgttacccccaaaaccgaacgacaaaattattatctcgataacgcttaccgcgcccttcgtccgcgacgccgctaccgccgccacccgaaaccgaaaccgaaaaatcgaacaaactcaataacgaccccctccccgaaccgtccgtcgaaccgtccgtccttccgtccgtccctccccgctttccctactcgccctcgaaccctcttctcctccctctcccgttttcccgccaccgtccctccgctaccctacttattctccttcgccaacgacgataactccccgaaacgcgcaaaaaacgaaaacaaaaaacaactccgtctcctcacgaacttacgaaaccgcgacaaaaaccgaaactacgtcccgcgccgccgcgccacattcactcgaacgaaaaacgacgaaaaaaaaaaaaacgaaaaaaacgaaaaaaaaaaaaaaaaaataaaacaaaaacgaaaaaaaattactacctcacaaaccgcgacgacaacaacgccaccgccccgaccgcgacgaataaaaaaactacgcgccgcgactctacgacgaaaacgaaaacgaaacgacctcccgccgacttcgccccaaccgccaacaaccgaacaaaaaacctacgcgaaccaatcaacgcgcgaaaacgatacgaaccgacgtcgacgactaaaaacaacgaaccgaaaaccgaaaaaaaaacaaccgacgaccgtaaattcgcgtacaaaacgcgccgtaaaacccactctaacccaaacccctcgaaacctacccgctactccctacccgctccccgaccccgcactcccgaactcccgaaccccccaa

SEQ ID NO: 22313 - DNA, 672 bp, Artificial Sequence
  chemically treated genomic DNA (Homo sapiens) CpG-island No: 22313
ggttcgtttataaagcggtggtcgcgaattatcgatcggattgaatgtttagaatggttgtcggaatgattttgtcgtttatagtagggttacggtgtgtatcggacgtacgaagtgtacgtcgtttgcgtttaacgtattagtttcgggatcggtagtttcgttagagaagtcgtaatatattcggtagtagtgtttcggtgttttcgttttttatatgggcgcgattagtagttattcgtttttatcggtagttagacgtttagtttggttaacgtaatatcgtaattacgcgtttaattttttgtcgttttgttcggtttggtttagcgtcgaacgtttggggtatcgtcggggcgcgtttttcgattttatattcggttgcgtttcgttaggttagtatttttacggtcgacgaagcgagagtaattttgaacggtgtcggtgcgagtatcgtttttttttcgcgtaagtgtcgtacgattttacgttggtcgggttggggggttattcgggtaattataaagtttttaatatcgtttttatttgtgatacgaatagggtcgtaagatgttttcgcggtcggattaaatttacgcgggagattattagggggaacgggggagtagttttaagaaaaagaggtagtgttgttgtggttgttttagagga

SEQ ID NO: 22314 - DNA, 672 bp, Artificial Sequence
  chemically treated genomic DNA (Homo sapiens) CpG-island No: 22314
tcctctaaaacaaccacaacaacactacctctttttcttaaaactactcccccgttccccctaataatctcccgcgtaaatttaatccgaccgcgaaaacatcttacgaccctattcgtatcacaaataaaaacgatattaaaaactttataattacccgaataaccccccaacccgaccaacgtaaaatcgtacgacacttacgcgaaaaaaaaacgatactcgcaccgacaccgttcaaaattactctcgcttcgtcgaccgtaaaaatactaacctaacgaaacgcaaccgaatataaaatcgaaaaacgcgccccgacgataccccaaacgttcgacgctaaaccaaaccgaacaaaacgacaaaaaattaaacgcgtaattacgatattacgttaaccaaactaaacgtctaactaccgataaaaacgaataactactaatcgcgcccatataaaaaacgaaaacaccgaaacactactaccgaatatattacgacttctctaacgaaactaccgatcccgaaactaatacgttaaacgcaaacgacgtacacttcgtacgtccgatacacaccgtaaccctactataaacgacaaaatcattccgacaaccattctaaacattcaatccgatcgataattcgcgaccaccgctttataaacgaacc

SEQ ID NO: 22315 - DNA, 672 bp, Artificial Sequence
  chemically treated genomic DNA (Homo sapiens) CpG-island No: 22315
ttttttagagtaattatagtagtattgttttttttttttgaggttgttttttcgttttttttggtggtttttcgcgtgaatttggttcgatcgcggggatattttgcgattttgttcgtgttatagataaaggcggtattggaaattttgtgattgttcgagtggttttttaattcggttagcgtgggatcgtgcggtatttacgcggaggggaaacggtgttcgtatcggtatcgtttaaggttgttttcgtttcgtcggtcgtgaaagtattaatttggcgaagcgtaatcggatgtgaaatcgaaaaacgcgtttcggcgatgttttaggcgttcgacgttgagttaaatcgagtaaagcggtagaagattgggcgcgtggttgcggtattacgttgattaggttgagcgtttgattatcgataaaggcgaatggttgttgatcgcgtttatgtgaagggcgaaagtatcgaagtattgttgtcgaatatgttgcgatttttttggcgaaattgtcgatttcgaaattgatgcgttgggcgtaagcgacgtgtatttcgtgcgttcggtgtatatcgtgattttgttgtgggcgataaagttatttcggtaattattttgggtatttagttcgatcggtgattcgcggttatcgttttatgggcgagtt

SEQ ID NO: 22316 - DNA, 672 bp, Artificial Sequence
  chemically treated genomic DNA (Homo sapiens) CpG-island No: 22316
aactcgcccataaaacgataaccgcgaatcaccgatcgaactaaatacccaaaataattaccgaaataactttatcgcccacaacaaaatcacgatatacaccgaacgcacgaaatacacgtcgcttacgcccaacgcatcaatttcgaaatcgacaatttcgccaaaaaaatcgcaacatattcgacaacaatacttcgatactttcgcccttcacataaacgcgatcaacaaccattcgcctttatcgataatcaaacgctcaacctaatcaacgtaataccgcaaccacgcgcccaatcttctaccgctttactcgatttaactcaacgtcgaacgcctaaaacatcgccgaaacgcgtttttcgatttcacatccgattacgcttcgccaaattaatactttcacgaccgacgaaacgaaaacaaccttaaacgataccgatacgaacaccgtttcccctccgcgtaaataccgcacgatcccacgctaaccgaattaaaaaaccactcgaacaatcacaaaatttccaataccgcctttatctataacacgaacaaaatcgcaaaatatccccgcgatcgaaccaaattcacgcgaaaaaccaccaaaaaaaacgaaaaaacaacctcaaaaaaaaaaaacaatactactataattactctaaaaaa

SEQ ID NO: 22317 - DNA, 633 bp, Artificial Sequence
  chemically treated genomic DNA (Homo sapiens) CpG-island No: 22317
cggatgttcggtagggtatagtagtggcggtaggtgcgtggacgggtcggttgtgtttattaaacgggttgtgcgcgtttaaaaaggggtatgttaaaacggcgtacggttcgaaattgtttcggacgagataggtacggaatggtcgacggagtcgtaagtttgtttgggcgttttagttgcgtagaattttcgttggcgcgttttgattacggaattggcgatcggggttatcggtgtgcggttacgtttatttggcgcggcgacgtcgttatcgtttgtgattacgggtcgtaattcgtttagacggtcggatagttaatatttacgtcgtggacggcgtttgattgggttaaaacgtattcgcgttgacgaagcgaattattttgtgtatatcgcgggcggaagggttcgggagcgtagggcgcgcgcggtatgaaggtcgtttatacggttagtttgtcgcggttgagaggatatttgttatgggaagttgttgttttcggatcgcggggacggtgtgaaacgcgttaagatggaagggaagtaatatgttgaaatattttgtcggaaaattagatggttatttgtggatgttggagttggtcggggcgcgagtgatttttaagggga

SEQ ID NO: 22318 - DNA, 633 bp, Artificial Sequence
  chemically treated genomic DNA (Homo sapiens) CpG-island No: 22318
tccccttaaaaatcactcgcgccccgaccaactccaacatccacaaataaccatctaattttccgacaaaatatttcaacatattacttcccttccatcttaacgcgtttcacaccgtccccgcgatccgaaaacaacaacttcccataacaaatatcctctcaaccgcgacaaactaaccgtataaacgaccttcataccgcgcgcgccctacgctcccgaacccttccgcccgcgatatacacaaaataattcgcttcgtcaacgcgaatacgttttaacccaatcaaacgccgtccacgacgtaaatattaactatccgaccgtctaaacgaattacgacccgtaatcacaaacgataacgacgtcgccgcgccaaataaacgtaaccgcacaccgataaccccgatcgccaattccgtaatcaaaacgcgccaacgaaaattctacgcaactaaaacgcccaaacaaacttacgactccgtcgaccattccgtacctatctcgtccgaaacaatttcgaaccgtacgccgttttaacatacccctttttaaacgcgcacaacccgtttaataaacacaaccgacccgtccacgcacctaccgccactactataccctaccgaacatccg

SEQ ID NO: 22319 - DNA, 633 bp, Artificial Sequence
  chemically treated genomic DNA (Homo sapiens) CpG-island No: 22319
tttttttagggattattcgcgtttcggttagttttaatatttataagtggttatttaatttttcggtaaagtgttttaatatattattttttttttattttggcgcgttttatatcgttttcgcggttcgggagtagtagttttttatggtaaatgtttttttagtcgcggtaagttggtcgtgtaggcggtttttatgtcgcgcgcgttttacgttttcgggttttttcgttcgcggtgtgtataaggtagttcgtttcgttagcgcgggtgcgttttggtttaattaagcgtcgtttacggcgtaaatattggttattcggtcgtttgagcgagttacggttcgtaattataagcggtagcggcgtcgtcgcgttaggtgggcgtggtcgtatatcggtagtttcggtcgttaatttcgtggttagggcgcgttagcgggaattttacgtagttggggcgtttaggtaagtttgcggtttcgtcggttatttcgtgtttatttcgttcggggtaatttcgggtcgtacgtcgttttggtatatttttttttaagcgcgtatagttcgtttagtgggtatagtcggttcgtttacgtatttgtcgttattgttgtgttttgtcgggtattcg

SEQ ID NO: 22320 - DNA, 633 bp, Artificial Sequence
  chemically treated genomic DNA (Homo sapiens) CpG-island No: 22320
cgaatacccgacaaaacacaacaataacgacaaatacgtaaacgaaccgactatacccactaaacgaactatacgcgcttaaaaaaaaatataccaaaacgacgtacgacccgaaattaccccgaacgaaataaacacgaaataaccgacgaaaccgcaaacttacctaaacgccccaactacgtaaaattcccgctaacgcgccctaaccacgaaattaacgaccgaaactaccgatatacgaccacgcccacctaacgcgacgacgccgctaccgcttataattacgaaccgtaactcgctcaaacgaccgaataaccaatatttacgccgtaaacgacgcttaattaaaccaaaacgcacccgcgctaacgaaacgaactaccttatacacaccgcgaacgaaaaaacccgaaaacgtaaaacgcgcgcgacataaaaaccgcctacacgaccaacttaccgcgactaaaaaaacatttaccataaaaaactactactcccgaaccgcgaaaacgatataaaacgcgccaaaataaaaaaaaaataatatattaaaacactttaccgaaaaattaaataaccacttataaatattaaaactaaccgaaacgcgaataatccctaaaaaaa

SEQ ID NO: 22321 - DNA, 748 bp, Artificial Sequence
  chemically treated genomic DNA (Homo sapiens) CpG-island No: 22321
gtatacgtcggggtttagggttcgtttcgttgttattgattttaagtaacgtatagcgtcgatttgggggtagtggtcggattaagtgtgtataattattcggagagaagatcgttaatttggggagaaaggggatcggtagatgagaggattgttggatatgtagtacgagagagattggggcgggaggggatgtagataacggcgcgatatattgttttgataatgtattgttgcggaatgtggagttgggatgtttaggcgtttgacggatcgacggacggtgggcggggatagtatatatagtgtgggagtggagtggatgtggatcggagtagaatgtttaaggggggcggtcgggattaatgtaattggtggtgatcgacggttagcgtcgtgaagataaggtacgggggttgtcggtggcggcgagggtaatgtgatataatgtaagagacgtcggtaggggggcgagggtatgagcgggtaggcgtaggggattatcgaatattttatttttttattttatcggtgatcgaattcgagagaattatgggtttatggggaaaggtaagtcgtcggaggtaatggcgttatagtatagtggtgatacgtagtgtaaggaggtgtataagagtataacgggagtttcgtagcgtaaggtataatatgtagaggggagtttggtatagacgcgaggattagaaggaatgcgtaaacgtatacgaaattaggatttatggagaaa

SEQ ID NO: 22322 - DNA, 748 bp, Artificial Sequence
  chemically treated genomic DNA (Homo sapiens) CpG-island No: 22322
tttctccataaatcctaatttcgtatacgtttacgcattccttctaatcctcgcgtctataccaaactcccctctacatattataccttacgctacgaaactcccgttatactcttatacacctccttacactacgtatcaccactatactataacgccattacctccgacgacttacctttccccataaacccataattctctcgaattcgatcaccgataaaataaaaaaataaaatattcgataatcccctacgcctacccgctcataccctcgcccccctaccgacgtctcttacattatatcacattaccctcgccgccaccgacaacccccgtaccttatcttcacgacgctaaccgtcgatcaccaccaattacattaatcccgaccgccccccttaaacattctactccgatccacatccactccactcccacactatatatactatccccgcccaccgtccgtcgatccgtcaaacgcctaaacatcccaactccacattccgcaacaatacattatcaaaacaatatatcgcgccgttatctacatcccctcccgccccaatctctctcgtactacatatccaacaatcctctcatctaccgatcccctttctccccaaattaacgatcttctctccgaataattatacacacttaatccgaccactacccccaaatcgacgctatacgttacttaaaatcaataacaacgaaacgaaccctaaaccccgacgtatac

SEQ ID NO: 22323 - DNA, 748 bp, Artificial Sequence
  chemically treated genomic DNA (Homo sapiens) CpG-island No: 22323
tttttttatagattttaatttcgtatgcgtttgcgtattttttttagttttcgcgtttgtgttaggtttttttttatatattgtgttttacgttgcgaagttttcgttatgtttttgtatatttttttgtattacgtgttattattgtattatagcgttattgttttcggcggtttgtttttttttatgggtttatggttttttcgggttcggttatcggtagggtggggaggtagggtattcggtggttttttgcgtttattcgtttatattttcgtttttttatcggcgttttttatattatgttatattattttcgtcgttatcggtagttttcgtgttttgtttttacggcgttaatcgtcggttattattagttatattaatttcggtcgttttttttaagtattttatttcggtttatatttattttatttttatattgtgtgtgttgttttcgtttatcgttcgtcggttcgttaagcgtttaagtattttagttttatatttcgtagtagtatattgttaaaatagtatgtcgcgtcgttgtttgtattttttttcgttttaatttttttcgtattatatatttagtaatttttttatttatcggttttttttttttttaaattggcggtttttttttcgggtggttgtatatatttaattcggttattatttttaaatcggcgttatacgttgtttgaagttagtagtagcgaggcgggttttgggtttcgacgtgtgt

SEQ ID NO: 22324 - DNA, 748 bp, Artificial Sequence
  chemically treated genomic DNA (Homo sapiens) CpG-island No: 22324
acacacgtcgaaacccaaaacccgcctcgctactactaacttcaaacaacgtataacgccgatttaaaaataataaccgaattaaatatatacaaccacccgaaaaaaaaaccgccaatttaaaaaaaaaaaaaaccgataaataaaaaaattactaaatatataatacgaaaaaaattaaaacgaaaaaaaatacaaacaacgacgcgacatactattttaacaatatactactacgaaatataaaactaaaatacttaaacgcttaacgaaccgacgaacgataaacgaaaacaacacacacaatataaaaataaaataaatataaaccgaaataaaatacttaaaaaaaacgaccgaaattaatataactaataataaccgacgattaacgccgtaaaaacaaaacacgaaaactaccgataacgacgaaaataatataacataatataaaaaacgccgataaaaaaacgaaaatataaacgaataaacgcaaaaaaccaccgaataccctacctccccaccctaccgataaccgaacccgaaaaaaccataaacccataaaaaaaaacaaaccgccgaaaacaataacgctataatacaataataacacgtaatacaaaaaaatatacaaaaacataacgaaaacttcgcaacgtaaaacacaatatataaaaaaaaacctaacacaaacgcgaaaactaaaaaaaatacgcaaacgcatacgaaattaaaatctataaaaaaa

SEQ ID NO: 22325 - DNA, 532 bp, Artificial Sequence
  chemically treated genomic DNA (Homo sapiens) CpG-island No: 22325
gcgcgttttgtacgcgaatttacggtcgtcggttgttttttttcggttttcggttcgttgtttttagtcgtcgacgtcggttcgtacgttttcgcgcgttgattggttcgcgtaggttttttgttcggttgttggcgttggggcgaagtcggcgggaggtcgtttcgttttcgttttcgtcgtaggtcgcggcgcgtagtttttttattcgtcgcggtcggggcggtggcgttgtgtcgtcgcggtttgtgaggtagtaattttttttcgtttttgttttatttttttttttttttttcgtttttttcgtttttttttttttcgtcgtttttgttcgagtgaatgtggcgcggcggcgcgggacgtagtttcggtttttgcgcggtttcgtaagttcgtgaggagacggagttgttttttgttttcgtttttgcgcgtttcggggagttatcgtcgttggcgaaggagaataagtagtgagattagaataaattttttagttttttaggaaaagataaggattttgtagtat

SEQ ID NO: 22326 - DNA, 532 bp, Artificial Sequence
  chemically treated genomic DNA (Homo sapiens) CpG-island No: 22326
atactacaaaatccttatcttttcctaaaaaactaaaaaatttattctaatctcactacttattctccttcgccaacgacgataactccccgaaacgcgcaaaaacgaaaacaaaaaacaactccgtctcctcacgaacttacgaaaccgcgcaaaaaccgaaactacgtcccgcgccgccgcgccacattcactcgaacaaaaacgacgaaaaaaaaaaaaacgaaaaaaacgaaaaaaaaaaaaaaaaataaaacaaaaacgaaaaaaaattactacctcacaaaccgcgacgacacaacgccaccgccccgaccgcgacgaataaaaaaactacgcgccgcgacctacgacgaaaacgaaaacgaaacgacctcccgccgacttcgccccaacgccaacaaccgaacaaaaaacctacgcgaaccaatcaacgcgcgaaaacgtacgaaccgacgtcgacgactaaaaacaacgaaccgaaaaccgaaaaaaaacaaccgacgaccgtaaattcgcgtacaaaacgcgc

SEQ ID NO: 22327 - DNA, 532 bp, Artificial Sequence
  chemically treated genomic DNA (Homo sapiens) CpG-island No: 22327
atgttgtaagatttttatttttttttagaagattgagagatttattttagttttattgtttgttttttttcgttagcggcggtggtttttcgagacgcgtaggggcgggagtaggaggtagtttcgtttttttacgagtttgcggggtcgcgtaggggtcgagattgcgtttcgcgtcgtcgcgttatatttattcgagtagagacggcgaggggagggaggacggagggagcggagagaaaggaggagaatggggtaggggcggaggggagttattgttttataggtcgcggcggtatagcgttatcgtttcggtcgcgacgggtgaagaggttgcgcgtcgcgatttgcggcgggggcgggggcggggcggtttttcgtcggtttcgttttaacgttaatagtcgggtaggaggtttgcgcgggttagttagcgcgcgggggcgtgcgggtcgacgtcggcggttgggggtagcgggtcgggggtcgggggagggtagtcggcggtcgtgggttcgcgtgtaaggcgcgt

SEQ ID NO: 22328 - DNA, 532 bp, Artificial Sequence
  chemically treated genomic DNA (Homo sapiens) CpG-island No: 22328
acgcgccttacacgcgaacccacgaccgccgactaccctcccccgacccccgacccgctacccccaaccgccgacgtcgacccgcacgcccccgcgcgctaactaacccgcgcaaacctcctacccgactattaacgttaaaacgaaaccgacgaaaaaccgccccgcccccgcccccgccgcaaatcgcgacgcgcaacctcttcacccgtcgcgaccgaaacgataacgctataccgccgcgacctataaaacaataactcccctccgcccctaccccattctcctcctttctctccgctccctccgtcctccctcccctcgccgtctctactcgaataaatataacgcgacgacgcgaaacgcaatctcgacccctacgcgaccccgcaaactcgtaaaaaaacgaaactacctcctactcccgcccctacgcgtctcgaaaaaccaccgccgctaacgaaaaaaaacaaacaataaaactaaaataaatctctcaatcttctaaaaaaaaataaaaatcttacaacat

SEQ ID NO: 22329 - DNA, 680 bp, Artificial Sequence
  chemically treated genomic DNA (Homo sapiens) CpG-island No: 22329
gtattcgtagagattggggcggggaggcgagtagagatgtgtcgtattttgtatgggataaagaagtgatgtagaatgtgtagttgggcgtgagcggaggataggtagataagatggtgcgacggatcgagggcggggatattagaggagtgtggatcggagtataatgtttgagggggggcggacgggaggatatatatagttcgtgatcgatcggtatcgcggtacgggagggttgtttgggcggcgtgcgagttgtgataatatgaatgagatattcgttatgggggaaagatgttatcgttagcgcggatcgggcgagcgaggtggtttatgcgtgatttttatgttttttaggatttgttgtaaattcgtttacgttatgtatcgattaacgttatgtcgtaaacgcgttgtttattttggtgattacgggttttgtatagtaggggtagtgcgggaaggtatttatacgatttgttttttatagatttgttagtatgtcgtttattttttacgcggattaacggttattcgtttgttaattcgtggttttcgaatattttatataatcgttattcgttcggtcgttttatttcgtattaggcggagaatgtaggtgggtggagtttttttttttattgttttagaatgtttattatttttgtttcgttgggtat

SEQ ID NO: 22330 - DNA, 680 bp, Artificial Sequence
  chemically treated genomic DNA (Homo sapiens) CpG-island No: 22330
atacccaacgaaacaaaaataataaacattctaaaacaataaaaaaaaaaactccacccacctacattctccgcctaatacgaaataaaacgaccgaacgaataacgattatataaaatattcgaaaaccacgaattaacaaacgaataaccgttaatccgcgtaaaaaataaacgacatactaacaaatctataaaaaacaaatcgtataaataccttcccgcactacccctactatacaaaacccgtaatcaccaaaataaacaacgcgtttacgacataacgttaatcgatacataacgtaaacgaatttacaacaaatcctaaaaaacataaaaatcacgcataaaccacctcgctcgcccgatccgcgctaacgataacatctttcccccataacgaatatctcattcatattatcacaactcgcacgccgcccaaacaaccctcccgtaccgcgataccgatcgatcacgaactatatatatcctcccgtccgccccccctcaaacattatactccgatccacactcctctaatatccccgccctcgatccgtcgcaccatcttatctacctatcctccgctcacgcccaactacacattctacatcacttctttatcccatacaaaatacgacacatctctactcgcctccccgccccaatctctacgaatac

SEQ ID NO: 22331 - DNA, 680 bp, Artificial Sequence
  chemically treated genomic DNA (Homo sapiens) CpG-island No: 22331
gtatttagcggagtaagagtggtaaatattttggaatagtggggagggaggttttatttatttgtatttttcgtttaatacgaaatggaacggtcgaacgggtaacggttatgtaaagtgttcgggaattacgagttgataggcgggtaatcgttggttcgcgtaagaggtaggcggtatattagtaaatttgtaagaggtaggtcgtgtgggtattttttcgtattgtttttattatataaaattcgtggttattaaggtaagtaacgcgtttgcggtatggcgttaatcggtgtatggcgtaggcgggtttatagtaaattttgaaagatataggggttacgtatgggttatttcgttcgttcggttcgcgttggcggtgatattttttttttatagcgggtgttttatttatattgttataattcgtacgtcgtttaggtaattttttcgtgtcgcggtatcggtcggttacgagttgtatatgttttttcgttcgtttttttttaagtattgtatttcggtttatatttttttggtgttttcgttttcggttcgtcgtattattttatttgtttatttttcgtttacgtttagttgtatattttgtattatttttttgttttatataaagtacggtatatttttgttcgttttttcgttttaatttttgcgggtat

SEQ ID NO: 22332 - DNA, 680 bp, Artificial Sequence
  chemically treated genomic DNA (Homo sapiens) CpG-island No: 22332
atacccgcaaaaattaaaacgaaaaaacgaacaaaaatataccgtactttatataaaacaaaaaaataatacaaaatatacaactaaacgtaaacgaaaaataaacaaataaaataatacgacgaaccgaaaacgaaaacaccaaaaaaatataaaccgaaatacaatacttaaaaaaaaacgaacgaaaaaacatatacaactcgtaaccgaccgataccgcgacacgaaaaaattacctaaacgacgtacgaattataacaatataaataaaacacccgctataaaaaaaaaatatcaccgccaacgcgaaccgaacgaacgaaataacccatacgtaacccctatatctttcaaaatttactataaacccgcctacgccatacaccgattaacgccataccgcaaacgcgttacttaccttaataaccacgaattttatataataaaaacaatacgaaaaaatacccacacgacctacctcttacaaatttactaatataccgcctacctcttacgcgaaccaacgattacccgcctatcaactcgtaattcccgaacactttacataaccgttacccgttcgaccgttccatttcgtattaaacgaaaaatacaaataaataaaacctccctccccactattccaaaatatttaccactcttactccgctaaatac

SEQ ID NO: 22333 - DNA, 674 bp, Artificial Sequence
  chemically treated genomic DNA (Homo sapiens) CpG-island No: 22333
aggttcgcgtttgtgggattagtaggggaaagagatatcgatttcgcgggtggtattgcggtgaacgcgttgggttatgcgtatcggaattgcgtgaagcgttgaacgaataggcgagtaagttttggtatacggtaacggttatattaacgagtcggtattgcgattggcgaaaaaattgtcgacgttacgtttgtcgatcgcgtttttttttgtaatttcggtgcggagttaacgaagcggcgttaaaattggcgcgtaaattcgtttacgatcgttcggtagttataagagcggtatcgtggcgtttaaaaatgcgttttatggtgtacgttgtttattgttagtgcgggtgggtagttagtttatttataggatttgcgttattgtcggcggatattcgttatgttgtatatatcgatttttttttgttagcgcgttgattgcgattttattgtgcggtgttgtcgatttttacgggaagcgggttgtgtattcgtaagttttttacggttcgtattttttttttagggcgtgtttgggtaatatacggtcgggttcggaagtgtttattcgggatcgtttatattataggcgcgttttttgcgttttgtattggttaattgatttattgttatcgtatgcgtcgatttggacgaagatgatagtgagat

SEQ ID NO: 22334 - DNA, 674 bp, Artificial Sequence
  chemically treated genomic DNA (Homo sapiens) CpG-island No: 22334
atctcactatcatcttcgtccaaatcgacgcatacgataacaataaatcaattaaccaatacaaaacgcaaaaaacgcgcctataatataaacgatcccgaataaacacttccgaacccgaccgtatattacccaaacacgccctaaaaaaaaaatacgaaccgtaaaaaacttacgaatacacaacccgcttcccgtaaaaatcgacaacaccgcacaataaaatcgcaatcaacgcgctaacaaaaaaaaatcgatatatacaacataacgaatatccgccgacaataacgcaaatcctataaataaactaactacccacccgcactaacaataaacaacgtacaccataaaacgcatttttaaacgccacgataccgctcttataactaccgaacgatcgtaaacgaatttacgcgccaattttaacgccgcttcgttaactccgcaccgaaattacaaaaaaaaacgcgatcgacaaacgtaacgtcgacaattttttcgccaatcgcaataccgactcgttaatataaccgttaccgtataccaaaacttactcgcctattcgttcaacgcttcacgcaattccgatacgcataacccaacgcgttcaccgcaataccacccgcgaaatcgatatctctttcccctactaatcccacaaacgcgaacct

SEQ ID NO: 22335 - DNA, 674 bp, Artificial Sequence
  chemically treated genomic DNA (Homo sapiens) CpG-island No: 22335
attttattattattttcgtttaaatcggcgtatacgatggtagtaagttagttagttagtgtaggacgtagaaaacgcgtttgtgatataaacggtttcggataggtattttcgggttcgatcgtgtgttgtttaaatacgttttgggggaaaaatacgggtcgtgaaaagtttgcgggtgtataattcgtttttcgtgagggtcgataatatcgtatagtagagtcgtaattagcgcgttggtagagaaaaatcggtatatgtagtatgacgaatattcgtcggtagtggcgtaaattttgtgaataggttggttgtttattcgtattgatagtaaatagcgtgtattatgaaacgtatttttgaacgttacgatgtcgtttttatggttgtcgagcggtcgtgagcgaatttacgcgttagttttagcgtcgtttcgttggtttcgtatcggagttataaaagaagacgcgatcggtaaacgtggcgtcgataattttttcgttagtcgtagtatcggttcgttggtgtaatcgttgtcgtatgttagaatttattcgtttgttcgtttagcgttttacgtagtttcggtgcgtatggtttagcgcgtttatcgtaatgttattcgcgaagtcgatattttttttttttgttgattttataagcgcgaattt

SEQ ID NO: 22336 - DNA, 674 bp, Artificial Sequence
  chemically treated genomic DNA (Homo sapiens) CpG-island No: 22336
aaattcgcgcttataaaatcaacaaaaaaaaaaaatatcgacttcgcgaataacattacgataaacgcgctaaaccatacgcaccgaaactacgtaaaacgctaaacgaacaaacgaataaattctaacatacgacaacgattacaccaacgaaccgatactacgactaacgaaaaaattatcgacgccacgtttaccgatcgcgtcttcttttataactccgatacgaaaccaacgaaacgacgctaaaactaacgcgtaaattcgctcacgaccgctcgacaaccataaaaacgacatcgtaacgttcaaaaatacgtttcataatacacgctatttactatcaatacgaataaacaaccaacctattcacaaaatttacgccactaccgacgaatattcgtcatactacatataccgatttttctctaccaacgcgctaattacgactctactatacgatattatcgaccctcacgaaaaacgaattatacacccgcaaacttttcacgacccgtatttttcccccaaaacgtatttaaacaacacacgatcgaacccgaaaatacctatccgaaaccgtttatatcacaaacgcgttttctacgtcctacactaactaactaacttactaccatcgtatacgccgatttaaacgaaaataataataaaat

SEQ ID NO: 22337 - DNA, 535 bp, Artificial Sequence
  chemically treated genomic DNA (Homo sapiens) CpG-island No: 22337
tcgttattatttgcgttcgaggatgcgttcgtggtgtcgtattcgattattattgcgtaggaggatgcgttcgtcgagtcgtattcgtttattatttgcgtggaggatgcgttcgtcgagtcgtattcgtttattaattgcgtaggaggagcgttcgtcgagtcgtattcgtttattatttgcgtaggaggatgcgttttcgagtcgtattcgttgattatttgcgtaggaggatgcgttcgtcgagtgtattcgtttattatttgtatacgaagatgcgttcgtcgagtcgtattttttattatttgcgtaggaggatgcgttcgtcgagtcgtattcgtttatttttgcgtaggaggatgcgttcgtcgagtcgtattcgtttattatttgtaacgaagatgcgttcgtcgagtggtatcggtgtattttttgcgcgcggagatgttttgtaagattaaatattttataggtgggtcgtgaaggtagggcggcgagggttagcgtaggggttattatttgatgtttattattt

SEQ ID NO: 22338 - DNA, 535 bp, Artificial Sequence
  chemically treated genomic DNA (Homo sapiens) CpG-island No: 22338
aaataataaacatcaaataataacccctacgctaaccctcgccgccctaccttcacgacccacctataaaatatttaatcttacaaaacatctccgcgcgcaaaaaatacaccgataccactcgacgaacgcatcttcgttacaaataataaacgaatacgactcgacgaacgcatcctcctacgcaaaaataaacgaatacgactcgacgaacgcatcctcctacgcaaataataaaaaatacgactcgacgaacgcatcttcgtatacaaataataaacgaatacactcgacgaacgcatcctcctacgcaaataatcaacgaatacgactcgaaaacgcatcctcctacgcaaataataaacgaatacgactcgacgaacgctcctcctacgcaattaataaacgaatacgactcgacgaacgcatcctccacgcaaataataaacgaatacgactcgacgaacgcatcctcctacgcaataataatcgaatacgacaccacgaacgcatcctcgaacgcaaataataacga

SEQ ID NO: 22339 - DNA, 535 bp, Artificial Sequence
  chemically treated genomic DNA (Homo sapiens) CpG-island No: 22339
aggtagtgggtattagatggtgatttttacgttgattttcgtcgttttgtttttacggtttatttgtaaggtatttagttttgtaaggtattttcgcgcgtaaagggtgtatcggtgttattcgacgaacgtattttcgttgtaaatggtgaacgggtgcgattcgacgaacgtatttttttacgtaaaggtgaacgggtgcgattcgacgaacgtatttttttacgtaaatggtgaagggtgcgattcgacgaacgtattttcgtatgtaaatggtgaacgggtgtattcgacgaacgtatttttttacgtaaatggttaacgggtgcgattcgagaacgtatttttttacgtaaatggtgaacgggtgcgattcgacgaacgttttttttacgtaattggtgaacgggtgcgattcgacgaacgtattttttacgtaaatggtgaacgggtgcgattcgacgaacgtatttttttacgtaatggtgatcgggtgcgatattacgaacgtattttcgaacgtaaatggtgacgg

SEQ ID NO: 22340 - DNA, 535 bp, Artificial Sequence
  chemically treated genomic DNA (Homo sapiens) CpG-island No: 22340
ccgtcaccatttacgttcgaaaatacgttcgtaatatcgcacccgatcaccattacgtaaaaaaatacgttcgtcgaatcgcacccgttcaccatttacgtaaaaaatacgttcgtcgaatcgcacccgttcaccaattacgtaaaaaaaacgttcgtcgaatcgcacccgttcaccatttacgtaaaaaaatacgttctcgaatcgcacccgttaaccatttacgtaaaaaaatacgttcgtcgaatacacccgttcaccatttacatacgaaaatacgttcgtcgaatcgcacccttcaccatttacgtaaaaaaatacgttcgtcgaatcgcacccgttcacctttacgtaaaaaaatacgttcgtcgaatcgcacccgttcaccatttacaacgaaaatacgttcgtcgaataacaccgatacaccctttacgcgcgaaaataccttacaaaactaaataccttacaaataaaccgtaaaaacaaaacgacgaaaatcaacgtaaaaatcaccatctaatacccactacct

SEQ ID NO: 22341 - DNA, 1311 bp, Artificial Sequence
  chemically treated genomic DNA (Homo sapiens) CpG-island No: 22341
gatcgcggtttgatatcgtattttgtttttttaatagttttggggcgcgcggtttatggagtcggggttgttgcggtcggcgtcggtgagcgaggttatcgttttgtattataattatatcggtaagtttcgcggtgcgcgttattagtcgggtgtcggtttgcgcgtcgacgtcgtggtgtgtttggcggtgtgcgtttttatcgtgttagagaatttagtcgtgttgttggtgttcggacgttattcgcgtttttacgtttttatgtttttgtttttgggtagttttacgttgtcggatttgttggtaggcgtcgtttacgtcgttaatattttattgtcggggtcgtttacgttgaaattgtttttcgcgttttggttcgtacgggagggaggcgttttcgtggtatttattgcgttcgtgttgagttttttggttatcgcgttggagcgtagttttattatggcgcgtagggggttcgcgttcgtttttagtcgggggcgtacgttggcgatggtagtcgcggtttggggcgtgtcgttgtttttcgggtttttgttagcgttgggttggaattgtttgggtcgtttggacgtttgttttattgttttgtcgttttacgttaaggtttacgtgtttttttgcgtgttcgttttcgtgggtattttggtcgttatttgtgtattttacgcgcgtatttattgttaggtacgcgttaacgcgcggcgtttgtcggtacggttcgggattgcggggattatttcgattcgggcgcgtcgtaagtcgcgttcgttggttttgttgcgtacgtttagcgtggtgtttttggtttttgtggtatgttggggttttttttttttgttgttgttgttcgacgtggcgtgttcggcgcgtatttgttttgtatttttgtaggtcgatttttttttgggattggttatggttaatttatttttgaattttattatttatacgtttattaatcgcgatttgcgttacgcgtttttgcgtttggtttgttgcggacgttatttttgcggtagagattcgagtggtttttagtagtcggcgagcgcggttgaggttttcgggggtttgcgtcgttgtttgttttcgggttttgatgggagttttagcggttcggagcgtttatcgttttagcgcgacgggttggatattagcggttttataggtagtttcggtgtatttatagtcgttcggattttggtattagaatcggttgtagattgatattttcggtttacgattgtttttttaagttttatagatttgttttttttatataaagg

SEQ ID NO: 22342 - DNA, 1311 bp, Artificial Sequence
  chemically treated genomic DNA (Homo sapiens) CpG-island No: 22342
cctttatataaaaaaaacaaatctataaaacttaaaaaaacaatcgtaaaccgaaaatatcaatctacaaccgattctaataccaaaatccgaacgactataaatacaccgaaactacctataaaaccgctaatatccaacccgtcgcgctaaaacgataaacgctccgaaccgctaaaactcccatcaaaacccgaaaacaaacaacgacgcaaacccccgaaaacctcaaccgcgctcgccgactactaaaaaccactcgaatctctaccgcaaaaataacgtccgcaacaaaccaaacgcaaaaacgcgtaacgcaaatcgcgattaataaacgtataaataataaaattcaaaaataaattaaccataaccaatcccaaaaaaaaatcgacctacaaaaatacaaaacaaatacgcgccgaacacgccacgtcgaacaacaacaacaaaaaaaaaaaaccccaacataccacaaaaaccaaaaacaccacgctaaacgtacgcaacaaaaccaacgaacgcgacttacgacgcgcccgaatcgaaataatccccgcaatcccgaaccgtaccgacaaacgccgcgcgttaacgcgtacctaacaataaatacgcgcgtaaaatacacaaataacgaccaaaatacccacgaaaacgaacacgcaaaaaaacacgtaaaccttaacgtaaaacgacaaaacaataaaacaaacgtccaaacgacccaaacaattccaacccaacgctaacaaaaacccgaaaaacaacgacacgccccaaaccgcgactaccatcgccaacgtacgcccccgactaaaaacgaacgcgaaccccctacgcgccataataaaactacgctccaacgcgataaccaaaaaactcaacacgaacgcaataaataccacgaaaacgcctccctcccgtacgaaccaaaacgcgaaaaacaatttcaacgtaaacgaccccgacaataaaatattaacgacgtaaacgacgcctaccaacaaatccgacaacgtaaaactacccaaaaacaaaaacataaaaacgtaaaaacgcgaataacgtccgaacaccaacaacacgactaaattctctaacacgataaaaacgcacaccgccaaacacaccacgacgtcgacgcgcaaaccgacacccgactaataacgcgcaccgcgaaacttaccgatataattataatacaaaacgataacctcgctcaccgacgccgaccgcaacaaccccgactccataaaccgcgcgccccaaaactattaaaaaaacaaaatacgatatcaaaccgcgatc

SEQ ID NO: 22343 - DNA, 1311 bp, Artificial Sequence
  chemically treated genomic DNA (Homo sapiens) CpG-island No: 22343
tttttatgtaaaaagaataagtttgtaaaatttgggaagatagtcgtgggtcgagggtgttagtttgtagtcggttttgatattagagttcgggcggttgtgggtgtatcggggttgtttgtggagtcgttggtgtttagttcgtcgcgttggggcgatgagcgtttcgagtcgttgaagtttttattaaggttcgggggtaggtagcggcgtaggttttcggaagttttagtcgcgttcgtcgattgttgggagttattcgggtttttgtcgtaggagtggcgttcgtagtagattaggcgtaggagcgcgtggcgtaggtcgcggttggtgagcgtgtagatgatggggtttagaagtgagttggttatggttagttttaggaagggatcggtttgtaggagtataggataggtgcgcgtcgggtacgttacgtcgagtaatagtagtaggaagagggggttttaatatgttataaaggttaggagtattacgttgagcgtgcgtagtaaggttagcgagcgcggtttgcgacgcgttcgggtcgaggtggttttcgtagtttcgggtcgtgtcggtaggcgtcgcgcgttggcgcgtatttggtagtagatgcgcgcgtagagtgtatagatagcggttaggatgtttacgaaggcgagtacgtagaagagtacgtaggttttggcgtagagcggtaagatagtggagtaagcgtttaggcgatttaggtaattttagtttagcgttggtaggagttcgaggagtagcgatacgttttaggtcgcggttgttatcgttagcgtgcgttttcgattggagacgggcgcgggttttttgcgcgttatggtgaggttgcgttttagcgcgatggttaggaggtttagtacggacgtagtgagtgttacgaagacgtttttttttcgtgcgaattagagcgcgggggatagttttagcgtgagcggtttcgatagtaggatgttggcggcgtaggcggcgtttgttagtagattcgataacgtgaggttgtttaggagtaggaatatgggagcgtggaagcgcgggtggcgttcgagtattaataatacggttagattttttagtacgatgaaggcgtatatcgttaggtatattacggcgtcggcgcgtaggtcggtattcggttggtagcgcgtatcgcggagtttgtcggtgtagttgtaatgtaggacgatgatttcgtttatcggcgtcggtcgtagtagtttcgattttatgggtcgcgcgttttaaggttgttggagaggtaagatacggtgttaggtcgcggtt

SEQ ID NO: 22344 - DNA, 1311 bp, Artificial Sequence
  chemically treated genomic DNA (Homo sapiens) CpG-island No: 22344
aaccgcgacctaacaccgtatcttacctctccaacaaccttaaaacgcgcgacccataaaatcgaaactactacgaccgacgccgataaacgaaatcatcgtcctacattacaactacaccgacaaactccgcgatacgcgctaccaaccgaataccgacctacgcgccgacgccgtaatatacctaacgatatacgccttcatcgtactaaaaaatctaaccgtattattaatactcgaacgccacccgcgcttccacgctcccatattcctactcctaaacaacctcacgttatcgaatctactaacaaacgccgcctacgccgccaacatcctactatcgaaaccgctcacgctaaaactatcccccgcgctctaattcgcacgaaaaaaaaacgtcttcgtaacactcactacgtccgtactaaacctcctaaccatcgcgctaaaacgcaacctcaccataacgcgcaaaaaacccgcgcccgtctccaatcgaaaacgcacgctaacgataacaaccgcgacctaaaacgtatcgctactcctcgaactcctaccaacgctaaactaaaattacctaaatcgcctaaacgcttactccactatcttaccgctctacgccaaaacctacgtactcttctacgtactcgccttcgtaaacatcctaaccgctatctatacactctacgcgcgcatctactaccaaatacgcgccaacgcgcgacgcctaccgacacgacccgaaactacgaaaaccacctcgacccgaacgcgtcgcaaaccgcgctcgctaaccttactacgcacgctcaacgtaatactcctaacctttataacatattaaaaccccctcttcctactactattactcgacgtaacgtacccgacgcgcacctatcctatactcctacaaaccgatcccttcctaaaactaaccataaccaactcacttctaaaccccatcatctacacgctcaccaaccgcgacctacgccacgcgctcctacgcctaatctactacgaacgccactcctacgacaaaaacccgaataactcccaacaatcgacgaacgcgactaaaacttccgaaaacctacgccgctacctacccccgaaccttaataaaaacttcaacgactcgaaacgctcatcgccccaacgcgacgaactaaacaccaacgactccacaaacaaccccgatacacccacaaccgcccgaactctaatatcaaaaccgactacaaactaacaccctcgacccacgactatcttcccaaattttacaaacttattctttttacataaaaa

SEQ ID NO: 22345 - DNA, 708 bp, Artificial Sequence
  chemically treated genomic DNA (Homo sapiens) CpG-island No: 22345
ggcgcgtaggtttggaattcggggtttagatttttcgcgatttggattacgcggttaagcgcgtttagggtcgcgtgttttcgtttcgtcgttatgttgggcgtcgtggtggtcgcgtagttgggcgatagtaggcgtgggcgggggtggggagcggttttttagcggtttttatcgtttgaggttagggttcggggatttttattgtgatacggcgggcgttcggttttgtttagttatggtgatttgcgcgcgtttcgcgttttttttacgcgtagcgatggaggcgtcggggttcgggcggtggaggcggaatcggagcgcggttatggcggggtgagtgaggcgggatgtgttcgggttgcgggtatcgcgggtcgcgagcgtttttgcggtcgtgttcggagattaggaaaacgggcgttacggtttagggcgttttcgagtttttcgttaggattcggagggttaggagggcgcgatttgggtggatatttttgttggacggcgtaatttttggggtggttcgggagcggcggaaatcgagcgagagaattaggaggcgttgcgtagaaggaggttcgggggtttcgaggcgttgaggggttcgatttgcgttttggggttggtagtcgagaggtcgcggtggggttattttttcgttttattgggtttggtggaggtttaggaggggtatgcgtagtcgtt

SEQ ID NO: 22346 - DNA, 708 bp, Artificial Sequence
  chemically treated genomic DNA (Homo sapiens) CpG-island No: 22346
aacgactacgcatacccctcctaaacctccaccaaacccaataaaacgaaaaaataaccccaccgcgacctctcgactaccaaccccaaaacgcaaatcgaacccctcaacgcctcgaaacccccgaacctccttctacgcaacgcctcctaattctctcgctcgatttccgccgctcccgaaccaccccaaaaattacgccgtccaacaaaaatatccacccaaatcgcgccctcctaaccctccgaatcctaacgaaaaactcgaaaacgccctaaaccgtaacgcccgttttcctaatctccgaacacgaccgcaaaaacgctcgcgacccgcgatacccgcaacccgaacacatcccgcctcactcaccccgccataaccgcgctccgattccgcctccaccgcccgaaccccgacgcctccatcgctacgcgtaaaaaaaacgcgaaacgcgcgcaaatcaccataactaaacaaaaccgaacgcccgccgtatcacaataaaaatccccgaaccctaacctcaaacgataaaaaccgctaaaaaaccgctccccacccccgcccacgcctactatcgcccaactacgcgaccaccacgacgcccaacataacgacgaaacgaaaacacgcgaccctaaacgcgcttaaccgcgtaatccaaatcgcgaaaaatctaaaccccgaattccaaacctacgcgcc

SEQ ID NO: 22347 - DNA, 708 bp, Artificial Sequence
  chemically treated genomic DNA (Homo sapiens) CpG-island No: 22347
ggcgattgcgtatgttttttttgagtttttattaggtttagtgaggcgaggaagtgattttatcgcggtttttcggttgttaattttagaacgtagatcgagttttttaacgtttcggagttttcgggtttttttttgcgtagcgttttttggttttttcgttcggttttcgtcgttttcgggttattttaagagttgcgtcgtttaataaaaatatttatttaggtcgcgtttttttggtttttcgagttttggcggggaattcggaggcgttttgggtcgtggcgttcgtttttttggttttcgggtacggtcgtaggggcgttcgcggttcgcgatgttcgtagttcgggtatatttcgttttatttatttcgttatggtcgcgtttcggtttcgtttttatcgttcgagtttcggcgtttttatcgttgcgcgtgggggaggcgcggagcgcgcgtaggttattatgattaagtagagtcgggcgttcgtcgtgttataataaaagttttcgggttttggttttaggcggtagggatcgttgaggggtcgttttttattttcgtttacgtttgttgtcgtttagttgcgcggttattacggcgtttagtatggcggcggggcgggggtacgcgattttgagcgcgtttagtcgcgtggtttaagtcgcggggagtttgaatttcgagttttaggtttgcgcgtt

SEQ ID NO: 22348 - DNA, 708 bp, Artificial Sequence
  chemically treated genomic DNA (Homo sapiens) CpG-island No: 22348
aacgcgcaaacctaaaactcgaaattcaaactccccgcgacttaaaccacgcgactaaacgcgctcaaaatcgcgtacccccgccccgccgccatactaaacgccgtaataaccgcgcaactaaacgacaacaaacgtaaacgaaaataaaaaacgacccctcaacgatccctaccgcctaaaaccaaaacccgaaaacttttattataacacgacgaacgcccgactctacttaatcataataacctacgcgcgctccgcgcctcccccacgcgcaacgataaaaacgccgaaactcgaacgataaaaacgaaaccgaaacgcgaccataacgaaataaataaaacgaaatatacccgaactacgaacatcgcgaaccgcgaacgcccctacgaccgtacccgaaaaccaaaaaaacgaacgccacgacccaaaacgcctccgaattccccgccaaaactcgaaaaaccaaaaaaacgcgacctaaataaatatttttattaaacgacgcaactcttaaaataacccgaaaacgacgaaaaccgaacgaaaaaaccaaaaaacgctacgcaaaaaaaaacccgaaaactccgaaacgttaaaaaactcgatctacgttctaaaattaacaaccgaaaaaccgcgataaaatcacttcctcgcctcactaaacctaataaaaactcaaaaaaaacatacgcaatcgcc

SEQ ID NO: 22349 - DNA, 561 bp, Artificial Sequence
  chemically treated genomic DNA (Homo sapiens) CpG-island No: 22349
gtgcggtagcgacgttatcgattacgcggtgggcgatagcgtatgcggttacggttcgtttttcgagacggttattattaacgtagtgaataattataagttgcgtaaaatgtcgtaaggtagtttttggaaaaacgtcgtttgttacgattcggcgtagtttgttatgagcggcgtgcgcgatgttaacgtgcgcgtaggggattttgtggtggtggtagggtttggcgtaatcggttaaattgttatttaattggttaaacgcgttggcgtttttgtggtgattggcgtcgaatttatcgtttatcgttgtgatattgttcgtcgttacggcgcggatttttgttttaattttatcggtattgatgtaggtaaagagattaaaacgttgatcggtaagtagggtgtcgatgtgattatcgaaattagcggttacgtcgacgcgttgtaaatcgcgtttcgcggtttgtttatggtcgtattatttttatgtcgcgtttgtaagtcgtttgtcgaaggtttttatttcggagtcgagcgtattttaataacggtaaaatg

SEQ ID NO: 22350 - DNA, 561 bp, Artificial Sequence
  chemically treated genomic DNA (Homo sapiens) CpG-island No: 22350
cattttaccgttattaaaatacgctcgactccgaaataaaaaccttcgacaaacgacttacaaacgcgacataaaaataatacgaccataaacaaaccgcgaaacgcgatttacaacgcgtcgacgtaaccgctaatttcgataatcacatcgacaccctacttaccgatcaacgttttaatctctttacctacatcaataccgataaaattaaaacaaaaatccgcgccgtaacgacgaacaatatcacaacgataaacgataaattcgacgccaatcaccacaaaaacgccaacgcgtttaaccaattaaataacaatttaaccgattacgccaaaccctaccaccaccacaaaatcccctacgcgcacgttaacatcgcgcacgccgctcataacaaactacgccgaatcgtaacaaacgacgtttttccaaaaactaccttacgacattttacgcaacttataattattcactacgttaataataaccgtctcgaaaaacgaaccgtaaccgcatacgctatcgcccaccgcgtaatcgataacgtcgctaccgcac

SEQ ID NO: 22351 - DNA, 561 bp, Artificial Sequence
  chemically treated genomic DNA (Homo sapiens) CpG-island No: 22351
tattttgtcgttattgaaatgcgttcggtttcgagataaaaattttcggtaaacggtttgtaaacgcgatatagagatggtgcggttataagtagatcgcggagcgcgatttgtagcgcgtcggcgtagtcgttggtttcgataattatatcggtattttgtttgtcggttagcgttttgatttttttatttatattagtgtcgatggggttaaggtagaaattcgcgtcgtggcgacgggtaatattatagcgatgggcgatagattcgacgttaattattatagaagcgttagcgcgtttagttagttggatggtaatttgatcgattgcgttaagttttattattattataaaattttttacgcgtacgttggtatcgcgtacgtcgtttatggtaaattgcgtcgggtcgtagtagacggcgtttttttaggagttgttttgcggtattttgcgtagtttgtagttatttattgcgttaatgatgatcgtttcggagagcgggtcgtagtcgtatacgttgtcgtttatcgcgtagtcggtaacgtcgttgtcgtat

SEQ ID NO: 22352 - DNA, 561 bp, Artificial Sequence
  chemically treated genomic DNA (Homo sapiens) CpG-island No: 22352
atacgacaacgacgttaccgactacgcgataaacgacaacgtatacgactacgacccgctctccgaaacgatcatcattaacgcaataaataactacaaactacgcaaaataccgcaaaacaactcctaaaaaaacgccgtctactacgacccgacgcaatttaccataaacgacgtacgcgataccaacgtacgcgtaaaaaattttataataataataaaacttaacgcaatcgatcaaattaccatccaactaactaaacgcgctaacgcttctataataattaacgtcgaatctatcgcccatcgctataatattacccgtcgccacgacgcgaatttctaccttaaccccatcgacactaatataaataaaaaaatcaaaacgctaaccgacaaacaaaataccgatataattatcgaaaccaacgactacgccgacgcgctacaaatcgcgctccgcgatctacttataaccgcaccatctctatatcgcgtttacaaaccgtttaccgaaaatttttatctcgaaaccgaacgcatttcaataacgacaaaata

SEQ ID NO: 22353 - DNA, 551 bp, Artificial Sequence
  chemically treated genomic DNA (Homo sapiens) CpG-island No: 22353
  unsure (307, 460, 463)
tttcggtttgggcggtcgtttttcggaaggttattcggtcgcggttgtttttttcgtaaaattcgatatttagcgcgtttatattgtgatttaggcgcgttcgattgtagggttgtaacgtttgcgttatttgttgttgttgtggggggtagatcgtaacggcgttaattcgatgacgtcggaagaggtgtatcgtgttgttaatgaacgtttgatgtagatgatgtcgtaggtattgttttcgttagacgcgatggggttaaagttatttgaatcggtaacggggatcgtttagtcgatttcgtantaatcggcgataggaaatgtagttattgcgtttgttgcgtcgatatagtttgttgttaatcgttttttataaagggttacgtcgtcgtaaagtggtgtttaatcgtttgcgcgtggcgtcgggagggtaatagtggcgagttatcgtagttanggnagttttggtaatttggttttcgttttttattgcgttgttgttgtaaattatggtttggtcggataatttgattgtgtatcggtaaatt

SEQ ID NO: 22354 - DNA, 551 bp, Artificial Sequence
  chemically treated genomic DNA (Homo sapiens) CpG-island No: 22354
  unsure (89, 92, 245)
aatttaccgatacacaatcaaattatccgaccaaaccataatttacaacaacaacgcaataaaaaacgaaaaccaaattaccaaaactnccntaactacgataactcgccactattaccctcccgacgccacgcgcaaacgattaaacaccactttacgacgacgtaaccctttataaaaaacgattaacaacaaactatatcgacgcaacaaacgcaataactacatttcctatcgccgattantacgaaatcgactaaacgatccccgttaccgattcaaataactttaaccccatcgcgtctaacgaaaacaatacctacgacatcatctacatcaaacgttcattaacaacacgatacacctcttccgacgtcatcgaattaacgccgttacgatctaccccccacaacaacaacaaataacgcaaacgttacaaccctacaatcgaacgcgcctaaatcacaatataaacgcgctaaatatcgaattttacgaaaaaaacaaccgcgaccgaataaccttccgaaaaacgaccgcccaaaccgaaa

SEQ ID NO: 22355 - DNA, 551 bp, Artificial Sequence
  chemically treated genomic DNA (Homo sapiens) CpG-island No: 22355
  unsure (89, 92, 245)
agtttgtcggtatataattaggttattcggttaggttatgatttgtagtaatagcgtaatgaggaacgaaggttagattattaaggttnttntggttacgatagttcgttattattgttttttcggcgttacgcgtaggcggttgagtattattttgcggcggcgtagttttttgtggagagcgattagtagtaggttgtgtcggcgtagtaggcgtagtagttgtattttttgtcgtcggttgntgcggagtcggttgagcgattttcgttgtcggtttaggtaattttggttttatcgcgtttggcgaaggtaatatttgcggtattatttgtattagacgtttattagtaatacgatgtatttttttcggcgttatcgggttagcgtcgttacgatttgttttttatagtagtagtagataacgtaaacgttgtagttttgtagtcggacgcgtttgaattatagtataagcgcgttgggtatcgagttttacggaagagataatcgcgatcggatagtttttcgggaaacgatcgtttagatcggaa

SEQ ID NO: 22356 - DNA, 551 bp, Artificial Sequence
  chemically treated genomic DNA (Homo sapiens) CpG-island No: 22356
  unsure (307, 460, 463)
ttccgatctaaacgatcgtttcccgaaaaactatccgatcgcgattatctcttccgtaaaactcgatacccaacgcgcttatactataattcaaacgcgtccgactacaaaactacaacgtttacgttatctactactactataaaaaacaaatcgtaacgacgctaacccgataacgccgaaaaaaatacatcgtattactaataaacgtctaatacaaataataccgcaaatattaccttcgccaaacgcgataaaaccaaaattacctaaaccgacaacgaaaatcgctcaaccgactccgcancaaccgacgacaaaaaatacaactactacgcctactacgccgacacaacctactactaatcgctctccacaaaaaactacgccgccgcaaaataatactcaaccgcctacgcgtaacgccgaaaaaacaataataacgaactatcgtaaccanaanaaccttaataatctaaccttcgttcctcattacgctattactacaaatcataacctaaccgaataacctaattatataccgacaaact

SEQ ID NO: 22357 - DNA, 689 bp, Artificial Sequence
  chemically treated genomic DNA (Homo sapiens) CpG-island No: 22357
gtgtttagtcgttgggtttattttattgtttatcggtttcgtattcgtttgttagaatttcgttagtgttagtaatcgattgcgtacggcgtttgttagacgatcggtttgtttatggttcgttatatcgatatagagtggtataatggcggtagcggaaaatagcgttagttgttcgcgtcgttagtcgtaatcgcggtagatgtcgtttttattattttagaggtaacggtttatcgtatcggacgggtattggttttttggcggaatagtgtttttgtttttttttcgttttttagcgtcgagatgttggcgatggcgttttttagtttaaataggaaggtatttagatcgatggggatgaattgggtggtacgaatgttcgttagacgattagtattacgtagttaacgggaagagtaattttaatcggaggtcgtttcgtcgcgtaaatcgcggtatatttcgttgggcgggcgattagaatgtttcgcggttttaacgtttttaagttaggattcgttacgcggcgtgtcgcgatcgttttagtaacggttgagtagcgattcgttcggtattcgtataatatggcgataggtttgattagggattaacgattttgtatcgtttatttagaaggtatattttattttaaggtggtcgagatagcgggcgatcgttatattatt

SEQ ID NO: 22358 - DNA, 689 bp, Artificial Sequence
  chemically treated genomic DNA (Homo sapiens) CpG-island No: 22358
aataatataacgatcgcccgctatctcgaccaccttaaaataaaatataccttctaaataaacgatacaaaatcgttaatccctaatcaaacctatcgccatattatacgaataccgaacgaatcgctactcaaccgttactaaaacgatcgcgacacgccgcgtaacgaatcctaacttaaaaacgttaaaaccgcgaaacattctaatcgcccgcccaacgaaatataccgcgatttacgcgacgaaacgacctccgattaaaattactcttcccgttaactacgtaatactaatcgtctaacgaacattcgtaccacccaattcatccccatcgatctaaataccttcctatttaaactaaaaaacgccatcgccaacatctcgacgctaaaaaacgaaaaaaaaacaaaaacactattccgccaaaaaaccaatacccgtccgatacgataaaccgttacctctaaaataataaaaacgacatctaccgcgattacgactaacgacgcgaacaactaacgctattttccgctaccgccattataccactctatatcgatataacgaaccataaacaaaccgatcgtctaacaaacgccgtacgcaatcgattactaacactaacgaaattctaacaaacgaatacgaaaccgataaacaataaaataaacccaacgactaaacac

SEQ ID NO: 22359 - DNA, 689 bp, Artificial Sequence
  chemically treated genomic DNA (Homo sapiens) CpG-island No: 22359
gatggtgtagcggtcgttcgttatttcgattattttaaaatggaatatgttttttggatggacggtgtagaatcgttaatttttaattaggtttatcgttatgttgtgcggatgtcggacggatcgttgtttaatcgttattgggacgatcgcgatacgtcgcgtgacgaattttggtttgaggacgttgaaatcgcgaaatattttggtcgttcgtttaacgaggtgtatcgcgatttacgcggcggggcggttttcggttgggattatttttttcgttggttgcgtgatattggtcgtttggcgagtattcgtattatttagtttatttttatcgatttgaatgtttttttgtttaaattggagagcgttatcgttaatatttcggcgttgaaaggcgagaaagagatagaagtattgtttcgttagaaagttagtgttcgttcgatgcggtaaatcgttatttttgggatgatgaaaacggtatttatcgcgattacgattggcgacgcgaataattggcgttgtttttcgttgtcgttattgtgttattttatgtcggtatggcgaattatgaataggtcgatcgtttggtaaacgtcgtgcgtagtcggttattgatattggcgggattttggtaagcgagtacgaaatcggtgaatagtgggataaatttaacggttgggtat

SEQ ID NO: 22360 - DNA, 689 bp, Artificial Sequence
  chemically treated genomic DNA (Homo sapiens) CpG-island No: 22360
atacccaaccgttaaatttatcccactattcaccgatttcgtactcgcttaccaaaatcccgccaatatcaataaccgactacgcacgacgtttaccaaacgatcgacctattcataattcgccataccgacataaaataacacaataacgacaacgaaaaacaacgccaattattcgcgtcgccaatcgtaatcgcgataaataccgttttcatcatcccaaaaataacgatttaccgcatcgaacgaacactaactttctaacgaaacaatacttctatctctttctcgcctttcaacgccgaaatattaacgataacgctctccaatttaaacaaaaaaacattcaaatcgataaaaataaactaaataatacgaatactcgccaaacgaccaatatcacgcaaccaacgaaaaaaataatcccaaccgaaaaccgccccgccgcgtaaatcgcgatacacctcgttaaacgaacgaccaaaatatttcgcgatttcaacgtcctcaaaccaaaattcgtcacgcgacgtatcgcgatcgtcccaataacgattaaacaacgatccgtccgacatccgcacaacataacgataaacctaattaaaaattaacgattctacaccgtccatccaaaaaacatattccattttaaaataatcgaaataacgaacgaccgctacaccatc

SEQ ID NO: 22361 - DNA, 500 bp, Artificial Sequence
  chemically treated genomic DNA (Homo sapiens) CpG-island No: 22361
gtcgttttcgtcgttcgtttcgttatttgcgcgtaagtggttagcgtcgtcgtcgttatcgtgacgagcgttatttaatttagtcgttaatgtcgttgatcgtagcgtgcgcgttttcggaattggtttttggtaaagtttggattcgttatttaattgtacgttcgtaagatgtataggttgaagagtagcgcgaataggaagaagtatatgtgtagtcgatggtgattgaggtttttgtcgtcgtcgttatcgaatcggttgttagcgcgttagttgttgaagaagtggtcggtgtcgtagaagttttcgtttaggttgtcgaatcgtaatcggaagtggttgaaacgacgtattttgaagtgatcgttgtcgcggtaattgaatagtcgtagtgagttatcgagtttgatgttgtcgtagtttaggaagttgtagaataagtagaatcggtggttgaatcgtaggaagagacggtagatattgaatagtattgtttg

SEQ ID NO: 22362 - DNA, 500 bp, Artificial Sequence
  chemically treated genomic DNA (Homo sapiens) CpG-island No: 22362
caaacaatactattcaatatctaccgtctcttcctacgattcaaccaccgattctacttattctacaacttcctaaactacgacaacatcaaactcgataactcactacgactattcaattaccgcgacaacgatcacttcaaaatacgtcgtttcaaccacttccgattacgattcgacaacctaaacgaaaacttctacgacaccgaccacttcttcaacaactaacgcgctaacaaccgattcgataacgacgacgacaaaaacctcaatcaccatcgactacacatatacttcttcctattcgcgctactcttcaacctatacatcttacgaacgtacaattaaataacgaatccaaactttaccaaaaaccaattccgaaaacgcgcacgctacgatcaacgacattaacgactaaattaaataacgctcgtcacgataacgacgacgacgctaaccacttacgcgcaaataacgaaacgaacgacgaaaacgac

SEQ ID NO: 22363 - DNA, 500 bp, Artificial Sequence
  chemically treated genomic DNA (Homo sapiens) CpG-island No: 22363
taggtaatattgtttaatatttgtcgtttttttttgcggtttaattatcggttttgtttgttttgtaattttttgggttacggtaatattagattcggtaatttattgcggttgtttagttatcgcggtagcgattattttaggatgcgtcgttttaattattttcggttgcggttcggtaatttgaacgggggtttttacgatatcggttatttttttaataattggcgcgttaataatcggttcgatagcggcggcgatagggattttagttattatcggttgtatatgtatttttttttgttcgcgttgttttttaatttgtatattttgcggacgtataattggatagcggatttagattttgttagaggttagtttcggagacgcgtacgttacggttaacggtattggcgattgggttggataacgttcgttacgatagcgacgacgacgttgattatttacgcgtaggtgacgaggcgagcggcgagaacgat

SEQ ID NO: 22364 - DNA, 500 bp, Artificial Sequence
  chemically treated genomic DNA (Homo sapiens) CpG-island No: 22364
atcgttctcgccgctcgcctcgtcacctacgcgtaaataatcaacgtcgtcgtcgctatcgtaacgaacgttatccaacccaatcgccaataccgttaaccgtaacgtacgcgtctccgaaactaacctctaacaaaatctaaatccgctatccaattatacgtccgcaaaatatacaaattaaaaaacaacgcgaacaaaaaaaaatacatatacaaccgataataactaaaatccctatcgccgccgctatcgaaccgattattaacgcgccaattattaaaaaaataaccgatatcgtaaaaacccccgttcaaattaccgaaccgcaaccgaaaataattaaaacgacgcatcctaaaataatcgctaccgcgataactaaacaaccgcaataaattaccgaatctaatattaccgtaacccaaaaaattacaaaacaaacaaaaccgataattaaaccgcaaaaaaaaacgacaaatattaaacaatattaccta

SEQ ID NO: 22365 - DNA, 599 bp, Artificial Sequence
  chemically treated genomic DNA (Homo sapiens) CpG-island No: 22365
atatattaagtaggttattgttgagtaggaacgtttgggattggatgtgttggtatatggcgaggtcgagcgtaatgatatggtggaatattttggcgagtatttcgacggatttgtttttacgtaaaacggttgggtatagagttacggttttcgttgcgtgaagttatcgattgttattggtgatattagtcgttcggtatcgattatcgtggagtgggcgaagtatgcgtaatcgttgatcgataaatcggtgaaagggatgttgacggggtcggtgattatattttgttggtcgttttcgcgtgaagatgttagtcgtgaaattatcgttaaatagattgcgttggtcgtgcgtgatgaagtggtcgatttggaagtcgttggaattggtattatttagattgacgaatcggcgttgcgcgaaggtttatcgttgcgtcgtagcgattgggatgcgtatttttagtggggcgtagaggtttttcgtattaacgtcgtcgtggcgaaagatgatatataaatttatatttatatgtgttattgcgagtttaacgatattatggattcgattgcggcgttggacgtagacgttatta

SEQ ID NO: 22366 - DNA, 599 bp, Artificial Sequence
  chemically treated genomic DNA (Homo sapiens) CpG-island No: 22366
taataacgtctacgtccaacgccgcaatcgaatccataatatcgttaaactcgcaataacacatataaatataaatttatatatcatctttcgccacgacgacgttaatacgaaaaacctctacgccccactaaaaatacgcatcccaatcgctacgacgcaacgataaaccttcgcgcaacgccgattcgtcaatctaaataataccaattccaacgacttccaaatcgaccacttcatcacgcacgaccaacgcaatctatttaacgataatttcacgactaacatcttcacgcgaaaacgaccaacaaaatataatcaccgaccccgtcaacatccctttcaccgatttatcgatcaacgattacgcatacttcgcccactccacgataatcgataccgaacgactaatatcaccaataacaatcgataacttcacgcaacgaaaaccgtaactctatacccaaccgttttacgtaaaaacaaatccgtcgaaatactcgccaaaatattccaccatatcattacgctcgacctcgccatataccaacacatccaatcccaaacgttcctactcaacaataacctacttaatatat

SEQ ID NO: 22367 - DNA, 599 bp, Artificial Sequence
  chemically treated genomic DNA (Homo sapiens) CpG-island No: 22367
tgatgacgtttgcgtttagcgtcgtaatcgaatttatgatgtcgttgaattcgtaataatatatgtgagtgtggatttgtgtgttatttttcgttacggcggcgttgatacggaaggtttttacgttttattggagatacgtattttagtcgttacgacgtagcggtaaattttcgcgtagcgtcggttcgttaatttggatgatgttaattttagcggtttttagatcggttattttattacgtacggttagcgtaatttgtttggcgatggttttacggttgatatttttacgcgggaacgattagtagagtatggttatcggtttcgttagtattttttttatcggtttgtcggttagcgattgcgtatatttcgtttattttacggtaatcggtgtcgggcggttaatgttattaatgataatcggtggttttacgtagcgggaatcgtagttttgtatttaatcgttttgcgtaaagataaattcgtcgaggtgttcgttaaagtattttattatgttattacgttcggtttcgttatgtattagtatatttagttttaaacgtttttgtttaataatggtttgtttgatatgt

SEQ ID NO: 22368 - DNA, 599 bp, Artificial Sequence
  chemically treated genomic DNA (Homo sapiens) CpG-island No: 22368
acatatcaaacaaaccattattaaacaaaaacgtttaaaactaaatatactaatacataacgaaaccgaacgtaataacataataaaatactttaacgaacacctcgacgaatttatctttacgcaaaacgattaaatacaaaactacgattcccgctacgtaaaaccaccgattatcattaataacattaaccgcccgacaccgattaccgtaaaataaacgaaatatacgcaatcgctaaccgacaaaccgataaaaaaaatactaacgaaaccgataaccatactctactaatcgttcccgcgtaaaaatatcaaccgtaaaaccatcgccaaacaaattacgctaaccgtacgtaataaaataaccgatctaaaaaccgctaaaattaacatcatccaaattaacgaaccgacgctacgcgaaaatttaccgctacgtcgtaacgactaaaatacgtatctccaataaaacgtaaaaaccttccgtatcaacgccgccgtaacgaaaaataacacacaaatccacactcacatatattattacgaattcaacgacatcataaattcgattacgacgctaaacgcaaacgtcatca

SEQ ID NO: 22369 - DNA, 573 bp, Artificial Sequence
  chemically treated genomic DNA (Homo sapiens) CpG-island No: 22369
ttttttaaaatggagcggaggaggaaaatgtttattatagttttatttcgtttttcgtagacggttagtattaattagtagcgcgtagagcgagtataaagttaggggaggagtttgttgttgttttagtaataattacggaaattaagacgagcgcggtcgcggaagtatcgcggtttatatatttcgtagttaggcgggttttgggagaggcgcgagttaggtttggtcggcgttcgcggagaaaagaagtagttaagtttatgaattataatttcggttgtcgttttttttttttttaatcgttaagtgcgttaaggtaggaatgacgtatgcgttgcgtttagaggcggggttaagtcggatttgaatttataacgtatgcgttttatggagtttgttgggggagggaagcggggtggttggcgtgacgcggaaggcgggttttttgcgttcgtgggcggagttattagtttcgggcgggtttttcgtcgatttgaattcgaaaaggttattttggattttttagagttaaatgttggttttttagataagggtttttttatttttttt

SEQ ID NO: 22370 - DNA, 573 bp, Artificial Sequence
  chemically treated genomic DNA (Homo sapiens) CpG-island No: 22370
aaaaaaaataaaaaaacccttatctaaaaaaccaacatttaactctaaaaaatccaaaataaccttttcgaattcaaatcgacgaaaaacccgcccgaaactaataactccgcccacgaacgcaaaaaacccgccttccgcgtcacgccaaccaccccgcttccctcccccaacaaactccataaaacgcatacgttataaattcaaatccgacttaaccccgcctctaaacgcaacgcatacgtcattcctaccttaacgcacttaacgattaaaaaaaaaaaaaacgacaaccgaaattataattcataaacttaactacttcttttctccgcgaacgccgaccaaacctaactcgcgcctctcccaaaacccgcctaactacgaaatatataaaccgcgatacttccgcgaccgcgctcgtcttaatttccgtaattattactaaaacaacaacaaactcctcccctaactttatactcgctctacgcgctactaattaatactaaccgtctacgaaaaacgaaataaaactataataaacattttcctcctccgctccattttaaaaaa

SEQ ID NO: 22371 - DNA, 573 bp, Artificial Sequence
  chemically treated genomic DNA (Homo sapiens) CpG-island No: 22371
ggaaaaaatggggggatttttgtttggggaattagtatttaattttgggaagtttaaaataattttttcgggtttaggtcggcggaaagttcgttcgaagttagtggtttcgtttacgagcgtaaaagattcgtttttcgcgttacgttagttatttcgttttttttttttagtaagttttataaggcgtatgcgttatgagtttaggttcgatttaatttcgtttttaagcgtagcgtatgcgttatttttattttagcgtatttaacggttaggagaggagaaagcggtaatcggggttgtagtttatgggtttgattgtttttttttttcgcgggcgtcgattaggtttggttcgcgttttttttaggattcgtttggttgcgagatatgtaagtcgcgatattttcgcgatcgcgttcgttttggttttcgtggttgttgttggggtaatagtaggttttttttttagttttgtattcgttttgcgcgttattaattggtgttagtcgtttgcggggggcggggtgaagttgtgatggatatttttttttttcgttttattttgggaaa

SEQ ID NO: 22372 - DNA, 573 bp, Artificial Sequence
  chemically treated genomic DNA (Homo sapiens) CpG-island No: 22372
tttcccaaaataaaacgaaaaaaaaaaatatccatcacaacttcaccccgccccccgcaaacgactaacaccaattaataacgcgcaaaacgaatacaaaactaaaaaaaaaacctactattaccccaacaacaaccacgaaaaccaaaacgaacgcgatcgcgaaaatatcgcgacttacatatctcgcaaccaaacgaatcctaaaaaaaacgcgaaccaaacctaatcgacgcccgcgaaaaaaaaaaacaatcaaacccataaactacaaccccgattaccgctttctcctctcctaaccgttaaatacgctaaaataaaaataacgcatacgctacgcttaaaaacgaaattaaatcgaacctaaactcataacgcatacgccttataaaacttactaaaaaaaaaaaacgaaataactaacgtaacgcgaaaaacgaatcttttacgctcgtaaacgaaaccactaacttcgaacgaactttccgccgacctaaacccgaaaaaattattttaaacttcccaaaattaaatactaattccccaaacaaaaatccccccattttttcc

SEQ ID NO: 22373 - DNA, 545 bp, Artificial Sequence
  chemically treated genomic DNA (Homo sapiens) CpG-island No: 22373
gcgggtattgcgggtcgggagttacggggtttggattcgggtgcgaggggcgggggttttcgtcgttttttcggtttttgcgttgggggttcgttttgatcgcgtacgcggggttagaatgtatttatttgagtagtacggcggcgtttgttatcgtgtttagcgtcgatagcggtagtaggtagcggtttatgtcgggtcggggataggcgttaggcgttaggggtcggcgcggagtttgttgtatattagtcgtttgggtagtttcgaggaagagcgcgcgacgtagttataggcgagcggaggcgtaggcgcggttgggttcgcgttcggaattgggttgcgaggggcggggcgcgggcggagggggcggggattttagggacgggatttatgagtatcggttttgagcgttgttatagttgggattggtggttttaggagtttgtgggcgtggttagttcgggggcggggtttatggtttgttcgaatgacgttatatttgtcgtagcgtataaggcgttacgtagttttggagtgaaata

SEQ ID NO: 22374 - DNA, 545 bp, Artificial Sequence
  chemically treated genomic DNA (Homo sapiens) CpG-island No: 22374
tatttcactccaaaactacgtaacgccttatacgctacgacaaatataacgtcattcgaacaaaccataaaccccgcccccgaactaaccacgcccacaaactcctaaaaccaccaatcccaactataacaacgctcaaaaccgatactcataaatcccgtccctaaaatccccgccccctccgcccgcgccccgcccctcgcaacccaattccgaacgcgaacccaaccgcgcctacgcctccgctcgcctataactacgtcgcgcgctcttcctcgaaactacccaaacgactaatatacaacaaactccgcgccgacccctaacgcctaacgcctatccccgacccgacataaaccgctacctactaccgctatcgacgctaaacacgataacaaacgccgccgtactactcaaataaatacattctaaccccgcgtacgcgatcaaaacgaacccccaacgcaaaaaccgaaaaaacgacgaaaacccccgcccctcgcacccgaatccaaaccccgtaactcccgacccgcaatacccgc

SEQ ID NO: 22375 - DNA, 545 bp, Artificial Sequence
  chemically treated genomic DNA (Homo sapiens) CpG-island No: 22375
tattttattttagaattgcgtagcgttttatacgttgcggtaagtgtgacgttattcgaataaattataggtttcgttttcggattagttacgtttataggtttttgaaattattaattttagttgtgatagcgtttaggatcgatgtttataggtttcgtttttaggattttcgtttttttcgttcgcgtttcgtttttcgtagtttagtttcggacgcgggtttagtcgcgtttgcgttttcgttcgtttgtggttgcgtcgcgcgttttttttcggagttatttaggcggttggtgtgtagtaagtttcgcgtcgatttttgacgtttgacgtttgttttcggttcggtatgagtcgttatttgttgtcgttgtcggcgttgggtacggtagtaggcgtcgtcgtgttgtttaagtgagtatattttagtttcgcgtgcgcggttaaggcgggtttttagcgtaggggtcgggaaggcggcggagattttcgtttttcgtattcgggtttaggtttcgtagttttcgattcgtagtgttcgt

SEQ ID NO: 22376 - DNA, 545 bp, Artificial Sequence
  chemically treated genomic DNA (Homo sapiens) CpG-island No: 22376
acgaacactacgaatcgaaaactacgaaacctaaacccgaatacgaaaaacgaaaatctccgccgccttcccgacccctacgctaaaaacccgccttaaccgcgcacgcgaaactaaaatatactcacttaaacaacacgacgacgcctactaccgtacccaacgccgacaacgacaacaaataacgactcataccgaaccgaaaacaaacgtcaaacgtcaaaaatcgacgcgaaacttactacacaccaaccgcctaaataactccgaaaaaaaacgcgcgacgcaaccacaaacgaacgaaaacgcaaacgcgactaaacccgcgtccgaaactaaactacgaaaaacgaaacgcgaacgaaaaaaacgaaaatcctaaaaacgaaacctataaacatcgatcctaaacgctatcacaactaaaattaataatttcaaaaacctataaacgtaactaatccgaaaacgaaacctataatttattcgaataacgtcacacttaccgcaacgtataaaacgctacgcaattctaaaataaaata

SEQ ID NO: 22377 - DNA, 948 bp, Artificial Sequence
  chemically treated genomic DNA (Homo sapiens) CpG-island No: 22377
tcgtgttagatacggtgggttcgttcgtgttagatacggtgggttcgttcgtgttagatacggtggattcgttcgtgttgtgttagatacggtggattcgttcgtgttagacgcggtggattcgttcgtgttagatacggtggattcgttcgtgttgtgttagatacggtggattcgttcgtgttgtgttagatacggtggattcgttcgtgttagatacggtgggttcgttcgtgttagatacggtgggttcgttcgtgttagacgcggtgggttcgttcgtgttagacgcggtggattttttcgtgttgtgttagatacggtggattcgttcgtgttagatacggtggattcgttcgtgttagatacggtggattcgttcgtgttagatacggtggattcgttcgtgttgtgttagatacggtggattcgttcgtgttagatacggtgggttcgttcgtgttagatacggtgggttcgttcgtgttagacgcggtgggttcgttcgtgttagacgcggtggattttttcgtgttgtgttagatacggtggattcgttcgtgttagatacggtggattcgttcgtgttagatacggtggattcgttcgtgttagatacggtggattcgttcgtgttgtgttagatacggtggattcgttcgtgttgtgttagatacggtgggttcgttcgtgttgtgttagatacggtggattcgttcgtgttgtgttagatacggtgggttcgttcgtgttagacgcggtgggttcgttcgtgttagacgcggtgggttcgttcgtgttgtgttagatacggtgggttcgttcgtgttgtgttagatacggtgggttcgtttgtgttgtgttagatacggtgggttcgttcgtgttagatattgtttattgatttttttagtggatgtgaggaatgggatttgagatattgttgtt

SEQ ID NO: 22378 - DNA, 948 bp, Artificial Sequence
  chemically treated genomic DNA (Homo sapiens) CpG-island No: 22378
aacaacaatatctcaaatcccattcctcacatccactaaaaaaatcaataaacaatatctaacacgaacgaacccaccgtatctaacacaacacaaacgaacccaccgtatctaacacaacacgaacgaacccaccgtatctaacacaacacgaacgaacccaccgcgtctaacacgaacgaacccaccgcgtctaacacgaacgaacccaccgtatctaacacaacacgaacgaatccaccgtatctaacacaacacgaacgaacccaccgtatctaacacaacacgaacgaatccaccgtatctaacacaacacgaacgaatccaccgtatctaacacgaacgaatccaccgtatctaacacgaacgaatccaccgtatctaacacgaacgaatccaccgtatctaacacaacacgaaaaaatccaccgcgtctaacacgaacgaacccaccgcgtctaacacgaacgaacccaccgtatctaacacgaacgaacccaccgtatctaacacgaacgaatccaccgtatctaacacaacacgaacgaatccaccgtatctaacacgaacgaatccaccgtatctaacacgaacgaatccaccgtatctaacacgaacgaatccaccgtatctaacacaacacgaaaaaatccaccgcgtctaacacgaacgaacccaccgcgtctaacacgaacgaacccaccgtatctaacacgaacgaacccaccgtatctaacacgaacgaatccaccgtatctaacacaacacgaacgaatccaccgtatctaacacaacacgaacgaatccaccgtatctaacacgaacgaatccaccgcgtctaacacgaacgaatccaccgtatctaacacaacacgaacgaatccaccgtatctaacacgaacgaacccaccgtatctaacacgaacgaacccaccgtatctaacacga

SEQ ID NO: 22379 - DNA, 948 bp, Artificial Sequence
  chemically treated genomic DNA (Homo sapiens) CpG-island No: 22379
gatagtaatgttttaggttttattttttatatttattgaggaagttaatgggtaatgtttaatacgaacgagtttatcgtgtttaatataatataaacgagtttatcgtgtttaatataatacgaacgagtttatcgtgtttaatataatacgaacgagtttatcgcgtttaatacgaacgagtttatcgcgtttaatacgaacgagtttatcgtgtttaatataatacgaacgagtttatcgtgtttaatataatacgaacgagtttatcgtgtttaatataatacgaacgagtttatcgtgtttaatataatacgaacgagtttatcgtgtttaatacgaacgagtttatcgtgtttaatacgaacgagtttatcgtgtttaatacgaacgagtttatcgtgtttaatataatacgaaggagtttatcgcgtttaatacgaacgaatttatcgcgtttaatacgaacgaatttatcgtgtttaatacgaacgaatttatcgtgtttaatacgaacgagtttatcgtgtttaatataatacgaacgagtttatcgtgtttaatacgaacgagtttatcgtgtttaatacgaacgagtttatcgtgtttaatacgaacgagtttatcgtgtttaatataatacgaaggagtttatcgcgtttaatacgaacgaatttatcgcgtttaatacgaacgaatttatcgtgtttaatacgaacgaatttatcgtgtttaatacgaacgagtttatcgtgtttaatataatacgaacgagtttatcgtgtttaatataatacgaacgagtttatcgtgtttaatacgaacgagtttatcgcgtttaatacgaacgagtttatcgtgtttaatataatacgaacgagtttatcgtgtttaatacgaacgagtttatcgtgtttaatacgaacgagtttatcgtgtttaatacga

SEQ ID NO: 22380 - DNA, 948 bp, Artificial Sequence
  chemically treated genomic DNA (Homo sapiens) CpG-island No: 22380
tcgtattaaacacgataaactcgttcgtattaaacacgataaactcgttcgtattaaacacgataaactcgttcgtattatattaaacacgataaactcgttcgtattaaacgcgataaactcgttcgtattaaacacgataaactcgttcgtattatattaaacacgataaactcgttcgtattatattaaacacgataaactcgttcgtattaaacacgataaattcgttcgtattaaacacgataaattcgttcgtattaaacgcgataaattcgttcgtattaaacgcgataaactccttcgtattatattaaacacgataaactcgttcgtattaaacacgataaactcgttcgtattaaacacgataaactcgttcgtattaaacacgataaactcgttcgtattatattaaacacgataaactcgttcgtattaaacacgataaattcgttcgtattaaacacgataaattcgttcgtattaaacgcgataaattcgttcgtattaaacgcgataaactccttcgtattatattaaacacgataaactcgttcgtattaaacacgataaactcgttcgtattaaacacgataaactcgttcgtattaaacacgataaactcgttcgtattatattaaacacgataaactcgttcgtattatattaaacacgataaactcgttcgtattatattaaacacgataaactcgttcgtattatattaaacacgataaactcgttcgtattaaacgcgataaactcgttcgtattaaacgcgataaactcgttcgtattatattaaacacgataaactcgttcgtattatattaaacacgataaactcgtttatattatattaaacacgataaactcgttcgtattaaacattacccattaacttcctcaataaatataaaaaataaaacctaaaacattactatc

SEQ ID NO: 22381 - DNA, 521 bp, Artificial Sequence
  chemically treated genomic DNA (Homo sapiens) CpG-island No: 22381
cgtgaattttcgaacgtttacggttggttgtgacgtaatcgaggtttgggtttaattagttacggttggggttcggttgtttttgggtgataattttaatttggtcgtttatttgtagttggtaggtgaacggtataatgcgttcgttaatttttgtttcgatgtagcggtgttcgatattattgtggatgtggtaagcgaagtttagcggcgttgatttcgtaggtaaattaacgatattatttttcggcgtaaagacgtatattcggtcgttaaagatttgattacgtatttcgtcgagtatttcgtcggaattagttatttttttttgttacgtaattagtttacgtagttaggtaattcggtttttatgtttcgaacgtgcgtcgttagtagtcgcgttttttttatatttttagtgcgtagtaatatttaattttgtatttttatgtatttgtttggtgcggatttggattttaacggtttttttattcggttttagaattacggtatgaatagat

SEQ ID NO: 22382 - DNA, 521 bp, Artificial Sequence
  chemically treated genomic DNA (Homo sapiens) CpG-island No: 22382
atctattcataccgtaattctaaaaccgaataaaaaaaccgttaaaatccaaatccgcaccaaacaaatacataaaaatacaaaattaaatattactacgcactaaaaatataaaaaaaacgcgactactaacgacgcacgttcgaaacataaaaaccgaattacctaactacgtaaactaattacgtaacaaaaaaaaataactaattccgacgaaatactcgacgaaatacgtaatcaaatctttaacgaccgaatatacgtctttacgccgaaaaataatatcgttaatttacctacgaaatcaacgccgctaaacttcgcttaccacatccacaataatatcgaacaccgctacatcgaaacaaaaattaacgaacgcattataccgttcacctaccaactacaaataaacgaccaaattaaaattatcacccaaaaacaaccgaaccccaaccgtaactaattaaacccaaacctcgattacgtcacaaccaaccgtaaacgttcgaaaattcacg

SEQ ID NO: 22383 - DNA, 521 bp, Artificial Sequence
  chemically treated genomic DNA (Homo sapiens) CpG-island No: 22383
gtttatttatatcgtggttttggggtcgggtggaaaaatcgttgagatttaaattcgtattaaatagatgtatgaagatgtagagttgggtgttgttgcgtattggaaatataaagagggcgcggttgttggcggcgtacgttcgggatatgaagatcggattgtttggttgcgtaaattgattgcgtggtaggaagagatggttgatttcggcgaaatgttcgacgaagtacgtagttaggtttttgacgatcgggtgtacgtttttacgtcgaaaggtgatgtcgttgatttgtttgcgggattaacgtcgttggatttcgtttattatatttatagtgatgtcggatatcgttgtatcggggtaaaaattggcgggcgtattgtgtcgtttatttattagttgtagatgggcgattagattgaaattattatttagaaatagtcgaattttagtcgtgattggttaaatttaaatttcggttacgttataattagtcgtgggcgttcgaaaatttacg

SEQ ID NO: 22384 - DNA, 521 bp, Artificial Sequence
  chemically treated genomic DNA (Homo sapiens) CpG-island No: 22384
cgtaaattttcgaacgcccacgactaattataacgtaaccgaaatttaaatttaaccaatcacgactaaaattcgactatttctaaataataatttcaatctaatcgcccatctacaactaataaataaacgacacaatacgcccgccaatttttaccccgatacaacgatatccgacatcactataaatataataaacgaaatccaacgacgttaatcccgcaaacaaatcaacgacatcacctttcgacgtaaaaacgtacacccgatcgtcaaaaacctaactacgtacttcgtcgaacatttcgccgaaatcaaccatctcttcctaccacgcaatcaatttacgcaaccaaacaatccgatcttcatatcccgaacgtacgccgccaacaaccgcgccctctttatatttccaatacgcaacaacacccaactctacatcttcatacatctatttaatacgaatttaaatctcaacgatttttccacccgaccccaaaaccacgatataaataaac

SEQ ID NO: 22385 - DNA, 1024 bp, Artificial Sequence
  chemically treated genomic DNA (Homo sapiens) CpG-island No: 22385
gcgggtcgattatcgaggtgtgtaaagattgatagtcgttcgtttttggaatggcgatatagttttttacgcggttcggacgcggtttgtataggttgtgtatttggtttagtacgcgataataggtgttagaattattgacgattacgcggaaagcgtagatcgattggttcggtagttacgaaatcgcgtattatatgttgggtatcgtagttggttcgtatttttattcgattattgtgcgtgagttttagcggatgattggcgaagaaattaaagcgtagattttggaaagagaaggtcgtttgtcggatgtcgttatcgtttgtgttggcggcggttcgaatgttatcggtatgtttgttgattttattaatgaaattaacgtcggtttgattggtgtggagttaggtggttacggtatcgaaattggcgagtacggcgtatcgttaaaatatggtcgcgtgggtatttatttcggtatgaaagcgtcgatgatgtaaatcgaagacgggtagattgaagaattttattttattttcgtcggattggatttttcgtttgtcggtttataatacgcgtattttaatagtattggacgcgttgattacgtgtttattatcgatgatgaagtttttgaagtttttaaaacgttgtgtttgtacgaagggattatttcggcgttggaatttttttacgttttaggagttttcggtttggttaatttatttttacgatatttcgttttgattgtcgtttattgggggtttatgttggttgaaatcgacggcgaaatcgtgtttagttcgcgtggcgcgttagttataggaatggaaaattttttgtagagcgcggttcgcgattaggtttatagtaatacgcgggtacgatttttaatggtgcgaaaaggtttttttgcgttatcggaaaattcgtaaggtattcgtgggtaggatgaatttgttcgcgtgagttgggatgaggcgttggattttatttattaataatataaacgtattcgtga

SEQ ID NO: 22386 - DNA, 1024 bp, Artificial Sequence
  chemically treated genomic DNA (Homo sapiens) CpG-island No: 22386
tcacgaatacgtttatattattaataaataaaatccaacgcctcatcccaactcacgcgaacaaattcatcctacccacgaataccttacgaattttccgataacgcaaaaaaaccttttcgcaccattaaaaatcgtacccgcgtattactataaacctaatcgcgaaccgcgctctacaaaaaattttccattcctataactaacgcgccacgcgaactaaacacgatttcgccgtcgatttcaaccaacataaacccccaataaacgacaatcaaaacgaaatatcgtaaaaataaattaaccaaaccgaaaactcctaaaacgtaaaaaaattccaacgccgaaataatcccttcgtacaaacacaacgttttaaaaacttcaaaaacttcatcatcgataataaacacgtaatcaacgcgtccaatactattaaaatacgcgtattataaaccgacaaacgaaaaatccaatccgacgaaaataaaataaaattcttcaatctacccgtcttcgatttacatcatcgacgctttcataccgaaataaatacccacgcgaccatattttaacgatacgccgtactcgccaatttcgataccgtaaccacctaactccacaccaatcaaaccgacgttaatttcattaataaaatcaacaaacataccgataacattcgaaccgccgccaacacaaacgataacgacatccgacaaacgaccttctctttccaaaatctacgctttaatttcttcgccaatcatccgctaaaactcacgcacaataatcgaataaaaatacgaaccaactacgatacccaacatataatacgcgatttcgtaactaccgaaccaatcgatctacgctttccgcgtaatcgtcaataattctaacacctattatcgcgtactaaaccaaatacacaacctatacaaaccgcgtccgaaccgcgtaaaaaactatatcgccattccaaaaacgaacgactatcaatctttacacacctcgataatcgacccgc

SEQ ID NO: 22387 - DNA, 1024 bp, Artificial Sequence
  chemically treated genomic DNA (Homo sapiens) CpG-island No: 22387
ttacgaatgcgtttatgttgttggtgaataagatttagcgttttattttaatttacgcgaataaatttattttgtttacgaatgttttgcgggtttttcggtgacgtaagaaagttttttcgtattattggaaatcgtattcgcgtattgttgtgaatttggtcgcgaatcgcgttttgtaaggagttttttatttttgtggttaacgcgttacgcgagttaaatacggtttcgtcgtcggttttaattagtatgggtttttaatgggcggtagttagaacgggatatcgtgaggatgagttggttaaatcgaggatttttgaggcgtgggaggattttagcgtcgggatgattttttcgtgtaggtatagcgttttgaaggttttaagggttttattatcggtaatagatacgtaattagcgcgtttagtgttgttaagatacgcgtgttgtgggtcgatagacgggaaatttagttcggcggagatggagtaagattttttaatttgttcgttttcggtttgtattatcggcgtttttatatcgaaatagatatttacgcgattatgttttagcggtgcgtcgtgttcgttagtttcgatatcgtgattatttggttttatattaattaggtcgacgttggttttattgatgaaattagtaaatatgtcgatggtattcgaatcgtcgttaatataggcgataacggtattcggtaggcgattttttttttttagaatttgcgttttggttttttcgttaattattcgttgaaatttacgtataatggtcggataaggatgcgggttagttgcggtgtttagtatatagtgcgcggtttcgtaattatcggattagtcgatttacgtttttcgcgtgatcgttaatgattttgatatttgttatcgcgtgttgggttagatgtatagtttgtataagtcgcgttcgggtcgcgtgaaagattatatcgttattttaaaagcgaacggttattagtttttgtatatttcgatgatcggttcgt

SEQ ID NO: 22388 - DNA, 1024 bp, Artificial Sequence
  chemically treated genomic DNA (Homo sapiens) CpG-island No: 22388
acgaaccgatcatcgaaatatacaaaaactaataaccgttcgcttttaaaataacgatataatctttcacgcgacccgaacgcgacttatacaaactatacatctaacccaacacgcgataacaaatatcaaaatcattaacgatcacgcgaaaaacgtaaatcgactaatccgataattacgaaaccgcgcactatatactaaacaccgcaactaacccgcatccttatccgaccattatacgtaaatttcaacgaataattaacgaaaaaaccaaaacgcaaattctaaaaaaaaaaaatcgcctaccgaataccgttatcgcctatattaacgacgattcgaataccatcgacatatttactaatttcatcaataaaaccaacgtcgacctaattaatataaaaccaaataatcacgatatcgaaactaacgaacacgacgcaccgctaaaacataatcgcgtaaatatctatttcgatataaaaacgccgataatacaaaccgaaaacgaacaaattaaaaaatcttactccatctccgccgaactaaatttcccgtctatcgacccacaacacgcgtatcttaacaacactaaacgcgctaattacgtatctattaccgataataaaacccttaaaaccttcaaaacgctatacctacacgaaaaaatcatcccgacgctaaaatcctcccacgcctcaaaaatcctcgatttaaccaactcatcctcacgatatcccgttctaactaccgcccattaaaaacccatactaattaaaaccgacgacgaaaccgtatttaactcgcgtaacgcgttaaccacaaaaataaaaaactccttacaaaacgcgattcgcgaccaaattcacaacaatacgcgaatacgatttccaataatacgaaaaaactttcttacgtcaccgaaaaacccgcaaaacattcgtaaacaaaataaatttattcgcgtaaattaaaataaaacgctaaatcttattcaccaacaacataaacgcattcgtaa

SEQ ID NO: 22389 - DNA, 685 bp, Artificial Sequence
  chemically treated genomic DNA (Homo sapiens) CpG-island No: 22389
cgattgtggggttcggtggcgtttgttattggttcggcgttgacgggtaaattggttattatgtttgattatcgggtgattttcgcgttgttgacgttgggcgtggtatttatgttgttcggtttttttattcgttcgacgatttagttataaggggtaagtcgttagtaggagagtatcggttggtttgcgtggttggcgttggttcgttagaattggcgttttttggtttgcgtttgtttattgtagggggtatatgcggtttattacggttttagcgttatttattggtaggtagttggttattcggtttcggcggtggggtatttgtggtcgttgggcgtggtggcggaagttattatttttgcgttgagtaataaattttttcgtcgttgtagtgtacgcgatatgttgttgatttcggcgatttgcggcgtagtgcgttggggtattatgggaatttattatgtttgtaattcgtgaatacgatcgttaaacgttagtttaagttcgaatgcgacgttattaggattatcgtgtaatattatacggtagatagataaatagagggttattagtatcgacgatacggttttgttgggtaaattgcgttttaagacgttggttagcgacggaatatttaaggaataacgtgcgggaattttcgttattaataaagaaatag

SEQ ID NO: 22390 - DNA, 685 bp, Artificial Sequence
  chemically treated genomic DNA (Homo sapiens) CpG-island No: 22390
ctatttctttattaataacgaaaattcccgcacgttattccttaaatattccgtcgctaaccaacgtcttaaaacgcaatttacccaacaaaaccgtatcgtcgatactaataaccctctatttatctatctaccgtataatattacacgataatcctaataacgtcgcattcgaacttaaactaacgtttaacgatcgtattcacgaattacaaacataataaattcccataataccccaacgcactacgccgcaaatcgccgaaatcaacaacatatcgcgtacactacaacgacgaaaaaatttattactcaacgcaaaaataataacttccgccaccacgcccaacgaccacaaataccccaccgccgaaaccgaataaccaactacctaccaataaataacgctaaaaccgtaataaaccgcatataccccctacaataaacaaacgcaaaccaaaaaacgccaattctaacgaaccaacgccaaccacgcaaaccaaccgatactctcctactaacgacttaccccttataactaaatcgtcgaacgaataaaaaaaccgaacaacataaataccacgcccaacgtcaacaacgcgaaaatcacccgataatcaaacataataaccaatttacccgtcaacgccgaaccaataacaaacgccaccgaaccccacaatcg

SEQ ID NO: 22391 - DNA, 685 bp, Artificial Sequence
  chemically treated genomic DNA (Homo sapiens) CpG-island No: 22391
ttgtttttttattgatgacgaaaattttcgtacgttgttttttgggtatttcgtcgttggttagcgttttaaagcgtaatttgtttagtaaggtcgtatcgtcgatgttgataattttttgtttgtttatttgtcgtgtggtgttgtacggtggttttggtggcgtcgtattcgggtttaaattggcgtttggcgatcgtgtttacgggttgtaggtatgatagatttttataatgttttagcgtattacgtcgtaaatcgtcgagattaatagtatatcgcgtgtattataacggcggaaaagtttattatttagcgtaaagataatgattttcgttattacgtttagcgattataaatattttatcgtcgaggtcgagtagttagttgtttgttagtaaatggcgttaaaatcgtaataggtcgtatgtgttttttgtaataaataaacgtaggttagaaagcgttagttttggcgaattagcgttaattacgtagattaatcggtgtttttttgttggcgatttgttttttgtggttgaatcgtcggacggatgagaaagtcgagtagtatggatgttacgtttaacgttaatagcgcgaggattattcgataattaaatatagtgattagtttgttcgttagcgtcgagttaatgataaacgttatcgagttttatagtcg

SEQ ID NO: 22392 - DNA, 685 bp, Artificial Sequence
  chemically treated genomic DNA (Homo sapiens) CpG-island No: 22392
cgactataaaactcgataacgtttatcattaactcgacgctaacgaacaaactaatcactatatttaattatcgaataatcctcgcgctattaacgttaaacgtaacatccatactactcgactttctcatccgtccgacgattcaaccacaaaaaacaaatcgccaacaaaaaaacaccgattaatctacgtaattaacgctaattcgccaaaactaacgctttctaacctacgtttatttattacaaaaaacacatacgacctattacgattttaacgccatttactaacaaacaactaactactcgacctcgacgataaaatatttataatcgctaaacgtaataacgaaaatcattatctttacgctaaataataaacttttccgccgttataatacacgcgatatactattaatctcgacgatttacgacgtaatacgctaaaacattataaaaatctatcatacctacaacccgtaaacacgatcgccaaacgccaatttaaacccgaatacgacgccaccaaaaccaccgtacaacaccacacgacaaataaacaaacaaaaaattatcaacatcgacgatacgaccttactaaacaaattacgctttaaaacgctaaccaacgacgaaatacccaaaaaacaacgtacgaaaattttcgtcatcaataaaaaaacaa

SEQ ID NO: 22393 - DNA, 562 bp, Artificial Sequence
  chemically treated genomic DNA (Homo sapiens) CpG-island No: 22393
taatttcgtacgattgcgtgttttaagtcgacgtagcggtttattttcgtattgtagacggggaaattgaggtttgaggcggtcggggtggggtagatttttcggcgagttcgagttttcgttttcggttagtttcgttttggttcgtaagaagtattcggggcgcgaggcgaaggcgtatagcgcggggttaggttgggtttagtagcgcgatggtagtttagcggttgggtaagcgcgtgttgagtaagttgtagtttttatcgcgggttcgcgggttagggggtagtttcggggggttgtagaagcggtacgcgcgcgttatcgttaagtatgatcggcgggagttgtagcggcggttggacgtggagaagtggatcgacgggcgtttggaggagttgtatcgcggtatggtgagttcggggagggttcgggggtggtcggggatagatagagttcgggcgcggagattttacgtttttggggtttcggtgtatattcgttggtgtacggttagtttggtttgtataagaggacgagcgttttagggtcgggtatttat

SEQ ID NO: 22394 - DNA, 562 bp, Artificial Sequence
  chemically treated genomic DNA (Homo sapiens) CpG-island No: 22394
ataaatacccgaccctaaaacgctcgtcctcttatacaaaccaaactaaccgtacaccaacgaatatacaccgaaaccccaaaaacgtaaaatctccgcgcccgaactctatctatccccgaccacccccgaaccctccccgaactcaccataccgcgatacaactcctccaaacgcccgtcgatccacttctccacgtccaaccgccgctacaactcccgccgatcatacttaacgataacgcgcgcgtaccgcttctacaaccccccgaaactaccccctaacccgcgaacccgcgataaaaactacaacttactcaacacgcgcttacccaaccgctaaactaccatcgcgctactaaacccaacctaaccccgcgctatacgccttcgcctcgcgccccgaatacttcttacgaaccaaaacgaaactaaccgaaaacgaaaactcgaactcgccgaaaaatctaccccaccccgaccgcctcaaacctcaatttccccgtctacaatacgaaaataaaccgctacgtcgacttaaaacacgcaatcgtacgaaatta

SEQ ID NO: 22395 - DNA, 562 bp, Artificial Sequence
  chemically treated genomic DNA (Homo sapiens) CpG-island No: 22395
atgagtgttcggttttggggcgttcgtttttttgtgtagattaggttggtcgtgtattagcgagtgtgtatcgagattttaagggcgtggggttttcgcgttcgggttttatttgttttcgattattttcgagtttttttcgggtttattatgtcgcggtatagtttttttaggcgttcgtcgatttatttttttacgtttagtcgtcgttgtagttttcgtcggttatatttgacggtgacgcgcgcgtgtcgtttttgtagtttttcgggattgttttttggttcgcgggttcgcgatggagattgtagtttgtttagtacgcgtttgtttagtcgttgagttgttatcgcgttgttggatttagtttggtttcgcgttgtgcgttttcgtttcgcgtttcgggtgttttttacgggttagggcggggttagtcgggggcgggggttcgggttcgtcgggaggtttgttttatttcggtcgttttaggttttagttttttcgtttgtagtgcgagagtaggtcgttgcgtcggtttgaggtacgtagtcgtgcgaagttg

SEQ ID NO: 22396 - DNA, 562 bp, Artificial Sequence
  chemically treated genomic DNA (Homo sapiens) CpG-island No: 22396
caacttcgcacgactacgtacctcaaaccgacgcaacgacctactctcgcactacaaacgaaaaaactaaaacctaaaacgaccgaaataaaacaaacctcccgacgaacccgaacccccgcccccgactaaccccgccctaacccgtaaaaaacacccgaaacgcgaaacgaaaacgcacaacgcgaaaccaaactaaatccaacaacgcgataacaactcaacgactaaacaaacgcgtactaaacaaactacaatctccatcgcgaacccgcgaaccaaaaaacaatcccgaaaaactacaaaaacgacacgcgcgcgtcaccgtcaaatataaccgacgaaaactacaacgacgactaaacgtaaaaaaataaatcgacgaacgcctaaaaaaactataccgcgacataataaacccgaaaaaaactcgaaaataatcgaaaacaaataaaacccgaacgcgaaaaccccacgcccttaaaatctcgatacacactcgctaatacacgaccaacctaatctacacaaaaaaacgaacgccccaaaaccgaacactcat

SEQ ID NO: 22397 - DNA, 771 bp, Artificial Sequence
  chemically treated genomic DNA (Homo sapiens) CpG-island No: 22397
gttttttgcgtttcgtttttagtttattcgttcggtttttatcgtggatgttgcgttttcggtcggtcgttaggattttagagaggagtagcgattttagtagggcgagaaacgttcggtttcgttttagttcgtatagttgcgttatggttagtttagtcgagacgcgtaggcgacgttattagtcgttggggtttcgcgattaggtgcgggaagttttttaacgcgtacgcgtaatggagcgtttcgcgtttaggtgtcgacgtttcgggagggttcgttaggtgttaaagttttcggaagtcgttttttcggatttttagtgtggggacgttcggttttttcggcgcgcgatgtttgggtttgttttttattcgcgttttcgtcgtttgcgatatttaacggtttttagcgcgtttagagtcgcgttatattttttaacgcgcggaggtcgttagagttaatggcgaacgtttattggaagcggttttcgaaggtggtcgggtaggtagggggcggggcgtatttggttaggtagggcgagttgggcgtaggcgtaaagggtaggtatttgcgcggtcgtttttcggttttgggcgtatttgggttcgtttttggtgtcggggaagaggcggggtttgcgcgggtttcgtttttaatagaatttggcggggcggggcggggcgtttgttcgttgagtatttgttattttttttttgggtttggtgacgacgtcggaggagggttttcgttttaggattggttttaggg

SEQ ID NO: 22398 - DNA, 771 bp, Artificial Sequence
  chemically treated genomic DNA (Homo sapiens) CpG-island No: 22398
ccctaaaaccaatcctaaaacgaaaaccctcctccgacgtcgtcaccaaacccaaaaaaaaaataacaaatactcaacgaacaaacgccccgccccgccccgccaaattctattaaaaacgaaacccgcgcaaaccccgcctcttccccgacaccaaaaacgaacccaaatacgcccaaaaccgaaaaacgaccgcgcaaatacctaccctttacgcctacgcccaactcgccctacctaaccaaatacgccccgccccctacctacccgaccaccttcgaaaaccgcttccaataaacgttcgccattaactctaacgacctccgcgcgttaaaaaatataacgcgactctaaacgcgctaaaaaccgttaaatatcgcaaacgacgaaaacgcgaataaaaaacaaacccaaacatcgcgcgccgaaaaaaccgaacgtccccacactaaaaatccgaaaaaacgacttccgaaaactttaacacctaacgaaccctcccgaaacgtcgacacctaaacgcgaaacgctccattacgcgtacgcgttaaaaaacttcccgcacctaatcgcgaaaccccaacgactaataacgtcgcctacgcgtctcgactaaactaaccataacgcaactatacgaactaaaacgaaaccgaacgtttctcgccctactaaaatcgctactcctctctaaaatcctaacgaccgaccgaaaacgcaacatccacgataaaaaccgaacgaataaactaaaaacgaaacgcaaaaaac

SEQ ID NO: 22399 - DNA, 771 bp, Artificial Sequence
  chemically treated genomic DNA (Homo sapiens) CpG-island No: 22399
ttttgaggttagttttagagcgaaggttttttttcgacgtcgttattaagtttaagggaagggtggtaggtgtttagcgggtagacgtttcgtttcgtttcgttaggttttgttgggggcgaggttcgcgtaagtttcgtttttttttcggtattaggggcgggtttaggtgcgtttagggtcggggagcggtcgcgtaggtgtttgttttttgcgtttgcgtttagttcgttttgtttagttaggtgcgtttcgttttttgtttgttcggttattttcgggagtcgtttttaataggcgttcgttattggttttggcgattttcgcgcgttgggaggtgtagcgcggttttgaacgcgttgagggtcgttgagtgtcgtaggcggcgagggcgcgagtgaggagtagatttaggtatcgcgcgtcgagaaggtcgggcgtttttatattgaaggttcggaaaggcgattttcgggggttttggtatttggcggattttttcggagcgtcggtatttgaacgcgaggcgttttattgcgcgtgcgcgttgaggggtttttcgtatttgatcgcgagattttaacggttggtggcgtcgtttgcgcgtttcggttgagttggttatggcgtagttgtgcgggttgaggcggagtcgggcgtttttcgttttgttgggatcgttgtttttttttggggttttggcggtcgatcgagaacgtagtatttacggtgagggtcgggcgggtaggttggaggcggggcgtagggggt

SEQ ID NO: 22400 - DNA, 771 bp, Artificial Sequence
  chemically treated genomic DNA (Homo sapiens) CpG-island No: 22400
accccctacgccccgcctccaacctacccgcccgaccctcaccgtaaatactacgttctcgatcgaccgccaaaaccccaaaaaaaaacaacgatcccaacaaaacgaaaaacgcccgactccgcctcaacccgcacaactacgccataaccaactcaaccgaaacgcgcaaacgacgccaccaaccgttaaaatctcgcgatcaaatacgaaaaacccctcaacgcgcacgcgcaataaaacgcctcgcgttcaaataccgacgctccgaaaaaatccgccaaataccaaaacccccgaaaatcgcctttccgaaccttcaatataaaaacgcccgaccttctcgacgcgcgatacctaaatctactcctcactcgcgccctcgccgcctacgacactcaacgaccctcaacgcgttcaaaaccgcgctacacctcccaacgcgcgaaaatcgccaaaaccaataacgaacgcctattaaaaacgactcccgaaaataaccgaacaaacaaaaaacgaaacgcacctaactaaacaaaacgaactaaacgcaaacgcaaaaaacaaacacctacgcgaccgctccccgaccctaaacgcacctaaacccgcccctaataccgaaaaaaaaacgaaacttacgcgaacctcgcccccaacaaaacctaacgaaacgaaacgaaacgtctacccgctaaacacctaccacccttcccttaaacttaataacgacgtcgaaaaaaaaccttcgctctaaaactaacctcaaaa

SEQ ID NO: 22401 - DNA, 712 bp, Artificial Sequence
  chemically treated genomic DNA (Homo sapiens) CpG-island No: 22401
cgttcgtaagcgattgtggtggtttcggtttattggtttattcgtggaataggagtgatcgcgatggagacgtcgtttacgatttatgattttggtggtttttcgtaggcgttgtacgatacgtattattttgtttcgggttcgtttgcgttggtatagcgtttggttgagttgttagcgtcgatttcggggacgttggataaagaagtttggggtttttgatacggtttgggggggcgggttattaaaaaggattttgattttttgattcggtcggttcgacgttttttagattcggttttttatattaaaacgtaattttagttgcggatatcgtttcgttagcgttaataacgtcggagttattatttgtcgtttaaaattaaagttgttgataatacgtagtattttttgcggtatttgacgacgttagaaagttcgtttattatttgatcgatattttgtaaaattcgttgcgtttatttataaattcgtttttttttttcggtaatggtgacgcggcgggtggtgcggtgtaataatattacgtttagcgtttgttttagtaaggcgatgcgtttgttgacgaacgtcggtgaaacgtttagttttttcgttacggcggtaaaattagttcggcgagttattagtataaagacgcgtaaattatttagtagcggtaaattatttatgattcgtgttttatgtttta

SEQ ID NO: 22402 - DNA, 712 bp, Artificial Sequence
  chemically treated genomic DNA (Homo sapiens) CpG-island No: 22402
taaaacataaaacacgaatcataaataatttaccgctactaaataatttacgcgtctttatactaataactcgccgaactaattttaccgccgtaacgaaaaaactaaacgtttcaccgacgttcgtcaacaaacgcatcgccttactaaaacaaacgctaaacgtaatattattacaccgcaccacccgccgcgtcaccattaccgaaaaaaaaaaacgaatttataaataaacgcaacgaattttacaaaatatcgatcaaataataaacgaactttctaacgtcgtcaaataccgcaaaaaatactacgtattatcaacaactttaattttaaacgacaaataataactccgacgttattaacgctaacgaaacgatatccgcaactaaaattacgttttaatataaaaaaccgaatctaaaaaacgtcgaaccgaccgaatcaaaaaatcaaaatcctttttaataacccgcccccccaaaccgtatcaaaaaccccaaacttctttatccaacgtccccgaaatcgacgctaacaactcaaccaaacgctataccaacgcaaacgaacccgaaacaaaataatacgtatcgtacaacgcctacgaaaaaccaccaaaatcataaatcgtaaacgacgtctccatcgcgatcactcctattccacgaataaaccaataaaccgaaaccaccacaatcgcttacgaacg

SEQ ID NO: 22403 - DNA, 712 bp, Artificial Sequence
  chemically treated genomic DNA (Homo sapiens) CpG-island No: 22403
tgaaatataaaatacgaattatgaataatttatcgttgttgaatgatttgcgcgtttttatgttggtggttcgtcgggttggttttgtcgtcgtggcggaagaattgggcgttttatcggcgttcgttagtaagcgtatcgttttgttggagtaaacgttaaacgtggtgttgttatatcgtattattcgtcgcgttattattatcgaagaaggagagcggatttatgaatgggcgtagcggattttgtaggatgtcggttagatgatggacgaattttttgacgtcgttaggtgtcgtaggggatgttgcgtattattagtagttttggttttggacgataggtggtggtttcggcgttattagcgttggcgaagcggtattcgtaattggaattacgttttgatgtggaagatcgagtttagagaacgtcggatcggtcggattagagggttaagattttttttaataattcgtttttttaagtcgtgttaaaagttttaggtttttttatttagcgttttcgggatcggcgttaatagtttaattagacgttgtgttagcgtaggcgaattcggagtaggataatgcgtatcgtatagcgtttgcgggaagttattaaagttatgaatcgtgggcggcgtttttatcgcggttatttttgttttacgggtaaattagtgagtcgaaattattataatcgtttgcgggcg

SEQ ID NO: 22404 - DNA, 712 bp, Artificial Sequence
  chemically treated genomic DNA (Homo sapiens) CpG-island No: 22404
cgcccgcaaacgattataataatttcgactcactaatttacccgtaaaacaaaaataaccgcgataaaaacgccgcccacgattcataactttaataacttcccgcaaacgctatacgatacgcattatcctactccgaattcgcctacgctaacacaacgtctaattaaactattaacgccgatcccgaaaacgctaaataaaaaaacctaaaacttttaacacgacttaaaaaaacgaattattaaaaaaaatcttaaccctctaatccgaccgatccgacgttctctaaactcgatcttccacatcaaaacgtaattccaattacgaataccgcttcgccaacgctaataacgccgaaaccaccacctatcgtccaaaaccaaaactactaataatacgcaacatcccctacgacacctaacgacgtcaaaaaattcgtccatcatctaaccgacatcctacaaaatccgctacgcccattcataaatccgctctccttcttcgataataataacgcgacgaataatacgatataacaacaccacgtttaacgtttactccaacaaaacgatacgcttactaacgaacgccgataaaacgcccaattcttccgccacgacgacaaaaccaacccgacgaaccaccaacataaaaacgcgcaaatcattcaacaacgataaattattcataattcgtattttatatttca

SEQ ID NO: 22405 - DNA, 619 bp, Artificial Sequence
  chemically treated genomic DNA (Homo sapiens) CpG-island No: 22405
gacgaataggaataggatgttgagggtaaaaatgagcgcgatgtgtttcgtcggggtgacgaaaattagtaggttgattagcgagtaggcgacgatgatttatttgaaggcggtgacgcggttcgaagcggtttagtaggcgtgaggagtaaagcgggtcgaatatggtggcgaggttgtcgtaaagtaaaaattgggtcgttaatttcgggtgatttattacgtattttacgaagtagagcgtcgtttcgtcgcgtattacgttggagtaggtcgttattattttgaacgcgtatatgatgcgttattggttgttgtttagtagtagtttaaggtttttcgttatcgacgagttcggttgtattttaaaggtgtagcgttttttggtcgtgaagaagtagacgtagagtagtattacgtcgtttagttttagtacgtatatggcgtcgaagtagtttatttgttcgttttttttgtcgatgatgtttattagcggtagcgaatgttttgaatagcgagcgaagtcgtcggcggtaggaagaacggtaagattgaagggatggcgttatattagttgtatgtagtcgatttaaaaaatgagtttttgggcgtgtaaata

SEQ ID NO: 22406 - DNA, 619 bp, Artificial Sequence
  chemically treated genomic DNA (Homo sapiens) CpG-island No: 22406
tatttacacgcccaaaaactcattttttaaatcgactacatacaactaatataacgccatcccttcaatcttaccgttcttcctaccgccgacgacttcgctcgctattcaaaacattcgctaccgctaataaacatcatcgacaaaaaaaacgaacaaataaactacttcgacgccatatacgtactaaaactaaacgacgtaatactactctacgtctacttcttcacgaccaaaaaacgctacacctttaaaatacaaccgaactcgtcgataacgaaaaaccttaaactactactaaacaacaaccaataacgcatcatatacgcgttcaaaataataacgacctactccaacgtaatacgcgacgaaacgacgctctacttcgtaaaatacgtaataaatcacccgaaattaacgacccaatttttactttacgacaacctcgccaccatattcgacccgctttactcctcacgcctactaaaccgcttcgaaccgcgtcaccgccttcaaataaatcatcgtcgcctactcgctaatcaacctactaattttcgtcaccccgacgaaacacatcgcgctcatttttaccctcaacatcctattcctattcgtc

SEQ ID NO: 22407 - DNA, 619 bp, Artificial Sequence
  chemically treated genomic DNA (Homo sapiens) CpG-island No: 22407
tatttgtacgtttaaaaatttattttttagatcggttgtatgtagttaatatagcgttatttttttagttttgtcgttttttttgtcgtcggcggtttcgttcgttatttagggtattcgttgtcgttggtgagtattatcggtaaaggggacgagtaggtgggttatttcggcgttatgtgcgtgttggggttgagcggcgtggtgttgttttacgtttgtttttttacgattaaagagcgttatatttttgaggtgtagtcgggttcgtcggtggcgaaagattttaagttgttgttgggtaatagttagtggcgtattatgtgcgcgtttaagatgatggcgatttgttttaacgtggtgcgcggcggggcgacgttttatttcgtgaaatacgtgatggattattcggagttggcgatttagtttttattttacggtagtttcgttattatgttcggttcgttttgttttttacgtttgttgggtcgtttcgagtcgcgttatcgtttttaagtggattatcgtcgtttattcgttgattagtttgttgattttcgttatttcggcggagtatatcgcgtttatttttgtttttaatattttgtttttgttcgtt

SEQ ID NO: 22408 - DNA, 619 bp, Artificial Sequence
  chemically treated genomic DNA (Homo sapiens) CpG-island No: 22408
aacgaacaaaaacaaaatattaaaaacaaaaataaacgcgatatactccgccgaaataacgaaaatcaacaaactaatcaacgaataaacgacgataatccacttaaaaacgataacgcgactcgaaacgacccaacaaacgtaaaaaacaaaacgaaccgaacataataacgaaactaccgtaaaataaaaactaaatcgccaactccgaataatccatcacgtatttcacgaaataaaacgtcgccccgccgcgcaccacgttaaaacaaatcgccatcatcttaaacgcgcacataatacgccactaactattacccaacaacaacttaaaatctttcgccaccgacgaacccgactacacctcaaaaatataacgctctttaatcgtaaaaaaacaaacgtaaaacaacaccacgccgctcaaccccaacacgcacataacgccgaaataacccacctactcgtcccctttaccgataatactcaccaacgacaacgaataccctaaataacgaacgaaaccgccgacgacaaaaaaaacgacaaaactaaaaaaataacgctatattaactacatacaaccgatctaaaaaataaatttttaaacgtacaaata

SEQ ID NO: 22409 - DNA, 544 bp, Artificial Sequence
  chemically treated genomic DNA (Homo sapiens) CpG-island No: 22409
  unsure (148)
attgtttagcgtaagtacgtagttatcgttatgtttagcgttagttagataattaatagcgatcgcgaacgttattcgcgttagaattaacgtgtaattatgtttttttttgtaattgttcgtttattagtcgtaagtagcggtcgtnagtgtcgttagttgtaggtcgtgggttattataattaacgtggtgttatgtttacggttgagggaaaatagtaggtcggtaattttatcgttcgtttggcggttaaggttgtcggtgggttcgtcggtaaatagtatattaggtcgattattaaaggttcgtgttagcgttattcgttgttgtttatcgtcggaaagttgtgtcggaagatgatttagacgtttatttagttttaattgttcgagtaacgttttcgtttcgttacgatttttcgcgttatttttatcgcgtagtagagtcggaagttcgacgttttttagcgcgttaagggtaggaattaatataaatgattgaaaaataaagtcgacgtgttgcgcgtaattttgttcgcgtttt

SEQ ID NO: 22410 - DNA, 544 bp, Artificial Sequence
  chemically treated genomic DNA (Homo sapiens) CpG-island No: 22410
  unsure (397)
aaaacgcgaacaaaattacgcgcaacacgtcgactttatttttcaatcatttatattaattcctacccttaacgcgctaaaaaacgtcgaacttccgactctactacgcgataaaaataacgcgaaaaatcgtaacgaaacgaaaacgttactcgaacaattaaaactaaataaacgtctaaatcatcttccgacacaactttccgacgataaacaacaacgaataacgctaacacgaacctttaataatcgacctaatatactatttaccgacgaacccaccgacaaccttaaccgccaaacgaacgataaaattaccgacctactattttccctcaaccgtaaacataacaccacgttaattataataacccacgacctacaactaacgacactnacgaccgctacttacgactaataaacgaacaattacaaaaaaaaacataattacacgttaattctaacgcgaataacgttcgcgatcgctattaattatctaactaacgctaaacataacgataactacgtacttacgctaaacaat

SEQ ID NO: 22411 - DNA, 544 bp, Artificial Sequence
  chemically treated genomic DNA (Homo sapiens) CpG-island No: 22411
  unsure (397)
gaagcgcgggtaaagttgcgcgtaatacgtcggttttgttttttagttatttatgttaatttttatttttaacgcgttggaaaacgtcgagttttcggttttgttgcgcggtgagagtagcgcggaaagtcgtaacggggcgaaagcgttgttcgaatagttagggttgggtaaacgtttggattatttttcggtatagtttttcggcggtgaatagtaacgagtggcgttggtacgagtttttaatggtcgatttgatgtgttgtttgtcgacgaatttatcggtaattttgatcgttagacgggcgataaaattgtcgatttgttgtttttttttaatcgtgaatatggtattacgttgattatggtgatttacgatttgtaattggcggtattngcgatcgttgtttacggttggtgaacgggtagttgtaggaggaagtatgattgtacgttggttttggcgcgaatggcgttcgcgatcgttattaattgtttggttggcgttaagtatggcgatggttgcgtgtttgcgttgggtaat

SEQ ID NO: 22412 - DNA, 544 bp, Artificial Sequence
  chemically treated genomic DNA (Homo sapiens) CpG-island No: 22412
  unsure (148)
attacccaacgcaaacacgcaaccatcgccatacttaacgccaaccaaacaattaataacgatcgcgaacgccattcgcgccaaaaccaacgtacaatcatacttcctcctacaactacccgttcaccaaccgtaaacaacgatcgcnaataccgccaattacaaatcgtaaatcaccataatcaacgtaataccatattcacgattaaaaaaaaacaacaaatcgacaattttatcgcccgtctaacgatcaaaattaccgataaattcgtcgacaaacaacacatcaaatcgaccattaaaaactcgtaccaacgccactcgttactattcaccgccgaaaaactataccgaaaaataatccaaacgtttacccaaccctaactattcgaacaacgctttcgccccgttacgactttccgcgctactctcaccgcgcaacaaaaccgaaaactcgacgttttccaacgcgttaaaaataaaaattaacataaataactaaaaaacaaaaccgacgtattacgcgcaactttacccgcgcttc

SEQ ID NO: 22413 - DNA, 699 bp, Artificial Sequence
  chemically treated genomic DNA (Homo sapiens) CpG-island No: 22413
gttattacggttttgttttattggcgattattataatggttttattcgtattggcgtgggtttgtaacggtatagtgcgtaaagtatcggttttggcgggagaacgtttatcgttgtggagcgttgtcgggtttatttggaaattagggttaggtttggtattataaggcgttggttttgttgttatcgggattttcgtttcgttttattttgttagtaaaggatgggcgatggcgggttttatttttatcgcgtttggcggcgtatttgtcgtgatgcgcgttatgtttggttggatgtcggatcgttttggcggcgtgaaagtggcgattgtttttttgtttgtagaaacggtgggtttgttgttgttttggtaagttttaggtgtatgggtcgtattagcgggcgcggcgttaatcggagtcggatgttcgtttattttttttgcgttgggcgtggaggtggttaaacgcgtttttttataagttcgcggtatcgtattgggcggttacgtcgcgttttaggatatcgttttcggcgttttcgggtcgtttcgggaatggtggcgattacgtttggttatttttcggtattttttgtcggggcgatttttgcggtgttgggtattattgttacgatattgttatttcgtcggggttaggaaataggtatgattagtattaggataatcgcgtttaa

SEQ ID NO: 22414 - DNA, 699 bp, Artificial Sequence
  chemically treated genomic DNA (Homo sapiens) CpG-island No: 22414
ttaaacgcgattatcctaatactaatcatacctatttcctaaccccgacgaaataacaatatcgtaacaataatacccaacaccgcaaaaatcgccccgacaaaaaataccgaaaaataaccaaacgtaatcgccaccattcccgaaacgacccgaaaacgccgaaaacgatatcctaaaacgcgacgtaaccgcccaatacgataccgcgaacttataaaaaaacgcgtttaaccacctccacgcccaacgcaaaaaaaataaacgaacatccgactccgattaacgccgcgcccgctaatacgacccatacacctaaaacttaccaaaacaacaacaaacccaccgtttctacaaacaaaaaaacaatcgccactttcacgccgccaaaacgatccgacatccaaccaaacataacgcgcatcacgacaaatacgccgccaaacgcgataaaaataaaacccgccatcgcccatcctttactaacaaaataaaacgaaacgaaaatcccgataacaacaaaaccaacgccttataataccaaacctaaccctaatttccaaataaacccgacaacgctccacaacgataaacgttctcccgccaaaaccgatactttacgcactataccgttacaaacccacgccaatacgaataaaaccattataataatcgccaataaaacaaaaccgtaataac

SEQ ID NO: 22415 - DNA, 699 bp, Artificial Sequence
  chemically treated genomic DNA (Homo sapiens) CpG-island No: 22415
ttagacgcgattattttgatgttggttatatttgttttttgatttcgacgaaatgatagtatcgtgataataatatttagtatcgtagagatcgtttcggtaagaaatatcgaagagtaattaaacgtggtcgttattattttcggagcggttcggagacgtcgagggcgatattttgaaacgcggcgtaatcgtttagtgcggtgtcgcgaatttgtgaggggacgcgtttaattatttttacgtttagcgtaggaaagataagcgaatattcggtttcggttaacgtcgcgttcgttaatgcgatttatgtatttggggtttgttagagtagtaataagtttatcgtttttataagtagagagataatcgttatttttacgtcgttaaaacggttcggtatttagttaaatatgacgcgtattacgataaatgcgtcgttaaacgcggtaagagtaaagttcgttatcgtttattttttgttggtaaagtagagcgaaacgaaagtttcgataatagtaaaattaacgttttgtagtgttagatttaattttggtttttagataagttcgataacgttttatagcgatggacgttttttcgttagggtcggtattttgcgtattgtgtcgttataggtttacgttagtacgggtaagattattgtggtgatcgttagtggggtaaaatcgtaatggt

SEQ ID NO: 22416 - DNA, 699 bp, Artificial Sequence
  chemically treated genomic DNA (Homo sapiens) CpG-island No: 22416
accattacgattttaccccactaacgatcaccacaataatcttacccgtactaacgtaaacctataacgacacaatacgcaaaataccgaccctaacgaaaaaacgtccatcgctataaaacgttatcgaacttatctaaaaaccaaaattaaatctaacactacaaaacgttaattttactattatcgaaactttcgtttcgctctactttaccaacaaaaaataaacgataacgaactttactcttaccgcgtttaacgacgcatttatcgtaatacgcgtcatatttaactaaataccgaaccgttttaacgacgtaaaaataacgattatctctctacttataaaaacgataaacttattactactctaacaaaccccaaatacataaatcgcattaacgaacgcgacgttaaccgaaaccgaatattcgcttatctttcctacgctaaacgtaaaaataattaaacgcgtcccctcacaaattcgcgacaccgcactaaacgattacgccgcgtttcaaaatatcgccctcgacgtctccgaaccgctccgaaaataataacgaccacgtttaattactcttcgatatttcttaccgaaacgatctctacgatactaaatattattatcacgatactatcatttcgtcgaaatcaaaaaacaaatataaccaacatcaaaataatcgcgtctaa

SEQ ID NO: 22417 - DNA, 867 bp, Artificial Sequence
  chemically treated genomic DNA (Homo sapiens) CpG-island No: 22417
  unsure (793..)
cgtattaattagattagtagcgcgtagtatacgatttgtagcgtagtaatcgtcgcgtttttttagtattattagtatcggtatgtcggtgtagcgacgtatatagtcggtgaaatattggtttgggttgtcgaggtggaatttacgtagtattacgtggtttatcgttagcgttattgtcgtatcggtgttttgtttcggtgttagttatagatcgtatagtttggcgattttagcgtagtttggtgtgacggtaatagttttggtttttttgtaacgtattttagtaaagaagtgagtattcggggtacgcgtttgcggtacgtttgatttttaggcgatgatgtagttggagttgtattagttagtagatttcggtacgttagtttgttcgttttaggtttgcggagacgtaggaggtaagtcgtagtattagtcgtagaagtttaagtaagtatcgttaattagcgagagatagcgtggtattcgatgcgtaagaaattatcgatattgtcggaattggcgagaaattagtaatacggttcgggtcgtagtttttgatggtgtaaacgttagatgcggcgattagttcgtttattttttgttaggaagaacgaataaatttatcgcgtttacgcgtttgtttaaagtttttcgttttatcggcgtttttaatgatagaagtttatgttttaatcggatcgttatgtagcgttttcgttttacgttatattcgtattaggcgttttatattaatcggtttgtaggtatgtaatatttgggtcgtttattnngttattttttttggttgtagttgaagtcgtatttaatgaaaaggcgttatttcgcgagaagattttcgaagta

SEQ ID NO: 22418 - DNA, 867 bp, Artificial Sequence
  chemically treated genomic DNA (Homo sapiens) CpG-island No: 22418
  unsure (74..)
tacttcgaaaatcttctcgcgaaataacgccttttcattaaatacgacttcaactacaaccaaaaaaaataacnnaataaacgacccaaatattacatacctacaaaccgattaatataaaacgcctaatacgaatataacgtaaaacgaaaacgctacataacgatccgattaaaacataaacttctatcattaaaaacgccgataaaacgaaaaactttaaacaaacgcgtaaacgcgataaatttattcgttcttcctaacaaaaaataaacgaactaatcgccgcatctaacgtttacaccatcaaaaactacgacccgaaccgtattactaatttctcgccaattccgacaatatcgataatttcttacgcatcgaataccacgctatctctcgctaattaacgatacttacttaaacttctacgactaatactacgacttacctcctacgtctccgcaaacctaaaacgaacaaactaacgtaccgaaatctactaactaatacaactccaactacatcatcgcctaaaaatcaaacgtaccgcaaacgcgtaccccgaatactcacttctttactaaaatacgttacaaaaaaaccaaaactattaccgtcacaccaaactacgctaaaatcgccaaactatacgatctataactaacaccgaaacaaaacaccgatacgacaataacgctaacgataaaccacgtaatactacgtaaattccacctcgacaacccaaaccaatatttcaccgactatatacgtcgctacaccgacataccgatactaataatactaaaaaaacgcgacgattactacgctacaaatcgtatactacgcgctactaatctaattaatacg

SEQ ID NO: 22419 - DNA, 867 bp, Artificial Sequence
  chemically treated genomic DNA (Homo sapiens) CpG-island No: 22419
  unsure (74..)
tgtttcgaaaattttttcgcgaggtagcgtttttttattggatacggttttaattatagttaaaaggagtggtnnggtgggcggtttaaatattgtatgtttgtaggtcgattgatataaaacgtttgatgcgaatgtggcgtgaagcgaaggcgttgtatagcgattcggttgaggtatgggtttttattattgaagacgtcgataaagcgaaaagttttaagtaggcgcgtggacgcggtggatttgttcgttttttttggtaggaggtgaacgaattgatcgtcgtatttaacgtttatattattaaaaattacggttcggatcgtgttgttggtttttcgttaatttcggtaatgtcgatggttttttacgtatcgggtgttacgttatttttcgttgattggcggtatttgtttaagtttttacgattggtattgcgatttgttttttgcgttttcgtaaatttggggcgagtaaattgacgtatcggaatttgttgattggtataattttagttatattatcgtttgggggttaaacgtgtcgtagacgcgtatttcggatgtttatttttttattgaagtgcgttataaagggattaaaattgttgtcgttatattagattacgttgaaatcgttaaattgtgcgatttgtggttggtatcgaaatagggtatcgatgcggtaatggcgttggcgatgggttacgtaatgttgcgtgaattttatttcgataatttaagttagtattttatcgattatgtgcgtcgttatatcgatatgtcgatgttggtgatgttggaagaacgcgacggttattacgttgtaggtcgtatgttgcgcgttgttgatttggttgatgcg

SEQ ID NO: 22420 - DNA, 867 bp, Artificial Sequence
  chemically treated genomic DNA (Homo sapiens) CpG-island No: 22420
  unsure (793..)
cgcatcaaccaaatcaacaacgcgcaacatacgacctacaacgtaataaccgtcgcgttcttccaacatcaccaacatcgacatatcgatataacgacgcacataatcgataaaatactaacttaaattatcgaaataaaattcacgcaacattacgtaacccatcgccaacgccattaccgcatcgataccctatttcgataccaaccacaaatcgcacaatttaacgatttcaacgtaatctaatataacgacaacaattttaatccctttataacgcacttcaataaaaaaataaacatccgaaatacgcgtctacgacacgtttaacccccaaacgataatataactaaaattataccaatcaacaaattccgatacgtcaatttactcgccccaaatttacgaaaacgcaaaaaacaaatcgcaataccaatcgtaaaaacttaaacaaataccgccaatcaacgaaaaataacgtaacacccgatacgtaaaaaaccatcgacattaccgaaattaacgaaaaaccaacaacacgatccgaaccgtaatttttaataatataaacgttaaatacgacgatcaattcgttcacctcctaccaaaaaaaacgaacaaatccaccgcgtccacgcgcctacttaaaacttttcgctttatcgacgtcttcaataataaaaacccatacctcaaccgaatcgctatacaacgccttcgcttcacgccacattcgcatcaaacgttttatatcaatcgacctacaaacatacaatatttaaaccgcccaccnnaccactccttttaactataattaaaaccgtatccaataaaaaaacgctacctcgcgaaaaaattttcgaaaca

SEQ ID NO: 22421 - DNA, 506 bp, Artificial Sequence
  chemically treated genomic DNA (Homo sapiens) CpG-island No: 22421
tcgttagtatttcgttatcggtttgttgtagtatttgtttcggaacgttttggttgatgtgtaattttagtcggatgcgatttttttgtaatatcgtgggcgtgatttttatttttaggacggtttttttaaattttatcgacgtcgcgttatttttttcgttggaaatttgatatggaatttcgtttttttgtttaatgttggtaggttgaagatgtgaggttagtagacgcggattggcgataatatttagttgttgtttttgttcgagcgcggaaagtttaagatttagtaagcgttcgttgatgcgtttaatgttaaaatcgatatgcgttgtcgtcgtcgttacggagaggtcgttattaagcgtggtgatttgtttaacggtattagcgtgttgcgtatcggttagcgtttattttaacgttaatttacgtaaattttttttattaatggtgataatatgcgtcgatagtttaatttgttcgatcggtagatttatttgg

SEQ ID NO: 22422 - DNA, 506 bp, Artificial Sequence
  chemically treated genomic DNA (Homo sapiens) CpG-island No: 22422
ccaaataaatctaccgatcgaacaaattaaactatcgacgcatattatcaccattaataaaaaaaatttacgtaaattaacgttaaaataaacgctaaccgatacgcaacacgctaataccgttaaacaaatcaccacgcttaataacgacctctccgtaacgacgacgacaacgcatatcgattttaacattaaacgcatcaacgaacgcttactaaatcttaaactttccgcgctcgaacaaaaacaacaactaaatattatcgccaatccgcgtctactaacctcacatcttcaacctaccaacattaaacaaaaaaacgaaattccatatcaaatttccaacgaaaaaaataacgcgacgtcgataaaatttaaaaaaaccgtcctaaaaataaaaatcacgcccacgatattacaaaaaaatcgcatccgactaaaattacacatcaaccaaaacgttccgaaacaaatactacaacaaaccgataacgaaatactaacga

SEQ ID NO: 22423 - DNA, 506 bp, Artificial Sequence
  chemically treated genomic DNA (Homo sapiens) CpG-island No: 22423
ttaaatggatttgtcggtcgggtaggttgagttgtcggcgtatattgttattattaatgaaaaaagtttgcgtgagttagcgttgaaatggacgttggtcgatgcgtaatacgttggtgtcgttgggtaagttattacgtttggtagcgattttttcgtagcgacggcgataacgtatgtcggttttaatattgggcgtattaacggacgtttgttggattttgagtttttcgcgttcgaataaaaatagtagttggatattatcgttagttcgcgtttgttggttttatatttttagtttgttagtattaaataggggagcgaaattttatattaggtttttagcggggaaagtggcgcgacgtcggtggaatttaaagaggtcgttttggggatggaggttacgtttacggtgttataaaaaggtcgtattcggttgaaattatatattagttagaacgtttcggggtaggtgttatagtaggtcgatggcgaagtgttggcga

SEQ ID NO: 22424 - DNA, 506 bp, Artificial Sequence
  chemically treated genomic DNA (Homo sapiens) CpG-island No: 22424
tcgccaacacttcgccatcgacctactataacacctaccccgaaacgttctaactaatatataatttcaaccgaatacgacctttttataacaccgtaaacgtaacctccatccccaaaacgacctctttaaattccaccgacgtcgcgccactttccccgctaaaaacctaatataaaatttcgctcccctatttaatactaacaaactaaaaatataaaaccaacaaacgcgaactaacgataatatccaactactatttttattcgaacgcgaaaaactcaaaatccaacaaacgtccgttaatacgcccaatattaaaaccgacatacgttatcgccgtcgctacgaaaaaatcgctaccaaacgtaataacttacccaacgacaccaacgtattacgcatcgaccaacgtccatttcaacgctaactcacgcaaacttttttcattaataataacaatatacgccgacaactcaacctacccgaccgacaaatccatttaa

SEQ ID NO: 22425 - DNA, 567 bp, Artificial Sequence
  chemically treated genomic DNA (Homo sapiens) CpG-island No: 22425
tttttgttcgagaatttggtggatgtcgacgatcgtagtatttagcgtttgttgtaggaagtggatttcgaatcgttgttgatcgcgttgaaaggagtcgagtagttattgcgcgagaaatttttgcgtaatatgtcgtagcgtgtcgtcgatattttgcgcgacgatttcgttaatcgtggttcggtgcgtttgtcgtaggtggaaaacgaatagaaagcgattttgttgattgtgcgtcgttttgtcgaaattggcgagatggtaattggtagcggcgaagatatttattcgttaattatgtatgtatgcgcgttttgcgatgtaataatttatcggtatatcggtcgattaatttaaaatttagattatttaattggcgatcggcggttaataattgaacgttttcggtattagtggttcggttgttgcgtatagcgtttcggtaaatattggcgaattgattttgacgttgattagcgaagtgaataaataaattagcgtttttgcgtcgaacgtgttgatttttgattagaatatgattttattagtttttttttttagtag

SEQ ID NO: 22426 - DNA, 567 bp, Artificial Sequence
  chemically treated genomic DNA (Homo sapiens) CpG-island No: 22426
ctactaaaaaaaaaaactaataaaatcatattctaatcaaaaatcaacacgttcgacgcaaaaacgctaatttatttattcacttcgctaatcaacgtcaaaatcaattcgccaatatttaccgaaacgctatacgcaacaaccgaaccactaataccgaaaacgttcaattattaaccgccgatcgccaattaaataatctaaattttaaattaatcgaccgatataccgataaattattacatcgcaaaacgcgcatacatacataattaacgaataaatatcttcgccgctaccaattaccatctcgccaatttcgacaaaacgacgcacaatcaacaaaatcgctttctattcgttttccacctacgacaaacgcaccgaaccacgattaacgaaatcgtcgcgcaaaatatcgacgacacgctacgacatattacgcaaaaatttctcgcgcaataactactcgactcctttcaacgcgatcaacaacgattcgaaatccacttcctacaacaaacgctaaatactacgatcgtcgacatccaccaaattctcgaacaaaaa

SEQ ID NO: 22427 - DNA, 567 bp, Artificial Sequence
  chemically treated genomic DNA (Homo sapiens) CpG-island No: 22427
ttgttggggaagaaggttgatggggttatgttttgattaagaattagtacgttcggcgtaaaaacgttggtttgtttgtttatttcgttggttagcgttagggttagttcgttaatgtttgtcgggacgttgtacgtagtaatcggattattgatgtcgggaacgtttagttgttggtcgtcggtcgttagttgggtggtttgggttttagattgatcgatcggtgtgtcggtgagttgttgtatcgtaaaacgcgtatgtatgtataattagcgggtaggtattttcgtcgttgttaattattatttcgttagtttcggtaaggcggcgtataattagtagaatcgttttttgttcgttttttatttgcgatagacgtatcggattacggttggcgagatcgtcgcgtagaatatcggcggtacgttgcgatatattgcgtaagaatttttcgcgtagtggttgttcggttttttttagcgcgattaatagcgattcggaatttattttttgtaatagacgttgaatgttgcgatcgtcgatatttattagattttcgaataggaa

SEQ ID NO: 22428 - DNA, 567 bp, Artificial Sequence
  chemically treated genomic DNA (Homo sapiens) CpG-island No: 22428
ttcctattcgaaaatctaataaatatcgacgatcgcaacattcaacgtctattacaaaaaataaattccgaatcgctattaatcgcgctaaaaaaaaccgaacaaccactacgcgaaaaattcttacgcaatatatcgcaacgtaccgccgatattctacgcgacgatctcgccaaccgtaatccgatacgtctatcgcaaataaaaaacgaacaaaaaacgattctactaattatacgccgccttaccgaaactaacgaaataataattaacaacgacgaaaatacctacccgctaattatacatacatacgcgttttacgatacaacaactcaccgacacaccgatcgatcaatctaaaacccaaaccacccaactaacgaccgacgaccaacaactaaacgttcccgacatcaataatccgattactacgtacaacgtcccgacaaacattaacgaactaaccctaacgctaaccaacgaaataaacaaacaaaccaacgtttttacgccgaacgtactaattcttaatcaaaacataaccccatcaaccttcttccccaacaa

SEQ ID NO: 22429 - DNA, 716 bp, Artificial Sequence
  chemically treated genomic DNA (Homo sapiens) CpG-island No: 22429
  unsure (369)
tttcgaagtggtgacgtaggtttttacggttgtcggaacgatcgaagttattagtatttagtacgcggtagtcgttagtcggtacgtaagtacggatttgtttagcgaatagttttatatagtcggtagatgttattgtcggagcgtcgtttattatttgagcgatatacggaacgcgcggagtttttagcgggtgtagtatgttttagcgtttataattttgattattacgcgttagttcggtgaaggaggttacgttataaacgttagaatttacgtcgtaatttttcgttaggattttagttgttttacggatttgacgtaggatagtatcgaagggtttgtatgtatgtaagtattcgcgtttanttttaattcgcgttttatttgtatgtttgtaggtcgtaacgttttttcgcgtatcgttttttttagcggttgtttatttattatttttaggtaattttgtaatacggttaatggcgtacgtaatttatggtttacgttggtaaaaaagttacgtcgcgttttttttagttgatgtatttgcgtgatattacgcgttattattagtaattgtttgtgggtataaggtatgacgcgaatttttagatgtcgttcggtgttgagtattagattgagcgggcgagaaaaattacgcgtttttagatattgcgtaaatttcgggtaacgtagtaggttaaggatgttttgtt

SEQ ID NO: 22430 - DNA, 716 bp, Artificial Sequence
  chemically treated genomic DNA (Homo sapiens) CpG-island No: 22430
  unsure (348)
aacaaaacatccttaacctactacgttacccgaaatttacgcaatatctaaaaacgcgtaatttttctcgcccgctcaatctaatactcaacaccgaacgacatctaaaaattcgcgtcataccttatacccacaaacaattactaataataacgcgtaatatcacgcaaatacatcaactaaaaaaaacgcgacgtaacttttttaccaacgtaaaccataaattacgtacgccattaaccgtattacaaaattacctaaaaataataaataaacaaccgctaaaaaaaacgatacgcgaaaaaacgttacgacctacaaacatacaaataaaacgcgaattaaaantaaacgcgaatacttacatacatacaaacccttcgatactatcctacgtcaaatccgtaaaacaactaaaatcctaacgaaaaattacgacgtaaattctaacgtttataacgtaacctccttcaccgaactaacgcgtaataatcaaaattataaacgctaaaacatactacacccgctaaaaactccgcgcgttccgtatatcgctcaaataataaacgacgctccgacaataacatctaccgactatataaaactattcgctaaacaaatccgtacttacgtaccgactaacgactaccgcgtactaaatactaataacttcgatcgttccgacaaccgtaaaaacctacgtcaccacttcgaaa

SEQ ID NO: 22431 - DNA, 716 bp, Artificial Sequence
  chemically treated genomic DNA (Homo sapiens) CpG-island No: 22431
  unsure (348)
ggtagaatatttttaatttattgcgttattcggagtttacgtaatatttgaaaacgcgtgatttttttcgttcgtttaatttggtgtttaatatcgggcggtatttggaaattcgcgttatgttttatatttataaatagttgttgatggtggcgcgtgatgttacgtaaatgtattaattggaaggggcgcggcgtaatttttttgttaacgtgagttatgagttacgtacgttattgatcgtgttatagggttatttggagatgatgaatgagtagtcgttggaaggggcggtacgcgaaaaagcgttgcgatttgtaggtatgtaagtggggcgcggattggggntgggcgcggatatttgtatgtatgtaggtttttcggtattattttgcgttaggttcgtgaagtaattgagattttggcgaaagattacggcgtaggttttgacgtttatagcgtgattttttttatcgagttggcgcgtgatggttaggattgtgaacgttggaatatgttgtattcgttggaaatttcgcgcgtttcgtatatcgtttaggtgatgaacgacgtttcggtagtggtatttatcgattatatgaaattgttcgttgagtaggttcgtatttacgtatcggttgacgattatcgcgtattgggtattgatggtttcggtcgtttcgatagtcgtgagaatttgcgttattatttcgaag

SEQ ID NO: 22432 - DNA, 716 bp, Artificial Sequence
  chemically treated genomic DNA (Homo sapiens) CpG-island No: 22432
  unsure (369)
cttcgaaataataacgcaaattctcacgactatcgaaacgaccgaaaccatcaatacccaatacgcgataatcgtcaaccgatacgtaaatacgaacctactcaacgaacaatttcatataatcgataaataccactaccgaaacgtcgttcatcacctaaacgatatacgaaacgcgcgaaatttccaacgaatacaacatattccaacgttcacaatcctaaccatcacgcgccaactcgataaaaaaaatcacgctataaacgtcaaaacctacgccgtaatctttcgccaaaatctcaattacttcacgaacctaacgcaaaataataccgaaaaacctacatacatacaaatatccgcgcccanccccaatccgcgccccacttacatacctacaaatcgcaacgctttttcgcgtaccgccccttccaacgactactcattcatcatctccaaataaccctataacacgatcaataacgtacgtaactcataactcacgttaacaaaaaaattacgccgcgccccttccaattaatacatttacgtaacatcacgcgccaccatcaacaactatttataaatataaaacataacgcgaatttccaaataccgcccgatattaaacaccaaattaaacgaacgaaaaaaatcacgcgttttcaaatattacgtaaactccgaataacgcaataaattaaaaatattctacc

SEQ ID NO: 22433 - DNA, 703 bp, Artificial Sequence
  chemically treated genomic DNA (Homo sapiens) CpG-island No: 22433
acgttggcgggtaataatggttggttgggttatgaatagttcggtgttatggcgttttagggtcgtcggcggaggtttttgcggaggtcggagacggtggtgtcgggggaggcgatcgagacggatttcgagcgttttgcgttttcgtcggaggaggaggagttgtatttgggtttttcgggttcgacgcgcggtcgttttacggggttgcgggtggttggggaagtcgcggagatcgattcggagtcggagtcggagtcggaatcgacggtcgcgtcgagggatttgtttttattcgtggtgtagcgggaatcggcggaggaggtttggggtacggaggaggtttcggcgttcgttttcgcgcgttcgtttttgtaatttcggttggcggagagttaggcgcggttggattacgacgtggcggtcgtcgtgagcggtgtttatcgtcgtgtaggtcgcgacgtggtcgttttggttagtaggttggcggtagtttaggcggcggggttggcggcggtttatagcgtgcgtttggcgcgcggggatttttgtgcgttggtcgagcgtttggatatcgtggttggttgtcgtttgttgtcggatattcgcggcgtgttagggatcgagtttgagaaagattcggggtcgcgggtttagttatgattttattttttaatttgattgtaatttgggggtaggtttt

SEQ ID NO: 22434 - DNA, 703 bp, Artificial Sequence
  chemically treated genomic DNA (Homo sapiens) CpG-island No: 22434
aaaacctacccccaaattacaatcaaattaaaaaataaaatcataactaaacccgcgaccccgaatctttctcaaactcgatccctaacacgccgcgaatatccgacaacaaacgacaaccaaccacgatatccaaacgctcgaccaacgcacaaaaatccccgcgcgccaaacgcacgctataaaccgccgccaaccccgccgcctaaactaccgccaacctactaaccaaaacgaccacgtcgcgacctacacgacgataaacaccgctcacgacgaccgccacgtcgtaatccaaccgcgcctaactctccgccaaccgaaattacaaaaacgaacgcgcgaaaacgaacgccgaaacctcctccgtaccccaaacctcctccgccgattcccgctacaccacgaataaaaacaaatccctcgacgcgaccgtcgattccgactccgactccgactccgaatcgatctccgcgacttccccaaccacccgcaaccccgtaaaacgaccgcgcgtcgaacccgaaaaacccaaatacaactcctcctcctccgacgaaaacgcaaaacgctcgaaatccgtctcgatcgcctcccccgacaccaccgtctccgacctccgcaaaaacctccgccgacgaccctaaaacgccataacaccgaactattcataacccaaccaaccattattacccgccaacgt

SEQ ID NO: 22435 - DNA, 703 bp, Artificial Sequence
  chemically treated genomic DNA (Homo sapiens) CpG-island No: 22435
aaggtttatttttaaattgtagttaggttgggaagtagaattatggttaggttcgcggtttcgggttttttttaggttcggtttttggtacgtcgcggatgttcggtagtaggcggtagttagttacgatgtttagacgttcggttagcgtataaaggttttcgcgcgttaggcgtacgttgtgggtcgtcgttagtttcgtcgtttgggttgtcgttagtttattagttagggcggttacgtcgcggtttgtacggcggtagatatcgtttacggcggtcgttacgtcgtggtttagtcgcgtttggtttttcgttagtcgaagttgtaggagcgagcgcgcgggggcgggcgtcggggtttttttcgtgttttaggtttttttcgtcgattttcgttgtattacgagtggaggtaggtttttcggcgcggtcgtcggtttcggtttcggtttcggtttcgagtcggttttcgcggtttttttagttattcgtagtttcgtggggcggtcgcgcgtcgggttcgaaggatttaggtatagttttttttttttcgacgaggacgtagagcgttcggaattcgtttcggtcgtttttttcggtattatcgttttcggttttcgtaggggttttcgtcgacgattttgggacgttatggtatcgaattatttataatttagttagttattattgttcgttagcgt

SEQ ID NO: 22436 - DNA, 703 bp, Artificial Sequence
  chemically treated genomic DNA (Homo sapiens) CpG-island No: 22436
acgctaacgaacaataataactaactaaattataaataattcgataccataacgtcccaaaatcgtcgacgaaaacccctacgaaaaccgaaaacgataataccgaaaaaaacgaccgaaacgaattccgaacgctctacgtcctcgtcgaaaaaaaaaaaactatacctaaatccttcgaacccgacgcgcgaccgccccacgaaactacgaataactaaaaaaaccgcgaaaaccgactcgaaaccgaaaccgaaaccgaaaccgacgaccgcgccgaaaaacctacctccactcgtaatacaacgaaaatcgacgaaaaaaacctaaaacacgaaaaaaaccccgacgcccgcccccgcgcgctcgctcctacaacttcgactaacgaaaaaccaaacgcgactaaaccacgacgtaacgaccgccgtaaacgatatctaccgccgtacaaaccgcgacgtaaccgccctaactaataaactaacgacaacccaaacgacgaaactaacgacgacccacaacgtacgcctaacgcgcgaaaacctttatacgctaaccgaacgtctaaacatcgtaactaactaccgcctactaccgaacatccgcgacgtaccaaaaaccgaacctaaaaaaaacccgaaaccgcgaacctaaccataattctacttcccaacctaactacaatttaaaaataaacctt

SEQ ID NO: 22437 - DNA, 577 bp, Artificial Sequence
  chemically treated genomic DNA (Homo sapiens) CpG-island No: 22437
cgtgtcgttaaaattattatcggcggtaatttggagaatggcggtacggtttaaatgaatagcgaaggggggaaatcggggaatgtattgatcgttaacggtaattatatcggaaataatggtttgatgacgtttaacgcgacgttggggggtataattcgtttatcgataagatgaacgtgaaaggcgatatttaagggaatattcgcgttcgggttgataatattggcggcgtcggtgtataaacggttaacggtattgaatttattgaggttggcggtaattttgtaggtaatttcgcgttgattatcggaattgtcgaagttggggtttacgtttatacgttggttaaagggaaggggaatgacgagaaaaattggtatttgattagtaaatgggacggcgtaacgtagcggatatattcgattttattaataatttttttgttgtggattcggaagttttattagtttatcgttcggagtcggaagttatattagtaatattgtcgtagttaattcgttgtttagttatcgtttatacgatcggtatttatgtttgtagtttttgaaaatat

SEQ ID NO: 22438 - DNA, 577 bp, Artificial Sequence
  chemically treated genomic DNA (Homo sapiens) CpG-island No: 22438
atattttcaaaaactacaaacataaataccgatcgtataaacgataactaaacaacgaattaactacgacaatattactaatataacttccgactccgaacgataaactaataaaacttccgaatccacaacaaaaaaattattaataaaatcgaatatatccgctacgttacgccgtcccatttactaatcaaataccaatttttctcgtcattccccttccctttaaccaacgtataaacgtaaaccccaacttcgacaattccgataatcaacgcgaaattacctacaaaattaccgccaacctcaataaattcaataccgttaaccgtttatacaccgacgccgccaatattatcaacccgaacgcgaatattcccttaaatatcgcctttcacgttcatcttatcgataaacgaattataccccccaacgtcgcgttaaacgtcatcaaaccattatttccgatataattaccgttaacgatcaatacattccccgatttccccccttcgctattcatttaaaccgtaccgccattctccaaattaccgccgataataattttaacgacacg

SEQ ID NO: 22439 - DNA, 577 bp, Artificial Sequence
  chemically treated genomic DNA (Homo sapiens) CpG-island No: 22439
gtatttttaaaggttgtaggtatgaatgtcggtcgtgtaaacgatggttaaatagcgagttggttgcggtaatgttgttgatatagttttcggtttcgggcgataaattgatggggttttcggatttataatagggggattattgatgggatcgggtgtattcgttgcgttacgtcgttttatttattggttagatattagtttttttcgttattttttttttttttagttagcgtgtagacgtaagttttagtttcgatagtttcggtggttagcgcgaagttatttgtagaattatcgttaattttaatgagtttaatatcgttgatcgtttgtgtatcgacgtcgttaatgttattaattcgaacgcgagtgtttttttgggtatcgttttttacgtttattttatcggtgggcgaattatgttttttagcgtcgcgttgaacgttattaggttattgttttcggtatagttgtcgttaacggttagtatatttttcggtttttttttttcgttatttatttgaatcgtgtcgttattttttaggttgtcgtcgatagtggttttagcgatacg

SEQ ID NO: 22440 - DNA, 577 bp, Artificial Sequence
  chemically treated genomic DNA (Homo sapiens) CpG-island No: 22440
cgtatcgctaaaaccactatcgacgacaacctaaaaaataacgacacgattcaaataaataacgaaaaaaaaaaaccgaaaaatatactaaccgttaacgacaactataccgaaaacaataacctaataacgttcaacgcgacgctaaaaaacataattcgcccaccgataaaataaacgtaaaaaacgatacccaaaaaaacactcgcgttcgaattaataacattaacgacgtcgatacacaaacgatcaacgatattaaactcattaaaattaacgataattctacaaataacttcgcgctaaccaccgaaactatcgaaactaaaacttacgtctacacgctaactaaaaaaaaaaaaaataacgaaaaaaactaatatctaaccaataaataaaacgacgtaacgcaacgaatacacccgatcccatcaataatccccctattataaatccgaaaaccccatcaatttatcgcccgaaaccgaaaactatatcaacaacattaccgcaaccaactcgctatttaaccatcgtttacacgaccgacattcatacctacaacctttaaaaatac

SEQ ID NO: 22441 - DNA, 520 bp, Artificial Sequence
  chemically treated genomic DNA (Homo sapiens) CpG-island No: 22441
gtagttgggaatgcggttggtgttggacggcgtgtttaattatagtggcgatttttatgtttggtttgataggtataatcgtggtacgggtggtgtttgttataatttcgaatcgttttggcgcgattggtattcgtttagtgatgatggtacggcgttcgattggtttggttatgttagtttgtcgaagttggattattagtcggaaagtttggtgaatgaaatttatcgcggggaagatagtattgttcgttattggttgaaagcgtcgtggaatatggacggttggcggttggatgtggtgtatatgttgggggaggcgggtggggcgcgtaataatatgtagtacgttgtcgggattatcgaagcggcgaaagaaatttagtcggaagcgtatattgtcggcgaatattttggcgatgtacggtaatggttataggtcgatgtggaagatgtcgttatgaattatcgtggttttatattttcgttgtggggattttttgttaatatcgatattttt

SEQ ID NO: 22442 - DNA, 520 bp, Artificial Sequence
  chemically treated genomic DNA (Homo sapiens) CpG-island No: 22442
aaaaatatcgatattaacaaaaaatccccacaacgaaaatataaaaccacgataattcataacgacatcttccacatcgacctataaccattaccgtacatcgccaaaatattcgccgacaatatacgcttccgactaaatttctttcgccgcttcgataatcccgacaacgtactacatattattacgcgccccacccgcctcccccaacatatacaccacatccaaccgccaaccgtccatattccacgacgctttcaaccaataacgaacaatactatcttccccgcgataaatttcattcaccaaactttccgactaataatccaacttcgacaaactaacataaccaaaccaatcgaacgccgtaccatcatcactaaacgaataccaatcgcgccaaaacgattcgaaattataacaaacaccacccgtaccacgattatacctatcaaaccaaacataaaaatcgccactataattaaacacgccgtccaacaccaaccgcattcccaactac

SEQ ID NO: 22443 - DNA, 520 bp, Artificial Sequence
  chemically treated genomic DNA (Homo sapiens) CpG-island No: 22443
agagatatcggtattggtaagaaatttttataacgggaatgtgaagttacgatagtttatggcggtattttttatatcggtttgtaattattgtcgtgtatcgttaaaatgttcgtcgataatatacgttttcggttgggtttttttcgtcgtttcggtgatttcggtaacgtgttgtatattattgcgcgttttattcgttttttttagtatatgtattatatttagtcgttagtcgtttatattttacggcgtttttagttagtggcggataatattgtttttttcgcgataaattttatttattagatttttcgattgataatttagtttcggtaagttggtatagttaagttagtcgagcgtcgtgttattattattaaacgagtattagtcgcgttagggcgattcggggttgtgataagtattattcgtgttacgattatgtttgttaaattaggtatgggaatcgttattgtggttaaatacgtcgtttagtattagtcgtatttttagttgt

SEQ ID NO: 22444 - DNA, 520 bp, Artificial Sequence
  chemically treated genomic DNA (Homo sapiens) CpG-island No: 22444
acaactaaaaatacgactaatactaaacgacgtatttaaccacaataacgattcccatacctaatttaacaaacataatcgtaacacgaataatacttatcacaaccccgaatcgccctaacgcgactaatactcgtttaataataataacacgacgctcgactaacttaactataccaacttaccgaaactaaattatcaatcgaaaaatctaataaataaaatttatcgcgaaaaaaacaatattatccgccactaactaaaaacgccgtaaaatataaacgactaacgactaaatataatacatatactaaaaaaaacgaataaaacgcgcaataatatacaacacgttaccgaaatcaccgaaacgacgaaaaaaacccaaccgaaaacgtatattatcgacgaacattttaacgatacacgacaataattacaaaccgatataaaaaataccgccataaactatcgtaacttcacattcccgttataaaaatttcttaccaataccgatatctct

SEQ ID NO: 22445 - DNA, 559 bp, Artificial Sequence
  chemically treated genomic DNA (Homo sapiens) CpG-island No: 22445
attgttttggtttcgtattacgttttataaagttttagcggcggtggaaagtgaacggttttttttgcgtattagtattaattggcgtttaataatcggcgtaatgcgttttattattagtgggttatttttaggtaatggtagcgttagtgcgggaagaatattgatgtcgatgtttgcggttattatcgggaatagcgtcgtcggatgtttaattttttgtataatattcgtttgaatattattgcgcgttagcgttgcgttaattagcggtcggttgtttgacgcgtaattttgtaatattaatttcgttttttgtaatgtttgttagggtatataattttttacggttaaagcgttatcgcgatggtaaagtagaaagaaaggttcggaaagaatcgttttatattgtagatcgtttattgggtttggatcgatgacgatgttaaaatcgatatttttttggcgaatattttttattatttattgttgcggacgatcgtgtaggataaattgaatatttggatagcggcgatggtttttagtaatgtattgcgga

SEQ ID NO: 22446 - DNA, 559 bp, Artificial Sequence
  chemically treated genomic DNA (Homo sapiens) CpG-island No: 22446
tccgcaatacattactaaaaaccatcgccgctatccaaatattcaatttatcctacacgatcgtccgcaacaataaataataaaaaatattcgccaaaaaaatatcgattttaacatcgtcatcgatccaaacccaataaacgatctacaatataaaacgattctttccgaacctttctttctactttaccatcgcgataacgctttaaccgtaaaaaattatataccctaacaaacattacaaaaaacgaaattaatattacaaaattacgcgtcaaacaaccgaccgctaattaacgcaacgctaacgcgcaataatattcaaacgaatattatacaaaaaattaaacatccgacgacgctattcccgataataaccgcaaacatcgacatcaatattcttcccgcactaacgctaccattacctaaaaataacccactaataataaaacgcattacgccgattattaaacgccaattaatactaatacgcaaaaaaaaccgttcactttccaccgccgctaaaactttataaaacgtaatacgaaaccaaaacaat

SEQ ID NO: 22447 - DNA, 559 bp, Artificial Sequence
  chemically treated genomic DNA (Homo sapiens) CpG-island No: 22447
ttcgtaatgtattgttgaaagttatcgtcgttatttagatatttagtttgttttgtacgatcgttcgtagtagtgggtaatggaaagtattcgttagggagatgtcgattttggtatcgttatcgatttaggtttagtgggcgatttgtaatgtgaagcgatttttttcgagtttttttttttgttttgttatcgcgatagcgttttggtcgtggaagattatgtattttggtaggtattatagggagcgaaattggtgttgtaggattacgcgttaggtagtcgatcgttgattgacgtagcgttggcgcgtaatggtatttaggcgaatattgtgtaggagattggatattcggcgacgttgttttcgatggtagtcgtaggtatcggtattagtatttttttcgtattggcgttattattgtttgaaggtagtttattggtggtaaagcgtattacgtcggttgttgaacgttagttgatgttggtgcgtaggaagaatcgtttattttttatcgtcgttgaagttttatgggacgtggtacgagattagggtaat

SEQ ID NO: 22448 - DNA, 559 bp, Artificial Sequence
  chemically treated genomic DNA (Homo sapiens) CpG-island No: 22448
attaccctaatctcgtaccacgtcccataaaacttcaacgacgataaaaaataaacgattcttcctacgcaccaacatcaactaacgttcaacaaccgacgtaatacgctttaccaccaataaactaccttcaaacaataataacgccaatacgaaaaaaatactaataccgatacctacgactaccatcgaaaacaacgtcgccgaatatccaatctcctacacaatattcgcctaaataccattacgcgccaacgctacgtcaatcaacgatcgactacctaacgcgtaatcctacaacaccaatttcgctccctataatacctaccaaaatacataatcttccacgaccaaaacgctatcgcgataacaaaacaaaaaaaaaaactcgaaaaaaatcgcttcacattacaaatcgcccactaaacctaaatcgataacgataccaaaatcgacatctccctaacgaatactttccattacccactactacgaacgatcgtacaaaacaaactaaatatctaaataacgacgataactttcaacaatacattacgaa

SEQ ID NO: 22449 - DNA, 522 bp, Artificial Sequence
  chemically treated genomic DNA (Homo sapiens) CpG-island No: 22449
ggcgcgtacgtttcgattacgtgattttagtcgtggtttgatgggtttcgttttgagttatgattatgattttcggtattggtcgttgtttttattcgttggtttgtttgtaggttatgagagattcggcgagttaaacgtgacgatttgttcggcggtgattagttgcgttacgtcgcgttcggtattattaggattagagtggcgataaacggttgaattttgaggatcgttattagtatgtcgttttataatttcgttagatgtcggtgtttagggcgtttaataaaataatcggtaggttgaatttcgcgatcgttatcgtagtcgttgtggtttcggcgatatagttatcgtttttacggagagattaattttatcggtggcgattattagcgttatgttaatcgttagtaacgtaacgggagttgtacggttaagaatgtttatggggttatcgaataaacgtttattttgaagtattattttgtattgattttaaaaagttggatagttaaatat

SEQ ID NO: 22450 - DNA, 522 bp, Artificial Sequence
  chemically treated genomic DNA (Homo sapiens) CpG-island No: 22450
atatttaactatccaactttttaaaatcaatacaaaataatacttcaaaataaacgtttattcgataaccccataaacattcttaaccgtacaactcccgttacgttactaacgattaacataacgctaataatcgccaccgataaaattaatctctccgtaaaaacgataactatatcgccgaaaccacaacgactacgataacgatcgcgaaattcaacctaccgattattttattaaacgccctaaacaccgacatctaacgaaattataaaacgacatactaataacgatcctcaaaattcaaccgtttatcgccactctaatcctaataataccgaacgcgacgtaacgcaactaatcaccgccgaacaaatcgtcacgtttaactcgccgaatctctcataacctacaaacaaaccaacgaataaaaacaacgaccaataccgaaaatcataatcataactcaaaacgaaacccatcaaaccacgactaaaatcacgtaatcgaaacgtacgcgcc

SEQ ID NO: 22451 - DNA, 522 bp, Artificial Sequence
  chemically treated genomic DNA (Homo sapiens) CpG-island No: 22451
gtgtttaattgtttaattttttggggttagtataaggtggtgttttaggatgggcgtttgttcggtagttttatagatatttttaatcgtgtagttttcgttgcgttattggcgattggtatgacgttggtgatcgttatcggtgggattgattttttcgtaggggcggtgattgtatcgtcggagttataacggttgcgatgacggtcgcgggatttagtttgtcgattgttttgttaagcgttttgggtatcggtatttggcgggattgtggaacggtatattggtagcgatttttaaaatttagtcgtttgtcgttattttgattttgatggtgtcgggcgcggcgtggcgtaattgattatcgtcgggtagatcgttacgtttaattcgtcggattttttatgatttgtaggtagattagcgagtggagatagcgattagtatcggaagttatggttatgatttagaacgaagtttattagattacggttgggattacgtagtcgagacgtacgcgtt

SEQ ID NO: 22452 - DNA, 522 bp, Artificial Sequence
  chemically treated genomic DNA (Homo sapiens) CpG-island No: 22452
aacgcgtacgtctcgactacgtaatcccaaccgtaatctaataaacttcgttctaaatcataaccataacttccgatactaatcgctatctccactcgctaatctacctacaaatcataaaaaatccgacgaattaaacgtaacgatctacccgacgataatcaattacgccacgccgcgcccgacaccatcaaaatcaaaataacgacaaacgactaaattttaaaaatcgctaccaatataccgttccacaatcccgccaaataccgatacccaaaacgcttaacaaaacaatcgacaaactaaatcccgcgaccgtcatcgcaaccgttataactccgacgatacaatcaccgcccctacgaaaaaatcaatcccaccgataacgatcaccaacgtcataccaatcgccaataacgcaacgaaaactacacgattaaaaatatctataaaactaccgaacaaacgcccatcctaaaacaccaccttatactaaccccaaaaaattaaacaattaaacac

SEQ ID NO: 22453 - DNA, 569 bp, Artificial Sequence
  chemically treated genomic DNA (Homo sapiens) CpG-island No: 22453
cgtttttattgttcggggatggggagtaagtttagttagtcgttgttttcgggtgtcgcgtgcgtagttgtacgttatttttagacgaatcgatgattggatggatggtcgtcgtagtcgttatattgatgatacggatgtgttttttcgtatatattatgttatcggagagttgttaacgtatggttatcgtcgggtatgggcgttgtttcgtagataggtagaatttgatggtatgtttgcgattaatgttaaacgtgtttatcggattatgcgttagaatgcgttgttgtttgagcgaaaatttgttgtatcgttatcgaaacgggtatatataggtagagtggtcgtgaaagaaagtaattagcgatggtgttttgacgggttcgagttttgttgtgataacggagagagattgcgtgttacgttcgcgttggattgttgtgatcgtgaggtattttattgttggcgggcgaaatattgtatgtttgtaggttattgttatatcgtttattcgttcgttttcggatattacgtttttgtgtgcgcgttttgcgttatttgatcga

SEQ ID NO: 22454 - DNA, 569 bp, Artificial Sequence
  chemically treated genomic DNA (Homo sapiens) CpG-island No: 22454
tcgatcaaataacgcaaaacgcgcacacaaaaacgtaatatccgaaaacgaacgaataaacgatataacaataacctacaaacatacaatatttcgcccgccaacaataaaatacctcacgatcacaacaatccaacgcgaacgtaacacgcaatctctctccgttatcacaacaaaactcgaacccgtcaaaacaccatcgctaattactttctttcacgaccactctacctatatatacccgtttcgataacgatacaacaaattttcgctcaaacaacaacgcattctaacgcataatccgataaacacgtttaacattaatcgcaaacataccatcaaattctacctatctacgaaacaacgcccatacccgacgataaccatacgttaacaactctccgataacataatatatacgaaaaaacacatccgtatcatcaatataacgactacgacgaccatccatccaatcatcgattcgtctaaaaataacgtacaactacgcacgcgacacccgaaaacaacgactaactaaacttactccccatccccgaacaataaaaacg

SEQ ID NO: 22455 - DNA, 569 bp, Artificial Sequence
  chemically treated genomic DNA (Homo sapiens) CpG-island No: 22455
tcgattaggtagcgtaaaacgcgtatataggaacgtaatgttcgagggcgaacgaataggcgatataataatggtttgtaggtatatagtatttcgttcgttaatagtgaagtgttttacgattatagtagtttagcgcgaacgtgatacgtagttttttttcgttattatagtagaattcgaattcgttagagtattatcgttgattgtttttttttacggttattttgtttgtatgtgttcgtttcgatggcggtatagtaggttttcgtttaagtaatagcgtattttggcgtatgattcggtaaatacgtttggtattgatcgtaggtatattattaagttttgtttgtttgcgaagtagcgtttatattcgacgataattatacgttggtagtttttcgataatatggtgtatacggagaagtatattcgtattattagtgtgacgattgcggcggttatttatttagttatcggttcgtttgagaatgacgtgtaattgcgtacgcgatattcggagataacggttgattaagtttattttttattttcgggtaataagggcg

SEQ ID NO: 22456 - DNA, 569 bp, Artificial Sequence
  chemically treated genomic DNA (Homo sapiens) CpG-island No: 22456
cgcccttattacccgaaaataaaaaataaacttaatcaaccgttatctccgaatatcgcgtacgcaattacacgtcattctcaaacgaaccgataactaaataaataaccgccgcaatcgtcacactaataatacgaatatacttctccgtatacaccatattatcgaaaaactaccaacgtataattatcgtcgaatataaacgctacttcgcaaacaaacaaaacttaataatatacctacgatcaataccaaacgtatttaccgaatcatacgccaaaatacgctattacttaaacgaaaacctactataccgccatcgaaacgaacacatacaaacaaaataaccgtaaaaaaaaacaatcaacgataatactctaacgaattcgaattctactataataacgaaaaaaaactacgtatcacgttcgcgctaaactactataatcgtaaaacacttcactattaacgaacgaaatactatatacctacaaaccattattatatcgcctattcgttcgccctcgaacattacgttcctatatacgcgttttacgctacctaatcga

SEQ ID NO: 22457 - DNA, 632 bp, Artificial Sequence
  chemically treated genomic DNA (Homo sapiens) CpG-island No: 22457
tgtatggtcgtgggttggataaataacgtttgatttaatattagagtaaattgggtgcggcgatggtgattgttgtcgtttggtgcgtggaagattattaggtgattcgtttggtaggtttatttatcgtacgggttatacgtttggtttacgaagcgtagttggatgtcgtttcgttggggaaaatttcgtatttgcgtacgtcgggtttgttggtgatggatatggattttatcgttatttagattgaatgtattgatgaaattgttaaattggtcggaacgggcgagatggtggcggaagtaatcgaacgggcgatgcgcggcgaattcgattttatcgttagtttgcgtagtcgtgtggcgacgttgaaaggcgttgacgttaatattttgtaataggtgcgtgaaaatttgtcgttgatgttaggtttaacgtaattggtgtttaagttggaaacgttgggttggaaagtggcgattgttttcggcggttttattttttttgttgaatatttgcgcgataagttgcgtttgatcgtcgtggtagttaatgaattggagattatggacgggtaaattaacgggtaatgtgattcggcgaataggcgtatgtttgtatcgttatatatt

SEQ ID NO: 22458 - DNA, 632 bp, Artificial Sequence
  chemically treated genomic DNA (Homo sapiens) CpG-island No: 22458
aatatataacgatacaaacatacgcctattcgccgaatcacattacccgttaatttacccgtccataatctccaattcattaactaccacgacgatcaaacgcaacttatcgcgcaaatattcaacaaaaaaaataaaaccgccgaaaacaatcgccactttccaacccaacgtttccaacttaaacaccaattacgttaaacctaacatcaacgacaaattttcacgcacctattacaaaatattaacgtcaacgcctttcaacgtcgccacacgactacgcaaactaacgataaaatcgaattcgccgcgcatcgcccgttcgattacttccgccaccatctcgcccgttccgaccaatttaacaatttcatcaatacattcaatctaaataacgataaaatccatatccatcaccaacaaacccgacgtacgcaaatacgaaattttccccaacgaaacgacatccaactacgcttcgtaaaccaaacgtataacccgtacgataaataaacctaccaaacgaatcacctaataatcttccacgcaccaaacgacaacaatcaccatcgccgcacccaatttactctaatattaaatcaaacgttatttatccaacccacgaccataca

SEQ ID NO: 22459 - DNA, 632 bp, Artificial Sequence
  chemically treated genomic DNA (Homo sapiens) CpG-island No: 22459
aatatgtagcgatgtaggtatgcgtttgttcgtcgaattatattgttcgttaatttattcgtttatgatttttagtttattggttattacggcggttaggcgtagtttgtcgcgtaggtatttagtaaagaaagtaaagtcgtcggaggtaatcgttattttttagtttagcgtttttagtttgagtattagttgcgttaagtttggtattagcggtagatttttacgtatttgttgtagaatattggcgttagcgttttttagcgtcgttatacggttgcgtaggttggcggtaaaatcgagttcgtcgcgtatcgttcgttcggttattttcgttattatttcgttcgtttcggttagtttggtaattttattaatatatttaatttggatggcggtggagtttatatttattattagtaaattcggcgtgcgtaggtgcgggattttttttagcggggcgatatttagttgcgtttcgtgggttaggcgtgtagttcgtgcggtgagtgaatttgttagacgaattatttgataattttttacgtattaggcggtaataattattatcgtcgtatttagtttgttttggtattgggttagacgttgtttatttagtttacgattatata

SEQ ID NO: 22460 - DNA, 632 bp, Artificial Sequence
  chemically treated genomic DNA (Homo sapiens) CpG-island No: 22460
tatataatcgtaaactaaataaacaacgtctaacccaataccaaaacaaactaaatacgacgataataattattaccgcctaatacgtaaaaaattatcaaataattcgtctaacaaattcactcaccgcacgaactacacgcctaacccacgaaacgcaactaaatatcgccccgctaaaaaaaatcccgcacctacgcacgccgaatttactaataataaatataaactccaccgccatccaaattaaatatattaataaaattaccaaactaaccgaaacgaacgaaataataacgaaaataaccgaacgaacgatacgcgacgaactcgattttaccgccaacctacgcaaccgtataacgacgctaaaaaacgctaacgccaatattctacaacaaatacgtaaaaatctaccgctaataccaaacttaacgcaactaatactcaaactaaaaacgctaaactaaaaaataacgattacctccgacgactttactttctttactaaatacctacgcgacaaactacgcctaaccgccgtaataaccaataaactaaaaatcataaacgaataaattaacgaacaatataattcgacgaacaaacgcatacctacatcgctacatatt

SEQ ID NO: 22461 - DNA, 595 bp, Artificial Sequence
  chemically treated genomic DNA (Homo sapiens) CpG-island No: 22461
attcggtttacgatttcgtagtaatttgtaggtcggataagatgcgttagtatcgtattcggtattgtgtattaattgtcggatgcggtatcggttgtaggtttgataagacgcgttaagcgtcgtattaggtataaatgtttaatgtttacgattatagcgaaatataggttttcgttcgttcgttagcgtttttttaattcgcgataacgttttaatttacgcgggtttattacggtttttgatataattatttatcgtcgttatattcggttttatcgaattatcggttttggtaaatggcgttaatttattcggtgtggtatggcgaatggtacgttgttgcggcgttttttagtttttatatatcgtattagtatcggtgaggattattagtttatttgtattaatttgttcggcgagtaacgtagcggcgagatttttattaattattgttttattttttgtttcgttattcgttataggtatatcgtcgtcgttattgtaaattattatatgtttttttttgagtaataattcgatgatttgtaggtatgtaagcggtttgtatgtttgtaggttattcgttgtcgtt

SEQ ID NO: 22462 - DNA, 595 bp, Artificial Sequence
  chemically treated genomic DNA (Homo sapiens) CpG-island No: 22462
aacgacaacgaataacctacaaacatacaaaccgcttacatacctacaaatcatcgaattattactcaaaaaaaaacatataataatttacaataacgacgacgatatacctataacgaataacgaaacaaaaaataaaacaataattaataaaaatctcgccgctacgttactcgccgaacaaattaatacaaataaactaataatcctcaccgatactaatacgatatataaaaactaaaaaacgccgcaacaacgtaccattcgccataccacaccgaataaattaacgccatttaccaaaaccgataattcgataaaaccgaatataacgacgataaataattatatcaaaaaccgtaataaacccgcgtaaattaaaacgttatcgcgaattaaaaaaacgctaacgaacgaacgaaaacctatatttcgctataatcgtaaacattaaacatttatacctaatacgacgcttaacgcgtcttatcaaacctacaaccgataccgcatccgacaattaatacacaataccgaatacgatactaacgcatcttatccgacctacaaattactacgaaatcgtaaaccgaat

SEQ ID NO: 22463 - DNA, 595 bp, Artificial Sequence
  chemically treated genomic DNA (Homo sapiens) CpG-island No: 22463
aacgatagcggatgatttgtaggtatgtaagtcgtttgtatgtttgtaggttatcgagttgttgtttaaagaggggtatgtggtgatttgtagtggcggcggcggtgtgtttgtgacggatgacggagtagggagtgaagtagtgattgataaagatttcgtcgttgcgttgttcgtcgagtagattaatgtagatggattggtgatttttatcgatgttgatgcggtatatgaaaattggggaacgtcgtagtaacgtgttattcgttatgttatatcggatgagttagcgttatttgttaaagtcgatggttcgatggggtcgaatgtaacggcggtgagtggttatgttagaagtcgtggtaaattcgcgtggattggggcgttatcgcgaattgaagagacgttggcgggcgaacggggatttgtatttcgttgtagtcgtaggtattagatatttgtgtttgatgcgacgtttgacgcgttttattaggtttataatcggtgtcgtattcggtaattggtgtataatgtcggatgcgatgttgacgtattttattcggtttatagattgttgcgaaatcgtaggtcggat

SEQ ID NO: 22464 - DNA, 595 bp, Artificial Sequence
  chemically treated genomic DNA (Homo sapiens) CpG-island No: 22464
atccgacctacgatttcgcaacaatctataaaccgaataaaatacgtcaacatcgcatccgacattatacaccaattaccgaatacgacaccgattataaacctaataaaacgcgtcaaacgtcgcatcaaacacaaatatctaatacctacgactacaacgaaatacaaatccccgttcgcccgccaacgtctcttcaattcgcgataacgccccaatccacgcgaatttaccacgacttctaacataaccactcaccgccgttacattcgaccccatcgaaccatcgactttaacaaataacgctaactcatccgatataacataacgaataacacgttactacgacgttccccaattttcatataccgcatcaacatcgataaaaatcaccaatccatctacattaatctactcgacgaacaacgcaacgacgaaatctttatcaatcactacttcactccctactccgtcatccgtcacaaacacaccgccgccgccactacaaatcaccacatacccctctttaaacaacaactcgataacctacaaacatacaaacgacttacatacctacaaatcatccgctatcgtt

SEQ ID NO: 22465 - DNA, 707 bp, Artificial Sequence
  chemically treated genomic DNA (Homo sapiens) CpG-island No: 22465
tttgtcgggaaagtgatcggtttgattggttataacggttttggtaaatttattttgtttaaaatgtttggtcgttattagtcgtcgtcggaaggggagattttttttgatgtttaatcgttggaaagttggagtagtaaagcgtttgttcgtaaagtggtttatttgtcgtagtagtttttttcggtagaagggatgatcgtgcgtgaattggtggcgattggtcgttattcgtggtatggcgcgttggcgttattgggggcggtagatcgcgaaaaagtcgaggaagttatttcgttggttggtttaaaatcgttggcgtatcggttggtcgatagtttttttggcggcgaacgttagcgggcgtggatcgtatgttggtggcgtaggatagtcgttgtttgttgttcgacgaatcgatttcggcgttggatatcgtttattaggttgatgtgttgtcgttggtgtatcgtttaagttaggagcgtggtttgacggttattgtcgtgttgtacgatattaatatggcggtacgttattgtgattatttggtcgttttgcgcggcggtgaaatgattgtttagggaacgtttgcggaaattatgcgcggcgaaattttcgaaatgatttatggtatttcgatgggtattttgtcgtattcggcgggtgttgtatttgtgagttttgtttattgatgagcggtttat

SEQ ID NO: 22466 - DNA, 707 bp, Artificial Sequence
  chemically treated genomic DNA (Homo sapiens) CpG-island No: 22466
ataaaccgctcatcaataaacaaaactcacaaatacaacacccgccgaatacgacaaaatacccatcgaaataccataaatcatttcgaaaatttcgccgcgcataatttccgcaaacgttccctaaacaatcatttcaccgccgcgcaaaacgaccaaataatcacaataacgtaccgccatattaatatcgtacaacacgacaataaccgtcaaaccacgctcctaacttaaacgatacaccaacgacaacacatcaacctaataaacgatatccaacgccgaaatcgattcgtcgaacaacaaacaacgactatcctacgccaccaacatacgatccacgcccgctaacgttcgccgccaaaaaaactatcgaccaaccgatacgccaacgattttaaaccaaccaacgaaataacttcctcgactttttcgcgatctaccgcccccaataacgccaacgcgccataccacgaataacgaccaatcgccaccaattcacgcacgatcatcccttctaccgaaaaaaactactacgacaaataaaccactttacgaacaaacgctttactactccaactttccaacgattaaacatcaaaaaaaatctccccttccgacgacgactaataacgaccaaacattttaaacaaaataaatttaccaaaaccgttataaccaatcaaaccgatcactttcccgacaaa

SEQ ID NO: 22467 - DNA, 707 bp, Artificial Sequence
  chemically treated genomic DNA (Homo sapiens) CpG-island No: 22467
gtaagtcgtttattaataaataaaatttataggtgtagtattcgtcggatgcggtaaaatatttatcgggatgttataaattatttcgagggtttcgtcgcgtataattttcgtaggcgttttttgagtaattattttatcgtcgcgtagggcgattagataattatagtagcgtgtcgttatattgatatcgtgtaatacggtaatgatcgttaggttacgtttttgatttaaacggtgtattagcgatagtatattaatttggtgggcgatatttagcgtcgaggtcggttcgtcgagtaatagataacggttattttgcgttattagtatgcgatttacgttcgttgacgttcgtcgttagagagattatcgattagtcgatgcgttagcggttttaagttaattagcgagatagttttttcgattttttcgcgatttgtcgtttttagtagcgttagcgcgttatgttacgggtaacgattaatcgttattagtttacgtacggttattttttttgtcggaggaagttgttgcggtaaataagttattttgcgggtaaacgttttgttgttttagttttttagcggttgggtattaagaagaattttttttttcgacggcggttgatgacggttaagtattttgagtagagtggatttattagaatcgttgtgattaattagatcggttattttttcggtagg

SEQ ID NO: 22468 - DNA, 707 bp, Artificial Sequence
  chemically treated genomic DNA (Homo sapiens) CpG-island No: 22468
cctaccgaaaaaataaccgatctaattaatcacaacgattctaataaatccactctactcaaaatacttaaccgtcatcaaccgccgtcgaaaaaaaaaattcttcttaatacccaaccgctaaaaaactaaaacaacaaaacgtttacccgcaaaataacttatttaccgcaacaacttcctccgacaaaaaaaataaccgtacgtaaactaataacgattaatcgttacccgtaacataacgcgctaacgctactaaaaacgacaaatcgcgaaaaaatcgaaaaaactatctcgctaattaacttaaaaccgctaacgcatcgactaatcgataatctctctaacgacgaacgtcaacgaacgtaaatcgcatactaataacgcaaaataaccgttatctattactcgacgaaccgacctcgacgctaaatatcgcccaccaaattaatatactatcgctaatacaccgtttaaatcaaaaacgtaacctaacgatcattaccgtattacacgatatcaatataacgacacgctactataattatctaatcgccctacgcgacgataaaataattactcaaaaaacgcctacgaaaattatacgcgacgaaaccctcgaaataatttataacatcccgataaatattttaccgcatccgacgaatactacacctataaattttatttattaataaacgacttac

SEQ ID NO: 22469 - DNA, 546 bp, Artificial Sequence
  chemically treated genomic DNA (Homo sapiens) CpG-island No: 22469
taattgttacggtttttttaggttcgtttcgtttaatttattgatagaggcggtttttttcgcggtagataatgtgtacgtgcgttttttagtcggtagagggcgcgcgtgtaggacggggtcggggcgcgcgcgggggtcgggggggttcgcgggggtcggtatcggaagcgtgcggttgttatgtaatattttggtcgcgcgggtagtcggttaggagggcggcgcgggtattggcggtagttgttaagcgggtggcggagcggcgtcgacggggattgttgaggcgcgtagagggtcgcggcgttcgggagtttgtcgttggcgcggttcgggcgggaggttcggcggcgggcggtagtatgtcggtggcggggttgaagaagtagttttataaggcgagttaggtgagcgtaggtttaggcgggagtcgagtatcgggtttcgggttgttcggatgagggagttaggttcgatttggttcgggagggggtcggggggatcgaggtggggacgttggcgcgtgttttttgttaggtgggaaga

SEQ ID NO: 22470 - DNA, 546 bp, Artificial Sequence
  chemically treated genomic DNA (Homo sapiens) CpG-island No: 22470
tcttcccacctaacaaaaaacacgcgccaacgtccccacctcgatccccccgaccccctcccgaaccaaatcgaacctaactccctcatccgaacaacccgaaacccgatactcgactcccgcctaaacctacgctcacctaactcgccttataaaactacttcttcaaccccgccaccgacatactaccgcccgccgccgaacctcccgcccgaaccgcgccaacgacaaactcccgaacgccgcgaccctctacgcgcctcaacaatccccgtcgacgccgctccgccacccgcttaacaactaccgccaatacccgcgccgccctcctaaccgactacccgcgcgaccaaaatattacataacaaccgcacgcttccgataccgacccccgcgaacccccccgacccccgcgcgcgccccgaccccgtcctacacgcgcgccctctaccgactaaaaaacgcacgtacacattatctaccgcgaaaaaaaccgcctctatcaataaattaaacgaaacgaacctaaaaaaaccgtaacaatta

SEQ ID NO: 22471 - DNA, 546 bp, Artificial Sequence
  chemically treated genomic DNA (Homo sapiens) CpG-island No: 22471
tttttttatttggtaggggatacgcgttaacgtttttatttcggttttttcggttttttttcgggttaggtcgggtttggtttttttattcgggtagttcggggttcggtattcggttttcgtttgggtttgcgtttatttggttcgttttgtagaattgtttttttagtttcgttatcgatatgttgtcgttcgtcgtcgagtttttcgttcggatcgcgttagcgataggttttcgggcgtcgcgattttttgcgcgttttagtagttttcgtcggcgtcgtttcgttattcgtttgatagttgtcgttagtgttcgcgtcgtttttttagtcgattgttcgcgcggttaggatattatatggtaatcgtacgttttcggtgtcggttttcgcgagttttttcggttttcgcgcgcgtttcggtttcgttttgtacgcgcgttttttgtcggttgaagagcgtacgtgtatattgtttatcgcgggagaggtcgtttttgttagtgagttgagcggggcgagtttagaggggtcgtagtagttg

SEQ ID NO: 22472 - DNA, 546 bp, Artificial Sequence
  chemically treated genomic DNA (Homo sapiens) CpG-island No: 22472
caactactacgacccctctaaactcgccccgctcaactcactaacaaaaacgacctctcccgcgataaacaatatacacgtacgctcttcaaccgacaaaaaacgcgcgtacaaaacgaaaccgaaacgcgcgcgaaaaccgaaaaaactcgcgaaaaccgacaccgaaaacgtacgattaccatataatatcctaaccgcgcgaacaatcgactaaaaaaacgacgcgaacactaacgacaactatcaaacgaataacgaaacgacgccgacgaaaactactaaaacgcgcaaaaaatcgcgacgcccgaaaacctatcgctaacgcgatccgaacgaaaaactcgacgacgaacgacaacatatcgataacgaaactaaaaaaacaattctacaaaacgaaccaaataaacgcaaacccaaacgaaaaccgaataccgaaccccgaactacccgaataaaaaaaccaaacccgacctaacccgaaaaaaaaccgaaaaaaccgaaataaaaacgttaacgcgtatcccctaccaaataaaaaaa

SEQ ID NO: 22473 - DNA, 530 bp, Artificial Sequence
  chemically treated genomic DNA (Homo sapiens) CpG-island No: 22473
ttttcgattaattgaggatggaatttttaatattttagcgtcgaggtttcgtcggttatagatgtttttttatttagagcgcgcgttagatagttatgtaatagtttacgaaggaaaaattgtagcgttagtacgtgttataagtcgttgcgattaacggtatgagtaatggtatttttgttcggttcggtacgttttatagtatcgcgtattggtgcggcgaggatttttttcgtgcggttggtttcgtttaacgttaataatcgcgcgaggttattttgatgtaaataaggataatcggcgttatgtattaattattattgcgcgtcgttagtagtttttagatttgttagtacggaatttgtacgtttattatcgttatttataacggtgatttgcggatgatttttagacgtacgtgtgtaaaatcgttatcgttaggatttatggtaatgacgatatttttattcggggatgcgtagtatcgtagtatcgagtgtttattatggttttatgacgatgagaaatat

SEQ ID NO: 22474 - DNA, 530 bp, Artificial Sequence
  chemically treated genomic DNA (Homo sapiens) CpG-island No: 22474
atatttctcatcgtcataaaaccataataaacactcgatactacgatactacgcatccccgaataaaaatatcgtcattaccataaatcctaacgataacgattttacacacgtacgtctaaaaatcatccgcaaatcaccgttataaataacgataataaacgtacaaattccgtactaacaaatctaaaaactactaacgacgcgcaataataattaatacataacgccgattatccttatttacatcaaaataacctcgcgcgattattaacgttaaacgaaaccaaccgcacgaaaaaaatcctcgccgcaccaatacgcgatactataaaacgtaccgaaccgaacaaaaataccattactcataccgttaatcgcaacgacttataacacgtactaacgctacaatttttccttcgtaaactattacataactatctaacgcgcgctctaaataaaaaaacatctataaccgacgaaacctcgacgctaaaatattaaaaattccatcctcaattaatcgaaaa

SEQ ID NO: 22475 - DNA, 530 bp, Artificial Sequence
  chemically treated genomic DNA (Homo sapiens) CpG-island No: 22475
atattttttatcgttataaaattatagtgaatattcggtgttgcgatgttgcgtattttcgggtgaaggtgtcgttattgttataagttttggcgatagcggttttgtatacgtgcgtttggagattattcgtaaattatcgttgtagatggcggtgatgagcgtgtagatttcgtgttggtaggtttgaaagttgttggcgacgcgtagtggtgattggtgtatgacgtcggttgtttttgtttgtattaggatgatttcgcgcgattgttggcgttgagcgaaattagtcgtacgggggggattttcgtcgtattagtgcgcgatattatgaaacgtgtcgagtcgggtaaaaatgttattgtttatatcgttgatcgtaacggtttatggtacgtgttgacgttgtaatttttttttcgtgagttgttatatgattgtttgacgcgcgttttaaatgaaggggtatttatgatcgacgaagtttcggcgttggaatattggggattttatttttagttggtcgaagg

SEQ ID NO: 22476 - DNA, 530 bp, Artificial Sequence
  chemically treated genomic DNA (Homo sapiens) CpG-island No: 22476
ccttcgaccaactaaaaataaaatccccaatattccaacgccgaaacttcgtcgatcataaataccccttcatttaaaacgcgcgtcaaacaatcatataacaactcacgaaaaaaaaattacaacgtcaacacgtaccataaaccgttacgatcaacgatataaacaataacatttttacccgactcgacacgtttcataatatcgcgcactaatacgacgaaaatcccccccgtacgactaatttcgctcaacgccaacaatcgcgcgaaatcatcctaatacaaacaaaaacaaccgacgtcatacaccaatcaccactacgcgtcgccaacaactttcaaacctaccaacacgaaatctacacgctcatcaccgccatctacaacgataatttacgaataatctccaaacgcacgtatacaaaaccgctatcgccaaaacttataacaataacgacaccttcacccgaaaatacgcaacatcgcaacaccgaatattcactataattttataacgataaaaaatat

SEQ ID NO: 22477 - DNA, 1115 bp, Artificial Sequence
  chemically treated genomic DNA (Homo sapiens) CpG-island No: 22477
gtaggtttgttggaattggaaatcgcgaatcgttttttatagggtgacgtcgatttcgtttgcgtcgattatgtcgacgacggtcgtcgagcggacgttggattcgaagcgatagagggagtaggagattagtagtggtattatttgtggtagtacgtcgtagaggattttttcgagtttgttggtatcggtggcgcgaatgttttttatcgggtcgggtttaatcgtttttatcgtttcggaaagtagtttggagagtacgtcggtggtgtggataaatagcgttagtacgttagtacgttagcgaacgggtcgaggtcgacggcgattacgaatagtatggcgaagattatttcgttaatggcgcggtaggcgtttattaggcggcgaacgggttggtaaatttattacggtattaggttttcggcgtttattaggttaaaggggatggagagaattatcgttagcgcggtgttttagacggcgatttgtagcgtgacggttatttcggtgaggtaattttgttattggttgaaatcgggcgggaagaagtcggcggcgaacgtcgttatgttgtcgtcgtttttgattagcgtaagcggggttattttcgcgttttgttacgagacgattaatacggcgagtataacggtttagtttagaagcgagaattagttgcgtttgggtggggcgatggtgatggtttgtatgtttggtttcggtttgtaggtcggataaggtgtttgtatcgtattcggtattaacgtttgtatattgtcggatgcgacgcggggcggggtgggggttaaaattgtgtatgttgtttgttatgtagaagaaatggggtagacgattcgaaaattatcgacggcgaagattttttgtcgtagtatcgtgaaaagtatcgtgttggtgggggtttgtttcgatttgaatttgaaaatcgattttattttgcgggatattaacgaatgtttttttgcgtagcgagtgaagttggcgtagttgttggattcgatggtcgaggcgaaatatatttttatttcggggttggggaaagtatttttttcgatatgcgaaaaaaaattaggcgcgcggtaacggtttcggttatg

SEQ ID NO: 22478 - DNA, 1115 bp, Artificial Sequence
  chemically treated genomic DNA (Homo sapiens) CpG-island No: 22478
cataaccgaaaccgttaccgcgcgcctaattttttttcgcatatcgaaaaaaatactttccccaaccccgaaataaaaatatatttcgcctcgaccatcgaatccaacaactacgccaacttcactcgctacgcaaaaaaacattcgttaatatcccgcaaaataaaatcgattttcaaattcaaatcgaaacaaacccccaccaacacgatacttttcacgatactacgacaaaaaatcttcgccgtcgataattttcgaatcgtctaccccatttcttctacataacaaacaacatacacaattttaacccccaccccgccccgcgtcgcatccgacaatatacaaacgttaataccgaatacgatacaaacaccttatccgacctacaaaccgaaaccaaacatacaaaccatcaccatcgccccacccaaacgcaactaattctcgcttctaaactaaaccgttatactcgccgtattaatcgtctcgtaacaaaacgcgaaaataaccccgcttacgctaatcaaaaacgacgacaacataacgacgttcgccgccgacttcttcccgcccgatttcaaccaataacaaaattacctcaccgaaataaccgtcacgctacaaatcgccgtctaaaacaccgcgctaacgataattctctccatcccctttaacctaataaacgccgaaaacctaataccgtaataaatttaccaacccgttcgccgcctaataaacgcctaccgcgccattaacgaaataatcttcgccatactattcgtaatcgccgtcgacctcgacccgttcgctaacgtactaacgtactaacgctatttatccacaccaccgacgtactctccaaactactttccgaaacgataaaaacgattaaacccgacccgataaaaaacattcgcgccaccgataccaacaaactcgaaaaaatcctctacgacgtactaccacaaataataccactactaatctcctactccctctatcgcttcgaatccaacgtccgctcgacgaccgtcgtcgacataatcgacgcaaacgaaatcgacgtcaccctataaaaaacgattcgcgatttccaattccaacaaacctac

SEQ ID NO: 22479 - DNA, 1115 bp, Artificial Sequence
  chemically treated genomic DNA (Homo sapiens) CpG-island No: 22479
tataatcgaagtcgttatcgcgcgtttgattttttttcgtatatcgaaagaggtattttttttagtttcggggtaaagatatatttcgtttcgattatcgggtttaatagttgcgttagttttattcgttgcgtagggaaatattcgttgatatttcgtagggtaaaatcggtttttagatttagatcgggataaatttttattagtacgatgttttttacggtgttgcggtagaaaattttcgtcgtcgatgattttcggatcgtttgttttattttttttgtatgataagtagtatgtatagttttggtttttatttcgtttcgcgtcgtattcgataatgtgtaggcgttgatgtcggatgcggtgtaagtattttattcggtttatagatcggagttaaatatgtaaattattattatcgttttatttaagcgtagttggttttcgtttttgagttgggtcgttgtattcgtcgtgttggtcgtttcgtggtagggcgcggaaatggtttcgtttacgttgattaaagacggcggtaatatggcgacgttcgtcgtcgattttttttcgttcgattttagttagtggtaggattattttatcgaaatggtcgttacgttgtaaatcgtcgtttggggtatcgcgttggcggtggttttttttattttttttggtttgatgagcgtcgaaaatttggtgtcgtggtgggtttattagttcgttcgtcgtttgatggacgtttgtcgcgttattaacgaaatggttttcgttatgttgttcgtggtcgtcgtcggtttcggttcgttcgttggcgtgttggcgtgttggcgttgtttatttatattatcggcgtgttttttaagttgtttttcgaagcggtggaagcgattgagttcggttcggtggaaggtattcgcgttatcggtgttaataagttcgaagagattttttacggcgtgttgttataggtgatgttattgttgattttttattttttttatcgtttcgaatttaacgttcgttcggcgatcgtcgtcggtatggtcggcgtaggcgggatcggcgttattttgtgggaagcgattcgcggtttttagttttaataaatttgt

SEQ ID NO: 22480 - DNA, 1115 bp, Artificial Sequence
  chemically treated genomic DNA (Homo sapiens) CpG-island No: 22480
acaaatttattaaaactaaaaaccgcgaatcgcttcccacaaaataacgccgatcccgcctacgccgaccataccgacgacgatcgccgaacgaacgttaaattcgaaacgataaaaaaaataaaaaatcaacaataacatcacctataacaacacgccgtaaaaaatctcttcgaacttattaacaccgataacgcgaataccttccaccgaaccgaactcaatcgcttccaccgcttcgaaaaacaacttaaaaaacacgccgataatataaataaacaacgccaacacgccaacacgccaacgaacgaaccgaaaccgacgacgaccacgaacaacataacgaaaaccatttcgttaataacgcgacaaacgtccatcaaacgacgaacgaactaataaacccaccacgacaccaaattttcgacgctcatcaaaccaaaaaaaataaaaaaaaccaccgccaacgcgataccccaaacgacgatttacaacgtaacgaccatttcgataaaataatcctaccactaactaaaatcgaacgaaaaaaaatcgacgacgaacgtcgccatattaccgccgtctttaatcaacgtaaacgaaaccatttccgcgccctaccacgaaacgaccaacacgacgaatacaacgacccaactcaaaaacgaaaaccaactacgcttaaataaaacgataataataatttacatatttaactccgatctataaaccgaataaaatacttacaccgcatccgacatcaacgcctacacattatcgaatacgacgcgaaacgaaataaaaaccaaaactatacatactacttatcatacaaaaaaaataaaacaaacgatccgaaaatcatcgacgacgaaaattttctaccgcaacaccgtaaaaaacatcgtactaataaaaatttatcccgatctaaatctaaaaaccgattttaccctacgaaatatcaacgaatatttccctacgcaacgaataaaactaacgcaactattaaacccgataatcgaaacgaaatatatctttaccccgaaactaaaaaaaatacctctttcgatatacgaaaaaaaatcaaacgcgcgataacgacttcgattata

SEQ ID NO: 22481 - DNA, 508 bp, Artificial Sequence
  chemically treated genomic DNA (Homo sapiens) CpG-island No: 22481
atcgcgatcgttataattattagtgcgacgtttaataatcgttagtttatttaaacgattaaatatcgtaggttattcgttgcgttcggtaagtaattgttacggtgtagtcggtaggtggagtttatcgaaaagttgtttttgagttagacggttagtaataatcgggaatatatcgcggtttataaaggtcggatggcgcgttagttcgcgggttaatgcggttttcggttagcgttttattttagcggtaattacgttttgttgaaaaggtatcgtcgtcggtttagcgtttagttcgattggttagatagtaatgtttaacggttcgtttgtttgacgtagtatacggtttaattgttcgttatcgaggacgtaaatttgttttatgtcgtatttcgcgggttcgggttttttagtatttcgtcggtttgggttttgtatgggtaatttttgtatgttttttgggttaatgttaacgggaatttttttttaatcgtttttttat

SEQ ID NO: 22482 - DNA, 508 bp, Artificial Sequence
  chemically treated genomic DNA (Homo sapiens) CpG-island No: 22482
ataaaaaaacgattaaaaaaaaattcccgttaacattaacccaaaaaacatacaaaaattacccatacaaaacccaaaccgacgaaatactaaaaaacccgaacccgcgaaatacgacataaaacaaatttacgtcctcgataacgaacaattaaaccgtatactacgtcaaacaaacgaaccgttaaacattactatctaaccaatcgaactaaacgctaaaccgacgacgataccttttcaacaaaacgtaattaccgctaaaataaaacgctaaccgaaaaccgcattaacccgcgaactaacgcgccatccgacctttataaaccgcgatatattcccgattattactaaccgtctaactcaaaaacaacttttcgataaactccacctaccgactacaccgtaacaattacttaccgaacgcaacgaataacctacgatatttaatcgtttaaataaactaacgattattaaacgtcgcactaataattataacgatcgcgat

SEQ ID NO: 22483 - DNA, 508 bp, Artificial Sequence
  chemically treated genomic DNA (Homo sapiens) CpG-island No: 22483
ataaagaggcgattaagaaaaagttttcgttagtattggtttaggaggtatgtaagagttgtttatgtaaagtttagatcgacgaagtgttggaaaattcggattcgcgaggtgcggtatgaaataggtttgcgttttcggtaacgggtagttaggtcgtatgttgcgttaggtaggcgaatcgttaggtattgttgtttggttagtcgggttggacgttgaatcggcggcggtgtttttttaataaagcgtgattatcgttgagatagaacgttggtcggaaatcgtattaattcgcgagttggcgcgttattcggtttttgtgaatcgcgatgtgttttcgattattgttgatcgtttgatttagaagtagtttttcgataagttttatttgtcgattgtatcgtggtagttatttgtcgaacgtagcgagtggtttgcggtgtttgatcgtttaggtgagttggcgattgttaagcgtcgtattggtggttatgacggtcgcggt

SEQ ID NO: 22484 - DNA, 508 bp, Artificial Sequence
  chemically treated genomic DNA (Homo sapiens) CpG-island No: 22484
accgcgaccgtcataaccaccaatacgacgcttaacaatcgccaactcacctaaacgatcaaacaccgcaaaccactcgctacgttcgacaaataactaccacgatacaatcgacaaataaaacttatcgaaaaactacttctaaatcaaacgatcaacaataatcgaaaacacatcgcgattcacaaaaaccgaataacgcgccaactcgcgaattaatacgatttccgaccaacgttctatctcaacgataatcacgctttattaaaaaaacaccgccgccgattcaacgtccaacccgactaaccaaacaacaatacctaacgattcgcctacctaacgcaacatacgacctaactacccgttaccgaaaacgcaaacctatttcataccgcacctcgcgaatccgaattttccaacacttcgtcgatctaaactttacataaacaactcttacatacctcctaaaccaatactaacgaaaactttttcttaatcgcctctttat

SEQ ID NO: 22485 - DNA, 1004 bp, Artificial Sequence
  chemically treated genomic DNA (Homo sapiens) CpG-island No: 22485
  unsure (922)
ggagatttgcggttacgcgttgtaatcggcggggattattttgttggtgattggtgcgggcggcgtgtttaaataagtgttggttgattttggcggaaggttcgtttttggtcgaatcgttaatcggtatgggtttgtcgattgttattatttgtttcgtcggaatttgttatatggattaggttaacggtcgcggtgagtcgtatttaaatcgaagtcgtagtcggacgtgaaacgggcggttcggtggatttgttttgggtgaacggcgaaaattttcgtattttaaaagaggttaatttattataaacgggttgggcggagattttgtttaattggcgttatgtcgatatatagttgtcggtgcgggaagatttttttgtgtcgatataaggtgcggaatcgttttggggcggcgtataattgacgtttatcgttcgtcgcgatgttacgttatagttattataaacgtcgtaagttttattggagtttgttaaagttaatttcggtacggttatttattcgcgtttatcggattttatcggtacggcgttttttgaatagttgttgattatgttgacgttcgatttcgtcgtattaaaagaagcgtcggacgatgcgattttcgttcgtgttattgtttttttgtggtaatattttgatgtgttgtattcgtatttgtggcgcgaaggaaaggatttttcgtttttattcgcgcggatggatgttttgttgaaagtcggtatattgcgtttgtcgttgatttttaatttcgcgtatgcgtagtaaaaaatcgttagcggcgatttgtttgtaagtagttatagttttggttttcgcgaggggatgattggtaacgtgtatttcgttattatttttgttaacgcgaatgttagtgttgcggcgaaggtagttgttaatnttttgtttttattcgatgcgtaattgcgtaaagtagatttcgttgtttgtaaatgttttgacgggataatcgttttggaaaa

SEQ ID NO: 22486 - DNA, 1004 bp, Artificial Sequence
  chemically treated genomic DNA (Homo sapiens) CpG-island No: 22486
  unsure (83)
ttttccaaaacgattatcccgtcaaaacatttacaaacaacgaaatctactttacgcaattacgcatcgaataaaaacaaaanattaacaactaccttcgccgcaacactaacattcgcgttaacaaaaataataacgaaatacacgttaccaatcatcccctcgcgaaaaccaaaactataactacttacaaacaaatcgccgctaacgattttttactacgcatacgcgaaattaaaaatcaacgacaaacgcaatataccgactttcaacaaaacatccatccgcgcgaataaaaacgaaaaatcctttccttcgcgccacaaatacgaatacaacacatcaaaatattaccacaaaaaaacaataacacgaacgaaaatcgcatcgtccgacgcttcttttaatacgacgaaatcgaacgtcaacataatcaacaactattcaaaaaacgccgtaccgataaaatccgataaacgcgaataaataaccgtaccgaaattaactttaacaaactccaataaaacttacgacgtttataataactataacgtaacatcgcgacgaacgataaacgtcaattatacgccgccccaaaacgattccgcaccttatatcgacacaaaaaaatcttcccgcaccgacaactatatatcgacataacgccaattaaacaaaatctccgcccaacccgtttataataaattaacctcttttaaaatacgaaaattttcgccgttcacccaaaacaaatccaccgaaccgcccgtttcacgtccgactacgacttcgatttaaatacgactcaccgcgaccgttaacctaatccatataacaaattccgacgaaacaaataataacaatcgacaaacccataccgattaacgattcgaccaaaaacgaaccttccgccaaaatcaaccaacacttatttaaacacgccgcccgcaccaatcaccaacaaaataatccccgccgattacaacgcgtaaccgcaaatctcc

SEQ ID NO: 22487 - DNA, 1004 bp, Artificial Sequence
  chemically treated genomic DNA (Homo sapiens) CpG-island No: 22487
  unsure (83)
ttttttagaacggttgtttcgttaaagtatttgtagatagcgggatttgttttacgtagttgcgtatcgggtgagagtagaanattggtaattattttcgtcgtagtattggtattcgcgttggtaggaatggtgacgaaatgtacgttgttaattattttttcgcgaaagttaaaattgtaattgtttgtaggtaaatcgtcgttggcgattttttgttgcgtatgcgcggggttaaaggttagcgataggcgtaatgtgtcggtttttagtagagtatttattcgcgcgggtgaaggcgggaaattttttttttcgcgttataaatacggatgtagtatattaagatattgttataagggagtagtgatacgggcgaaagtcgtatcgttcggcgttttttttaatgcggcgggatcgggcgttagtataattagtaattgtttaagaaacgtcgtgtcggtaaagttcggtgggcgcggataggtaatcgtgtcgggattggttttagtaaattttagtaaggtttgcggcgtttgtggtggttgtggcgtaatatcgcggcgggcgataaacgttagttgtgcgtcgttttagggcgatttcgtattttgtgtcggtatagaaaaattttttcgtatcggtagttgtgtgtcgatatagcgttagttgggtagagttttcgtttagttcgtttgtaataaattggttttttttaaggtgcggaagttttcgtcgtttatttagagtagatttatcgagtcgttcgttttacgttcggttgcggtttcggtttgaatgcggtttatcgcggtcgttgatttagtttatgtagtaaatttcgacgaagtaggtgatagtaatcggtaggtttatgtcggttaacggttcggttaagggcgggtttttcgttagagttaattagtatttgtttgaatacgtcgttcgtattaattattagtagaatgattttcgtcggttgtagcgcgtgatcgtaaattttt

SEQ ID NO: 22488 - DNA, 1004 bp, Artificial Sequence
  chemically treated genomic DNA (Homo sapiens) CpG-island No: 22488
  unsure (922)
aaaaatttacgatcacgcgctacaaccgacgaaaatcattctactaataattaatacgaacgacgtattcaaacaaatactaattaactctaacgaaaaacccgcccttaaccgaaccgttaaccgacataaacctaccgattactatcacctacttcgtcgaaatttactacataaactaaatcaacgaccgcgataaaccgcattcaaaccgaaaccgcaaccgaacgtaaaacgaacgactcgataaatctactctaaataaacgacgaaaacttccgcaccttaaaaaaaaccaatttattacaaacgaactaaacgaaaactctacccaactaacgctatatcgacacacaactaccgatacgaaaaaatttttctataccgacacaaaatacgaaatcgccctaaaacgacgcacaactaacgtttatcgcccgccgcgatattacgccacaaccaccacaaacgccgcaaaccttactaaaatttactaaaaccaatcccgacacgattacctatccgcgcccaccgaactttaccgacacgacgtttcttaaacaattactaattatactaacgcccgatcccgccgcattaaaaaaaacgccgaacgatacgactttcgcccgtatcactactcccttataacaatatcttaatatactacatccgtatttataacgcgaaaaaaaaaatttcccgccttcacccgcgcgaataaatactctactaaaaaccgacacattacgcctatcgctaacctttaaccccgcgcatacgcaacaaaaaatcgccaacgacgatttacctacaaacaattacaattttaactttcgcgaaaaaataattaacaacgtacatttcgtcaccattcctaccaacgcgaataccaatactacgacgaaaataattaccaatnttctactctcacccgatacgcaactacgtaaaacaaatcccgctatctacaaatactttaacgaaacaaccgttctaaaaaa

SEQ ID NO: 22489 - DNA, 812 bp, Artificial Sequence
  chemically treated genomic DNA (Homo sapiens) CpG-island No: 22489
  unsure (443)
ggttaggtatgaattacggttttgattagcgtcgttaacggaatggcgaagaatacgttttagaatttttataaattatcgaagattattatcgataaaataattattagcggatgtaggttaatcgtttcggagaataatatcggtattaataggttgtcgtttagcgtttgaataattagatatatcgcgaagtagttttagaatttagtatttgcgttaaattggaatagcgttacgttaattatcggaatggttattataaatgcgttaatgtacggaataagaatcgagaagtcgattagtattgttagtagtagcgaatagtttagttcgaagagtaagaattttagttaggtggcgatttttattacgattatttttagtattttgtcgttagcgtgcgttggttgtcgacgttaatatttcgtaggttgtcgatnttattattaaagaattaaagacgataaggtagtttattttttatcgggaagagatttagtaacgcgtcgcgcgtggcgtattcgtcgtgttttattatttggttaatatggcgataatcggcgttgtttagttgggttcgtaatgtatttcgtgataggcgttgatttttttttattattagcgtatgatcgtggagaaaattgtgtgggtaaacgcgttgtataagcgtatttatcggaataattagtacgttacgttgtatcgtcggtagttggtaaagggtggaaaggcgcgaggagataatgttttgatgaggcgaaaaattgtcgtagggaagagttttttagttcgttagatttattattatt

SEQ ID NO: 22490 - DNA, 812 bp, Artificial Sequence
  chemically treated genomic DNA (Homo sapiens) CpG-island No: 22490
  unsure (370)
aataataataaatctaacgaactaaaaaactcttccctacgacaatttttcgcctcatcaaaacattatctcctcgcgcctttccaccctttaccaactaccgacgatacaacgtaacgtactaattattccgataaatacgcttatacaacgcgtttacccacacaattttctccacgatcatacgctaataataaaaaaaaatcaacgcctatcacgaaatacattacgaacccaactaaacaacgccgattatcgccatattaaccaaataataaaacacgacgaatacgccacgcgcgacgcgttactaaatctcttcccgataaaaaataaactaccttatcgtctttaattctttaataataanatcgacaacctacgaaatattaacgtcgacaaccaacgcacgctaacgacaaaatactaaaaataatcgtaataaaaatcgccacctaactaaaattcttactcttcgaactaaactattcgctactactaacaatactaatcgacttctcgattcttattccgtacattaacgcatttataataaccattccgataattaacgtaacgctattccaatttaacgcaaatactaaattctaaaactacttcgcgatatatctaattattcaaacgctaaacgacaacctattaataccgatattattctccgaaacgattaacctacatccgctaataattattttatcgataataatcttcgataatttataaaaattctaaaacgtattcttcgccattccgttaacgacgctaatcaaaaccgtaattcatacctaacc

SEQ ID NO: 22491 - DNA, 812 bp, Artificial Sequence
  chemically treated genomic DNA (Homo sapiens) CpG-island No: 22491
  unsure (370)
aatggtgatgaatttggcggattgggaaatttttttttacgatagtttttcgttttattaggatattattttttcgcgtttttttattttttattagttatcgacgatgtagcgtggcgtattgattgtttcggtgaatacgtttatgtagcgcgtttgtttatatagttttttttacggttatgcgttggtgatgaaaaaaggttagcgtttgttacgagatgtattacgaatttaattggatagcgtcggttatcgttatgttgattaggtgatggagtacggcgaatacgttacgcgcggcgcgttgttggattttttttcgatggggagtgagttgttttatcgtttttgattttttgatgatganatcgatagtttgcggggtgttgacgtcgatagttagcgtacgttggcggtaaagtgttggagatgatcgtggtggggatcgttatttggttggggtttttgtttttcgggttgaattattcgttgttgttggtagtgttggtcggtttttcggtttttatttcgtatattggcgtatttgtggtgattatttcggtggttggcgtggcgttattttagtttggcgtaggtattgaattttggagttgtttcgcggtgtatttgattatttaggcgttggacggtaatttgttagtgtcggtgttgtttttcgaagcggttaatttgtattcgttggtgattattttatcggtggtgattttcggtggtttgtggggattttggggcgtatttttcgttatttcgttggcgacgttgattaaagtcgtgatttatgtttggtt

SEQ ID NO: 22492 - DNA, 812 bp, Artificial Sequence
  chemically treated genomic DNA (Homo sapiens) CpG-island No: 22492
  unsure (443)
aaccaaacataaatcacgactttaatcaacgtcgccaacgaaataacgaaaaatacgccccaaaatccccacaaaccaccgaaaatcaccaccgataaaataatcaccaacgaatacaaattaaccgcttcgaaaaacaacaccgacactaacaaattaccgtccaacgcctaaataatcaaatacaccgcgaaacaactccaaaattcaatacctacgccaaactaaaataacgccacgccaaccaccgaaataatcaccacaaatacgccaatatacgaaataaaaaccgaaaaaccgaccaacactaccaacaacaacgaataattcaacccgaaaaacaaaaaccccaaccaaataacgatccccaccacgatcatctccaacactttaccgccaacgtacgctaactatcgacgtcaacaccccgcaaactatcgatntcatcatcaaaaaatcaaaaacgataaaacaactcactccccatcgaaaaaaaatccaacaacgcgccgcgcgtaacgtattcgccgtactccatcacctaatcaacataacgataaccgacgctatccaattaaattcgtaatacatctcgtaacaaacgctaaccttttttcatcaccaacgcataaccgtaaaaaaaactatataaacaaacgcgctacataaacgtattcaccgaaacaatcaatacgccacgctacatcgtcgataactaataaaaaataaaaaaacgcgaaaaaataatatcctaataaaacgaaaaactatcgtaaaaaaaaatttcccaatccgccaaattcatcaccatt

SEQ ID NO: 22493 - DNA, 867 bp, Artificial Sequence
  chemically treated genomic DNA (Homo sapiens) CpG-island No: 22493
gttgatacgaaaaacggtattatttcgtaagtcggaatacgggtattgttataggtcggatgtggtacgcgtttgtatggtagcgtaaaaacgttgtttattttttcggtagaaagcggaatagtaggcgggttgatttatatatagcggtcgtcgtgtttttgtattaatgcgcgggtatagtttgggttggtttcgtggtgtagaatacgcgaagtatgggcgtatagtattttatcgttttttattttttcgaaagaaggtagtaatacgtaggtttttttttacggtttcgggcgcggtggttgtacggttacggttttggttttttgttttttcggtgttatcggtttgttattcgcgtacggtaaatttttattatacggatgcgggattgggtcgatttttttaggggtattaagacgggtggaatttacgtcgttttagttaggtagcgttttttttacgataatcgcggtattacgtatatcgcggattttattaattggttcgtttatcgttagacgatgcgttatttttattatcggacgtttatcgttattaaatattagtatgtcggttttcgaatttattattacggaacggcgtacggtatcggattagtaattataatgcgcggtacggcgtatattagttttaatatcgtcgaggattatcggtatatttttttacgtttttttataacgttgggtataaattagtgtggcgcgattcgcgcgtttatacgcgacgttattcggcgtgtatgtatcgttatgacgtatacggcgatcggcggtataacggttgattatcgaatttatgttggtagtagtgatatcgaaaaatagatcggtgtattagacg

SEQ ID NO: 22494 - DNA, 867 bp, Artificial Sequence
  chemically treated genomic DNA (Homo sapiens) CpG-island No: 22494
cgtctaatacaccgatctatttttcgatatcactactaccaacataaattcgataatcaaccgttataccgccgatcgccgtatacgtcataacgatacatacacgccgaataacgtcgcgtataaacgcgcgaatcgcgccacactaatttatacccaacgttataaaaaaacgtaaaaaaatataccgataatcctcgacgatattaaaactaatatacgccgtaccgcgcattataattactaatccgataccgtacgccgttccgtaataataaattcgaaaaccgacatactaatatttaataacgataaacgtccgataataaaaataacgcatcgtctaacgataaacgaaccaattaataaaatccgcgatatacgtaataccgcgattatcgtaaaaaaaacgctacctaactaaaacgacgtaaattccacccgtcttaatacccctaaaaaaatcgacccaatcccgcatccgtataataaaaatttaccgtacgcgaataacaaaccgataacaccgaaaaaacaaaaaaccaaaaccgtaaccgtacaaccaccgcgcccgaaaccgtaaaaaaaaacctacgtattactaccttctttcgaaaaaataaaaaacgataaaatactatacgcccatacttcgcgtattctacaccacgaaaccaacccaaactatacccgcgcattaatacaaaaacacgacgaccgctatatataaatcaacccgcctactattccgctttctaccgaaaaaataaacaacgtttttacgctaccatacaaacgcgtaccacatccgacctataacaatacccgtattccgacttacgaaataataccgtttttcgtatcaac

SEQ ID NO: 22495 - DNA, 867 bp, Artificial Sequence
  chemically treated genomic DNA (Homo sapiens) CpG-island No: 22495
cgtttggtatatcgatttgtttttcggtgttattgttgttaatatggattcgatgattaatcgttatatcgtcgatcgtcgtatacgttatgacgatgtatatacgtcggataacgtcgcgtgtaagcgcgcggatcgcgttatattggtttatatttagcgttgtaaagaggcgtggaaagatgtatcggtgattttcggcggtattgaggttagtatgcgtcgtatcgcgtattatgattattggttcgatatcgtgcgtcgtttcgtgatggtggattcgaaagtcgatatgttgatgtttggtaacggtgagcgttcgatggtggaagtggcgtatcgtttggcgatgggcgagttaattagtgaaattcgcgatgtgcgtaatatcgcgattatcgtgaaagaggcgttgtttggttggagcggcgtggattttattcgttttgatatttttggaaaaatcgatttaatttcgtattcgtatggtgaagatttgtcgtgcgcggataataaatcggtggtatcgaaaaagtaggaagttaaagtcgtaatcgtgtagttatcgcgttcgaaatcgtgggaaaaaatttacgtgttgttgttttttttcgagaaagtgaagggcgataaagtgttgtacgtttatgtttcgcgtattttgtattacgaaattaatttaggttgtgttcgcgtattgatgtaaaaatacggcgatcgttatgtgtggattaattcgtttgttatttcgttttttatcgaagagatggatagcgtttttgcgttgttatataagcgcgtgttatattcggtttatggtaatgttcgtatttcggtttacgaaatggtatcgtttttcgtgttaat

SEQ ID NO: 22496 - DNA, 867 bp, Artificial Sequence
  chemically treated genomic DNA (Homo sapiens) CpG-island No: 22496
attaacacgaaaaacgataccatttcgtaaaccgaaatacgaacattaccataaaccgaatataacacgcgcttatataacaacgcaaaaacgctatccatctcttcgataaaaaacgaaataacaaacgaattaatccacacataacgatcgccgtatttttacatcaatacgcgaacacaacctaaattaatttcgtaatacaaaatacgcgaaacataaacgtacaacactttatcgcccttcactttctcgaaaaaaaacaacaacacgtaaattttttcccacgatttcgaacgcgataactacacgattacgactttaacttcctactttttcgataccaccgatttattatccgcgcacgacaaatcttcaccatacgaatacgaaattaaatcgatttttccaaaaatatcaaaacgaataaaatccacgccgctccaaccaaacaacgcctctttcacgataatcgcgatattacgcacatcgcgaatttcactaattaactcgcccatcgccaaacgatacgccacttccaccatcgaacgctcaccgttaccaaacatcaacatatcgactttcgaatccaccatcacgaaacgacgcacgatatcgaaccaataatcataatacgcgatacgacgcatactaacctcaataccgccgaaaatcaccgatacatctttccacgcctctttacaacgctaaatataaaccaatataacgcgatccgcgcgcttacacgcgacgttatccgacgtatatacatcgtcataacgtatacgacgatcgacgatataacgattaatcatcgaatccatattaacaacaataacaccgaaaaacaaatcgatataccaaacg

SEQ ID NO: 22497 - DNA, 604 bp, Artificial Sequence
  chemically treated genomic DNA (Homo sapiens) CpG-island No: 22497
tagggttattggtatttgtcggtattatcgatattaatattgaagacgattagggtagttacgttcgtttgatagttcgtgatattgaaggtcggatggtttggcgggtatggaattttgagtcggatgtcggtgaaggttttaatcgttatattcgtattttaggtattcgtatagatacggttattcgttgatcgcgaagtatttattcgtatttattttttcgaatatattttatatttttatacgttagttatcgtcgttggcgtttttattgacggagatatatttatgataatatagacgtagtacgatttcgtattcgttaattaattcgaatttgaattgatcgttacgtcggttttcgatgaatagcgtatcgatttttggttatagtattttggcgttatttcgtagtggttatttttggagtcgtatattttcgtttggatggatcgtttttgtgagggttatagcggtggtatttggtcgttttatatttttagtaatggcggcgtatttatgtttttcgagtttgatatcgatgagatagtcgtttgtttaattgtttgaaaagtgatttgtaggtatgtatattttgtta

SEQ ID NO: 22498 - DNA, 604 bp, Artificial Sequence
  chemically treated genomic DNA (Homo sapiens) CpG-island No: 22498
taacaaaatatacatacctacaaatcacttttcaaacaattaaacaaacgactatctcatcgatatcaaactcgaaaaacataaatacgccgccattactaaaaatataaaacgaccaaataccaccgctataaccctcacaaaaacgatccatccaaacgaaaatatacgactccaaaaataaccactacgaaataacgccaaaatactataaccaaaaatcgatacgctattcatcgaaaaccgacgtaacgatcaattcaaattcgaattaattaacgaatacgaaatcgtactacgtctatattatcataaatatatctccgtcaataaaaacgccaacgacgataactaacgtataaaaatataaaatatattcgaaaaaataaatacgaataaatacttcgcgatcaacgaataaccgtatctatacgaatacctaaaatacgaatataacgattaaaaccttcaccgacatccgactcaaaattccatacccgccaaaccatccgaccttcaatatcacgaactatcaaacgaacgtaactaccctaatcgtcttcaatattaatatcgataataccgacaaataccaataacccta

SEQ ID NO: 22499 - DNA, 604 bp, Artificial Sequence
  chemically treated genomic DNA (Homo sapiens) CpG-island No: 22499
tggtagaatatgtatgtttgtaggttattttttaagtagttaaatagacggttgttttatcgatgttaggttcgggggatataaatgcgtcgttattgttgagggtgtagaacgattagatattatcgttgtagtttttatagaagcggtttatttaggcgaagatatgcggttttaggagtagttattgcgggatagcgttaaagtattgtggttagaaatcgatacgttgtttatcggggatcggcgtgacggttagtttaaattcgggttggttagcgggtgcgaggtcgtgttgcgtttgtgttgttatgggtatgttttcgttaataaaaacgttagcggcgatggttggcgtatggggatataaagtgtgttcggggaggtgaatgcgggtaaatgtttcgcgattagcgggtggtcgtgtttgtacggatgtttgaggtgcggatatagcggttaagatttttatcggtattcggtttaaagttttatgttcgttagattattcggtttttagtattacgaattattaggcggacgtgattgttttggtcgtttttaatgttaatgtcggtgatatcggtagatattagtggttttg

SEQ ID NO: 22500 - DNA, 604 bp, Artificial Sequence
  chemically treated genomic DNA (Homo sapiens) CpG-island No: 22500
caaaaccactaatatctaccgatatcaccgacattaacattaaaaacgaccaaaacaatcacgtccgcctaataattcgtaatactaaaaaccgaataatctaacgaacataaaactttaaaccgaataccgataaaaatcttaaccgctatatccgcacctcaaacatccgtacaaacacgaccacccgctaatcgcgaaacatttacccgcattcacctccccgaacacactttatatccccatacgccaaccatcgccgctaacgtttttattaacgaaaacatacccataacaacacaaacgcaacacgacctcgcacccgctaaccaacccgaatttaaactaaccgtcacgccgatccccgataaacaacgtatcgatttctaaccacaatactttaacgctatcccgcaataactactcctaaaaccgcatatcttcgcctaaataaaccgcttctataaaaactacaacgataatatctaatcgttctacaccctcaacaataacgacgcatttatatcccccgaacctaacatcgataaaacaaccgtctatttaactacttaaaaaataacctacaaacatacatattctacca

SEQ ID NO: 22501 - DNA, 878 bp, Artificial Sequence
  chemically treated genomic DNA (Homo sapiens) CpG-island No: 22501
ggtggtgttggcggtagtcggtagtaggttagagacgttagtttgttgtgttgcggtggtttgtacgcggcgaacggggcgttaggtggggtgttcgattcggtcgggaatatttttagtcggtcgaggagcggcgaggagaaggtgagtgcgtggtcggtgtgcgttagtgtcggcgttagtgttggtggcggttcggggtggttcggggtgaaggcgggtgtaggtatcgtgtcggtggggtgggtgggcggagtaggtttttttagcgtgttgtcgaagtggttgatagcgttagacggtttcgttttcggttaggtagtcgagggtagtgtagtaaacggaatggcggtgtcggtggaggaggattagtcggatttaaatacggcggtatagggttgtagtttcgttgattattggcggtatacgggtaattagtttatcgaggtacggtatcggaatattgattatttatttatatagcgcgttatttgatgcgaattgggttttaaacggcgggatattttatagtgttacggtagttgttaggaatatgaacggtgtttaggtacgtattatttgattcgtagagtaatcggtgtgggttagcgttatattaatttgtgacgtttttaaattattaaaacggaatatacgtattggttgttagcgtttgacgaatagcgttaggtagagtagtgatattagcgaagagataatgttcggtagtttcggtttaatgaagttagagtttaggtattgaacgatggtaaatgattcgttcgtaaatacgatcgtagggtacgtttttttgattacgcgttcgaagggttttataggacgttatacgaaacgaaaaatttttttgcgtaataatt

SEQ ID NO: 22502 - DNA, 878 bp, Artificial Sequence
  chemically treated genomic DNA (Homo sapiens) CpG-island No: 22502
aattattacgcaaaaaaatttttcgtttcgtataacgtcctataaaacccttcgaacgcgtaatcaaaaaaacgtaccctacgatcgtatttacgaacgaatcatttaccatcgttcaatacctaaactctaacttcattaaaccgaaactaccgaacattatctcttcgctaatatcactactctacctaacgctattcgtcaaacgctaacaaccaatacgtatattccgttttaataatttaaaaacgtcacaaattaatataacgctaacccacaccgattactctacgaatcaaataatacgtacctaaacaccgttcatattcctaacaactaccgtaacactataaaatatcccgccgtttaaaacccaattcgcatcaaataacgcgctatataaataaataatcaatattccgataccgtacctcgataaactaattacccgtataccgccaataatcaacgaaactacaaccctataccgccgtatttaaatccgactaatcctcctccaccgacaccgccattccgtttactacactaccctcgactacctaaccgaaaacgaaaccgtctaacgctatcaaccacttcgacaacacgctaaaaaaacctactccgcccacccaccccaccgacacgatacctacacccgccttcaccccgaaccaccccgaaccgccaccaacactaacgccgacactaacgcacaccgaccacgcactcaccttctcctcgccgctcctcgaccgactaaaaatattcccgaccgaatcgaacaccccacctaacgccccgttcgccgcgtacaaaccaccgcaacacaacaaactaacgtctctaacctactaccgactaccgccaacaccacc

SEQ ID NO: 22503 - DNA, 878 bp, Artificial Sequence
  chemically treated genomic DNA (Homo sapiens) CpG-island No: 22503
aattattgcgtaaagggatttttcgtttcgtatgacgttttataaggtttttcgggcgcgtaattaaagagacgtgttttgcggtcgtgtttgcgggcggattatttgttatcgtttagtatttgagttttaattttattgggtcggagttgtcggatattattttttcgttggtattattgttttgtttgacgttgttcgttaaacgttggtagttagtgcgtgtatttcgttttggtgatttgggggcgttataggttgatatgacgttggtttatatcggttattttgcgggttaggtgatgcgtgtttggatatcgtttatgtttttgatagttatcgtaatattgtggagtatttcgtcgtttaaagtttagttcgtattaggtggcgcgttgtatgagtgggtgattaatatttcggtgtcgtatttcgataaattggttgttcgtatgtcgttagtggttagcgaggttatagttttatgtcgtcgtgtttaagttcgattggtttttttttatcggtatcgttatttcgtttgttgtattgttttcgattgtttggtcgaagacgaaatcgtttgacgttattagttatttcggtagtacgttgaaagaatttgtttcgtttatttattttatcggtacggtgtttgtattcgtttttatttcgaattatttcggatcgttattaatattggcgtcggtattggcgtatatcggttacgtatttatttttttttcgtcgtttttcggtcggttgggggtattttcgatcgggtcggatattttatttaacgtttcgttcgtcgcgtgtaagttatcgtagtataataaattggcgtttttgatttgttgtcggttgtcgttaatattatt

SEQ ID NO: 22504 - DNA, 878 bp, Artificial Sequence
  chemically treated genomic DNA (Homo sapiens) CpG-island No: 22504
aataatattaacgacaaccgacaacaaatcaaaaacgccaatttattatactacgataacttacacgcgacgaacgaaacgttaaataaaatatccgacccgatcgaaaatacccccaaccgaccgaaaaacgacgaaaaaaaaataaatacgtaaccgatatacgccaataccgacgccaatattaataacgatccgaaataattcgaaataaaaacgaatacaaacaccgtaccgataaaataaataaacgaaacaaattctttcaacgtactaccgaaataactaataacgtcaaacgatttcgtcttcgaccaaacaatcgaaaacaatacaacaaacgaaataacgataccgataaaaaaaaaccaatcgaacttaaacacgacgacataaaactataacctcgctaaccactaacgacatacgaacaaccaatttatcgaaatacgacaccgaaatattaatcacccactcatacaacgcgccacctaatacgaactaaactttaaacgacgaaatactccacaatattacgataactatcaaaaacataaacgatatccaaacacgcatcacctaacccgcaaaataaccgatataaaccaacgtcatatcaacctataacgcccccaaatcaccaaaacgaaatacacgcactaactaccaacgtttaacgaacaacgtcaaacaaaacaataataccaacgaaaaaataatatccgacaactccgacccaataaaattaaaactcaaatactaaacgataacaaataatccgcccgcaaacacgaccgcaaaacacgtctctttaattacgcgcccgaaaaaccttataaaacgtcatacgaaacgaaaaatccctttacgcaataatt

SEQ ID NO: 22505 - DNA, 513 bp, Artificial Sequence
  chemically treated genomic DNA (Homo sapiens) CpG-island No: 22505
  unsure (426)
atcggtcgcgacggtcgcgtggcgtacgaatgtattttcgatattcgttcgttgaaagaagaaatcggtattagcgagttggatattgttaagcgtttgatcgattacggtttttacgcgtcgacgatgtcgttttcggtggcgggtacgttgatggttgaatcgattgaatttgaaagtaaagtggaattggatcgttttatcgacgcgatgttggttattcgcgtagaaattgattaggtgaaagtcggtgtttggtcgttggaagataattcgttggtgaacgcgtcgtatatttagagcgaattggtcgtcgagtgggcgtattcgtatagtcgtgaaattgcggtattttcggtaggtgtcgggcgaatatggggtgggagagggtagatagaattagtatcgtgcggtggtcgcgaaaanaaatcggggacgggagtgaaaaagaatttgaaatcgtgtacgtataagtagtgggagtatgtttaggcgtgtgattgcgtatttttt

SEQ ID NO: 22506 - DNA, 513 bp, Artificial Sequence
  chemically treated genomic DNA (Homo sapiens) CpG-island No: 22506
  unsure (88)
aaaaaatacgcaatcacacgcctaaacatactcccactacttatacgtacacgatttcaaattctttttcactcccgtccccgatttnttttcgcgaccaccgcacgatactaattctatctaccctctcccaccccatattcgcccgacacctaccgaaaataccgcaatttcacgactatacgaatacgcccactcgacgaccaattcgctctaaatatacgacgcgttcaccaacgaattatcttccaacgaccaaacaccgactttcacctaatcaatttctacgcgaataaccaacatcgcgtcgataaaacgatccaattccactttactttcaaattcaatcgattcaaccatcaacgtacccgccaccgaaaacgacatcgtcgacgcgtaaaaaccgtaatcgatcaaacgcttaacaatatccaactcgctaataccgatttcttctttcaacgaacgaatatcgaaaatacattcgtacgccacgcgaccgtcgcgaccgat

SEQ ID NO: 22507 - DNA, 513 bp, Artificial Sequence
  chemically treated genomic DNA (Homo sapiens) CpG-island No: 22507
  unsure (88)
aaaaggtacgtagttatacgtttaagtatgtttttattgtttgtacgtatacggttttaggtttttttttattttcgttttcggtttnttttcgcggttatcgtacggtattggttttatttgtttttttttattttatattcgttcgatatttgtcgggaatatcgtaattttacggttgtacggatgcgtttattcggcgattagttcgttttgaatgtgcggcgcgtttattagcgggttattttttagcggttagatatcggtttttatttggttaatttttgcgcggatagttagtatcgcgtcgataaagcgatttagttttattttgtttttagatttagtcggtttaattattagcgtattcgttatcgggaacgatatcgtcggcgcgtggaaatcgtagtcgattaggcgtttggtaatatttagttcgttgatgtcggtttttttttttagcgggcgaatatcgagaatatattcgtgcgttacgcgatcgtcgcgatcggt

SEQ ID NO: 22508 - DNA, 513 bp, Artificial Sequence
  chemically treated genomic DNA (Homo sapiens) CpG-island No: 22508
  unsure (426)
accgatcgcgacgatcgcgtaacgcacgaatatattctcgatattcgcccgctaaaaaaaaaaaccgacatcaacgaactaaatattaccaaacgcctaatcgactacgatttccacgcgccgacgatatcgttcccgataacgaatacgctaataattaaaccgactaaatctaaaaacaaaataaaactaaatcgctttatcgacgcgatactaactatccgcgcaaaaattaaccaaataaaaaccgatatctaaccgctaaaaaataacccgctaataaacgcgccgcacattcaaaacgaactaatcgccgaataaacgcatccgtacaaccgtaaaattacgatattcccgacaaatatcgaacgaatataaaataaaaaaaaacaaataaaaccaataccgtacgataaccgcgaaaanaaaccgaaaacgaaaataaaaaaaaacctaaaaccgtatacgtacaaacaataaaaacatacttaaacgtataactacgtacctttt

SEQ ID NO: 22509 - DNA, 621 bp, Artificial Sequence
  chemically treated genomic DNA (Homo sapiens) CpG-island No: 22509
  unsure (506, 567)
gcgcggcgaataggtaatgttcgtggttttgcgcgttagtattattatttcggaagttcgtgaagtggcggatttattgggttttattattatcgaatgtgatgaatcgatttcggtaacggcgttcgtgttcgttagcgtgttagtcgataaaatcgaaagttagcgtattcgcgaaattattattgtttagttgtcggaaggttagtttatcgaaagtttggtcgtatagttgatggaaaaagtgatgaaggaaaaatagtcgttggagtagggcgtaatgtagtcgagttttaaatcggtgatcggtaaaggcggtattaaagtgattgatggtagtagcgttaagtttggtcgtttcgacggcgtagaagcgtattgcgtgggtttgattgattttgtgatcggagacgacggtagtagtatgggcgtcggttttatgtagtgggagaacgtatttttttcgtggattttgaattacgacgaaatcgatatggtgttggaangggagttgtatgttcgttacgaaggttaaatatgatcgttaaattagcgagtgatgttatntcgaaagttttagttttaacgggggggtattggggggattattgtttgtatgtt

SEQ ID NO: 22510 - DNA, 621 bp, Artificial Sequence
  chemically treated genomic DNA (Homo sapiens) CpG-island No: 22510
  unsure (55, 116)
aacatacaaacaataatccccccaatacccccccgttaaaactaaaactttcganataacatcactcgctaatttaacgatcatatttaaccttcgtaacgaacatacaactcccnttccaacaccatatcgatttcgtcgtaattcaaaatccacgaaaaaaatacgttctcccactacataaaaccgacgcccatactactaccgtcgtctccgatcacaaaatcaatcaaacccacgcaatacgcttctacgccgtcgaaacgaccaaacttaacgctactaccatcaatcactttaataccgcctttaccgatcaccgatttaaaactcgactacattacgccctactccaacgactatttttccttcatcactttttccatcaactatacgaccaaactttcgataaactaaccttccgacaactaaacaataataatttcgcgaatacgctaactttcgattttatcgactaacacgctaacgaacacgaacgccgttaccgaaatcgattcatcacattcgataataataaaacccaataaatccgccacttcacgaacttccgaaataataatactaacgcgcaaaaccacgaacattacctattcgccgcgc

SEQ ID NO: 22511 - DNA, 621 bp, Artificial Sequence
  chemically treated genomic DNA (Homo sapiens) CpG-island No: 22511
  unsure (55, 116)
ggtatgtaaatagtagtttttttagtattttttcgttgaagttggagttttcggnataatattattcgttggtttggcgattatgtttggttttcgtggcgaatatgtagtttttnttttagtattatgtcgatttcgtcgtagtttagggtttacgggaagaatgcgtttttttattgtataaaatcggcgtttatgttgttgtcgtcgttttcggttataagattagttaagtttacgtaatgcgtttttgcgtcgtcgaaacgattaaatttgacgttattgttattaattattttgatgtcgtttttgtcggttatcgatttgaagttcggttgtattgcgttttgttttagcgattgttttttttttattattttttttattagttgtgcgattaggttttcggtaaattggtttttcggtagttgggtaatgatggtttcgcggatgcgttggttttcggttttgtcggttggtacgttggcgggtacggacgtcgttatcgggatcgatttattatattcggtgatggtaaaatttagtagattcgttattttacgggttttcggggtaataatgttggcgcgtagaattacggatattgtttgttcgtcgcgt

SEQ ID NO: 22512 - DNA, 621 bp, Artificial Sequence
  chemically treated genomic DNA (Homo sapiens) CpG-island No: 22512
  unsure (506, 567)
acgcgacgaacaaacaatatccgtaattctacgcgccaacattattaccccgaaaacccgtaaaataacgaatctactaaattttaccatcaccgaatataataaatcgatcccgataacgacgtccgtacccgccaacgtaccaaccgacaaaaccgaaaaccaacgcatccgcgaaaccatcattacccaactaccgaaaaaccaatttaccgaaaacctaatcgcacaactaataaaaaaaataataaaaaaaaaacaatcgctaaaacaaaacgcaatacaaccgaacttcaaatcgataaccgacaaaaacgacatcaaaataattaataacaataacgtcaaatttaatcgtttcgacgacgcaaaaacgcattacgtaaacttaactaatcttataaccgaaaacgacgacaacaacataaacgccgattttatacaataaaaaaacgcattcttcccgtaaaccctaaactacgacgaaatcgacataatactaaaanaaaaactacatattcgccacgaaaaccaaacataatcgccaaaccaacgaataatattatnccgaaaactccaacttcaacgaaaaaatactaaaaaaactactatttacatacc

SEQ ID NO: 22513 - DNA, 572 bp, Artificial Sequence
  chemically treated genomic DNA (Homo sapiens) CpG-island No: 22513
gttttgttgtagggttattaaatgtagggtagtgaaaatacgttttatttggcggtaggttaacggttggcgttagttatattaagtgaagaaggtattaaggcgtttattgtaaacggggaatggtaggttgacgaatacggtaattaatggcgttaggcgtttttatagggtgcgtttatcgatttcgtattagcggatcgtaaatcgttatggtaatacgttgaaaaatttgacgatatttattgcgttggttgttatgtttttattgtcgtcgattattatatcgttaatgcgtggtcgtttattgttaaaggaatgggggtacgaattagtatgagcgaaaacgaattggatattttaatttcgatttttcgtcggggggggtaattggggtatgttaattttgttttcgcgtatttatgtagtcggttttcgaaggtatcggtattatcgtcggtggtgtaatgcgcgtcgttttggaagtcgttggggtttataacgttttggttaaagtttatggttttattaattcgattaacgtggttcgtgtaattattgatggtttggaa

SEQ ID NO: 22514 - DNA, 572 bp, Artificial Sequence
  chemically treated genomic DNA (Homo sapiens) CpG-island No: 22514
ttccaaaccatcaataattacacgaaccacgttaatcgaattaataaaaccataaactttaaccaaaacgttataaaccccaacgacttccaaaacgacgcgcattacaccaccgacgataataccgataccttcgaaaaccgactacataaatacgcgaaaacaaaattaacataccccaattaccccccccgacgaaaaatcgaaattaaaatatccaattcgttttcgctcatactaattcgtacccccattcctttaacaataaacgaccacgcattaacgatataataatcgacgacaataaaaacataacaaccaacgcaataaatatcgtcaaatttttcaacgtattaccataacgatttacgatccgctaatacgaaatcgataaacgcaccctataaaaacgcctaacgccattaattaccgtattcgtcaacctaccattccccgtttacaataaacgccttaataccttcttcacttaatataactaacgccaaccgttaacctaccgccaaataaaacgtattttcactaccctacatttaataaccctacaacaaaac

SEQ ID NO: 22515 - DNA, 572 bp, Artificial Sequence
  chemically treated genomic DNA (Homo sapiens) CpG-island No: 22515
ttttaggttattaatagttgtacgaattacgttgatcgggttggtggaattataggttttagttagaacgttatgaattttagcgatttttagaacggcgcgtattgtattatcggcgatgatatcggtattttcggaagtcggttgtatgaatacgcgaggataagattagtatgttttagttatttttttcgacgggaaatcggggttaaaatgtttagttcgttttcgtttatgttggttcgtgtttttatttttttggtaatggacggttacgtattgacggtgtaatggtcggcggtaataggggtatgataattagcgtaataggtatcgttaagttttttagcgtattgttatagcggtttacggttcgttaatgcgggatcggtaagcgtattttgtaaagacgtttgacgttattgattgtcgtattcgttagtttgttatttttcgtttatagtgagcgttttgatattttttttatttaatgtggttagcgttagtcgttgatttgtcgttaggtagagcgtgtttttattgttttgtatttgataattttgtaatagaat

SEQ ID NO: 22516 - DNA, 572 bp, Artificial Sequence
  chemically treated genomic DNA (Homo sapiens) CpG-island No: 22516
attctattacaaaattatcaaatacaaaacaataaaaacacgctctacctaacgacaaatcaacgactaacgctaaccacattaaataaaaaaaatatcaaaacgctcactataaacgaaaaataacaaactaacgaatacgacaatcaataacgtcaaacgtctttacaaaatacgcttaccgatcccgcattaacgaaccgtaaaccgctataacaatacgctaaaaaacttaacgatacctattacgctaattatcatacccctattaccgccgaccattacaccgtcaatacgtaaccgtccattaccaaaaaaataaaaacacgaaccaacataaacgaaaacgaactaaacattttaaccccgatttcccgtcgaaaaaaataactaaaacatactaatcttatcctcgcgtattcatacaaccgacttccgaaaataccgatatcatcgccgataatacaatacgcgccgttctaaaaatcgctaaaattcataacgttctaactaaaacctataattccaccaacccgatcaacgtaattcgtacaactattaataacctaaaa

SEQ ID NO: 22517 - DNA, 545 bp, Artificial Sequence
  chemically treated genomic DNA (Homo sapiens) CpG-island No: 22517
ggtcgtttggttgcgggaaatcgacgttgttgcgtatggttgtcgggttggagcgggtgatagaaggcgatatttggattaacgattagcgcgtgattgaaatggagttaaaagatcgcgggattgcgatggtgttttagaattacgcgttttattcgtatatgagtgtcgaagaaaatatggcgtgggggttgaaaattcgcggtatgggtaagtagtaaattgtcgagcgcgttaaagaagcggcgcgtattttggagttggacggtttgtttaaacgtcgttcgcgcgagtttttcggcggttagcgttagcgtgtggcgatgggtcgcgcgattgtgcgcgattcggcggtgtttttgtttgatgagtcgttttttaatttcgatgttaagttgcgcgtgtagatgcgttttgaattgtaatagttgtatcgtcggtttgaaacgattttattttacgttatttacgattaggttgaagcgatgacgttgtttagcgagtaatgtgatgaacggcggtgttgtcgaattttttaatgttta

SEQ ID NO: 22518 - DNA, 545 bp, Artificial Sequence
  chemically treated genomic DNA (Homo sapiens) CpG-island No: 22518
taaacattaaaaaattcgacaacaccgccgttcatcacattactcgctaaacaacgtcatcgcttcaacctaatcgtaaataacgtaaaataaaatcgtttcaaaccgacgatacaactattacaattcaaaacgcatctacacgcgcaacttaacatcgaaattaaaaaacgactcatcaaacaaaaacaccgccgaatcgcgcacaatcgcgcgacccatcgccacacgctaacgctaaccgccgaaaaactcgcgcgaacgacgtttaaacaaaccgtccaactccaaaatacgcgccgcttctttaacgcgctcgacaatttactacttacccataccgcgaattttcaacccccacgccatattttcttcgacactcatatacgaataaaacgcgtaattctaaaacaccatcgcaatcccgcgatcttttaactccatttcaatcacgcgctaatcgttaatccaaatatcgccttctatcacccgctccaacccgacaaccatacgcaacaacgtcgatttcccgcaaccaaacgacc

SEQ ID NO: 22519 - DNA, 545 bp, Artificial Sequence
  chemically treated genomic DNA (Homo sapiens) CpG-island No: 22519
tgaatattaaggggttcggtaatatcgtcgtttattatattattcgttgggtagcgttatcgttttaatttgatcgtgagtaacgtagagtgaagtcgttttaggtcgacggtgtaattgttgtagtttaagacgtatttgtacgcgtagtttggtatcgaggttagagagcggtttattaaataggaatatcgtcggatcgcgtataatcgcgcggtttatcgttatacgttggcgttgatcgtcggaaagttcgcgcgggcgacgtttgagtagatcgtttagttttagaatgcgcgtcgtttttttaacgcgttcggtaatttgttgtttgtttatgtcgcgaatttttagtttttacgttatgtttttttcgatatttatatgcggataaagcgcgtagttttggaatattatcgtaatttcgcgattttttggttttattttagttacgcgttggtcgttgatttagatatcgttttttgttattcgttttagttcggtaattatgcgtagtagcgtcgatttttcgtagttagacggtt

SEQ ID NO: 22520 - DNA, 545 bp, Artificial Sequence
  chemically treated genomic DNA (Homo sapiens) CpG-island No: 22520
aaccgtctaactacgaaaaatcgacgctactacgcataattaccgaactaaaacgaataacaaaaaacgatatctaaatcaacgaccaacgcgtaactaaaataaaaccaaaaaatcgcgaaattacgataatattccaaaactacgcgctttatccgcatataaatatcgaaaaaaacataacgtaaaaactaaaaattcgcgacataaacaaacaacaaattaccgaacgcgttaaaaaaacgacgcgcattctaaaactaaacgatctactcaaacgtcgcccgcgcgaactttccgacgatcaacgccaacgtataacgataaaccgcgcgattatacgcgatccgacgatattcctatttaataaaccgctctctaacctcgataccaaactacgcgtacaaatacgtcttaaactacaacaattacaccgtcgacctaaaacgacttcactctacgttactcacgatcaaattaaaacgataacgctacccaacgaataatataataaacgacgatattaccgaaccccttaatattca

SEQ ID NO: 22521 - DNA, 793 bp, Artificial Sequence
  chemically treated genomic DNA (Homo sapiens) CpG-island No: 22521
  unsure (631)
gttttatcgatttgagcgtggaaacgcgttttgatgtagaagtgaaaagttggtttgttttcgttttataaaaatgttatgaattggtattgttgcgcgatgcgttgaatagtggtgatacggtagttttggtagagtggagcgtttcgatttaggtacgtcgttattttattcgcgtatataattcggcggtagaaaagcgtttggcggcgattatcgtttaggatagttagcgtgcgaatgtttatgaagtgcgtgttgaagtttagcgtgcgcgttttaaattgttagcgtggtcgattattacgattggttttttttcgtaaattacggaaattcgtattttgcgtttggattttaaaaagggtaatttcgacgttaataattatcgtacgggtattgcggaatatattaagtaggttattgttgagtaggaacgtttgggattggatgtgttggtatatggcgaggtcgagcgtaatgatatggtggaatattttggcgagtatttcgacggatttgtttttacgtaaaacggttgggtatagagttacggttttcgttgcgtgaagttatcgattgttattggtgatattagtcgttcggtatttattacgtggagtggcgaagntattttattttttattataaatcgtaaagggatttttagggttcgtgattattattttcgtgtggttttcgcggagagtgtattcgtaattttcgggggggtaatgggggggagtaatttttgtatgttttttggttttttagtttattgttgacgttaatt

SEQ ID NO: 22522 - DNA, 793 bp, Artificial Sequence
  chemically treated genomic DNA (Homo sapiens) CpG-island No: 22522
  unsure (163)
aattaacgtcaacaataaactaaaaaaccaaaaaacatacaaaaattactcccccccattacccccccgaaaattacgaatacactctccgcgaaaaccacacgaaaataataatcacgaaccctaaaaatccctttacgatttataataaaaaataaaatancttcgccactccacgtaataaataccgaacgactaatatcaccaataacaatcgataacttcacgcaacgaaaaccgtaactctatacccaaccgttttacgtaaaaacaaatccgtcgaaatactcgccaaaatattccaccatatcattacgctcgacctcgccatataccaacacatccaatcccaaacgttcctactcaacaataacctacttaatatattccgcaatacccgtacgataattattaacgtcgaaattaccctttttaaaatccaaacgcaaaatacgaatttccgtaatttacgaaaaaaaaccaatcgtaataatcgaccacgctaacaatttaaaacgcgcacgctaaacttcaacacgcacttcataaacattcgcacgctaactatcctaaacgataatcgccgccaaacgcttttctaccgccgaattatatacgcgaataaaataacgacgtacctaaatcgaaacgctccactctaccaaaactaccgtatcaccactattcaacgcatcgcgcaacaataccaattcataacatttttataaaacgaaaacaaaccaacttttcacttctacatcaaaacgcgtttccacgctcaaatcgataaaac

SEQ ID NO: 22523 - DNA, 793 bp, Artificial Sequence
  chemically treated genomic DNA (Homo sapiens) CpG-island No: 22523
  unsure (163)
aattaacgttagtaataaattgaaagattaagaggtatgtaaaagttatttttttttattattttttcgagggttacgggtatatttttcgcgggaattatacgagagtaatggttacgggttttagagatttttttacggtttgtggtaaagaatgggatantttcgttattttacgtaatgggtgtcgggcggttaatgttattaatgataatcggtggttttacgtagcgggaatcgtagttttgtatttaatcgttttgcgtaaagataaattcgtcgaggtgttcgttaaagtattttattatgttattacgttcggtttcgttatgtattagtatatttagttttaaacgtttttgtttaataatggtttgtttgatatgtttcgtaatgttcgtgcggtagttgttggcgtcgagattgttttttttgaaatttagacgtagggtacgaattttcgtggtttgcgggaaggaattaatcgtggtggtcggttacgttggtagtttaaaacgcgtacgttgggttttagtacgtattttatagatattcgtacgttggttgttttgggcggtgatcgtcgttagacgtttttttatcgtcggattatgtacgcgggtagagtgacgacgtgtttgaatcggggcgttttattttgttagagttgtcgtgttattattgtttagcgtatcgcgtagtagtgttagtttatggtatttttgtagggcgaaggtaaattagttttttatttttgtattaagacgcgtttttacgtttaggtcgatggggt

SEQ ID NO: 22524 - DNA, 793 bp, Artificial Sequence
  chemically treated genomic DNA (Homo sapiens) CpG-island No: 22524
  unsure (631)
accccatcgacctaaacgtaaaaacgcgtcttaatacaaaaataaaaaactaatttaccttcgccctacaaaaataccataaactaacactactacgcgatacgctaaacaataataacacgacaactctaacaaaataaaacgccccgattcaaacacgtcgtcactctacccgcgtacataatccgacgataaaaaaacgtctaacgacgatcaccgcccaaaacaaccaacgtacgaatatctataaaatacgtactaaaacccaacgtacgcgttttaaactaccaacgtaaccgaccaccacgattaattccttcccgcaaaccacgaaaattcgtaccctacgtctaaatttcaaaaaaaacaatctcgacgccaacaactaccgcacgaacattacgaaacatatcaaacaaaccattattaaacaaaaacgtttaaaactaaatatactaatacataacgaaaccgaacgtaataacataataaaatactttaacgaacacctcgacgaatttatctttacgcaaaacgattaaatacaaaactacgattcccgctacgtaaaaccaccgattatcattaataacattaaccgcccgacacccattacgtaaaataacgaaantatcccattctttaccacaaaccgtaaaaaaatctctaaaacccgtaaccattactctcgtataattcccgcgaaaaatatacccgtaaccctcgaaaaaataataaaaaaaaataacttttacatacctcttaatctttcaatttattactaacgttaatt

SEQ ID NO: 22525 - DNA, 521 bp, Artificial Sequence
  chemically treated genomic DNA (Homo sapiens) CpG-island No: 22525
  unsure (386..387, 392..393, 395)
taggcgtacgatattttggcgcgtggtgtcgtcggttgtggcggttagcgttataaacggtagcgtcgggaatcgttggcgtaattgatcgagcgcggtatatttcgggcggaaatcgtggttttattgggagatatagtgcgttttattaacggttaataatatcggattttagtgcgttagatgtttaagaaagttatttagtattaggcgtttcggggcgatataaagtagacgaatttgttcggtgcggtagtttgttattattttaagttgttgttcgcgggtttgcgtcgagttaaggtacgtcgtcgttacgtcgttggtttgtagttgatcgatttgatttatatcgattaagagatagtaagtattttcgttttatnnttttnntntttcgacgttatggttttgttatggtggtgtacgggtttggtcgttttttatgaacggacggggtagtacgtagtgcggcgaaaatgattagtttggttggaatgcgtaataattcgcggttttta

SEQ ID NO: 22526 - DNA, 521 bp, Artificial Sequence
  chemically treated genomic DNA (Homo sapiens) CpG-island No: 22526
  unsure (127, 129..130, 135..)
taaaaaccgcgaattattacgcattccaaccaaactaatcattttcgccgcactacgtactaccccgtccgttcataaaaaacgaccaaacccgtacaccaccataacaaaaccataacgtcgaaanannaaaannataaaacgaaaatacttactatctcttaatcgatataaatcaaatcgatcaactacaaaccaacgacgtaacgacgacgtaccttaactcgacgcaaacccgcgaacaacaacttaaaataataacaaactaccgcaccgaacaaattcgtctactttatatcgccccgaaacgcctaatactaaataactttcttaaacatctaacgcactaaaatccgatattattaaccgttaataaaacgcactatatctcccaataaaaccacgatttccgcccgaaatataccgcgctcgatcaattacgccaacgattcccgacgctaccgtttataacgctaaccgccacaaccgacgacaccacgcgccaaaatatcgtacgccta

SEQ ID NO: 22527 - DNA, 521 bp, Artificial Sequence
  chemically treated genomic DNA (Homo sapiens) CpG-island No: 22527
  unsure (127, 129..130, 135..)
tgaaaatcgcggattattgcgtattttaattaaattggttattttcgtcgtattgcgtattatttcgttcgtttatagagaacgattaaattcgtatattattatggtaaaattatgacgtcggggnannggggnnatggggcggaaatgtttgttattttttggtcgatgtaagttaggtcgattaattgtaagttaacggcgtggcggcggcgtgttttaattcgacgtaaattcgcgaatagtaatttgaagtgatgataggttgtcgtatcgggtaaattcgtttgttttatatcgtttcggaacgtttgatgttggataatttttttgagtatttggcgtattggaattcggtgttattagtcgttgatgaagcgtattgtattttttaatggggttacgattttcgttcggaatatgtcgcgttcggttagttgcgttagcggttttcgacgttgtcgtttatggcgttgatcgttatagtcgacgatattacgcgttaggatatcgtgcgtttg

SEQ ID NO: 22528 - DNA, 521 bp, Artificial Sequence
  chemically treated genomic DNA (Homo sapiens) CpG-island No: 22528
  unsure (386..387, 392..393, 395)
caaacgcacgatatcctaacgcgtaatatcgtcgactataacgatcaacgccataaacgacaacgtcgaaaaccgctaacgcaactaaccgaacgcgacatattccgaacgaaaatcgtaaccccattaaaaaatacaatacgcttcatcaacgactaataacaccgaattccaatacgccaaatactcaaaaaaattatccaacatcaaacgttccgaaacgatataaaacaaacgaatttacccgatacgacaacctatcatcacttcaaattactattcgcgaatttacgtcgaattaaaacacgccgccgccacgccgttaacttacaattaatcgacctaacttacatcgaccaaaaaataacaaacatttccgccccatnnccccnntnccccgacgtcataattttaccataataatatacgaatttaatcgttctctataaacgaacgaaataatacgcaatacgacgaaaataaccaatttaattaaaatacgcaataatccgcgattttca

SEQ ID NO: 22529 - DNA, 572 bp, Artificial Sequence
  chemically treated genomic DNA (Homo sapiens) CpG-island No: 22529
ttaggtcgtagtcggtaatttcgcgtatataatcgggtagtgatgtgattgtttgcgttgaaatggacgaatagtggggttacgtcggtgttaaattacgttagcgttggttgttttacgcgtatgataggatacggaggacggttgtggcgtacgttttcggtgaacgtattttggttatattggagcgttttttgagttcgttgtcggtttttaaggtttggtatagatgacggatggttggtcgttgtatgaattacgtttgaagggaaagtcgtattttatcgtaagcgttattttagcgtattgagcgttataattcgaattcgggataatagttggaaagtttggacgaatttattgtttttcgaatatatgcgggggttgggcggttttttaagtattcggttagggatgttttaaaaacgtgttaagtagtaggcgttggggttggaagtcgatatttttgtcgtcgggttaaagcgtaaagagagttacggtaaagtggtatttggtagcgtgtagtttgtcgttcgtaattttgatgttttttagggtgaattttcgttgtt

SEQ ID NO: 22530 - DNA, 572 bp, Artificial Sequence
  chemically treated genomic DNA (Homo sapiens) CpG-island No: 22530
aacaacgaaaattcaccctaaaaaacatcaaaattacgaacgacaaactacacgctaccaaataccactttaccgtaactctctttacgctttaacccgacgacaaaaatatcgacttccaaccccaacgcctactacttaacacgtttttaaaacatccctaaccgaatacttaaaaaaccgcccaacccccgcatatattcgaaaaacaataaattcgtccaaactttccaactattatcccgaattcgaattataacgctcaatacgctaaaataacgcttacgataaaatacgactttcccttcaaacgtaattcatacaacgaccaaccatccgtcatctataccaaaccttaaaaaccgacaacgaactcaaaaaacgctccaatataaccaaaatacgttcaccgaaaacgtacgccacaaccgtcctccgtatcctatcatacgcgtaaaacaaccaacgctaacgtaatttaacaccgacgtaaccccactattcgtccatttcaacgcaaacaatcacatcactacccgattatatacgcgaaattaccgactacgacctaa

SEQ ID NO: 22531 - DNA, 572 bp, Artificial Sequence
  chemically treated genomic DNA (Homo sapiens) CpG-island No: 22531
aatagcgaaaatttattttgaaaggtattaagattacgggcgatagattgtacgttgttaaatattattttatcgtggttttttttgcgttttagttcggcggtaaaaatatcggtttttagttttagcgtttgttatttagtacgtttttgaggtatttttagtcgaatgtttgagaaatcgtttaattttcgtatgtgttcggaaggtagtaaattcgtttaggttttttagttgttgtttcggattcggattatggcgtttaatgcgttgaggtaacgtttgcgataaagtgcggttttttttttaggcgtgatttatatagcggttagttattcgttatttatattagattttaaaggtcgatagcgggtttagaagacgttttagtgtggttagagtgcgtttatcgaagacgtgcgttataatcgtttttcgtattttgttatacgcgtaaaatagttagcgttgacgtgatttagtatcgacgtagttttattgttcgtttattttagcgtagataattatattattgttcggttgtatgcgcgaggttatcgattgcggtttga

SEQ ID NO: 22532 - DNA, 572 bp, Artificial Sequence
  chemically treated genomic DNA (Homo sapiens) CpG-island No: 22532
tcaaaccgcaatcgataacctcgcgcatacaaccgaacaataatataattatctacgctaaaataaacgaacaataaaactacgtcgatactaaatcacgtcaacgctaactattttacgcgtataacaaaatacgaaaaacgattataacgcacgtcttcgataaacgcactctaaccacactaaaacgtcttctaaacccgctatcgacctttaaaatctaatataaataacgaataactaaccgctatataaatcacgcctaaaaaaaaaaccgcactttatcgcaaacgttacctcaacgcattaaacgccataatccgaatccgaaacaacaactaaaaaacctaaacgaatttactaccttccgaacacatacgaaaattaaacgatttctcaaacattcgactaaaaatacctcaaaaacgtactaaataacaaacgctaaaactaaaaaccgatatttttaccgccgaactaaaacgcaaaaaaaaccacgataaaataatatttaacaacgtacaatctatcgcccgtaatcttaatacctttcaaaataaattttcgctatt

SEQ ID NO: 22533 - DNA, 1157 bp, Artificial Sequence
  chemically treated genomic DNA (Homo sapiens) CpG-island No: 22533
ttatcggggggggggggaagggggtaatgtttgtatgtttgttgattttgggggcgtatcgttatattacgcgcgatgttagcgtcggaagtgaaaattatatcgttttgagcgagtaggagttttttattcgcgcggggtaaaatttgttggttttaagttggtacgttaacggtttgtattatggcgtcggcgtcgagattgatttttggttgtacgtcggattcgacgtgttggttaacggtttacgcgtttatttgtcgtaggcgcgggcgcgttattaatcggcgttgttgttcgtttgtttataggtttcgtcggagatttttcgttagcgtttggaaaatcgtggtcgtgaaaacgttagtgaaattaacgttcgtttggcgcgcgtcgttcgttatattttataggattgttatacgtttaataatgacggtagtttgcgttagtcggtcgatacgttgttgacgttgatttattagaaggagaaatattatgtttgtttgtgagtttcgttcggttacgtagtacgatatcgacgcggtttacgcgttgatttgtgagttaaaataggcggagtttgattattacgcgtttcgcgtgggttttaacgttaatttgcgcgatttaaatatgcgttattatttggcgttgtttgatggcgaagttgtcggtatgatcggtttgtatttgtagttttatttgtattatgttaattggatcggcgaaatttaggagttggtggtaatgtcgtaggcgcgcggtttgaacgtcggtagtaagttattggcgtgggtagaagaagaagttcgttaggtcggggtcgaaatgatcgaattttcgattaacgtgaagcgttacgacgcgtatcgtttttatttgcgcgaaggttacgagtagagttattttcgttttattaaggcgttgtaatatgagtttgatttttacgtttatcggtatcggcggcgtatagggcgtttcggtatggggttgcgagtgtgcggtttgcgttagaacgcggcgttcgtcgtagtatcgtcgttaatcgtgtagcggcgtagtgaagtttaacgacgtaattattttgatcgacgtcgggttgtacgatttattcgatcgtttgtcggtcggattgttttaataattttttttta

SEQ ID NO: 22534 - DNA, 1157 bp, Artificial Sequence
  chemically treated genomic DNA (Homo sapiens) CpG-island No: 22534
taaaaaaaaattattaaaacaatccgaccgacaaacgatcgaataaatcgtacaacccgacgtcgatcaaaataattacgtcgttaaacttcactacgccgctacacgattaacgacgatactacgacgaacgccgcgttctaacgcaaaccgcacactcgcaaccccataccgaaacgccctatacgccgccgataccgataaacgtaaaaatcaaactcatattacaacgccttaataaaacgaaaataactctactcgtaaccttcgcgcaaataaaaacgatacgcgtcgtaacgcttcacgttaatcgaaaattcgatcatttcgaccccgacctaacgaacttcttcttctacccacgccaataacttactaccgacgttcaaaccgcgcgcctacgacattaccaccaactcctaaatttcgccgatccaattaacataatacaaataaaactacaaatacaaaccgatcataccgacaacttcgccatcaaacaacgccaaataataacgcatatttaaatcgcgcaaattaacgttaaaacccacgcgaaacgcgtaataatcaaactccgcctattttaactcacaaatcaacgcgtaaaccgcgtcgatatcgtactacgtaaccgaacgaaactcacaaacaaacataatatttctccttctaataaatcaacgtcaacaacgtatcgaccgactaacgcaaactaccgtcattattaaacgtataacaatcctataaaatataacgaacgacgcgcgccaaacgaacgttaatttcactaacgttttcacgaccacgattttccaaacgctaacgaaaaatctccgacgaaacctataaacaaacgaacaacaacgccgattaataacgcgcccgcgcctacgacaaataaacgcgtaaaccgttaaccaacacgtcgaatccgacgtacaaccaaaaatcaatctcgacgccgacgccataatacaaaccgttaacgtaccaacttaaaaccaacaaattttaccccgcgcgaataaaaaactcctactcgctcaaaacgatataattttcacttccgacgctaacatcgcgcgtaatataacgatacgcccccaaaatcaacaaacatacaaacattacccccttccccccccccccgataa

SEQ ID NO: 22535 - DNA, 1157 bp, Artificial Sequence
  chemically treated genomic DNA (Homo sapiens) CpG-island No: 22535
taagaaaaaattgttgaaataattcggtcgataagcgatcgggtagatcgtgtagttcggcgtcgattagggtgattgcgtcgttaaattttattacgtcgttgtacggttggcggcgatattgcggcgagcgtcgcgttttggcgtaggtcgtatattcgtagttttatgtcggaacgttttgtgcgtcgtcggtgtcggtgagcgtgagggttaggtttatgttatagcgttttggtgaagcggaagtggttttgttcgtagttttcgcgtagatagaaacggtgcgcgtcgtggcgttttacgttggtcgaaagttcggttatttcggtttcggtttggcgggtttttttttttgtttacgttagtaatttattgtcgacgtttagatcgcgcgtttgcggtattattattaatttttgaatttcgtcgatttagttgatatgatgtagatgaaattgtaaatgtaggtcgattatgtcgataatttcgttattaagtagcgttagatggtagcgtatgtttgggtcgcgtagattggcgttaaaatttacgcgaaacgcgtggtggttaaatttcgtttgttttagtttataaattagcgcgtaaatcgcgtcggtgtcgtattgcgtggtcgggcgaagtttataagtaggtatggtgtttttttttttgatggattagcgttagtagcgtgtcgatcgattggcgtaggttgtcgttattgttgagcgtatggtaattttgtggagtatagcgggcggcgcgcgttaggcgggcgttaattttattggcgtttttacggttacggttttttaggcgttggcggaggattttcggcgaaatttgtaaatagacgggtagtagcgtcgattgatagcgcgttcgcgtttgcggtagatgggcgcgtgagtcgttgattagtacgtcgaattcggcgtgtagttagagattaatttcgacgtcgacgttataatatagatcgttagcgtgttagtttaaggttaatagattttgtttcgcgcgggtaaaaaatttttgttcgtttagggcgatatggtttttattttcggcgttggtatcgcgcgtgatgtagcgatgcgtttttaggattagtaggtatataagtattgttttttttttttttttttcgatgg

SEQ ID NO: 22536 - DNA, 1157 bp, Artificial Sequence
  chemically treated genomic DNA (Homo sapiens) CpG-island No: 22536
ccatcgaaaaaaaaaaaaaaaaaacaatacttatatacctactaatcctaaaaacgcatcgctacatcacgcgcgataccaacgccgaaaataaaaaccatatcgccctaaacgaacaaaaattttttacccgcgcgaaacaaaatctattaaccttaaactaacacgctaacgatctatattataacgtcgacgtcgaaattaatctctaactacacgccgaattcgacgtactaatcaacgactcacgcgcccatctaccgcaaacgcgaacgcgctatcaatcgacgctactacccgtctatttacaaatttcgccgaaaatcctccgccaacgcctaaaaaaccgtaaccgtaaaaacgccaataaaattaacgcccgcctaacgcgcgccgcccgctatactccacaaaattaccatacgctcaacaataacgacaacctacgccaatcgatcgacacgctactaacgctaatccatcaaaaaaaaaaacaccatacctacttataaacttcgcccgaccacgcaatacgacaccgacgcgatttacgcgctaatttataaactaaaacaaacgaaatttaaccaccacgcgtttcgcgtaaattttaacgccaatctacgcgacccaaacatacgctaccatctaacgctacttaataacgaaattatcgacataatcgacctacatttacaatttcatctacatcatatcaactaaatcgacgaaattcaaaaattaataataataccgcaaacgcgcgatctaaacgtcgacaataaattactaacgtaaacaaaaaaaaaaacccgccaaaccgaaaccgaaataaccgaactttcgaccaacgtaaaacgccacgacgcgcaccgtttctatctacgcgaaaactacgaacaaaaccacttccgcttcaccaaaacgctataacataaacctaaccctcacgctcaccgacaccgacgacgcacaaaacgttccgacataaaactacgaatatacgacctacgccaaaacgcgacgctcgccgcaatatcgccgccaaccgtacaacgacgtaataaaatttaacgacgcaatcaccctaatcgacgccgaactacacgatctacccgatcgcttatcgaccgaattatttcaacaattttttctta

SEQ ID NO: 22537 - DNA, 767 bp, Artificial Sequence
  chemically treated genomic DNA (Homo sapiens) CpG-island No: 22537
tcgattagcgttcgttgtggattcggcggtgggaatggcgagtttagtaatttgtgtttcgcgtacgatggtttgcggtagtggatgcgtcgcgttttgttcgatcgtcgtcgttagtgttagtagtttagatttattaatattcgttgtcggatgaatcgcggtaacgcgcggtttatcgacggttagcgtatcggttttattaaacgttatttgagtaatacgatttagttgttttagcgtcgtttcgtttttaattaacgttttacgacgcgttgtcgtcgttagttcggaggtaatcgtcgtaggcgttgagataattaacgtatacgggtagttaattagtagtagcgttagttttttataaatttatttttgttagttggcggtaaatagtagcggtggtattagcgttattagtagagcgacggttataatcgcgggcgtatagatacggttgaaacggtcgataaatcgtttaatgggagcgcgacgtttttcggttttttcgattagttttagaattcggttaatggcgttggttttcggttttgatagtatttttaacgttattagacggtttacgttggtggtattagtagggattttatcgttcgttgcgcgttttatcggaatggattcgtcggttagggcgtttttattaaagagcgattagtaggatttatatagttgtttttttttttttgcgttaagtgtcgtggagtaaatagttttattgaggacgatataatgtttcggttagttaa

SEQ ID NO: 22538 - DNA, 767 bp, Artificial Sequence
  chemically treated genomic DNA (Homo sapiens) CpG-island No: 22538
ttaactaaccgaaacattatatcgtcctcaataaaactatttactccacgacacttaacgcaaaaaaaaaaaaacaactatataaatcctactaatcgctctttaataaaaacgccctaaccgacgaatccattccgataaaacgcgcaacgaacgataaaatccctactaataccaccaacgtaaaccgtctaataacgttaaaaatactatcaaaaccgaaaaccaacgccattaaccgaattctaaaactaatcgaaaaaaccgaaaaacgtcgcgctcccattaaacgatttatcgaccgtttcaaccgtatctatacgcccgcgattataaccgtcgctctactaataacgctaataccaccgctactatttaccgccaactaacaaaaataaatttataaaaaactaacgctactactaattaactacccgtatacgttaattatctcaacgcctacgacgattacctccgaactaacgacgacaacgcgtcgtaaaacgttaattaaaaacgaaacgacgctaaaacaactaaatcgtattactcaaataacgtttaataaaaccgatacgctaaccgtcgataaaccgcgcgttaccgcgattcatccgacaacgaatattaataaatctaaactactaacactaacgacgacgatcgaacaaaacgcgacgcatccactaccgcaaaccatcgtacgcgaaacacaaattactaaactcgccattcccaccgccgaatccacaacgaacgctaatcga

SEQ ID NO: 22539 - DNA, 767 bp, Artificial Sequence
  chemically treated genomic DNA (Homo sapiens) CpG-island No: 22539
ttaattggtcggaatattatgtcgtttttaataaagttatttgttttacggtatttagcgtaggggggggggggtaattgtgtgaattttgttggtcgttttttgatgaaagcgttttggtcggcgaatttatttcggtggagcgcgtaacgggcgataaagtttttgttggtgttattagcgtagatcgtttggtgacgttggaagtgttgttagaatcgggagttagcgttattgatcggattttgaaattgatcgaagaagtcgaagagcgtcgcgtttttattgagcggtttatcgatcgttttagtcgtatttatacgttcgcgattatggtcgtcgttttgttggtgacgttggtgttatcgttgttgtttgtcgttagttggtaggagtggatttataaagggttgacgttgttgttgattggttgttcgtgtgcgttagttattttaacgtttgcggcgattattttcgggttggcggcggtagcgcgtcgtggggcgttgattaaaggcggagcggcgttggaatagttgggtcgtgttatttaggtggcgtttgataaaatcggtacgttgatcgtcggtaaatcgcgcgttatcgcgatttattcggtaacgggtattagtgaatttgaattgttgatattggcggcggcggtcgagtaaggcgcgacgtatttattgtcgtaagttatcgtacgcgaagtataggttgttgaattcgttatttttatcgtcgaatttatagcgggcgttggtcgg

SEQ ID NO: 22540 - DNA, 767 bp, Artificial Sequence
  chemically treated genomic DNA (Homo sapiens) CpG-island No: 22540
ccgaccaacgcccgctataaattcgacgataaaaataacgaattcaacaacctatacttcgcgtacgataacttacgacaataaatacgtcgcgccttactcgaccgccgccgccaatatcaacaattcaaattcactaatacccgttaccgaataaatcgcgataacgcgcgatttaccgacgatcaacgtaccgattttatcaaacgccacctaaataacacgacccaactattccaacgccgctccgcctttaatcaacgccccacgacgcgctaccgccgccaacccgaaaataatcgccgcaaacgttaaaataactaacgcacacgaacaaccaatcaacaacaacgtcaaccctttataaatccactcctaccaactaacgacaaacaacaacgataacaccaacgtcaccaacaaaacgacgaccataatcgcgaacgtataaatacgactaaaacgatcgataaaccgctcaataaaaacgcgacgctcttcgacttcttcgatcaatttcaaaatccgatcaataacgctaactcccgattctaacaacacttccaacgtcaccaaacgatctacgctaataacaccaacaaaaactttatcgcccgttacgcgctccaccgaaataaattcgccgaccaaaacgctttcatcaaaaaacgaccaacaaaattcacacaattacccccccccccctacgctaaataccgtaaaacaaataactttattaaaaacgacataatattccgaccaattaa

SEQ ID NO: 22541 - DNA, 746 bp, Artificial Sequence
  chemically treated genomic DNA (Homo sapiens) CpG-island No: 22541
ggatatcgtacgttgtttttcggttatgcggtgatgtttttcgagttgatttcgtattgtaatatcgtttaattcgcgcgtggtgcgggattatttattttattattcgtaatttgttatcgttttattaattataattaaacgatagtagttcgcgtagtattgggttcgtatattatgtggatggggattgttgtcgattgcgtgattagcgttatttttttgacggcgatggtattaaatttgttgttaattggattgatgaaaagcgtattttacgttacgttgagttggggcgattggtttttcgggatgttgtcgtttagtattttattggttttgttggttttttggttggtttacgtgttgtattcgtcggtattgaagtttggcgattaggtgtcgcgttgggtagagacggaattgtaggtaatgggttcgttttgttcgcgtgaaaaacggatgttggggttgatggtaggcgcgttggtgttgtggattttcggcggtgattatatcgatgtcgcgatggtcggttatagcgtggtggtattgatgttgtttttgcgtattattagttgggacgatattgttagtaataaagcggcgtggaacgtttttttttggttggtttcgtttattattttcgttatcggatttaataatatcggttttattagttggtttggtaaattgttagtaggtagtttaagcggttattcgttaacgatggtgatggtggcgtt

SEQ ID NO: 22542 - DNA, 746 bp, Artificial Sequence
  chemically treated genomic DNA (Homo sapiens) CpG-island No: 22542
aacgccaccatcaccatcgttaacgaataaccgcttaaactacctactaacaatttaccaaaccaactaataaaaccgatattattaaatccgataacgaaaataataaacgaaaccaaccaaaaaaaaacgttccacgccgctttattactaacaatatcgtcccaactaataatacgcaaaaacaacatcaataccaccacgctataaccgaccatcgcgacatcgatataatcaccgccgaaaatccacaacaccaacgcgcctaccatcaaccccaacatccgtttttcacgcgaacaaaacgaacccattacctacaattccgtctctacccaacgcgacacctaatcgccaaacttcaataccgacgaatacaacacgtaaaccaaccaaaaaaccaacaaaaccaataaaatactaaacgacaacatcccgaaaaaccaatcgccccaactcaacgtaacgtaaaatacgcttttcatcaatccaattaacaacaaatttaataccatcgccgtcaaaaaaataacgctaatcacgcaatcgacaacaatccccatccacataatatacgaacccaatactacgcgaactactatcgtttaattataattaataaaacgataacaaattacgaataataaaataaataatcccgcaccacgcgcgaattaaacgatattacaatacgaaatcaactcgaaaaacatcaccgcataaccgaaaaacaacgtacgatatcc

SEQ ID NO: 22543 - DNA, 746 bp, Artificial Sequence
  chemically treated genomic DNA (Homo sapiens) CpG-island No: 22543
aacgttattattattatcgttggcgaataatcgtttaagttgtttgttaatagtttgttaaattagttaataaaatcggtgttgttgagttcggtggcgagggtgataagcgaggttagttagaagaaaacgttttacgtcgttttattattgataatgtcgttttaattgataatgcgtagaagtagtattagtgttattacgttgtaatcgattatcgcggtatcgatataattatcgtcgaaaatttatagtattagcgcgtttattattagttttagtattcgttttttacgcgaatagagcgggtttattgtttgtagtttcgtttttgtttagcgcggtatttgatcgttagattttagtatcggcgggtatagtacgtaagttagttagggaattagtagaattagtaaaatgttgagcggtaatatttcgaggaattagtcgttttaatttagcgtggcgtgagatgcgttttttattagtttaattaatagtaagtttggtgttatcgtcgttaagaaaatggcgttggttacgtagtcggtaataatttttatttatatgatgtacgagtttaatgttgcgcgaattgttgtcgtttggttgtgattgatagagcggtggtaggttacggatgatgggatagataatttcgtattacgcgcgagttggacggtgttatagtgcgagattagttcggagaatattatcgtatagtcgagaaatagcgtgcgatgttt

SEQ ID NO: 22544 - DNA, 746 bp, Artificial Sequence
  chemically treated genomic DNA (Homo sapiens) CpG-island No: 22544
aaacatcgcacgctatttctcgactatacgataatattctccgaactaatctcgcactataacaccgtccaactcgcgcgtaatacgaaattatctatcccatcatccgtaacctaccaccgctctatcaatcacaaccaaacgacaacaattcgcgcaacattaaactcgtacatcatataaataaaaattattaccgactacgtaaccaacgccattttcttaacgacgataacaccaaacttactattaattaaactaataaaaaacgcatctcacgccacgctaaattaaaacgactaattcctcgaaatattaccgctcaacattttactaattctactaattccctaactaacttacgtactatacccgccgatactaaaatctaacgatcaaataccgcgctaaacaaaaacgaaactacaaacaataaacccgctctattcgcgtaaaaaacgaatactaaaactaataataaacgcgctaatactataaattttcgacgataattatatcgataccgcgataatcgattacaacgtaataacactaatactacttctacgcattatcaattaaaacgacattatcaataataaaacgacgtaaaacgttttcttctaactaacctcgcttatcaccctcgccaccgaactcaacaacaccgattttattaactaatttaacaaactattaacaaacaacttaaacgattattcgccaacgataataataataacgtt

SEQ ID NO: 22545 - DNA, 685 bp, Artificial Sequence
  chemically treated genomic DNA (Homo sapiens) CpG-island No: 22545
gtcggataatcgtatcgttcgtgacgcgtattatttttatcggtatgatcgttacggtaggttgatagagaaaatcgattttatttcggaaggggttattcgtacggatgatgagcggatttatcggtattattacgatagttagtatcggttggtgtattatacgcggatataatatgaagagtcgttggtcgaaagtcgttatttttacgattcgttgggtcgtagggtggtaaaacgggtgtggcggcgtgaacgggatttgacgggttggatgtcgttgttacggaaatcgtaagtgatttggtacggttgggacggcgatcggttgattacgatatagaacgataggagtcgtatttagacgatttattagtcggggagttttacgttatttattagggtcgaaattgttatcggtgagttggcgaaaacgtagcgtcgtagtttggcggatgttttttagtagttcggcggcgaagacggtggtagtgggggattttcgtcggtacggtgtagatgttcgatcggttggaaagtgaaattttggttgatcgggtgagtgaggaaagtcgtcgttggttggtatcgtgcggtttgatcgtggagtagatgaaaaagattagtatatatgtaagtatagttcgttataagtgtacggttatgtttgtatgtttgtaggtta

SEQ ID NO: 22546 - DNA, 685 bp, Artificial Sequence
  chemically treated genomic DNA (Homo sapiens) CpG-island No: 22546
taacctacaaacatacaaacataaccgtacacttataacgaactatacttacatatatactaatctttttcatctactccacgatcaaaccgcacgataccaaccaacgacgactttcctcactcacccgatcaaccaaaatttcactttccaaccgatcgaacatctacaccgtaccgacgaaaatcccccactaccaccgtcttcgccgccgaactactaaaaaacatccgccaaactacgacgctacgttttcgccaactcaccgataacaatttcgaccctaataaataacgtaaaactccccgactaataaatcgtctaaatacgactcctatcgttctatatcgtaatcaaccgatcgccgtcccaaccgtaccaaatcacttacgatttccgtaacaacgacatccaacccgtcaaatcccgttcacgccgccacacccgttttaccaccctacgacccaacgaatcgtaaaaataacgactttcgaccaacgactcttcatattatatccgcgtataatacaccaaccgatactaactatcgtaataataccgataaatccgctcatcatccgtacgaataaccccttccgaaataaaatcgattttctctatcaacctaccgtaacgatcataccgataaaaataatacgcgtcacgaacgatacgattatccgac

SEQ ID NO: 22547 - DNA, 685 bp, Artificial Sequence
  chemically treated genomic DNA (Homo sapiens) CpG-island No: 22547
tgatttgtaggtatgtaagtatagtcgtatatttgtggcggattatgtttgtatgtatgttggttttttttatttgttttacggttaggtcgtacgatgttagttagcggcggttttttttatttattcggttagttaggattttattttttagtcggtcgagtatttgtatcgtgtcggcgggaattttttattgttatcgttttcgtcgtcggattgttgaagggtattcgttaggttgcggcgttgcgttttcgttagtttatcggtggtagtttcgattttgatgagtggcgtgaagtttttcggttgataaatcgtttggatgcggtttttgtcgttttgtatcgtggttagtcggtcgtcgttttagtcgtattaggttatttgcggttttcgtgatagcgatatttagttcgttaggtttcgtttacgtcgttatattcgttttgttattttgcggtttagcgggtcgtaaagatagcgattttcgattagcggttttttatattgtgttcgcgtgtagtgtattagtcggtgttgattgtcgtaatggtatcggtgagttcgtttattattcgtgcggataatttttttcgggatgaggtcggttttttttgttagtttgtcgtgacggttatatcggtaaagatagtgcgcgttacgggcgatacggttattcggt

SEQ ID NO: 22548 - DNA, 685 bp, Artificial Sequence
  chemically treated genomic DNA (Homo sapiens) CpG-island No: 22548
accgaataaccgtatcgcccgtaacgcgcactatctttaccgatataaccgtcacgacaaactaacaaaaaaaaccgacctcatcccgaaaaaaattatccgcacgaataataaacgaactcaccgataccattacgacaatcaacaccgactaatacactacacgcgaacacaatataaaaaaccgctaatcgaaaatcgctatctttacgacccgctaaaccgcaaaataacaaaacgaatataacgacgtaaacgaaacctaacgaactaaatatcgctatcacgaaaaccgcaaataacctaatacgactaaaacgacgaccgactaaccacgatacaaaacgacaaaaaccgcatccaaacgatttatcaaccgaaaaacttcacgccactcatcaaaatcgaaactaccaccgataaactaacgaaaacgcaacgccgcaacctaacgaatacccttcaacaatccgacgacgaaaacgataacaataaaaaattcccgccgacacgatacaaatactcgaccgactaaaaaataaaatcctaactaaccgaataaataaaaaaaaccgccgctaactaacatcgtacgacctaaccgtaaaacaaataaaaaaaaccaacatacatacaaacataatccgccacaaatatacgactatacttacatacctacaaatca

SEQ ID NO: 22549 - DNA, 857 bp, Artificial Sequence
  chemically treated genomic DNA (Homo sapiens) CpG-island No: 22549
  unsure (722, 789)
gcgtagacgttggtatagttgttttattaatttaatattcgtcgggttatgattatgatgacgcggttagagttttggcggcgttagttttttatcgagatcgtggtataaagttgcgaaacggatatcgatttgcggatttagtatcgtcgttattgagagcgttattaaggtatgaatattcgtatcgattttcggatgttatttggtaggggtcggaacgttaaatagtgcgttaattttcgggaataaaacgcgtagtgcgtcgtaatcgcgtagtatttggaagaatatttgtggattgcgggtggtgagggcgtttttcgtttttttttatattcgtttaggcgttaggtgttttagtttattcgtatgggttatttcgcgtattaacgttagagttttatcggtaatacgaaaatcgaggtgggtataacgcgtagtaaaacgcgttacgcgtaatacgcgtaacggattttcgttaaaagcgggggaaatatggcgtaatagacgattttgtagatcgtttagatcgttgtacgggtcgataatttcgtcgttatcgttttgggttagcgtattaatggttagatcgcgacgtttaagattattttttagcgtgatattcggtgcggtatagtaagtaaaatcggtgtaatcggaatcggattttcgttcggtacgtgttagcgtatattttttatgcgtttgcggatataganatatagggaaatcgcggttttattgttggtaggtcgcgtcgagtattttttgtggcgtattgtcgantatttatttatttttgttttgaacggtaggttttatatgtatttcggtgtaagtttgttttggaggtt

SEQ ID NO: 22550 - DNA, 857 bp, Artificial Sequence
  chemically treated genomic DNA (Homo sapiens) CpG-island No: 22550
  unsure (69, 136)
aacctccaaaacaaacttacaccgaaatacatataaaacctaccgttcaaaacaaaaataaataaatantcgacaatacgccacaaaaaatactcgacgcgacctaccaacaataaaaccgcgatttccctatatntctatatccgcaaacgcataaaaaatatacgctaacacgtaccgaacgaaaatccgattccgattacaccgattttacttactataccgcaccgaatatcacgctaaaaaataatcttaaacgtcgcgatctaaccattaatacgctaacccaaaacgataacgacgaaattatcgacccgtacaacgatctaaacgatctacaaaatcgtctattacgccatatttcccccgcttttaacgaaaatccgttacgcgtattacgcgtaacgcgttttactacgcgttatacccacctcgattttcgtattaccgataaaactctaacgttaatacgcgaaataacccatacgaataaactaaaacacctaacgcctaaacgaatataaaaaaaaacgaaaaacgccctcaccacccgcaatccacaaatattcttccaaatactacgcgattacgacgcactacgcgttttattcccgaaaattaacgcactatttaacgttccgacccctaccaaataacatccgaaaatcgatacgaatattcataccttaataacgctctcaataacgacgatactaaatccgcaaatcgatatccgtttcgcaactttataccacgatctcgataaaaaactaacgccgccaaaactctaaccgcgtcatcataatcataacccgacgaatattaaattaataaaacaactataccaacgtctacgc

SEQ ID NO: 22551 - DNA, 857 bp, Artificial Sequence
  chemically treated genomic DNA (Homo sapiens) CpG-island No: 22551
  unsure (69, 136)
agtttttaaggtaggtttgtatcggaatgtatgtgaggtttatcgtttaagatagagatgggtgggtgntcggtagtacgttatagaagatgttcgacgcggtttattagtagtagggtcgcgatttttttgtgtntttgtattcgtaaacgtatgaagagtatgcgttggtacgtatcgaacggaaattcggtttcggttatatcggttttatttgttatgtcgtatcggatgttacgttggaagatgattttaagcgtcgcgatttgattattaatgcgttggtttaggacgataacggcgagattatcgattcgtataacggtttgggcgatttgtaaaatcgtttgttgcgttatgtttttttcgtttttggcgaagattcgttacgcgtattgcgcgtggcgcgttttgttgcgcgttatgtttatttcggttttcgtattgtcgatgaaattttggcgttgatgcgcgagatgatttatgcgggtgaattggaatatttgacgtttgaacgggtatggaaagagacggaaagcgtttttattattcgtaatttataggtgtttttttaggtattgcgcgattgcggcgtattgcgcgttttattttcggaaattgacgtattgtttggcgtttcggtttttgttaagtggtattcggaaatcgatacgggtatttatattttaatgacgtttttaatggcggcgatgttgagttcgtaggtcgatgttcgtttcgtaattttatgttacgatttcggtaaagggttgacgtcgttagaattttggtcgcgttattatggttatggttcggcgggtgttgagttagtggaataattatgttagcgtttgcgt

SEQ ID NO: 22552 - DNA, 857 bp, Artificial Sequence
  chemically treated genomic DNA (Homo sapiens) CpG-island No: 22552
  unsure (722, 789)
acgcaaacgctaacataattattccactaactcaacacccgccgaaccataaccataataacgcgaccaaaattctaacgacgtcaaccctttaccgaaatcgtaacataaaattacgaaacgaacatcgacctacgaactcaacatcgccgccattaaaaacgtcattaaaatataaatacccgtatcgatttccgaataccacttaacaaaaaccgaaacgccaaacaatacgtcaatttccgaaaataaaacgcgcaatacgccgcaatcgcgcaatacctaaaaaaacacctataaattacgaataataaaaacgctttccgtctctttccatacccgttcaaacgtcaaatattccaattcacccgcataaatcatctcgcgcatcaacgccaaaatttcatcgacaatacgaaaaccgaaataaacataacgcgcaacaaaacgcgccacgcgcaatacgcgtaacgaatcttcgccaaaaacgaaaaaaacataacgcaacaaacgattttacaaatcgcccaaaccgttatacgaatcgataatctcgccgttatcgtcctaaaccaacgcattaataatcaaatcgcgacgcttaaaatcatcttccaacgtaacatccgatacgacataacaaataaaaccgatataaccgaaaccgaatttccgttcgatacgtaccaacgcatactcttcatacgtttacgaatacaaanacacaaaaaaatcgcgaccctactactaataaaccgcgtcgaacatcttctataacgtactaccgancacccacccatctctatcttaaacgataaacctcacatacattccgatacaaacctaccttaaaaact

SEQ ID NO: 22553 - DNA, 525 bp, Artificial Sequence
  chemically treated genomic DNA (Homo sapiens) CpG-island No: 22553
ggttacggcggcgtacgtggattagtaagagcgtagcgtcggttacgttcgcggttacgagtagttttagagtcggaggtaaaaggtagcgttgagggttttcgggtttgaggttcggcggggtcgcgggtaaggcgtttgcgtcgtcggggtgtattgggaatttatatcgcgtttttatgtagtcgggagcgtaagcgtagacgaggtcggagaagtgggcgtagtagcggtcgtcgtgagtataggggcgcgcggcgtacgggttcgcgcgttcgcggtagtcgcggtcgtcgaagtttagcgcgtaggagtagcggtgcgcgtcgtcgttttttatatacgtgtcgtcgttagcgtaggcgcggttcgcgtagtcgtttaggtcgtgttcgtagcgaggattcgcgaagtcggcgcggtagcggtagcgtagggcgtggtttaggtttaggtagagttcgtttgtggggaagggaatattagagggcgtagttcgggagtcggggatttatttgttcgcgt

SEQ ID NO: 22554 - DNA, 525 bp, Artificial Sequence
  chemically treated genomic DNA (Homo sapiens) CpG-island No: 22554
acgcgaacaaataaatccccgactcccgaactacgccctctaatattcccttccccacaaacgaactctacctaaacctaaaccacgccctacgctaccgctaccgcgccgacttcgcgaatcctcgctacgaacacgacctaaacgactacgcgaaccgcgcctacgctaacgacgacacgtatataaaaaacgacgacgcgcaccgctactcctacgcgctaaacttcgacgaccgcgactaccgcgaacgcgcgaacccgtacgccgcgcgcccctatactcacgacgaccgctactacgcccacttctccgacctcgtctacgcttacgctcccgactacataaaaacgcgatataaattcccaatacaccccgacgacgcaaacgccttacccgcgaccccgccgaacctcaaacccgaaaaccctcaacgctaccttttacctccgactctaaaactactcgtaaccgcgaacgtaaccgacgctacgctcttactaatccacgtacgccgccgtaacc

SEQ ID NO: 22555 - DNA, 525 bp, Artificial Sequence
  chemically treated genomic DNA (Homo sapiens) CpG-island No: 22555
gcgcgggtaggtgggttttcggttttcggattgcgttttttgatgtttttttttttataggcggattttgtttggatttgggttacgttttgcgttgtcgttgtcgcgtcggtttcgcgggttttcgttgcgagtacgatttggacgattgcgcgggtcgcgtttgcgttaacggcggtacgtgtgtggagggcggcggcgcgtatcgttgtttttgcgcgttgggtttcggcggtcgcgattgtcgcgagcgcgcggattcgtgcgtcgcgcgtttttgtgtttacggcggtcgttgttacgtttattttttcggtttcgtttgcgtttgcgttttcggttatatgggagcgcggtgtgagtttttagtgtatttcgacggcgtaagcgttttgttcgcggtttcgtcgggttttaggttcggggatttttagcgttattttttgttttcggttttgggattgttcgtggtcgcgggcgtggtcggcgttgcgtttttgttggtttacgtgcgtcgtcgtggtt

SEQ ID NO: 22556 - DNA, 525 bp, Artificial Sequence
  chemically treated genomic DNA (Homo sapiens) CpG-island No: 22556
aaccacgacgacgcacgtaaaccaacaaaaacgcaacgccgaccacgcccgcgaccacgaacaatcccaaaaccgaaaacaaaaaataacgctaaaaatccccgaacctaaaacccgacgaaaccgcgaacaaaacgcttacgccgtcgaaatacactaaaaactcacaccgcgctcccatataaccgaaaacgcaaacgcaaacgaaaccgaaaaaataaacgtaacaacgaccgccgtaaacacaaaaacgcgcgacgcacgaatccgcgcgctcgcgacaatcgcgaccgccgaaacccaacgcgcaaaaacaacgatacgcgccgccgccctccacacacgtaccgccgttaacgcaaacgcgacccgcgcaatcgtccaaatcgtactcgcaacgaaaacccgcgaaaccgacgcgacaacgacaacgcaaaacgtaacccaaatccaaacaaaatccgcctataaaaaaaaaaacatcaaaaaacgcaatccgaaaaccgaaaacccacctacccgcgc

SEQ ID NO: 22557 - DNA, 504 bp, Artificial Sequence
  chemically treated genomic DNA (Homo sapiens) CpG-island No: 22557
gggggtttggcgcggaggttaggttcgggacgttgttggggatgggttcgggtatagggttcggtattcgcgttatggatcgcgtagtttcggttattgggttttttcgagttttttgtattcgaatttcgtcgtcgattgtttttcgtagtacgtcgttgacgttattcgcggtgtttatttgtgggatattgttattttcggggagttcggatatttttaatagtttagtcggtttcgttatagttttagcgtttttacggagattggaataacggtattgtattgttgtatgcgagatttgcgtatgcgcgagttttagtgagcgcgtaaacgttgtgcgtgttagagtgtgcgtatgcgtaagtacggtggttaattttttagcgttttttagcggttttgagtagttattacgtttgtagtcgtttttggttttttgagcgtttgaggatttgcggattgcgcggtattttaaattataattattttagtattaatgta

SEQ ID NO: 22558 - DNA, 504 bp, Artificial Sequence
  chemically treated genomic DNA (Homo sapiens) CpG-island No: 22558
tacattaatactaaaataattataatttaaaataccgcgcaatccgcaaatcctcaaacgctcaaaaaaccaaaaacgactacaaacgtaataactactcaaaaccgctaaaaaacgctaaaaaattaaccaccgtacttacgcatacgcacactctaacacgcacaacgtttacgcgctcactaaaactcgcgcatacgcaaatctcgcatacaacaatacaataccgttattccaatctccgtaaaaacgctaaaactataacgaaaccgactaaactattaaaaatatccgaactccccgaaaataacaatatcccacaaataaacaccgcgaataacgtcaacgacgtactacgaaaaacaatcgacgacgaaattcgaatacaaaaaactcgaaaaaacccaataaccgaaactacgcgatccataacgcgaataccgaaccctatacccgaacccatccccaacaacgtcccgaacctaacctccgcgccaaaccccc

SEQ ID NO: 22559 - DNA, 504 bp, Artificial Sequence
  chemically treated genomic DNA (Homo sapiens) CpG-island No: 22559
tatattaatattgaagtggttgtaatttaagatatcgcgtagttcgtaggtttttaggcgtttagaggattagaggcggttatagacgtaatggttatttaggatcgttagggaacgttagaggattggttatcgtgtttacgtatgcgtatattttggtacgtatagcgtttacgcgtttattgagattcgcgtatgcgtaggtttcgtatatagtagtgtagtgtcgttattttagttttcgtagaaacgttgggattatggcggagtcgattgggttgttggagatgttcgagtttttcggagatagtagtgttttataggtgggtatcgcgagtggcgttagcgacgtattgcggggggtagtcggcggcggggttcgggtgtaggaggttcgggaaggtttagtggtcgaagttgcgcggtttatggcgcggatgtcgggttttgtgttcgggtttatttttagtagcgtttcgggtttggttttcgcgttagattttt

SEQ ID NO: 22560 - DNA, 504 bp, Artificial Sequence
  chemically treated genomic DNA (Homo sapiens) CpG-island No: 22560
aaaaatctaacgcgaaaaccaaacccgaaacgctactaaaaataaacccgaacacaaaacccgacatccgcgccataaaccgcgcaacttcgaccactaaaccttcccgaacctcctacacccgaaccccgccgccgactaccccccgcaatacgtcgctaacgccactcgcgatacccacctataaaacactactatctccgaaaaactcgaacatctccaacaacccaatcgactccgccataatcccaacgtttctacgaaaactaaaataacgacactacactactatatacgaaacctacgcatacgcgaatctcaataaacgcgtaaacgctatacgtaccaaaatatacgcatacgtaaacacgataaccaatcctctaacgttccctaacgatcctaaataaccattacgtctataaccgcctctaatcctctaaacgcctaaaaacctacgaactacgcgatatcttaaattacaaccacttcaatattaatata

SEQ ID NO: 22561 - DNA, 1175 bp, Artificial Sequence
  chemically treated genomic DNA (Homo sapiens) CpG-island No: 22561
  unsure (89, 115, 182, 192, 405, 469, 482, 640, 650, 664, 678, 691)
  unsure (697, 713, 738, 782, 1115)
tttcgatttcggcgggtttagcgttattcggtttttcggggtgtggaatattgagcgaggtaggtgcggcgggagtatgcgcgcggggncgggtagggggcggttttcgcgtttnttatttcgcgcgtgtattttcgcgtttttttcgtcgggtatcgcggggtagcggcgtcgtagtttgnggttggcggnaatttcgcgtttcgattcgtttttcgtttgtagttcggtcggcgttgcgggtaggcgtcgtttcgttgggggtaagaaggacgtcgtcgttcgcgtgggatggtcgcgagttcgcgtgggtgtttacggtcgtcgtcgcgcggggtggttttattttcgggtaggtagaggggtttgtacgattttcgcggcgagggtcgggtcggtgggggncggtggcggttggggatagtttcggtttcggtttaggttttttttttttttttttcgtcgtcgngggcgcgcgtcgnggtttttcgcgagaggcgttgttttatttgtcgtttattttggacgggcgcggtcgtcgtagagttcggcgtttcggttagtcgcgagggtagggtcggggtgttaggcgcggttatttgggcgttttggagttagcgtagtttgggatcgggggagncgggacgggnacgggatttttgangggtttttaggtangtttttcggttantcgagncgttcggcggtgggtnatttggtttttgttttttttggggnttaacgttttcgtttgttcgcgtgttttttttagtcgataagtngtcgtgtgttcggacgggcgagcgttgtttttttttattcgttttttgtttttgtttttttttgcgagttttgtttagtttcgggagcgggagtttagggagtgcgcgtagggcgggcgggcgtttggttagtttgggacggcggtttttaggtttttgttatcgtttggaattgcggggggcgcgtcggttatagtcgttttcgtttgtttttcgggtttttttgggttcgtttggttttaggtggacgcgagtcgagttgggtatatttgggttagcgtcgtatttatttgcgggattggtgagagcgttttcgcgaggtcgtaaattttngggtgggtattgttttttgtttttgattttttttagttattggttaaagtgcgaagtgtg

SEQ ID NO: 22562 - DNA, 1175 bp, Artificial Sequence
  chemically treated genomic DNA (Homo sapiens) CpG-island No: 22562
  unsure (61, 394, 438, 463, 479, 485, 498, 512, 526, 536, 694, 707)
  unsure (771, 984, 994, 1061, 1087)
cacacttcgcactttaaccaataactaaaaaaaatcaaaaacaaaaaacaatacccacccnaaaatttacgacctcgcgaaaacgctctcaccaatcccgcaaataaatacgacgctaacccaaatatacccaactcgactcgcgtccacctaaaaccaaacgaacccaaaaaaacccgaaaaacaaacgaaaacgactataaccgacgcgccccccgcaattccaaacgataacaaaaacctaaaaaccgccgtcccaaactaaccaaacgcccgcccgccctacgcgcactccctaaactcccgctcccgaaactaaacaaaactcgcaaaaaaaaacaaaaacaaaaaacgaataaaaaaaaacaacgctcgcccgtccgaacacacgacnacttatcgactaaaaaaaacacgcgaacaaacgaaaacgttaanccccaaaaaaaacaaaaaccaaatnacccaccgccgaacgnctcgantaaccgaaaaacntacctaaaaacccntcaaaaatcccgtncccgtcccgnctcccccgatcccaaactacgctaactccaaaacgcccaaataaccgcgcctaacaccccgaccctaccctcgcgactaaccgaaacgccgaactctacgacgaccgcgcccgtccaaaataaacgacaaataaaacaacgcctctcgcgaaaaaccncgacgcgcgcccncgacgacgaaaaaaaaaaaaaaaaaacctaaaccgaaaccgaaactatccccaaccgccaccgncccccaccgacccgaccctcgccgcgaaaatcgtacaaacccctctacctacccgaaaataaaaccaccccgcgcgacgacgaccgtaaacacccacgcgaactcgcgaccatcccacgcgaacgacgacgtccttcttacccccaacgaaacgacgcctacccgcaacgccgaccgaactacaaacgaaaaacgaatcgaaacgcgaaattnccgccaaccncaaactacgacgccgctaccccgcgatacccgacgaaaaaaacgcgaaaatacacgcgcgaaataanaaacgcgaaaaccgccccctacccgnccccgcgcgcatactcccgccgcacctacctcgctcaatattccacaccccgaaaaaccgaataacgctaaacccgccgaaatcgaaa

SEQ ID NO: 22563 - DNA, 1175 bp, Artificial Sequence
  chemically treated genomic DNA (Homo sapiens) CpG-island No: 22563
  unsure (61, 394, 438, 463, 479, 485, 498, 512, 526, 536, 694, 707)
  unsure (771, 984, 994, 1061, 1087)
tatatttcgtattttaattagtgattaagggagattaaaagtaggggataatatttatttnggaatttgcgatttcgcgaaaacgtttttattaatttcgtaggtaagtgcggcgttggtttaggtgtgtttagttcgattcgcgtttatttgggattaagcgggtttaagaaggttcggagagtaggcgagggcgattgtggtcggcgcgtttttcgtagttttaggcggtggtaggagtttgagagtcgtcgttttaggttggttaggcgttcgttcgttttgcgcgtattttttgggttttcgttttcgaggttgggtagaattcgtagaggaagataagggtagaaagcgggtggagggaggtagcgttcgttcgttcgggtatacgatnatttgtcggttgagggggatacgcgggtagacgggggcgttagnttttagaggaaataaaagttaaatngtttatcgtcgggcgnttcgantggtcggaggatntgtttgggggtttnttaggagtttcgtnttcgtttcgnttttttcggttttaggttgcgttggttttagggcgtttaggtagtcgcgtttggtatttcgattttgttttcgcggttgatcgaggcgtcgggttttgcggcggtcgcgttcgtttaaagtaggcgataagtgaggtagcgtttttcgcggggagttncggcgcgcgtttncggcggcgaaagagaaagagaaagagtttgggtcgggatcggggttatttttaatcgttatcgntttttatcggttcggttttcgtcgcgggagtcgtgtaggtttttttatttgttcggggatggggttatttcgcgcggcggcggtcgtgggtatttacgcgggttcgcgattattttacgcgggcggcggcgttttttttatttttagcggagcggcgtttgttcgtaacgtcgatcgagttataggcggggggcgagtcggagcgcgaggttntcgttagttntaggttgcggcgtcgttgtttcgcggtgttcggcgggaggggcgcgagggtgtacgcgcggggtggngggcgcgggagtcgttttttgttcgntttcgcgcgtatgttttcgtcgtatttgtttcgtttagtgttttatatttcggggagtcgggtggcgttgggttcgtcgaggtcgggg

SEQ ID NO: 22564 - DNA, 1175 bp, Artificial Sequence
  chemically treated genomic DNA (Homo sapiens) CpG-island No: 22564
  unsure (89, 115, 182, 192, 405, 469, 482, 640, 650, 664, 678, 691)
  unsure (697, 713, 738, 782, 1115)
ccccgacctcgacgaacccaacgccacccgactccccgaaatataaaacactaaacgaaacaaatacgacgaaaacatacgcgcgaaancgaacaaaaaacgactcccgcgcccnccaccccgcgcgtacaccctcgcgcccctcccgccgaacaccgcgaaacaacgacgccgcaacctanaactaacganaacctcgcgctccgactcgccccccgcctataactcgatcgacgttacgaacaaacgccgctccgctaaaaataaaaaaaacgccgccgcccgcgtaaaataatcgcgaacccgcgtaaatacccacgaccgccgccgcgcgaaataaccccatccccgaacaaataaaaaaacctacacgactcccgcgacgaaaaccgaaccgataaaaancgataacgattaaaaataaccccgatcccgacccaaactctttctctttctctttcgccgccgnaaacgcgcgccgnaactccccgcgaaaaacgctacctcacttatcgcctactttaaacgaacgcgaccgccgcaaaacccgacgcctcgatcaaccgcgaaaacaaaatcgaaataccaaacgcgactacctaaacgccctaaaaccaacgcaacctaaaaccgaaaaaancgaaacgaanacgaaactcctaanaaacccccaaacanatcctccgaccantcgaancgcccgacgataaacnatttaacttttatttcctctaaaanctaacgcccccgtctacccgcgtatccccctcaaccgacaaatnatcgtatacccgaacgaacgaacgctacctccctccacccgctttctacccttatcttcctctacgaattctacccaacctcgaaaacgaaaacccaaaaaatacgcgcaaaacgaacgaacgcctaaccaacctaaaacgacgactctcaaactcctaccaccgcctaaaactacgaaaaacgcgccgaccacaatcgccctcgcctactctccgaaccttcttaaacccgcttaatcccaaataaacgcgaatcgaactaaacacacctaaaccaacgccgcacttacctacgaaattaataaaaacgttttcgcgaaatcgcaaattccnaaataaatattatcccctacttttaatctcccttaatcactaattaaaatacgaaatata

SEQ ID NO: 22565 - DNA, 588 bp, Artificial Sequence
  chemically treated genomic DNA (Homo sapiens) CpG-island No: 22565
gagagagggtacgaatttcgggcgtcgttcggggttcgggtttggatttcgcggacgtcgggacgaggggcggggcggggtggtagtttgtaggttttttagcgttcgttcgtttaggagaagttttagcgtcgtttttcgtcgtaggttgggggttaggggagggttcgaatatcggttttgtttttgttattttagcgggtatttggcgtttcggcgcggtagtttgcgaggttagggtcgagcgcgcggagtcgaatgttgggttcggggattcgcggtcgtcgtttttaattcgtttttaagtagttttcgtttgcgttacgttaggtcggcggaggggagtagagcgcgtcgtgcggttgtcgttgcgcgtcggagttcgaggggtcggggacgcgcgcggggggagaggggtaagagttttggaggttcggcggggagcggggcgatttcgaaaggaaggattgtagcgtttttcggggtttttcggggagtttaggtaattttatttgatcgttagatttaagtaggcggagggggagtcgggagcggacgcgtgggtgagtggggaggggagtgagtagg

SEQ ID NO: 22566 - DNA, 588 bp, Artificial Sequence
  chemically treated genomic DNA (Homo sapiens) CpG-island No: 22566
cctactcactcccctccccactcacccacgcgtccgctcccgactccccctccgcctacttaaatctaacgatcaaataaaattacctaaactccccgaaaaaccccgaaaaacgctacaatccttcctttcgaaatcgccccgctccccgccgaacctccaaaactcttacccctctccccccgcgcgcgtccccgacccctcgaactccgacgcgcaacgacaaccgcacgacgcgctctactcccctccgccgacctaacgtaacgcaaacgaaaactacttaaaaacgaattaaaaacgacgaccgcgaatccccgaacccaacattcgactccgcgcgctcgaccctaacctcgcaaactaccgcgccgaaacgccaaatacccgctaaaataacaaaaacaaaaccgatattcgaaccctcccctaacccccaacctacgacgaaaaacgacgctaaaacttctcctaaacgaacgaacgctaaaaaacctacaaactaccaccccgccccgcccctcgtcccgacgtccgcgaaatccaaacccgaaccccgaacgacgcccgaaattcgtaccctctctc

SEQ ID NO: 22567 - DNA, 588 bp, Artificial Sequence
  chemically treated genomic DNA (Homo sapiens) CpG-island No: 22567
tttatttatttttttttttatttatttacgcgttcgttttcggtttttttttcgtttgtttgggtttggcggttaggtgaggttatttgggtttttcgagaagtttcgaggggcgttgtagttttttttttcgaaatcgtttcgtttttcgtcgggtttttaggatttttgttttttttttttcgcgcgcgttttcggtttttcgggtttcgacgcgtagcgatagtcgtacggcgcgttttgttttttttcgtcgatttggcgtgacgtaggcggagattatttaagggcggattagaggcggcggtcgcggattttcgagtttagtattcggtttcgcgcgttcggttttggtttcgtaggttgtcgcgtcggagcgttaggtgttcgttgaagtagtaggaatagagtcggtgttcggatttttttttggtttttaatttgcggcggagagcggcgttgagattttttttgggcgggcgagcgttggaggatttgtaggttgttatttcgtttcgtttttcgtttcggcgttcgcgggatttagattcgaatttcggacggcgttcgaggttcgtgttttttttt

SEQ ID NO: 22568 - DNA, 588 bp, Artificial Sequence
  chemically treated genomic DNA (Homo sapiens) CpG-island No: 22568
aaaaaaaaacacgaacctcgaacgccgtccgaaattcgaatctaaatcccgcgaacgccgaaacgaaaaacgaaacgaaataacaacctacaaatcctccaacgctcgcccgcccaaaaaaaatctcaacgccgctctccgccgcaaattaaaaaccaaaaaaaaatccgaacaccgactctattcctactacttcaacgaacacctaacgctccgacgcgacaacctacgaaaccaaaaccgaacgcgcgaaaccgaatactaaactcgaaaatccgcgaccgccgcctctaatccgcccttaaataatctccgcctacgtcacgccaaatcgacgaaaaaaaacaaaacgcgccgtacgactatcgctacgcgtcgaaacccgaaaaaccgaaaacgcgcgcgaaaaaaaaaaaacaaaaatcctaaaaacccgacgaaaaacgaaacgatttcgaaaaaaaaaactacaacgcccctcgaaacttctcgaaaaacccaaataacctcacctaaccgccaaacccaaacaaacgaaaaaaaaaccgaaaacgaacgcgtaaataaataaaaaaaaaaataaataaa

SEQ ID NO: 22569 - DNA, 542 bp, Artificial Sequence
  chemically treated genomic DNA (Homo sapiens) CpG-island No: 22569
atttagcgattgttttgtcgtcgtcgttttcgcgtcgggacgagtgcgtttaggggttgggcgaggcggtcgcgttttggattcgttataaggaggaggattagattttgggtttcggtgttcgtttgcgtttagacgtatttattcgttggtcgcggtatcgtttcgcgtcgtattcggttttttgttatcggtttttcgtcgtttcgtgtatgaggttttcgttatttcgtttcgatcgtcgatttttttttttttttttttttttttttgttttttattcgtttttcgtttgtttttttgtttttttcgtagtttcgtcgtcgttgggtcgtcgtgtttatagcgattgattgattgatgtttaattttttgttaggcggggttttttttttataagcgttaatttaagggttgaattatttgaagaatgcgacgtttcggtgtttcgttaagacgatgtttcgcgttttttaattgcgttttgtaggttgttagggatattgttttacgaatggttatttgtaagttttagatgatta

SEQ ID NO: 22570 - DNA, 542 bp, Artificial Sequence
  chemically treated genomic DNA (Homo sapiens) CpG-island No: 22570
taatcatctaaaacttacaaataaccattcgtaaaacaatatccctaacaacctacaaaacgcaattaaaaaacgcgaaacatcgtcttaacgaaacaccgaaacgtcgcattcttcaaataattcaacccttaaattaacgcttataaaaaaaaaaccccgcctaacaaaaaattaaacatcaatcaatcaatcgctataaacacgacgacccaacgacgacgaaactacgaaaaaaacaaaaaaacaaacgaaaaacgaataaaaaacaaaaaaaaaaaaaaaaaaaaaaaaaaatcgacgatcgaaacgaaataacgaaaacctcatacacgaaacgacgaaaaaccgataacaaaaaaccgaatacgacgcgaaacgataccgcgaccaacgaataaatacgtctaaacgcaaacgaacaccgaaacccaaaatctaatcctcctccttataacgaatccaaaacgcgaccgcctcgcccaacccctaaacgcactcgtcccgacgcgaaaacgacgacgacaaaacaatcgctaaat

SEQ ID NO: 22571 - DNA, 542 bp, Artificial Sequence
  chemically treated genomic DNA (Homo sapiens) CpG-island No: 22571
tggttatttggagtttataggtggttattcgtgggatagtatttttgatagtttataaaacgtaattgaagaacgcgaggtatcgttttaacgaggtatcgaggcgtcgtattttttagatggtttaatttttaagttagcgtttatgggaggggggtttcgtttggtaggaaattaaatattaattaattaatcgttgtgagtacggcgatttaacggcggcggggttgcgaaggaggtagagggataggcgaggggcgggtgggaggtagggaggagggaagaggaaggggagagtcggcggtcggagcggggtgacgaggattttatgtacgaggcggcgaaggatcgatggtagagaatcgagtgcggcgcgaggcggtgtcgcggttagcgggtgggtgcgtttgggcgtaggcgggtatcggggtttagggtttggtttttttttttgtggcgggtttagagcgcggtcgtttcgtttagtttttaggcgtattcgtttcggcgcggaggcggcggcgataaggtagtcgttgggt

SEQ ID NO: 22572 - DNA, 542 bp, Artificial Sequence
  chemically treated genomic DNA (Homo sapiens) CpG-island No: 22572
acccaacgactaccttatcgccgccgcctccgcgccgaaacgaatacgcctaaaaactaaacgaaacgaccgcgctctaaacccgccacaaaaaaaaaaaccaaaccctaaaccccgatacccgcctacgcccaaacgcacccacccgctaaccgcgacaccgcctcgcgccgcactcgattctctaccatcgatccttcgccgcctcgtacataaaatcctcgtcaccccgctccgaccgccgactctccccttcctcttccctcctccctacctcccacccgcccctcgcctatccctctacctccttcgcaaccccgccgccgttaaatcgccgtactcacaacgattaattaattaatatttaatttcctaccaaacgaaacccccctcccataaacgctaacttaaaaattaaaccatctaaaaaatacgacgcctcgatacctcgttaaaacgatacctcgcgttcttcaattacgttttataaactatcaaaaatactatcccacgaataaccacctataaactccaaataacca

SEQ ID NO: 22573 - DNA, 521 bp, Artificial Sequence
  chemically treated genomic DNA (Homo sapiens) CpG-island No: 22573
tgggttcggttttatcgatttcgcgtagttgtttattgtgggtgtttttgattcggacgtagttcgtggtggggcggttttattttacgtttcgtttggttacgtcgcgtttatttttagggcgcgttttttaggcgttatagtgggtttggcgttcgtcgagggtatgtgtcgcgtcgagagttcgggaggcgtgagtacggtgatgacgcgggcgggggcgagggagagataggaggttttacggtcgtagtgatcgtttttttacggttttttaggattattcggagttttttatcggcgtcgtagttattatggtttatgagatcggttatagtttcggttttagttacgatttcgacggttgttgcgtggaggttgcggtcgagttcggaggttgcgttatggttgcggttatcgggtacgcgggtggggggtcggggttgcggcggggcggttagttttggggatttttttcgttgcgtttttttggtcgttttttagtttttttttttgtaaaa

SEQ ID NO: 22574 - DNA, 521 bp, Artificial Sequence
  chemically treated genomic DNA (Homo sapiens) CpG-island No: 22574
ttttacaaaaaaaaaaactaaaaaacgaccaaaaaaacgcaacgaaaaaaatccccaaaactaaccgccccgccgcaaccccgaccccccacccgcgtacccgataaccgcaaccataacgcaacctccgaactcgaccgcaacctccacgcaacaaccgtcgaaatcgtaactaaaaccgaaactataaccgatctcataaaccataataactacgacgccgataaaaaactccgaataatcctaaaaaaccgtaaaaaaacgatcactacgaccgtaaaacctcctatctctccctcgcccccgcccgcgtcatcaccgtactcacgcctcccgaactctcgacgcgacacataccctcgacgaacgccaaacccactataacgcctaaaaaacgcgccctaaaaataaacgcgacgtaaccaaacgaaacgtaaaataaaaccgccccaccacgaactacgtccgaatcaaaaacacccacaataaacaactacgcgaaatcgataaaaccgaaccca

SEQ ID NO: 22575 - DNA, 521 bp, Artificial Sequence
  chemically treated genomic DNA (Homo sapiens) CpG-island No: 22575
ttttatagaagaggaaattgagggacgattaaagaaacgtagcggaggaagtttttaggattagtcgtttcgtcgtagtttcgattttttattcgcgtattcggtggtcgtagttatgacgtagttttcggattcggtcgtagtttttacgtagtagtcgtcggggtcgtggttgaggtcgaggttgtggtcgattttatgggttatggtggttgcggcgtcgatggggagtttcgagtggttttggggggtcgtgggagggcggttattgcggtcgtagagttttttgtttttttttcgttttcgttcgcgttattatcgtgtttacgtttttcgagttttcggcgcggtatatgttttcgacgggcgttaggtttattgtggcgtttggaaagcgcgttttgggggtgagcgcggcgtgattaggcggggcgtgaggtgaggtcgttttattacgggttgcgttcgggttagaggtatttatagtgagtagttgcgcggagtcgatggggtcgggttta

SEQ ID NO: 22576 - DNA, 521 bp, Artificial Sequence
  chemically treated genomic DNA (Homo sapiens) CpG-island No: 22576
taaacccgaccccatcgactccgcgcaactactcactataaatacctctaacccgaacgcaacccgtaataaaacgacctcacctcacgccccgcctaatcacgccgcgctcacccccaaaacgcgctttccaaacgccacaataaacctaacgcccgtcgaaaacatataccgcgccgaaaactcgaaaaacgtaaacacgataataacgcgaacgaaaacgaaaaaaaaacaaaaaactctacgaccgcaataaccgccctcccacgaccccccaaaaccactcgaaactccccatcgacgccgcaaccaccataacccataaaatcgaccacaacctcgacctcaaccacgaccccgacgactactacgtaaaaactacgaccgaatccgaaaactacgtcataactacgaccaccgaatacgcgaataaaaaatcgaaactacgacgaaacgactaatcctaaaaacttcctccgctacgtttctttaatcgtccctcaatttcctcttctataaaa

SEQ ID NO: 22577 - DNA, 737 bp, Artificial Sequence
  chemically treated genomic DNA (Homo sapiens) CpG-island No: 22577
ttcgcgtcgttgtcgggtttcggaggtcgtagtacgggtaggtttagtaggtcgtagcgttttttcgcggtatgtttcggcggcgggaagggggtgggcgcggagggcggggaggaggcgtcggggttttcgcgtttttcgcgagatttcgtttcgttcgtttcgtttcgttcgtcgcgtttttagtttttcgcgcgcgtattttttgtttttcgcgttcggtcgttcgttttcgtttgcgttcgtcgttgtcgttcgtcgtcggatcgcgttcgtcgcgttttcggaggtgttttcggtcgggtgcgttcgtttcgtcgtcggttcggagtcgttttgtttcgggcgggggcgcggatgtaggtcgttaggtgtttttcgttacggttcgggttttcgtttcggcgcggcggcggtcgtttcgagatatagggtattatatagaacggtcgtattacgttgatcggtttttcgcggtagaaagttacgggattatttagggaggtgtaggagaattcgtatttgcgtaagggtaagatttatcggcgtttaatattcggtcgtttacgttgagtacgattttgaagaataagcgcgttattttgggtcgggagtttaattacgcggatcgtttttatttgtcggtaagattaataagttgtttttttacgataatttcgagggtttgattattgtatgtttttaaaaaattcgattacgcggatgtagtttaaagg

SEQ ID NO: 22578 - DNA, 737 bp, Artificial Sequence
  chemically treated genomic DNA (Homo sapiens) CpG-island No: 22578
cctttaaactacatccgcgtaatcgaattttttaaaaacatacaataatcaaaccctcgaaattatcgtaaaaaaacaacttattaatcttaccgacaaataaaaacgatccgcgtaattaaactcccgacccaaaataacgcgcttattcttcaaaatcgtactcaacgtaaacgaccgaatattaaacgccgataaatcttacccttacgcaaatacgaattctcctacacctccctaaataatcccgtaactttctaccgcgaaaaaccgatcaacgtaatacgaccgttctatataataccctatatctcgaaacgaccgccgccgcgccgaaacgaaaacccgaaccgtaacgaaaaacacctaacgacctacatccgcgcccccgcccgaaacaaaacgactccgaaccgacgacgaaacgaacgcacccgaccgaaaacacctccgaaaacgcgacgaacgcgatccgacgacgaacgacaacgacgaacgcaaacgaaaacgaacgaccgaacgcgaaaaacaaaaaatacgcgcgcgaaaaactaaaaacgcgacgaacgaaacgaaacgaacgaaacgaaatctcgcgaaaaacgcgaaaaccccgacgcctcctccccgccctccgcgcccacccccttcccgccgccgaaacataccgcgaaaaaacgctacgacctactaaacctacccgtactacgacctccgaaacccgacaacgacgcgaa

SEQ ID NO: 22579 - DNA, 737 bp, Artificial Sequence
  chemically treated genomic DNA (Homo sapiens) CpG-island No: 22579
tttttggattatattcgcgtggtcgaattttttgaaggtatgtaatgattaagttttcgaggttgtcgtagggagatagtttattggttttgtcggtaggtggaggcgattcgcgtagttgggttttcgatttaggatggcgcgtttgttttttaggatcgtgtttagcgtggacggtcggatgttgaacgtcggtggattttgtttttgcgtaggtgcggatttttttatatttttttggatgatttcgtgattttttgtcgcgagaaatcggttaacgtggtacgatcgttttatgtggtgttttatatttcggggcggtcgtcgtcgcgtcggggcgggggttcgggtcgtggcggggggtatttggcggtttatattcgcgttttcgttcgagataaagcggtttcgggtcggcggcggggcgaacgtattcggtcgggggtattttcggggacgcggcgggcgcgattcggcggcgggcggtagcgacgggcgtagacgagggcgggcggtcgggcgcggaaggtaggaagtgcgcgcgcggggagttgggagcgcggcgagcggggcggagcgggcggagcgggatttcgcgggaagcgcggggatttcggcgtttttttttcgtttttcgcgtttatttttttttcgtcgtcgggatatatcgcgggggggcgttgcggtttgttggatttgttcgtgttgcggttttcgggattcggtagcgacgcggg

SEQ ID NO: 22580 - DNA, 737 bp, Artificial Sequence
  chemically treated genomic DNA (Homo sapiens) CpG-island No: 22580
cccgcgtcgctaccgaatcccgaaaaccgcaacacgaacaaatccaacaaaccgcaacgcccccccgcgatatatcccgacgacgaaaaaaaaataaacgcgaaaaacgaaaaaaaaacgccgaaatccccgcgcttcccgcgaaatcccgctccgcccgctccgccccgctcgccgcgctcccaactccccgcgcgcgcacttcctaccttccgcgcccgaccgcccgccctcgtctacgcccgtcgctaccgcccgccgccgaatcgcgcccgccgcgtccccgaaaatacccccgaccgaatacgttcgccccgccgccgacccgaaaccgctttatctcgaacgaaaacgcgaatataaaccgccaaataccccccgccacgacccgaacccccgccccgacgcgacgacgaccgccccgaaatataaaacaccacataaaacgatcgtaccacgttaaccgatttctcgcgacaaaaaatcacgaaatcatccaaaaaaatataaaaaaatccgcacctacgcaaaaacaaaatccaccgacgttcaacatccgaccgtccacgctaaacacgatcctaaaaaacaaacgcgccatcctaaatcgaaaacccaactacgcgaatcgcctccacctaccgacaaaaccaataaactatctccctacgacaacctcgaaaacttaatcattacataccttcaaaaaattcgaccacgcgaatataatccaaaaa

SEQ ID NO: 22581 - DNA, 780 bp, Artificial Sequence
  chemically treated genomic DNA (Homo sapiens) CpG-island No: 22581
tttacgtcggttttcgttggtttcgtagtcgtattagggcgttacgcgcgtttacgttgtttacgtagttaggggtgacggcggtgttgcggggattttgagggcgaagttatcggtttattcggcggagatattttttggagaattttcgttttcgttcggatttcggtcgcgcgtatttacgaggttcgcgtagggcgtaggtagcgggcgtttttggtttagtaggtagtcgtcgggggcgttgggcgttggggtgtacgagatttgaaaggttaggaggcgaggttgcgcggcgggagggcggtgagtcggagagaggtttcgtttttattttcgttagcggtcgcgtcgtcggggattttgtagtttcgtcgttcgtagaagtttaagggtttaaggtaggagggcgggcggtcgggtttcgaaaaggcgtaggagggtacgaagggtgtttcgacgttcggcgtagtcgggcggcgtacgggtagaagagtagtgcgtgggtgagcgcgggcgttcgcgggcgaagaagcggcgtagggttcggcggtagcgggcgcgggatagtttttttgcgtagttcggtttaggtattgcgttatatattcggagcgtaaacgttggtatcgcgcgttcgtcgtgtaggtttcggtcgcgtttatatatcggtttttttcgatcgagttcgtcgattttgggaaaggcgcggggaggttgtaggttttagtgcgtttcgtatgtatattttatttagtttatttacgtttttggaaggtg

SEQ ID NO: 22582 - DNA, 780 bp, Artificial Sequence
  chemically treated genomic DNA (Homo sapiens) CpG-island No: 22582
caccttccaaaaacgtaaataaactaaataaaatatacatacgaaacgcactaaaacctacaacctccccgcgcctttcccaaaatcgacgaactcgatcgaaaaaaaccgatatataaacgcgaccgaaacctacacgacgaacgcgcgataccaacgtttacgctccgaatatataacgcaatacctaaaccgaactacgcaaaaaaactatcccgcgcccgctaccgccgaaccctacgccgcttcttcgcccgcgaacgcccgcgctcacccacgcactactcttctacccgtacgccgcccgactacgccgaacgtcgaaacacccttcgtaccctcctacgccttttcgaaacccgaccgcccgccctcctaccttaaacccttaaacttctacgaacgacgaaactacaaaatccccgacgacgcgaccgctaacgaaaataaaaacgaaacctctctccgactcaccgccctcccgccgcgcaacctcgcctcctaacctttcaaatctcgtacaccccaacgcccaacgcccccgacgactacctactaaaccaaaaacgcccgctacctacgccctacgcgaacctcgtaaatacgcgcgaccgaaatccgaacgaaaacgaaaattctccaaaaaatatctccgccgaataaaccgataacttcgccctcaaaatccccgcaacaccgccgtcacccctaactacgtaaacaacgtaaacgcgcgtaacgccctaatacgactacgaaaccaacgaaaaccgacgtaaa

SEQ ID NO: 22583 - DNA, 780 bp, Artificial Sequence
  chemically treated genomic DNA (Homo sapiens) CpG-island No: 22583
tattttttaggggcgtggatgggttgggtgaagtgtgtatgcggggcgtattgagatttgtagttttttcgcgttttttttagggtcggcgagttcggtcggagggaatcgatgtgtggacgcggtcgaagtttgtacggcggacgcgcggtgttagcgtttgcgtttcgagtatgtggcgtagtgtttgggtcgggttgcgtaggggggttgtttcgcgttcgttgtcgtcgggttttgcgtcgttttttcgttcgcgggcgttcgcgtttatttacgtattgtttttttgttcgtgcgtcgttcggttgcgtcgagcgtcggagtatttttcgtgtttttttgcgttttttcggggttcggtcgttcgtttttttgttttgagtttttaaatttttgcgagcgacggaattgtaggattttcggcggcgcggtcgttggcgagggtggggacggggttttttttcggtttatcgttttttcgtcgcgtagtttcgttttttggttttttaggtttcgtgtattttagcgtttagcgttttcgacggttgtttgttggattagaggcgttcgttgtttgcgttttacgcgggtttcgtgggtacgcgcggtcgggattcgggcgagggcgggggttttttaggggatattttcgtcgggtgggtcgatgatttcgtttttagggttttcgtagtatcgtcgttatttttaattacgtggataacgtgagcgcgcgtggcgttttggtgcgattgcggagttagcgggaatcggcgtgag

SEQ ID NO: 22584 - DNA, 780 bp, Artificial Sequence
  chemically treated genomic DNA (Homo sapiens) CpG-island No: 22584
ctcacgccgattcccgctaactccgcaatcgcaccaaaacgccacgcgcgctcacgttatccacgtaattaaaaataacgacgatactacgaaaaccctaaaaacgaaatcatcgacccacccgacgaaaatatcccctaaaaaacccccgccctcgcccgaatcccgaccgcgcgtacccacgaaacccgcgtaaaacgcaaacaacgaacgcctctaatccaacaaacaaccgtcgaaaacgctaaacgctaaaatacacgaaacctaaaaaaccaaaaaacgaaactacgcgacgaaaaaacgataaaccgaaaaaaaaccccgtccccaccctcgccaacgaccgcgccgccgaaaatcctacaattccgtcgctcgcaaaaatttaaaaactcaaaacaaaaaaacgaacgaccgaaccccgaaaaaacgcaaaaaaacacgaaaaatactccgacgctcgacgcaaccgaacgacgcacgaacaaaaaaacaatacgtaaataaacgcgaacgcccgcgaacgaaaaaacgacgcaaaacccgacgacaacgaacgcgaaacaacccccctacgcaacccgacccaaacactacgccacatactcgaaacgcaaacgctaacaccgcgcgtccgccgtacaaacttcgaccgcgtccacacatcgattccctccgaccgaactcgccgaccctaaaaaaaacgcgaaaaaactacaaatctcaatacgccccgcatacacacttcacccaacccatccacgcccctaaaaaata

SEQ ID NO: 22585 - DNA, 757 bp, Artificial Sequence
  chemically treated genomic DNA (Homo sapiens) CpG-island No: 22585
gtttcgtcgagttagcggtgttgtagtacgcggtgtaggcggcgttgggcgttcgcggtttgcgtgtcgtggtttcgtacgacgtgggttttattatttttaaaggcgcggtgttgttcggttaggcgtcgggcgtggtgcgggttcgtcgttcgtcgtttatttatggcgtgggcgtgtttaatcgttttgtgtttgggcgttattcgttcgaaaagttgttggttcgcgacggtcgtcgttggtgtatcgacgttttcgagcgtttcgtggtcgtcgagtagtcggtggttttgggcgaggaggtgcggcgtattattgttcggcgcgtttcggttagcggcgcgtatttattaatttgtattgttgcgcggtagaggatgcgcgttttattatcgatttcggcgtgcgtaaatgtggcgcgtttagtttcgagtttgagttcgtcgattgcgttaggatatcgtcggcgcgtttttcggtcgtcgcgagattcgcgtcgttatgtagtttggcgatatcgaaattaaggttatcgtcgtcgacgttagtattaatcgtttcgtgcgcgcgtttatcgattttttttttaattgagggcgcgcgcgcgtgttaggttcgtttgttcggtttcgttttttttcggtttaggggtttgcggagcgggttggggcgggggaaacgatagttttgtagtttgcgtttttttacgttttttagtttcgggggagataaggttatgggagagtgggtgggg

SEQ ID NO: 22586 - DNA, 757 bp, Artificial Sequence
  chemically treated genomic DNA (Homo sapiens) CpG-island No: 22586
ccccacccactctcccataaccttatctcccccgaaactaaaaaacgtaaaaaaacgcaaactacaaaactatcgtttcccccgccccaacccgctccgcaaacccctaaaccgaaaaaaaacgaaaccgaacaaacgaacctaacacgcgcgcgcgccctcaattaaaaaaaaaatcgataaacgcgcgcacgaaacgattaatactaacgtcgacgacgataaccttaatttcgatatcgccaaactacataacgacgcgaatctcgcgacgaccgaaaaacgcgccgacgatatcctaacgcaatcgacgaactcaaactcgaaactaaacgcgccacatttacgcacgccgaaatcgataataaaacgcgcatcctctaccgcgcaacaatacaaattaataaatacgcgccgctaaccgaaacgcgccgaacaataatacgccgcacctcctcgcccaaaaccaccgactactcgacgaccacgaaacgctcgaaaacgtcgatacaccaacgacgaccgtcgcgaaccaacaacttttcgaacgaataacgcccaaacacaaaacgattaaacacgcccacgccataaataaacgacgaacgacgaacccgcaccacgcccgacgcctaaccgaacaacaccgcgcctttaaaaataataaaacccacgtcgtacgaaaccacgacacgcaaaccgcgaacgcccaacgccgcctacaccgcgtactacaacaccgctaactcgacgaaac

SEQ ID NO: 22587 - DNA, 757 bp, Artificial Sequence
  chemically treated genomic DNA (Homo sapiens) CpG-island No: 22587
ttttatttatttttttatgattttatttttttcggggttggagggcgtggaaaggcgtagattgtagaattatcgtttttttcgttttaattcgtttcgtaggtttttgaatcgaaagagggcggggtcgggtagacgggtttggtacgcgcgcgcgtttttagttggaaagaaagtcgatggacgcgcgtacggagcgattggtgttgacgtcgacggcggtgattttaatttcggtgtcgttaaattgtatggcggcgcggatttcgcggcggtcgggaggcgcgtcggcggtgttttggcgtagtcggcgggtttaagttcgaggttgagcgcgttatatttgcgtacgtcggggtcggtgatgaagcgcgtattttttgtcgcgtagtagtataggttgatgagtacgcgtcgttggtcgggacgcgtcgggtagtagtgcgtcgtattttttcgtttagggttatcgattgttcggcggttacgaagcgttcgaagacgtcggtgtattagcggcggtcgtcgcgaattagtagtttttcgggcgggtggcgtttaggtataaagcggttgagtacgtttacgttataggtgagcggcgagcggcggattcgtattacgttcggcgtttggtcgaatagtatcgcgtttttgaggatggtgaggtttacgtcgtgcgggattacgatacgtagatcgcgggcgtttagcgtcgtttgtatcgcgtgttgtagtatcgttgattcggcgaagt

SEQ ID NO: 22588 - DNA, 757 bp, Artificial Sequence
  chemically treated genomic DNA (Homo sapiens) CpG-island No: 22588
acttcgccgaatcaacgatactacaacacgcgatacaaacgacgctaaacgcccgcgatctacgtatcgtaatcccgcacgacgtaaacctcaccatcctcaaaaacgcgatactattcgaccaaacgccgaacgtaatacgaatccgccgctcgccgctcacctataacgtaaacgtactcaaccgctttatacctaaacgccacccgcccgaaaaactactaattcgcgacgaccgccgctaatacaccgacgtcttcgaacgcttcgtaaccgccgaacaatcgataaccctaaacgaaaaaatacgacgcactactacccgacgcgtcccgaccaacgacgcgtactcatcaacctatactactacgcgacaaaaaatacgcgcttcatcaccgaccccgacgtacgcaaatataacgcgctcaacctcgaacttaaacccgccgactacgccaaaacaccgccgacgcgcctcccgaccgccgcgaaatccgcgccgccatacaatttaacgacaccgaaattaaaatcaccgccgtcgacgtcaacaccaatcgctccgtacgcgcgtccatcgactttctttccaactaaaaacgcgcgcgcgtaccaaacccgtctacccgaccccgccctctttcgattcaaaaacctacgaaacgaattaaaacgaaaaaaacgataattctacaatctacgcctttccacgccctccaaccccgaaaaaaataaaatcataaaaaaataaataaaa

SEQ ID NO: 22589 - DNA, 640 bp, Artificial Sequence
  chemically treated genomic DNA (Homo sapiens) CpG-island No: 22589
ttcgttttcgtttcgttttcggagtcgtagtttcgttcgttatcgtcgtcgttatgttgtggttttcgtagtcggcgttggggacgcgcgcggtcgagattttggtttgtagtcgtcgtcgtcgtcgttaggtaagcgtttttcgcgggtcgggtcgagcggggtttgcgggtcggggtagttttattttgggttcgggaggatcgtagtcgggatcgagttcgagttcgagtcggggttcggttttgtagtttggcggattttggtcgtcgttagaggcggtagttatttttttcgatcgtcgtttggcgggttcgggtcgttattttatttcgttttcggtcgtcgggcgtcggtttttttcgtcgttgcgatcgtcgttgcgatcgtcgttttttggtaggtcgggtacgttgttgtttttcgcgttgggcgggacgtgcggtcgttttcggcgatagtcggcggtttttagttcgggtacggataacggtgttattttttttttttgggacggtttgttagttcgatcgttttcgtcgttcgaagagttgtcgtcgttatagggtagatatttcggggaacgattttttttggcgttttttagtattttttttttttgagtttaagttttgatttt

SEQ ID NO: 22590 - DNA, 640 bp, Artificial Sequence
  chemically treated genomic DNA (Homo sapiens) CpG-island No: 22590
aaaatcaaaacttaaactcaaaaaaaaaaaatactaaaaaacgccaaaaaaaatcgttccccgaaatatctaccctataacgacgacaactcttcgaacgacgaaaacgatcgaactaacaaaccgtcccaaaaaaaaaaaataacaccgttatccgtacccgaactaaaaaccgccgactatcgccgaaaacgaccgcacgtcccgcccaacgcgaaaaacaacaacgtacccgacctaccaaaaaacgacgatcgcaacgacgatcgcaacgacgaaaaaaaccgacgcccgacgaccgaaaacgaaataaaataacgacccgaacccgccaaacgacgatcgaaaaaaataactaccgcctctaacgacgaccaaaatccgccaaactacaaaaccgaaccccgactcgaactcgaactcgatcccgactacgatcctcccgaacccaaaataaaactaccccgacccgcaaaccccgctcgacccgacccgcgaaaaacgcttacctaacgacgacgacgacgactacaaaccaaaatctcgaccgcgcgcgtccccaacgccgactacgaaaaccacaacataacgacgacgataacgaacgaaactacgactccgaaaacgaaacgaaaacgaa

SEQ ID NO: 22591 - DNA, 640 bp, Artificial Sequence
  chemically treated genomic DNA (Homo sapiens) CpG-island No: 22591
agggttagaatttgggtttaggggaggggagtattgaggagcgttaaagagggtcgtttttcgaagtgtttgttttgtgacggcgatagtttttcgggcggcggggacggtcgggttgataggtcgttttagagggagaaagtggtatcgttattcgtgttcgggttgggggtcgtcggttatcgtcgagggcggtcgtacgtttcgtttagcgcggaggatagtagcgtgttcggtttgttaaggagcggcggtcgtagcggcggtcgtagcggcggaaggggtcggcgttcgacggtcgggggcggggtggggtggcggttcgggttcgttaggcggcggtcgggggaagtggttgtcgtttttggcggcggttagggttcgttaggttgtagggtcgggtttcggttcgggttcggattcggtttcggttgcgattttttcgggtttaggatggggttgtttcggttcgtaggtttcgttcggttcggttcgcggggggcgtttatttggcggcggcggcggcgattgtaggttagagtttcggtcgcgcgcgtttttagcgtcggttgcgggagttataatatggcgacggcgatggcgggcggggttgcggtttcgggggcggagcgggggcggg

SEQ ID NO: 22592 - DNA, 640 bp, Artificial Sequence
  chemically treated genomic DNA (Homo sapiens) CpG-island No: 22592
cccgcccccgctccgcccccgaaaccgcaaccccgcccgccatcgccgtcgccatattataactcccgcaaccgacgctaaaaacgcgcgcgaccgaaactctaacctacaatcgccgccgccgccgccaaataaacgccccccgcgaaccgaaccgaacgaaacctacgaaccgaaacaaccccatcctaaacccgaaaaaatcgcaaccgaaaccgaatccgaacccgaaccgaaacccgaccctacaacctaacgaaccctaaccgccgccaaaaacgacaaccacttcccccgaccgccgcctaacgaacccgaaccgccaccccaccccgcccccgaccgtcgaacgccgaccccttccgccgctacgaccgccgctacgaccgccgctccttaacaaaccgaacacgctactatcctccgcgctaaacgaaacgtacgaccgccctcgacgataaccgacgacccccaacccgaacacgaataacgataccactttctccctctaaaacgacctatcaacccgaccgtccccgccgcccgaaaaactatcgccgtcacaaaacaaacacttcgaaaaacgaccctctttaacgctcctcaatactcccctcccctaaacccaaattctaaccct

SEQ ID NO: 22593 - DNA, 557 bp, Artificial Sequence
  chemically treated genomic DNA (Homo sapiens) CpG-island No: 22593
tcgtacgttgagtaggtagtttcggttggttgggttggggatttatacggggtcgtcgtttttatcgtcgtttttcgttttcgatcgtttattcgcgttttagtttcggttgggggtttttcgcgattttatggtatcgtttttttcgatcgtcggtttcgtattcgtcgttgtttcgtttgttttttaggtttcggttttcgggtttttgttcgtcgtcgtcgttttcgttcgcggttgacgcgcgtttttatttatagtcggtggtcgggtcgtcgttatttgttgttgttttttttttggtttggttcgattcgggtagcgcggtttggagacgtcggggggcgtcggggtttatgtgttcgttttagggtcggtttcgagttcgtttttttggcggttttggtgtttgtagtagcgtcgcgtttggagaggttcgggaggtttcgggaggaaggcgtagcgggtgttttggttatggaggataggttttttcgtggagttttcgggattcggttttcggtcggtttgtttatgtttcgtgtggtatatgaggg

SEQ ID NO: 22594 - DNA, 557 bp, Artificial Sequence
  chemically treated genomic DNA (Homo sapiens) CpG-island No: 22594
ccctcatataccacacgaaacataaacaaaccgaccgaaaaccgaatcccgaaaactccacgaaaaaacctatcctccataaccaaaacacccgctacgccttcctcccgaaacctcccgaacctctccaaacgcgacgctactacaaacaccaaaaccgccaaaaaaacgaactcgaaaccgaccctaaaacgaacacataaaccccgacgccccccgacgtctccaaaccgcgctacccgaatcgaaccaaaccaaaaaaaaaacaacaacaaataacgacgacccgaccaccgactataaataaaaacgcgcgtcaaccgcgaacgaaaacgacgacgacgaacaaaaacccgaaaaccgaaacctaaaaaacaaacgaaacaacgacgaatacgaaaccgacgatcgaaaaaaacgataccataaaatcgcgaaaaacccccaaccgaaactaaaacgcgaataaacgatcgaaaacgaaaaacgacgataaaaacgacgaccccgtataaatccccaacccaaccaaccgaaactacctactcaacgtacga

SEQ ID NO: 22595 - DNA, 557 bp, Artificial Sequence
  chemically treated genomic DNA (Homo sapiens) CpG-island No: 22595
tttttatatgttatacgggatatgagtaggtcggtcgggagtcgggtttcgggagttttacgaaggggtttgttttttatgattaggatattcgttgcgtttttttttcgaggtttttcgggtttttttagacgcggcgttattgtagatattagggtcgttaagggagcggattcggagtcggttttggggcgggtatatgggtttcggcgtttttcggcgtttttaagtcgcgttgttcgggtcgggttaggttaggggagggatagtagtaggtgacgacggttcggttatcggttataaataggggcgcgcgttagtcgcgggcgggagcggcggcggcgggtaggggttcgggggtcggggtttggaggataggcgaggtagcggcgagtgcggggtcggcggtcggggagggcggtgttatggggtcgcggagggtttttagtcggggttggggcgcgggtgggcggtcgggggcggggggcgacggtgaggacgacggtttcgtgtggatttttagtttagttagtcggagttatttgtttagcgtgcgg

SEQ ID NO: 22596 - DNA, 557 bp, Artificial Sequence
  chemically treated genomic DNA (Homo sapiens) CpG-island No: 22596
ccgcacgctaaacaaataactccgactaactaaactaaaaatccacacgaaaccgtcgtcctcaccgtcgccccccgcccccgaccgcccacccgcgccccaaccccgactaaaaaccctccgcgaccccataacaccgccctccccgaccgccgaccccgcactcgccgctacctcgcctatcctccaaaccccgacccccgaacccctacccgccgccgccgctcccgcccgcgactaacgcgcgcccctatttataaccgataaccgaaccgtcgtcacctactactatccctcccctaacctaacccgacccgaacaacgcgacttaaaaacgccgaaaaacgccgaaacccatatacccgccccaaaaccgactccgaatccgctcccttaacgaccctaatatctacaataacgccgcgtctaaaaaaacccgaaaaacctcgaaaaaaaaacgcaacgaatatcctaatcataaaaaacaaaccccttcgtaaaactcccgaaacccgactcccgaccgacctactcatatcccgtataacatataaaaa

SEQ ID NO: 22597 - DNA, 670 bp, Artificial Sequence
  chemically treated genomic DNA (Homo sapiens) CpG-island No: 22597
aattgatcgggtagcgcgagggaggagcgcgtacgcgatcgcgagggcgggcgtgtattttcggttggaagtttgtgtcgggtttcgagcgcgcgtcggttgggagtttcgggtagagatttaggtcgttggatcgcgatgagcgcgtcgagttttcgtgcgcgcgtcgcggggttggggttgttgttgtgcgcggtgttggggcgcgttggtcggttagatagcggcggtcgcggggaattcgggtagttttttggggtagtcgtcgagcgtttatgttttattatttgtcgttgtttcggggatttgttggattgtagtcgtaagcggttagcgcgttttttcgagttattttcgttttgggtcgttcggttgtaagtatttttttcgcggggggagggggttcgggtcgttggagattcgagaaaataggagtcggcggggaatggggttcggcgtgtagttttttttttgtcgtatagttttttttggtttaggtcgcgatcggcgtttcgtgggcgtggaaaaagaattgttcgggttttagttttttttttacgtgttttgcgggcggcgtaggtgggtttttggcgcgttttaattggttgtaggtagattagggttgggggttagtaacgacgttagagattggggatgaagttttgcgttt

SEQ ID NO: 22598 - DNA, 670 bp, Artificial Sequence
  chemically treated genomic DNA (Homo sapiens) CpG-island No: 22598
aaacgcaaaacttcatccccaatctctaacgtcgttactaacccccaaccctaatctacctacaaccaattaaaacgcgccaaaaacccacctacgccgcccgcaaaacacgtaaaaaaaaaactaaaacccgaacaattctttttccacgcccacgaaacgccgatcgcgacctaaaccaaaaaaaactatacgacaaaaaaaaaactacacgccgaaccccattccccgccgactcctattttctcgaatctccaacgacccgaaccccctccccccgcgaaaaaaatacttacaaccgaacgacccaaaacgaaaataactcgaaaaaacgcgctaaccgcttacgactacaatccaacaaatccccgaaacaacgacaaataataaaacataaacgctcgacgactaccccaaaaaactacccgaattccccgcgaccgccgctatctaaccgaccaacgcgccccaacaccgcgcacaacaacaaccccaaccccgcgacgcgcgcacgaaaactcgacgcgctcatcgcgatccaacgacctaaatctctacccgaaactcccaaccgacgcgcgctcgaaacccgacacaaacttccaaccgaaaatacacgcccgccctcgcgatcgcgtacgcgctcctccctcgcgctacccgatcaatt

SEQ ID NO: 22599 - DNA, 670 bp, Artificial Sequence
  chemically treated genomic DNA (Homo sapiens) CpG-island No: 22599
gggcgtaggattttatttttaatttttggcgtcgttattggtttttaattttggtttatttgtagttagttaggacgcgttaagagtttatttgcgtcgttcgtaaagtacgtgggagggaaattgaggttcggatagttttttttttacgtttacggagcgtcgatcgcggtttgggttagaaggagttatacggtaaaaaggggattgtacgtcgaattttatttttcgtcggtttttgttttttcgaatttttagcggttcgggtttttttttttcgcgggaagaatatttatagtcgagcgatttaggacgggagtggttcgggaagacgcgttagtcgtttacgattgtagtttagtaggttttcgaggtagcggtaggtagtggggtatgggcgttcggcggttattttagagggttgttcgagtttttcgcgatcgtcgttgtttgatcggttagcgcgttttagtatcgcgtatagtagtagttttaatttcgcggcgcgcgtacggaggttcggcgcgtttatcgcggtttagcggtttaggtttttattcgaagtttttagtcggcgcgcgttcggggttcggtataaatttttagtcgagggtgtacgttcgttttcgcggtcgcgtgcgcgtttttttttcgcgttgttcggttaatt

SEQ ID NO: 22600 - DNA, 670 bp, Artificial Sequence
  chemically treated genomic DNA (Homo sapiens) CpG-island No: 22600
aattaaccgaacaacgcgaaaaaaaaacgcgcacgcgaccgcgaaaacgaacgtacaccctcgactaaaaatttataccgaaccccgaacgcgcgccgactaaaaacttcgaataaaaacctaaaccgctaaaccgcgataaacgcgccgaacctccgtacgcgcgccgcgaaattaaaactactactatacgcgatactaaaacgcgctaaccgatcaaacaacgacgatcgcgaaaaactcgaacaaccctctaaaataaccgccgaacgcccataccccactacctaccgctacctcgaaaacctactaaactacaatcgtaaacgactaacgcgtcttcccgaaccactcccgtcctaaatcgctcgactataaatattcttcccgcgaaaaaaaaaaacccgaaccgctaaaaattcgaaaaaacaaaaaccgacgaaaaataaaattcgacgtacaatcccctttttaccgtataactccttctaacccaaaccgcgatcgacgctccgtaaacgtaaaaaaaaaactatccgaacctcaatttccctcccacgtactttacgaacgacgcaaataaactcttaacgcgtcctaactaactacaaataaaccaaaattaaaaaccaataacgacgccaaaaattaaaaataaaatcctacgccc

SEQ ID NO: 22601 - DNA, 1158 bp, Artificial Sequence
  chemically treated genomic DNA (Homo sapiens) CpG-island No: 22601
tttacgtcggcggttttttttttacggatttcgcgttgggtgtttacgtcggcggttttttttttacggatttcgcgttgggtttttacgtcggcggttttttttttatcgatttcgcgttgggtttttacgtcggcggttttttttttatcgatttcgcgttgggtttttacgtcggcggtttttgttttatcgatttcgcgttgggtttttacgtcggcggtttttgttttatcgatttcgcgttgggtttttacgtcggcggttttttttttatcgatttcgcgttgggtttttacgtcggcggttttttttttatcgatttcgcgttgggtttttacgtcggcggttttttttttatcgatttcgcgttgggtttttacgtcggcggttttttttttatcgatttcgcgttgggtttttacgtcggcggttttttttttatcgatttcgcgttgggtttttacgtcggcggttttttttttatcgatttcgcgttgggtttttacgtcggcggttttttttttatcgatttcgcgttgggtttttacgtcggcggttttttttttatcgatttcgcgttgggtttttacgtcggcggttttttttttatcgatttcgcgttgggtttttacgtcggcggttttttttttatcgatttcgcgttgggtttttacgtcggcggttttttttttatcgatttcgcgttgggtttttacgtcggcggttttttttttatcgatttcgcgttgggtttttacgtcggcggttttttttttatcgatttcgcgttgggtttttacgtcggcggttttttttttatcgatttcgcgttgggtttttacgtcggcggttttttttttatcgatttcgcgttgggtttttacgtcggcggttttttttttatcgatttcgcgttgggtttttacgtcggcggttttttttttatcgatttcgcgttgggtttttacgtcggcggttttttttttatcgatttcgcgttgggtttttacgtcggcggttttttttttatcgatttcgcgttgggtttttacgtcggcggttttttttttatcgatttcgcgttgggttgttttagtaggcgaaatttttgtttgaaggcgttttcgtgtggattttttttgataaggttttgtt

SEQ ID NO: 22602 - DNA, 1158 bp, Artificial Sequence
  chemically treated genomic DNA (Homo sapiens) CpG-island No: 22602
aacaaaaccttatcaaaaaaaatccacacgaaaacgccttcaaacaaaaatttcgcctactaaaacaacccaacgcgaaatcgataaaaaaaaaaccgccgacgtaaaaacccaacgcgaaatcgataaaaaaaaaaccgccgacgtaaaaacccaacgcgaaatcgataaaaaaaaaaccgccgacgtaaaaacccaacgcgaaatcgataaaaaaaaaaccgccgacgtaaaaacccaacgcgaaatcgataaaaaaaaaaccgccgacgtaaaaacccaacgcgaaatcgataaaaaaaaaaccgccgacgtaaaaacccaacgcgaaatcgataaaaaaaaaaccgccgacgtaaaaacccaacgcgaaatcgataaaaaaaaaaccgccgacgtaaaaacccaacgcgaaatcgataaaaaaaaaaccgccgacgtaaaaacccaacgcgaaatcgataaaaaaaaaaccgccgacgtaaaaacccaacgcgaaatcgataaaaaaaaaaccgccgacgtaaaaacccaacgcgaaatcgataaaaaaaaaaccgccgacgtaaaaacccaacgcgaaatcgataaaaaaaaaaccgccgacgtaaaaacccaacgcgaaatcgataaaaaaaaaaccgccgacgtaaaaacccaacgcgaaatcgataaaaaaaaaaccgccgacgtaaaaacccaacgcgaaatcgataaaaaaaaaaccgccgacgtaaaaacccaacgcgaaatcgataaaaaaaaaaccgccgacgtaaaaacccaacgcgaaatcgataaaaaaaaaaccgccgacgtaaaaacccaacgcgaaatcgataaaaaaaaaaccgccgacgtaaaaacccaacgcgaaatcgataaaaaaaaaaccgccgacgtaaaaacccaacgcgaaatcgataaaacaaaaaccgccgacgtaaaaacccaacgcgaaatcgataaaacaaaaaccgccgacgtaaaaacccaacgcgaaatcgataaaaaaaaaaccgccgacgtaaaaacccaacgcgaaatcgataaaaaaaaaaccgccgacgtaaaaacccaacgcgaaatccgtaaaaaaaaaaccgccgacgtaaacacccaacgcgaaatccgtaaaaaaaaaaccgccgacgtaaa

SEQ ID NO: 22603 - DNA, 1158 bp, Artificial Sequence
  chemically treated genomic DNA (Homo sapiens) CpG-island No: 22603
agtaagattttgttaaggggagtttatacgaaggcgtttttaaatagaaatttcgtttgttggggtaatttagcgcggggtcggtggagaaaaggtcgtcgacgtggggatttagcgcggggtcggtggagaaaaggtcgtcgacgtggggatttagcgcggggtcggtggagaaaaggtcgtcgacgtggggatttagcgcggggtcggtggagaaaaggtcgtcgacgtggagatttagcgcggggtcggtggagaaaaggtcgtcgacgtggggatttagcgcggggtcggtggagaaaaggtcgtcgacgtggggatttagcgcggggtcggtggagaaaaggtcgtcgacgtggggatttagcgcggggtcggtggagaaaaggtcgtcgacgtggggatttagcgcggggtcggtggagaaaaggtcgtcgacgtggggatttagcgcggggtcggtggagaaaaggtcgtcgacgtggagatttagcgcggggtcggtggagaaaaggtcgtcgacgtggagatttagcgcggggtcggtggagaaaaggtcgtcgacgtggggatttagcgcggggtcggtggagaaaaggtcgtcgacgtggggatttagcgcggggtcggtggagaaaaggtcgtcgacgtggagatttagcgcggggtcggtggagaaaaggtcgtcgacgtggagatttagcgcggggtcggtggagaaaaggtcgtcgacgtggagatttagcgcggggtcggtggagaaaaggtcgtcgacgtggagatttagcgcggggtcggtggagaaaaggtcgtcgacgtggagatttagcgcggggtcggtggagaaaaggtcgtcgacgtggagatttagcgcggggtcggtggagaaaaggtcgtcgacgtggggatttagcgcggggtcggtggagtaaaggtcgtcgacgtggagatttagcgcggggtcggtggagtaaaggtcgtcgacgtggagatttagcgcggggtcggtggagaaaaggtcgtcgacgtggagatttagcgcggggtcggtggagaaaaggtcgtcgacgtggggatttagcgcggggttcgtggagaaaaggtcgtcgacgtggatatttagcgcggggttcgtggagaaaaggtcgtcgacgtgga

SEQ ID NO: 22604 - DNA, 1158 bp, Artificial Sequence
  chemically treated genomic DNA (Homo sapiens) CpG-island No: 22604
tccacgtcgacgaccttttctccacgaaccccgcgctaaatatccacgtcgacgaccttttctccacgaaccccgcgctaaatccccacgtcgacgaccttttctccaccgaccccgcgctaaatctccacgtcgacgaccttttctccaccgaccccgcgctaaatctccacgtcgacgacctttactccaccgaccccgcgctaaatctccacgtcgacgacctttactccaccgaccccgcgctaaatccccacgtcgacgaccttttctccaccgaccccgcgctaaatctccacgtcgacgaccttttctccaccgaccccgcgctaaatctccacgtcgacgaccttttctccaccgaccccgcgctaaatctccacgtcgacgaccttttctccaccgaccccgcgctaaatctccacgtcgacgaccttttctccaccgaccccgcgctaaatctccacgtcgacgaccttttctccaccgaccccgcgctaaatctccacgtcgacgaccttttctccaccgaccccgcgctaaatccccacgtcgacgaccttttctccaccgaccccgcgctaaatccccacgtcgacgaccttttctccaccgaccccgcgctaaatctccacgtcgacgaccttttctccaccgaccccgcgctaaatctccacgtcgacgaccttttctccaccgaccccgcgctaaatccccacgtcgacgaccttttctccaccgaccccgcgctaaatccccacgtcgacgaccttttctccaccgaccccgcgctaaatccccacgtcgacgaccttttctccaccgaccccgcgctaaatccccacgtcgacgaccttttctccaccgaccccgcgctaaatccccacgtcgacgaccttttctccaccgaccccgcgctaaatctccacgtcgacgaccttttctccaccgaccccgcgctaaatccccacgtcgacgaccttttctccaccgaccccgcgctaaatccccacgtcgacgaccttttctccaccgaccccgcgctaaatccccacgtcgacgaccttttctccaccgaccccgcgctaaattaccccaacaaacgaaatttctatttaaaaacgccttcgtataaactccccttaacaaaatcttact

SEQ ID NO: 22605 - DNA, 846 bp, Artificial Sequence
  chemically treated genomic DNA (Homo sapiens) CpG-island No: 22605
tcgggtcggttgttcgggttttattttaaaataaggttcgaattgtagtagtcggagtcgatttttggagtttagcgtttagggcggattcgcgggagcgttttttggtaatcgttgttaaggagacgaagttcgggaaggagttttcgcgtttgcgtcgcggggtcgttcgcgtttgcgtttgcgcgtaagagaggcggggttagcgttcggtatggcggagttagatttggagtgcgagtagattcgtttgaagtgtattcgtaaggagggtttttttacggtgttttcggaatatagggtgcgcggggtgttattcgggtagttttgttcgtttcgttagcggtattgttcggttgggtttggggagtttcgtgtcgcgttgtcgcgtcgaggttttcggtacgggcgggaacgatagttttagagtttttcgcggcgggggcggaagtcggggcggggcgggtttaggattttcgatagtcggtttttggagatttgaggggtcggggcgggtttagggatgtttcgcgttcgcggagagacgggttcgggatttgggaagagtaggtttcgggatttagttcgggcgttgttgggtttagcgttcgagttgggttttgtaggttgagtcgcgagttatttgtttgtggggagaatttatattcgcgacgagttcgagtttgaaggttttcgttgggtttgggttgtatggagcggggtttagcgttgtttggcggttttacgcgaattttgggcgcgttttttgcggaggtgtcggtgtttttttttgtagagattaggagagagtttttgggcgttgggcggtgttgtttaggtgtacgg

SEQ ID NO: 22606 - DNA, 846 bp, Artificial Sequence
  chemically treated genomic DNA (Homo sapiens) CpG-island No: 22606
ccgtacacctaaacaacaccgcccaacgcccaaaaactctctcctaatctctacaaaaaaaaacaccgacacctccgcaaaaaacgcgcccaaaattcgcgtaaaaccgccaaacaacgctaaaccccgctccatacaacccaaacccaacgaaaaccttcaaactcgaactcgtcgcgaatataaattctccccacaaacaaataactcgcgactcaacctacaaaacccaactcgaacgctaaacccaacaacgcccgaactaaatcccgaaacctactcttcccaaatcccgaacccgtctctccgcgaacgcgaaacatccctaaacccgccccgacccctcaaatctccaaaaaccgactatcgaaaatcctaaacccgccccgccccgacttccgcccccgccgcgaaaaactctaaaactatcgttcccgcccgtaccgaaaacctcgacgcgacaacgcgacacgaaactccccaaacccaaccgaacaataccgctaacgaaacgaacaaaactacccgaataacaccccgcgcaccctatattccgaaaacaccgtaaaaaaaccctccttacgaatacacttcaaacgaatctactcgcactccaaatctaactccgccataccgaacgctaaccccgcctctcttacgcgcaaacgcaaacgcgaacgaccccgcgacgcaaacgcgaaaactccttcccgaacttcgtctccttaacaacgattaccaaaaaacgctcccgcgaatccgccctaaacgctaaactccaaaaatcgactccgactactacaattcgaaccttattttaaaataaaacccgaacaaccgacccga

SEQ ID NO: 22607 - DNA, 846 bp, Artificial Sequence
  chemically treated genomic DNA (Homo sapiens) CpG-island No: 22607
tcgtgtatttgggtaatatcgtttaacgtttagaggtttttttttggtttttgtagagggaggtatcggtattttcgtaagggacgcgtttagggttcgcgtgaagtcgttaggtagcgttggatttcgttttatgtagtttaagtttagcgggagtttttaagttcgaattcgtcgcgggtgtaaattttttttataaataagtggttcgcggtttagtttgtaaagtttagttcgggcgttgaatttagtagcgttcgagttggatttcggagtttgttttttttaagtttcgggttcgttttttcgcgggcgcgaggtatttttgagttcgtttcggttttttagatttttagggatcggttgtcgggggttttgagttcgtttcgtttcggttttcgttttcgtcgcggggaattttgggattgtcgttttcgttcgtgtcggaagtttcggcgcggtagcgcgatacgaggttttttagatttagtcgggtagtgtcgttagcgaggcgggtagagttgttcgggtggtatttcgcgtattttgtgtttcggaggtatcgtgaagaagttttttttacgaatatattttagacggatttgttcgtattttagatttggtttcgttatgtcgagcgttggtttcgttttttttgcgcgtaggcgtagacgcggacggtttcgcggcgtaggcgcgaaagttttttttcgggtttcgtttttttagtaacggttattaagagacgttttcgcgggttcgttttaggcgttgggttttagggatcggtttcgattgttgtagttcgggttttattttagggtgaagttcgggtagtcgattcgg

SEQ ID NO: 22608 - DNA, 846 bp, Artificial Sequence
  chemically treated genomic DNA (Homo sapiens) CpG-island No: 22608
ccgaatcgactacccgaacttcaccctaaaataaaacccgaactacaacaatcgaaaccgatccctaaaacccaacgcctaaaacgaacccgcgaaaacgtctcttaataaccgttactaaaaaaacgaaacccgaaaaaaaactttcgcgcctacgccgcgaaaccgtccgcgtctacgcctacgcgcaaaaaaaacgaaaccaacgctcgacataacgaaaccaaatctaaaatacgaacaaatccgtctaaaatatattcgtaaaaaaaacttcttcacgatacctccgaaacacaaaatacgcgaaataccacccgaacaactctacccgcctcgctaacgacactacccgactaaatctaaaaaacctcgtatcgcgctaccgcgccgaaacttccgacacgaacgaaaacgacaatcccaaaattccccgcgacgaaaacgaaaaccgaaacgaaacgaactcaaaacccccgacaaccgatccctaaaaatctaaaaaaccgaaacgaactcaaaaatacctcgcgcccgcgaaaaaacgaacccgaaacttaaaaaaaacaaactccgaaatccaactcgaacgctactaaattcaacgcccgaactaaactttacaaactaaaccgcgaaccacttatttataaaaaaaatttacacccgcgacgaattcgaacttaaaaactcccgctaaacttaaactacataaaacgaaatccaacgctacctaacgacttcacgcgaaccctaaacgcgtcccttacgaaaataccgatacctccctctacaaaaaccaaaaaaaaacctctaaacgttaaacgatattacccaaatacacga

SEQ ID NO: 22609 - DNA, 1234 bp, Artificial Sequence
  chemically treated genomic DNA (Homo sapiens) CpG-island No: 22609
ttcgaatcgggggtcggggatcgaggtttggggggaggggtttcgggtcgagggtcgaggttcggggtaaaggatttcgggttgggggtcgggggtttgggaagggtttcggtcggtggtcgggggtcgaggttcgggagaaggggtttcgggtcggtggtagaggttttggggaaggggtttcgggtcggggatcgagggtcgaggttcgggaaaaggggtttcgggttggtggtttaggttttggggaaggggtttcgggtcgggtatcgggggacgaggttcgggaaaaggggttttaggtcggtggtcgaggttttggggatggggttcgggtcggggatcgggggacgacgatcgggaaaaggggttttaggtcggtggtcgaggttttggggatggggtttcgggggatcgacggtcgaggttcgagtttttttgagttttgttcgcggttttaggtgggcggagtttacgttagtgggagaagcggtttcgtttcgcgcgcgagttttcggaggacggtcgcgattttttatcgtttatggttataatgataggagtagtattcggagagggagaagggacgttaatttcgggcggtgttaggtttcggcggcgatcgaatcgattaagttgtattcggcggggattttcggggtcgtcgttttattttcggtcgtacgggatgttttcgcgagaggatggtggtcggtttcgttagaggggcggggcgcggttgcgcggcgcgcggtcgttatggtgacgtacgtcgttggcgcgaggattttttgtgagtcgttttcggtttcgcggtcgcggaggtgtggggattcgggtttgcgtcggagggggcggtgggtttatttatgggtttttttaaaagtaaagagaaatttcggaaaggtaaaggaggcgtaggcgttgggtttttcgcgttttcgtttttgggcgcgggtttagggcggggttgggttgggcggggcggtgtgagcgtaggcgttaggttcggttcggtgcgaatcgtttttgtcgtcgagttcgttacggacggcgcgtttttcgtttgaggcggttacggaaacgcggagattcgagatttgaagttagtttattttggatttacgtaggcgattgaagacgatgggatttattgttttgtattcggtaagtttcgggtttaacggatgatttatatattttaggtgaggagtaaaagaagggatttatttat

SEQ ID NO: 22610 - DNA, 1234 bp, Artificial Sequence
  chemically treated genomic DNA (Homo sapiens) CpG-island No: 22610
ataaataaatcccttcttttactcctcacctaaaatatataaatcatccgttaaacccgaaacttaccgaatacaaaacaataaatcccatcgtcttcaatcgcctacgtaaatccaaaataaactaacttcaaatctcgaatctccgcgtttccgtaaccgcctcaaacgaaaaacgcgccgtccgtaacgaactcgacgacaaaaacgattcgcaccgaaccgaacctaacgcctacgctcacaccgccccgcccaacccaaccccgccctaaacccgcgcccaaaaacgaaaacgcgaaaaacccaacgcctacgcctcctttacctttccgaaatttctctttacttttaaaaaaacccataaataaacccaccgccccctccgacgcaaacccgaatccccacacctccgcgaccgcgaaaccgaaaacgactcacaaaaaatcctcgcgccaacgacgtacgtcaccataacgaccgcgcgccgcgcaaccgcgccccgcccctctaacgaaaccgaccaccatcctctcgcgaaaacatcccgtacgaccgaaaataaaacgacgaccccgaaaatccccgccgaatacaacttaatcgattcgatcgccgccgaaacctaacaccgcccgaaattaacgtcccttctccctctccgaatactactcctatcattataaccataaacgataaaaaatcgcgaccgtcctccgaaaactcgcgcgcgaaacgaaaccgcttctcccactaacgtaaactccgcccacctaaaaccgcgaacaaaactcaaaaaaactcgaacctcgaccgtcgatcccccgaaaccccatccccaaaacctcgaccaccgacctaaaaccccttttcccgatcgtcgtcccccgatccccgacccgaaccccatccccaaaacctcgaccaccgacctaaaaccccttttcccgaacctcgtcccccgatacccgacccgaaaccccttccccaaaacctaaaccaccaacccgaaaccccttttcccgaacctcgaccctcgatccccgacccgaaaccccttccccaaaacctctaccaccgacccgaaaccccttctcccgaacctcgacccccgaccaccgaccgaaacccttcccaaacccccgacccccaacccgaaatcctttaccccgaacctcgaccctcgacccgaaacccctccccccaaacctcgatccccgacccccgattcgaa

SEQ ID NO: 22611 - DNA, 1234 bp, Artificial Sequence
  chemically treated genomic DNA (Homo sapiens) CpG-island No: 22611
ataggtggatttttttttttgttttttatttgaaatatatggattattcgttagattcgggatttatcgaatgtagggtagtgggttttatcgtttttagtcgtttgcgtgggtttagaataagttggttttaagtttcgagttttcgcgttttcgtaatcgttttaggcgggaaacgcgtcgttcgtggcggattcggcggtaggaacggttcgtatcgggtcgagtttggcgtttgcgtttatatcgtttcgtttagtttagtttcgttttgggttcgcgtttaggggcggagacgcggggagtttagcgtttgcgttttttttattttttcggggtttttttttgtttttggaaaggtttatgggtgagtttatcgtttttttcgacgtaagttcgggtttttatattttcgcggtcgcggagtcgggagcgatttataaaaggttttcgcgttagcggcgtgcgttattatggcgatcgcgcgtcgcgtagtcgcgtttcgtttttttggcgggatcggttattattttttcgcgagagtatttcgtgcgatcggaagtggggcggcgatttcggaagttttcgtcgggtgtagtttggtcggttcgatcgtcgtcgggatttgatatcgttcggagttggcgtttttttttttttttcgagtgttgtttttgttattgtggttatggacggtaagaggtcgcggtcgtttttcggggattcgcgcgcggggcggggtcgttttttttattggcgtgggtttcgtttatttggggtcgcgggtaggatttaggagagttcgggtttcgatcgtcgatttttcgggattttatttttagggtttcgattatcgatttgggattttttttttcggtcgtcgtttttcgattttcgattcggattttatttttagggtttcgattatcgatttgggattttttttttcgagtttcgtttttcgatattcgattcggaattttttttttagggtttagattattaattcgggattttttttttcgggtttcgattttcgattttcgattcggaattttttttttagggtttttattatcgattcgggattttttttttcgggtttcgattttcgattatcgatcgggattttttttaggttttcgatttttaattcgagattttttatttcgggtttcgattttcgattcgggatttttttttttaggtttcgattttcgattttcgattcggg

SEQ ID NO: 22612 - DNA, 1234 bp, Artificial Sequence
  chemically treated genomic DNA (Homo sapiens) CpG-island No: 22612
cccgaatcgaaaatcgaaaatcgaaacctaaaaaaaaaaatcccgaatcgaaaatcgaaacccgaaataaaaaatctcgaattaaaaatcgaaaacctaaaaaaaatcccgatcgataatcgaaaatcgaaacccgaaaaaaaaaatcccgaatcgataataaaaaccctaaaaaaaaaattccgaatcgaaaatcgaaaatcgaaacccgaaaaaaaaaatcccgaattaataatctaaaccctaaaaaaaaaattccgaatcgaatatcgaaaaacgaaactcgaaaaaaaaaatcccaaatcgataatcgaaaccctaaaaataaaatccgaatcgaaaatcgaaaaacgacgaccgaaaaaaaaaatcccaaatcgataatcgaaaccctaaaaataaaatcccgaaaaatcgacgatcgaaacccgaactctcctaaatcctacccgcgaccccaaataaacgaaacccacgccaataaaaaaaacgaccccgccccgcgcgcgaatccccgaaaaacgaccgcgacctcttaccgtccataaccacaataacaaaaacaacactcgaaaaaaaaaaaaaaacgccaactccgaacgatatcaaatcccgacgacgatcgaaccgaccaaactacacccgacgaaaacttccgaaatcgccgccccacttccgatcgcacgaaatactctcgcgaaaaaataataaccgatcccgccaaaaaaacgaaacgcgactacgcgacgcgcgatcgccataataacgcacgccgctaacgcgaaaaccttttataaatcgctcccgactccgcgaccgcgaaaatataaaaacccgaacttacgtcgaaaaaaacgataaactcacccataaacctttccaaaaacaaaaaaaaaccccgaaaaaataaaaaaaacgcaaacgctaaactccccgcgtctccgcccctaaacgcgaacccaaaacgaaactaaactaaacgaaacgatataaacgcaaacgccaaactcgacccgatacgaaccgttcctaccgccgaatccgccacgaacgacgcgtttcccgcctaaaacgattacgaaaacgcgaaaactcgaaacttaaaaccaacttattctaaacccacgcaaacgactaaaaacgataaaacccactaccctacattcgataaatcccgaatctaacgaataatccatatatttcaaataaaaaacaaaaaaaaaaatccacctat

SEQ ID NO: 22613 - DNA, 595 bp, Artificial Sequence
  chemically treated genomic DNA (Homo sapiens) CpG-island No: 22613
tttttcgcggtcgggtcgtttggggttgggtttttgtttcgtggggaggagcggtttaggtataacgttttttgagcgtttgttatgagttcgtagttttcggtttagcggcgtcgtgaacgatatcggtttcgcgaggagacgggcgacgcggtgataggaggttttcggggtgtttcgcgtaggggttcggtcgggttgatatttttttttttttttttattaggtttcgttttttttaaattattcggaggcggggtttgcgttaagtttcgtttcgtttttagcgttacggtcgcggatttcgggcggagtcgattttcggcggaagcgcgcggcgcgcggggaggttcgaattgattcgcggcggtcgtagatcgttggggatagataggtagcgtcgttattcgcgggattcgtagttttatttgtcgggcgaaggggttttggtcgggagagggtttagcgggcggaagcgcgtttttagagaagggtgcggtcgataatcgggggcgtttttggaaggtcgaggtatttaggttggagggaggggttggaggtgcgggggcgtttaattggaggggtttggatcgtt

SEQ ID NO: 22614 - DNA, 595 bp, Artificial Sequence
  chemically treated genomic DNA (Homo sapiens) CpG-island No: 22614
aacgatccaaacccctccaattaaacgcccccgcacctccaacccctccctccaacctaaatacctcgaccttccaaaaacgcccccgattatcgaccgcacccttctctaaaaacgcgcttccgcccgctaaaccctctcccgaccaaaaccccttcgcccgacaaataaaactacgaatcccgcgaataacgacgctacctatctatccccaacgatctacgaccgccgcgaatcaattcgaacctccccgcgcgccgcgcgcttccgccgaaaatcgactccgcccgaaatccgcgaccgtaacgctaaaaacgaaacgaaacttaacgcaaaccccgcctccgaataatttaaaaaaaacgaaacctaataaaaaaaaaaaaaaaaatatcaacccgaccgaacccctacgcgaaacaccccgaaaacctcctatcaccgcgtcgcccgtctcctcgcgaaaccgatatcgttcacgacgccgctaaaccgaaaactacgaactcataacaaacgctcaaaaaacgttatacctaaaccgctcctccccacgaaacaaaaacccaaccccaaacgacccgaccgcgaaaaa

SEQ ID NO: 22615 - DNA, 595 bp, Artificial Sequence
  chemically treated genomic DNA (Homo sapiens) CpG-island No: 22615
agcgatttaggtttttttagttgagcgttttcgtatttttagtttttttttttagtttgggtatttcggttttttaggggcgttttcggttatcgatcgtatttttttttagagacgcgttttcgttcgttgagttttttttcgattagagttttttcgttcggtagatggagttgcggatttcgcgggtgacggcgttatttgtttgtttttagcggtttgcggtcgtcgcggattagttcgggttttttcgcgcgtcgcgcgttttcgtcgggagtcggtttcgttcggggttcgcggtcgtgacgttgggggcggggcggggtttggcgtaggtttcgttttcgaataatttaggaggggcggggtttggtgaaaggggaggaggaggtgttagttcggtcgagtttttgcgcgaggtatttcgagagttttttgttatcgcgtcgttcgttttttcgcgggatcggtatcgtttacgacgtcgttgggtcgagggttgcgggtttatggtaggcgtttagggaacgttgtgtttgggtcgtttttttttacgagatagggatttagttttaggcgattcggtcgcggggaa

SEQ ID NO: 22616 - DNA, 595 bp, Artificial Sequence
  chemically treated genomic DNA (Homo sapiens) CpG-island No: 22616
ttccccgcgaccgaatcgcctaaaactaaatccctatctcgtaaaaaaaaacgacccaaacacaacgttccctaaacgcctaccataaacccgcaaccctcgacccaacgacgtcgtaaacgataccgatcccgcgaaaaaacgaacgacgcgataacaaaaaactctcgaaatacctcgcgcaaaaactcgaccgaactaacacctcctcctcccctttcaccaaaccccgcccctcctaaattattcgaaaacgaaacctacgccaaaccccgccccgcccccaacgtcacgaccgcgaaccccgaacgaaaccgactcccgacgaaaacgcgcgacgcgcgaaaaaacccgaactaatccgcgacgaccgcaaaccgctaaaaacaaacaaataacgccgtcacccgcgaaatccgcaactccatctaccgaacgaaaaaactctaatcgaaaaaaaactcaacgaacgaaaacgcgtctctaaaaaaaaatacgatcgataaccgaaaacgcccctaaaaaaccgaaatacccaaactaaaaaaaaaaactaaaaatacgaaaacgctcaactaaaaaaacctaaatcgct

SEQ ID NO: 22617 - DNA, 503 bp, Artificial Sequence
  chemically treated genomic DNA (Homo sapiens) CpG-island No: 22617
tcgggtgatcgcgttttttttatcgttcgagtagtcgttcgggttcgcgttggagtttggagagatttttgcgtcggggaaaagcgttggcgtttcgcgcggattggggttcgagtttcggttttttcgttcgttgcggtttcgcgttatgcgtttttcgttttttcgaggtgaagttacgcgttttacgcgagatggtgatcgaggaagcgttcgtttggcgtcggtttcgtgttttttcggattttaatcgcgattatagcgggttcgtttgagatttacgttggagcgggagtttcggacgtttggaggttcgtattttagcgcgcgttttttcgtcggtttgttttcgtttagtttttcgtttttcgtcggtcggcgttttttattttttaatttttttgcgttttttggtcgagttttttgttcgcgttttatgtttgggcgttttattttggttcggggtttttttttcgaattttgggtcgtattttttattgcgg

SEQ ID NO: 22618 - DNA, 503 bp, Artificial Sequence
  chemically treated genomic DNA (Homo sapiens) CpG-island No: 22618
ccgcaataaaaaatacgacccaaaattcgaaaaaaaaaccccgaaccaaaataaaacgcccaaacataaaacgcgaacaaaaaactcgaccaaaaaacgcaaaaaaattaaaaaataaaaaacgccgaccgacgaaaaacgaaaaactaaacgaaaacaaaccgacgaaaaaacgcgcgctaaaatacgaacctccaaacgtccgaaactcccgctccaacgtaaatctcaaacgaacccgctataatcgcgattaaaatccgaaaaaacacgaaaccgacgccaaacgaacgcttcctcgatcaccatctcgcgtaaaacgcgtaacttcacctcgaaaaaacgaaaaacgcataacgcgaaaccgcaacgaacgaaaaaaccgaaactcgaaccccaatccgcgcgaaacgccaacgcttttccccgacgcaaaaatctctccaaactccaacgcgaacccgaacgactactcgaacgataaaaaaaacgcgatcacccga

SEQ ID NO: 22619 - DNA, 503 bp, Artificial Sequence
  chemically treated genomic DNA (Homo sapiens) CpG-island No: 22619
tcgtagtgaggggtgcggtttagggttcggggagggggtttcgggttagagtgaagcgtttaggtatgaggcgcgggtagggggttcgattaagaggcgtaaggagattgaggggtgaggggcgtcggtcgacggggggcgggaggttgggcgggagtaggtcggcgagggagcgcgcgttggggtgcggatttttaggcgttcggggttttcgttttaacgtgggttttaagcgaattcgttgtgatcgcggttggggttcgaaggggtacggggtcggcgttagacgggcgttttttcggttattatttcgcgtgaaacgcgtggttttatttcgaaagggcgagaaacgtatggcgcgaagtcgtagcgggcggaggagtcggaattcgaattttagttcgcgcggggcgttagcgttttttttcggcgtaggggtttttttaggttttagcgcgggttcgggcggttgttcgggcggtggaagggacgcggttattcgg

SEQ ID NO: 22620 - DNA, 503 bp, Artificial Sequence
  chemically treated genomic DNA (Homo sapiens) CpG-island No: 22620
ccgaataaccgcgtcccttccaccgcccgaacaaccgcccgaacccgcgctaaaacctaaaaaaacccctacgccgaaaaaaaacgctaacgccccgcgcgaactaaaattcgaattccgactcctccgcccgctacgacttcgcgccatacgtttctcgccctttcgaaataaaaccacgcgtttcacgcgaaataataaccgaaaaaacgcccgtctaacgccgaccccgtaccccttcgaaccccaaccgcgatcacaacgaattcgcttaaaacccacgttaaaacgaaaaccccgaacgcctaaaaatccgcaccccaacgcgcgctccctcgccgacctactcccgcccaacctcccgccccccgtcgaccgacgcccctcacccctcaatctccttacgcctcttaatcgaaccccctacccgcgcctcatacctaaacgcttcactctaacccgaaaccccctccccgaaccctaaaccgcacccctcactacga

SEQ ID NO: 22621 - DNA, 533 bp, Artificial Sequence
  chemically treated genomic DNA (Homo sapiens) CpG-island No: 22621
ttcgtatttttagttcggcgttagtttcggttcggtgggttttttggttttttacgtttcggttttatttgtatttattggttttgcgtttgttgtagtaacgttacgttggggtcggatttggtgagcgggtcgcggtttagtaggtgtcggtagttgagtcgtagttttattttcgaggcgtagggcgcgggtaaattttcgggggttgtcgtcgtttcgcgtttcgagttcgcgtttatgttttcggcgttcgggggttcggttgggcgtattgaggggtcgttgttcgcgagtcggcgtcgtcgcggcgttcgggaaatggtggtcggtttaggcgtggtcgcgtttttttgaacgtttgtcgggcgcgggcgtacgtggttcgggcggtcgcggcgcggggattgtagggggtggggcgcggtcggggggcggggtcggggaggggcgcggcgggaaatgagggtagggggtaaggtaggggtgtttttcggagatgttcgggaggagatagtttttaatttttcggg

SEQ ID NO: 22622 - DNA, 533 bp, Artificial Sequence
  chemically treated genomic DNA (Homo sapiens) CpG-island No: 22622
cccgaaaaattaaaaactatctcctcccgaacatctccgaaaaacacccctaccttaccccctaccctcatttcccgccgcgcccctccccgaccccgccccccgaccgcgccccaccccctacaatccccgcgccgcgaccgcccgaaccacgtacgcccgcgcccgacaaacgttcaaaaaaacgcgaccacgcctaaaccgaccaccatttcccgaacgccgcgacgacgccgactcgcgaacaacgacccctcaatacgcccaaccgaacccccgaacgccgaaaacataaacgcgaactcgaaacgcgaaacgacgacaacccccgaaaatttacccgcgccctacgcctcgaaaataaaactacgactcaactaccgacacctactaaaccgcgacccgctcaccaaatccgaccccaacgtaacgttactacaacaaacgcaaaaccaataaatacaaataaaaccgaaacgtaaaaaaccaaaaaacccaccgaaccgaaactaacgccgaactaaaaatacgaa

SEQ ID NO: 22623 - DNA, 533 bp, Artificial Sequence
  chemically treated genomic DNA (Homo sapiens) CpG-island No: 22623
ttcggggaattagaagttgttttttttcgggtattttcgaggggtatttttgttttgttttttgtttttatttttcgtcgcgttttttttcggtttcgtttttcggtcgcgttttattttttgtagttttcgcgtcgcggtcgttcgagttacgtgcgttcgcgttcggtaggcgtttagggaagcgcggttacgtttgggtcggttattatttttcgggcgtcgcggcggcgtcgattcgcgggtagcggttttttagtgcgtttagtcgggttttcgaacgtcgggagtatgagcgcgggttcggagcgcggggcggcggtaattttcgggggtttgttcgcgttttgcgtttcgaaggtggagttgcggtttagttgtcggtatttgttggatcgcgattcgtttattaagttcgattttagcgtggcgttgttgtagtaggcgtagggttagtgggtgtaggtagggtcggggcgtgggagattaaaaggtttatcgggtcggggttggcgtcgagttggggatgcgga

SEQ ID NO: 22624 - DNA, 533 bp, Artificial Sequence
  chemically treated genomic DNA (Homo sapiens) CpG-island No: 22624
tccgcatccccaactcgacgccaaccccgacccgataaaccttttaatctcccacgccccgaccctacctacacccactaaccctacgcctactacaacaacgccacgctaaaatcgaacttaataaacgaatcgcgatccaacaaataccgacaactaaaccgcaactccaccttcgaaacgcaaaacgcgaacaaacccccgaaaattaccgccgccccgcgctccgaacccgcgctcatactcccgacgttcgaaaacccgactaaacgcactaaaaaaccgctacccgcgaatcgacgccgccgcgacgcccgaaaaataataaccgacccaaacgtaaccgcgcttccctaaacgcctaccgaacgcgaacgcacgtaactcgaacgaccgcgacgcgaaaactacaaaaaataaaacgcgaccgaaaaacgaaaccgaaaaaaaacgcgacgaaaaataaaaacaaaaaacaaaacaaaaatacccctcgaaaatacccgaaaaaaaacaacttctaattccccgaa

SEQ ID NO: 22625 - DNA, 513 bp, Artificial Sequence
  chemically treated genomic DNA (Homo sapiens) CpG-island No: 22625
acgcgtttttggggacgtcgtcgcgcggacgcgagttgtcgttcgagcggggcggtgtttgtttagtttcggttaattttgagttcggtgggcgggagaattttcggtttcgtttttttttaattttttttaaagttttttgattcgttttcgtttaaatacgcgtcgtagttagagtaggcgggttcgtgtggacgttcggttagtttttagtttggtgggcgggaggatgttagggttcgtttcgtttcgttttattcgaagtttttcgggtcgttttcgtttaaatacgcgttgtatttcgagttgggtggtgttcgtcgagttttggttagtcggtgggcgggaggacgttcgggttcgtttcgtttcgtttcgttttaaagttttttgggacgtttttatttatgcgcgtgtcgtatcgggtttagtagtgtcggtttagttttagttaattttgagtcgagtgggtcgcgaggatttagtgttaagtttgttgtttttggtttcgtt

SEQ ID NO: 22626 - DNA, 513 bp, Artificial Sequence
  chemically treated genomic DNA (Homo sapiens) CpG-island No: 22626
aacgaaaccaaaaacaacaaacttaacactaaatcctcgcgacccactcgactcaaaattaactaaaactaaaccgacactactaaacccgatacgacacgcgcataaataaaaacgtcccaaaaaactttaaaacgaaacgaaacgaaacgaacccgaacgtcctcccgcccaccgactaaccaaaactcgacgaacaccacccaactcgaaatacaacgcgtatttaaacgaaaacgacccgaaaaacttcgaataaaacgaaacgaaacgaaccctaacatcctcccgcccaccaaactaaaaactaaccgaacgtccacacgaacccgcctactctaactacgacgcgtatttaaacgaaaacgaatcaaaaaactttaaaaaaaattaaaaaaaaacgaaaccgaaaattctcccgcccaccgaactcaaaattaaccgaaactaaacaaacaccgccccgctcgaacgacaactcgcgtccgcgcgacgacgtccccaaaaacgcgt

SEQ ID NO: 22627 - DNA, 513 bp, Artificial Sequence
  chemically treated genomic DNA (Homo sapiens) CpG-island No: 22627
agcggggttaggaataatagatttagtattgagttttcgcggtttattcggtttaggattggttgaagttgggtcggtattgttgggttcggtgcggtacgcgtatgggtgggggcgttttaagaggttttagggcggagcgaggcggggcgagttcgggcgttttttcgtttatcgattagttaaggttcggcgggtattatttagttcgggatgtagcgcgtgtttgggcgggggcgattcgggaggtttcggatggaacgaggcggagcgagttttggtattttttcgtttattaggttaaggattggtcgaacgtttatacgggttcgtttgttttggttgcggcgcgtgtttgggcgggggcgagttaggaggttttaaggaggattgaggggaggcggggtcgggagttttttcgtttatcgggtttaggattggtcgaagttaggtaggtatcgtttcgttcgggcggtagttcgcgttcgcgcggcggcgtttttagaggcgcgt

SEQ ID NO: 22628 - DNA, 513 bp, Artificial Sequence
  chemically treated genomic DNA (Homo sapiens) CpG-island No: 22628
acgcgcctctaaaaacgccgccgcgcgaacgcgaactaccgcccgaacgaaacgatacctacctaacttcgaccaatcctaaacccgataaacgaaaaaactcccgaccccgcctcccctcaatcctccttaaaacctcctaactcgcccccgcccaaacacgcgccgcaaccaaaacaaacgaacccgtataaacgttcgaccaatccttaacctaataaacgaaaaaataccaaaactcgctccgcctcgttccatccgaaacctcccgaatcgcccccgcccaaacacgcgctacatcccgaactaaataatacccgccgaaccttaactaatcgataaacgaaaaaacgcccgaactcgccccgcctcgctccgccctaaaacctcttaaaacgcccccacccatacgcgtaccgcaccgaacccaacaataccgacccaacttcaaccaatcctaaaccgaataaaccgcgaaaactcaatactaaatctattattcctaaccccgct

SEQ ID NO: 22629 - DNA, 749 bp, Artificial Sequence
  chemically treated genomic DNA (Homo sapiens) CpG-island No: 22629
gtgcgcgcgcgtcgcggggaggtgttgtcgagggcggagcgggagggggcgtggtttcgcgcgggcggtcgttgacggcgaggtttcgtttcggatgtcgcgtgtcgttgaaagggcggcggcgattggtcggcgtcgcgggggcgggcggggcggaaggttttggagggggttggcgggttttggaagttttcgtcggacgggtatatagagttcgggattggtcggcggcggagtcgggggacggcgatagcgggtcggcgggtcgtaggagggggttatgggtaaagattattattagacgttgggtttggttcgcggcgcgtcggacgaggagattaagcgggtttatcgtcgttaggcgttgcgttattattcggataagaataaggagttcggcgtcgaggagaagtttaaggagatcgttgaggtttacgacgtgtttagcgattcgcgtaagcgcgagattttcgatcgttacggggaggaaggtgtgtgttcgcggttaggggcgcggtttcgttttttgatagatagggaaattgaggtacgttggtttttttcggcggattttcgggaaggacgtttcgggtcgtggggtcgagttgtttcgattttcggtttcgcgggttttcgatttcggattggcggacgcgcggtgggagtttaaaatataaagggtaggtgttattttattttgagttattaggggagtcgtagatagattcgtttagaaatcggtaaggttg

SEQ ID NO: 22630 - DNA, 749 bp, Artificial Sequence
  chemically treated genomic DNA (Homo sapiens) CpG-island No: 22630
caaccttaccgatttctaaacgaatctatctacgactcccctaataactcaaaataaaataacacctaccctttatattttaaactcccaccgcgcgtccgccaatccgaaatcgaaaacccgcgaaaccgaaaatcgaaacaactcgaccccacgacccgaaacgtccttcccgaaaatccgccgaaaaaaaccaacgtacctcaatttccctatctatcaaaaaacgaaaccgcgcccctaaccgcgaacacacaccttcctccccgtaacgatcgaaaatctcgcgcttacgcgaatcgctaaacacgtcgtaaacctcaacgatctccttaaacttctcctcgacgccgaactccttattcttatccgaataataacgcaacgcctaacgacgataaacccgcttaatctcctcgtccgacgcgccgcgaaccaaacccaacgtctaataataatctttacccataaccccctcctacgacccgccgacccgctatcgccgtcccccgactccgccgccgaccaatcccgaactctatatacccgtccgacgaaaacttccaaaacccgccaaccccctccaaaaccttccgccccgcccgcccccgcgacgccgaccaatcgccgccgccctttcaacgacacgcgacatccgaaacgaaacctcgccgtcaacgaccgcccgcgcgaaaccacgccccctcccgctccgccctcgacaacacctccccgcgacgcgcgcgcac

SEQ ID NO: 22631 - DNA, 749 bp, Artificial Sequence
  chemically treated genomic DNA (Homo sapiens) CpG-island No: 22631
tagttttatcgatttttgaacgagtttatttgcggtttttttggtggtttaagatggaatagtatttgttttttgtgttttgggtttttatcgcgcgttcgttaattcgaggtcggaggttcgcgaggtcggaggtcggggtagttcggttttacggttcggggcgtttttttcgggggttcgtcgagaggggttagcgtgttttagtttttttgtttgttaaaaggcggggtcgcgtttttggtcgcgagtatatattttttttttcgtagcggtcgaagatttcgcgtttgcgcgggtcgttgagtacgtcgtaggttttagcgatttttttgaattttttttcggcgtcgggttttttgtttttgttcgggtggtagcgtagcgtttggcggcggtaggttcgtttgattttttcgttcgacgcgtcgcgggttaggtttaacgtttggtagtagtttttatttatgatttttttttgcggttcgtcgattcgttgtcgtcgtttttcggtttcgtcgtcgattagtttcggattttatatattcgttcggcggaagtttttagagttcgttagttttttttagaatttttcgtttcgttcgttttcgcggcgtcggttaatcgtcgtcgtttttttagcgatacgcgatattcggggcggggtttcgtcgttaacggtcgttcgcgcggggttacgttttttttcgtttcgttttcggtaatattttttcgcggcgcgcgcgtat

SEQ ID NO: 22632 - DNA, 749 bp, Artificial Sequence
  chemically treated genomic DNA (Homo sapiens) CpG-island No: 22632
atacgcgcgcgccgcgaaaaaatattaccgaaaacgaaacgaaaaaaaacgtaaccccgcgcgaacgaccgttaacgacgaaaccccgccccgaatatcgcgtatcgctaaaaaaacgacgacgattaaccgacgccgcgaaaacgaacgaaacgaaaaattctaaaaaaaactaacgaactctaaaaacttccgccgaacgaatatataaaatccgaaactaatcgacgacgaaaccgaaaaacgacgacaacgaatcgacgaaccgcaaaaaaaaatcataaataaaaactactaccaaacgttaaacctaacccgcgacgcgtcgaacgaaaaaatcaaacgaacctaccgccgccaaacgctacgctaccacccgaacaaaaacaaaaaacccgacgccgaaaaaaaattcaaaaaaatcgctaaaacctacgacgtactcaacgacccgcgcaaacgcgaaatcttcgaccgctacgaaaaaaaaaatatatactcgcgaccaaaaacgcgaccccgccttttaacaaacaaaaaaactaaaacacgctaacccctctcgacgaacccccgaaaaaaacgccccgaaccgtaaaaccgaactaccccgacctccgacctcgcgaacctccgacctcgaattaacgaacgcgcgataaaaacccaaaacacaaaaaacaaatactattccatcttaaaccaccaaaaaaaccgcaaataaactcgttcaaaaatcgataaaacta

SEQ ID NO: 22633 - DNA, 616 bp, Artificial Sequence
  chemically treated genomic DNA (Homo sapiens) CpG-island No: 22633
ttattcgtgatgatgtcgtcgtaatcgtcgcgttgaacgttttgatttacgtcgtatagtataacgaaaatttgttggttgtcgttgttaatgtcgttcgcgttcgcgttattttgggtgaaattttcgatgcgttggaagtcgttttcgatcgttatttggtgttaagttagtgtgttatcggcgtgattgcgtaaagttattattagtttgagaaatcggttttcgagttcgatgttattgttgcgtaaacggagtagttttttgtcgataatggtcgtcgttcgcgtattttgatcgttaagatgggttaggatggatacgatcgcggcgcgaaagtgatcgttagcgtttatttcgatttcggtttcgacgtagatttaagttcgatgttttttatatttgaagagatcgttcgtttggtcgtagaaaacgacgtttacgtagtgggcgttatttttattggttgtcggttttaaacgttgatttcggattgtcgagcgttgaaaaatgggacggagatattgttgttcgggtgggtatacgcgagataagtttttgaaatcgggtggggattaggttagttttatgttaagtggcgatttgattgtatcga

SEQ ID NO: 22634 - DNA, 616 bp, Artificial Sequence
  chemically treated genomic DNA (Homo sapiens) CpG-island No: 22634
tcgatacaatcaaatcgccacttaacataaaactaacctaatccccacccgatttcaaaaacttatctcgcgtatacccacccgaacaacaatatctccgtcccatttttcaacgctcgacaatccgaaatcaacgtttaaaaccgacaaccaataaaaataacgcccactacgtaaacgtcgttttctacgaccaaacgaacgatctcttcaaatataaaaaacatcgaacttaaatctacgtcgaaaccgaaatcgaaataaacgctaacgatcactttcgcgccgcgatcgtatccatcctaacccatcttaacgatcaaaatacgcgaacgacgaccattatcgacaaaaaactactccgtttacgcaacaataacatcgaactcgaaaaccgatttctcaaactaataataactttacgcaatcacgccgataacacactaacttaacaccaaataacgatcgaaaacgacttccaacgcatcgaaaatttcacccaaaataacgcgaacgcgaacgacattaacaacgacaaccaacaaattttcgttatactatacgacgtaaatcaaaacgttcaacgcgacgattacgacgacatcatcacgaataa

SEQ ID NO: 22635 - DNA, 616 bp, Artificial Sequence
  chemically treated genomic DNA (Homo sapiens) CpG-island No: 22635
tcggtataattaaatcgttatttggtataggattgatttaatttttattcggttttagaagtttatttcgcgtatatttattcggatagtaatattttcgttttattttttagcgttcgatagttcgggattagcgtttaggatcggtagttagtgaggatggcgtttattacgtgaacgtcgttttttacggttaggcgggcgatttttttaggtgtagagaatatcgggtttaaatttacgtcgaaatcgagatcggaataggcgttggcgattattttcgcgtcgcgatcgtgtttattttggtttattttagcgattagaatgcgcgggcgacgattattgtcggtaaggaattgtttcgtttgcgtaataatggtatcgaattcggaggtcgattttttagattgatgatagttttgcgtaattacgtcggtaatatattggtttggtattagataacggtcgaaagcgatttttagcgtatcggaaattttatttagggtggcgcgaacgcgagcggtattaatagcggtagttagtaggttttcgttatgttgtgcggcgtgagttagggcgtttaacgcggcggttacggcggtattattacgggtgg

SEQ ID NO: 22636 - DNA, 616 bp, Artificial Sequence
  chemically treated genomic DNA (Homo sapiens) CpG-island No: 22636
ccacccgtaataataccgccgtaaccgccgcgttaaacgccctaactcacgccgcacaacataacgaaaacctactaactaccgctattaataccgctcgcgttcgcgccaccctaaataaaatttccgatacgctaaaaatcgctttcgaccgttatctaataccaaaccaatatattaccgacgtaattacgcaaaactatcatcaatctaaaaaatcgacctccgaattcgataccattattacgcaaacgaaacaattccttaccgacaataatcgtcgcccgcgcattctaatcgctaaaataaaccaaaataaacacgatcgcgacgcgaaaataatcgccaacgcctattccgatctcgatttcgacgtaaatttaaacccgatattctctacacctaaaaaaatcgcccgcctaaccgtaaaaaacgacgttcacgtaataaacgccatcctcactaactaccgatcctaaacgctaatcccgaactatcgaacgctaaaaaataaaacgaaaatattactatccgaataaatatacgcgaaataaacttctaaaaccgaataaaaattaaatcaatcctataccaaataacgatttaattataccga

SEQ ID NO: 22637 - DNA, 611 bp, Artificial Sequence
  chemically treated genomic DNA (Homo sapiens) CpG-island No: 22637
aatacgcgcggaatgtttttttagaagtcgtcgtcggttaagtgcgtaatggtatgtatatcgatttttttaattaattttagtattgattttacgtaaatgcgggtcggtgttagtagatgatcggttaatggtttattattaagttcggtggtttgcggattataatcgttgattttaagaattttgcgtattagcgaatagtcgttcgagtgtggatcgttggaatcgagtgtaattagtatatcgtcgtcgttgattttagagtcgtcgatgatttttgatttttttattacgttaacgtagaaattcgcgatatcgtaatttttatcgtgatatattttcggtatttttgtcgtttttttatttattagtgaataatttgattgtatatattagtcgtaatatttatcgcggcgatcgcggttttaatttgtttttttggaagtatatggcgtttgtattagtatggcgattttgtaaggacgaggatacgtttggtatttaaaacgaacggcgtgtgtaatggcgcgataaatgttttgttttataatttgtaaagatatcgtcgcgtagtttttatttatggtttgcgttgagtaatagtaatt

SEQ ID NO: 22638 - DNA, 611 bp, Artificial Sequence
  chemically treated genomic DNA (Homo sapiens) CpG-island No: 22638
aattactattactcaacgcaaaccataaataaaaactacgcgacgatatctttacaaattataaaacaaaacatttatcgcgccattacacacgccgttcgttttaaataccaaacgtatcctcgtccttacaaaatcgccatactaatacaaacgccatatacttccaaaaaaacaaattaaaaccgcgatcgccgcgataaatattacgactaatatatacaatcaaattattcactaataaataaaaaaacgacaaaaataccgaaaatatatcacgataaaaattacgatatcgcgaatttctacgttaacgtaataaaaaaatcaaaaatcatcgacgactctaaaatcaacgacgacgatatactaattacactcgattccaacgatccacactcgaacgactattcgctaatacgcaaaattcttaaaatcaacgattataatccgcaaaccaccgaacttaataataaaccattaaccgatcatctactaacaccgacccgcatttacgtaaaatcaatactaaaattaattaaaaaaatcgatatacataccattacgcacttaaccgacgacgacttctaaaaaaacattccgcgcgtatt

SEQ ID NO: 22639 - DNA, 611 bp, Artificial Sequence
  chemically treated genomic DNA (Homo sapiens) CpG-island No: 22639
gattattattatttaacgtaggttatgagtgaaaattacgcggcgatgtttttgtaagttgtggagtaggatatttgtcgcgttattgtatacgtcgttcgttttgagtgttagacgtattttcgtttttataaagtcgttatgttgatgtaagcgttatatatttttaggaaggtagattgaagtcgcgatcgtcgcgatggatgttgcggttgatgtatgtaattaggttgtttattggtgggtggggaaacggtagaaatgtcggggatgtattacggtgaggattacgatgtcgcgggtttttgcgttggcgtggtagaaaaattagaaattatcgacggttttaaagttagcgacggcgatgtgttgattgtattcggttttagcggtttatattcgaacggttattcgttggtgcgtaaaatttttgaagttagcggttgtgattcgtaaattatcgaatttgatggtaagttattagtcgattatttgttggtatcgattcgtatttacgtgaagttagtgttggagttgattgaaaaggtcgatgtgtatgttattgcgtatttgatcggcggcggtttttgggaaaatatttcgcgcgtatt

SEQ ID NO: 22640 - DNA, 611 bp, Artificial Sequence
  chemically treated genomic DNA (Homo sapiens) CpG-island No: 22640
aatacgcgcgaaatattttcccaaaaaccgccgccgatcaaatacgcaataacatacacatcgaccttttcaatcaactccaacactaacttcacgtaaatacgaatcgataccaacaaataatcgactaataacttaccatcaaattcgataatttacgaatcacaaccgctaacttcaaaaattttacgcaccaacgaataaccgttcgaatataaaccgctaaaaccgaatacaatcaacacatcgccgtcgctaactttaaaaccgtcgataatttctaatttttctaccacgccaacgcaaaaacccgcgacatcgtaatcctcaccgtaatacatccccgacatttctaccgtttccccacccaccaataaacaacctaattacatacatcaaccgcaacatccatcgcgacgatcgcgacttcaatctaccttcctaaaaatatataacgcttacatcaacataacgactttataaaaacgaaaatacgtctaacactcaaaacgaacgacgtatacaataacgcgacaaatatcctactccacaacttacaaaaacatcgccgcgtaattttcactcataacctacgttaaataataataatc

SEQ ID NO: 22641 - DNA, 868 bp, Artificial Sequence
  chemically treated genomic DNA (Homo sapiens) CpG-island No: 22641
atgattattgatcgtttcgggtagatgacggcggtgtatcgcgaggaagggttgagttagtatcgcgtatacgatagtcgtggatagttaattgtcgtgaaagatacgtagggttatgaaacgcggtatgaatataatatcgtcggtgatttgatcgtcgttattgtttcggacggtagtagaaacgggatatagtacgatgcgtggggaaaggtcgttcgtattacgtagggcgggttgacgcgtagtatggaatacgatgttgtcggacgggttattcgtttgattagtgaaaacggtagttatattatttttcgttacgatgtatttgatcggttgatataggaaatcggttttgacggtcgtatatagcgttattattacgatttgatcggtaaatttattcgtagcgaggatgagggtttggtgcgggttgttgatgcggatgagttcgtcgttgtcgttttaggtgtaatcgcggttagatagtaggttgtttaggtgttggttttgtaattgttcggtaggggtataagcggtggtgagtttataacggtcgaagttgcgtagcgtttttcggtgtaggcggtcgcgggtgtattttattagcggtgtgtcgtcgagttttatgtttgttaggtaatcgttgtcgtaggttagttattttacggcgggtaggttgttcggtatatagcggttcgttagtttttgcgcgttgtacgtatgtttggttttatgttgttagagtagtgttttcgtttgcgggtgatgtatcgtttgacgtttatcggttagtcggttttttttattatatttgtaatgtatcgttattcggtgtttttcgttgatatggttgatgtttgttagt

SEQ ID NO: 22642 - DNA, 868 bp, Artificial Sequence
  chemically treated genomic DNA (Homo sapiens) CpG-island No: 22642
actaacaaacatcaaccatatcaacgaaaaacaccgaataacgatacattacaaatataataaaaaaaaccgactaaccgataaacgtcaaacgatacatcacccgcaaacgaaaacactactctaacaacataaaaccaaacatacgtacaacgcgcaaaaactaacgaaccgctatataccgaacaacctacccgccgtaaaataactaacctacgacaacgattacctaacaaacataaaactcgacgacacaccgctaataaaatacacccgcgaccgcctacaccgaaaaacgctacgcaacttcgaccgttataaactcaccaccgcttatacccctaccgaacaattacaaaaccaacacctaaacaacctactatctaaccgcgattacacctaaaacgacaacgacgaactcatccgcatcaacaacccgcaccaaaccctcatcctcgctacgaataaatttaccgatcaaatcgtaataataacgctatatacgaccgtcaaaaccgatttcctatatcaaccgatcaaatacatcgtaacgaaaaataatataactaccgttttcactaatcaaacgaataacccgtccgacaacatcgtattccatactacgcgtcaacccgccctacgtaatacgaacgacctttccccacgcatcgtactatatcccgtttctactaccgtccgaaacaataacgacgatcaaatcaccgacgatattatattcataccgcgtttcataaccctacgtatctttcacgacaattaactatccacgactatcgtatacgcgatactaactcaacccttcctcgcgatacaccgccgtcatctacccgaaacgatcaataatcat

SEQ ID NO: 22643 - DNA, 868 bp, Artificial Sequence
  chemically treated genomic DNA (Homo sapiens) CpG-island No: 22643
gttgatagatattagttatattagcgaagggtatcgggtggcggtgtattataggtatgatgagaaaggtcggttgatcggtgagcgttagacggtgtattattcgtagacggaagtattgttttggtagtatgagattagatatgcgtataacgcgtaggggttggcgaatcgttgtatatcggatagtttgttcgtcgtggaatggttgatttacggtagcggttatttggtaggtatgaaattcggcgatatatcgttggtggagtatattcgcgatcgtttgtatcgggaaacgttgcgtagtttcggtcgttatgaatttattatcgtttatatttttgtcgggtagttatagagttagtatttgaatagtttgttgtttgatcgcgattatatttggaacgataacggcgaatttattcgtattagtagttcgtattagatttttattttcgttgcggataagtttgtcggttaggtcgtggtgataacgttgtgtgcggtcgttaaagtcggttttttgtattagtcggttaagtatatcgtaacggaaggtggtgtggttgtcgtttttattggttaggcggatgattcgttcggtagtatcgtattttatattgcgcgttagttcgttttgcgtggtacggacggtttttttttacgtatcgtattgtgtttcgtttttgttgtcgttcggggtaatgacggcggttaggttatcggcgatgttgtatttatatcgcgttttatggttttgcgtgttttttacggtaattaattgtttacggttgtcgtatgcgcggtattgatttagttttttttcgcggtgtatcgtcgttatttgttcgaagcggttagtggttat

SEQ ID NO: 22644 - DNA, 868 bp, Artificial Sequence
  chemically treated genomic DNA (Homo sapiens) CpG-island No: 22644
ataaccactaaccgcttcgaacaaataacgacgatacaccgcgaaaaaaaactaaatcaataccgcgcatacgacaaccgtaaacaattaattaccgtaaaaaacacgcaaaaccataaaacgcgatataaatacaacatcgccgataacctaaccgccgtcattaccccgaacgacaacaaaaacgaaacacaatacgatacgtaaaaaaaaaccgtccgtaccacgcaaaacgaactaacgcgcaatataaaatacgatactaccgaacgaatcatccgcctaaccaataaaaacgacaaccacaccaccttccgttacgatatacttaaccgactaatacaaaaaaccgactttaacgaccgcacacaacgttatcaccacgacctaaccgacaaacttatccgcaacgaaaataaaaatctaatacgaactactaatacgaataaattcgccgttatcgttccaaatataatcgcgatcaaacaacaaactattcaaatactaactctataactacccgacaaaaatataaacgataataaattcataacgaccgaaactacgcaacgtttcccgatacaaacgatcgcgaatatactccaccaacgatatatcgccgaatttcatacctaccaaataaccgctaccgtaaatcaaccattccacgacgaacaaactatccgatatacaacgattcgccaacccctacgcgttatacgcatatctaatctcatactaccaaaacaatacttccgtctacgaataatacaccgtctaacgctcaccgatcaaccgacctttctcatcatacctataatacaccgccacccgatacccttcgctaatataactaatatctatcaac

SEQ ID NO: 22645 - DNA, 526 bp, Artificial Sequence
  chemically treated genomic DNA (Homo sapiens) CpG-island No: 22645
gagcggagcggggcgggggtgaagggtcggagaggaggggtgggaatcgggagaggaatcggaaaggtgggagaggttcggtcgtcggtcgtcgtgggtttgtggatacgcgggaatgtgttcggagagggagtgcggagtcgtgaggtcgtttggaaatttttggaaggggtttacgaagaagtagtggtcgggaaaaggtgaagttcgtcgagggggcgtggacgtttgaatcgtttcgaagtgtgcgtggtcgcggtcggaagtgcgttttttttggacggatggatcgtttcggaagggaggtcgcgcgttaggtgaggttgcggatcggaatgagaggcggaaggggagggtgacgtaagggaagggagtcggaaggcgaggtgaggaggggagttgaaggggggcggagagggaggaaggacgcggaaagttgcgaagtgaaggggggggcgaggggtggggaaagggaaggtcgtgaaagaaatagtagttggtaattttatttatattgttttgtggt

SEQ ID NO: 22646 - DNA, 526 bp, Artificial Sequence
  chemically treated genomic DNA (Homo sapiens) CpG-island No: 22646
accacaaaacaatataaataaaattaccaactactatttctttcacgaccttccctttccccacccctcgccccccccttcacttcgcaactttccgcgtccttcctccctctccgccccccttcaactcccctcctcacctcgccttccgactcccttcccttacgtcaccctccccttccgcctctcattccgatccgcaacctcacctaacgcgcgacctcccttccgaaacgatccatccgtccaaaaaaaacgcacttccgaccgcgaccacgcacacttcgaaacgattcaaacgtccacgccccctcgacgaacttcaccttttcccgaccactacttcttcgtaaaccccttccaaaaatttccaaacgacctcacgactccgcactccctctccgaacacattcccgcgtatccacaaacccacgacgaccgacgaccgaacctctcccacctttccgattcctctcccgattcccacccctcctctccgacccttcacccccgccccgctccgctc

SEQ ID NO: 22647 - DNA, 526 bp, Artificial Sequence
  chemically treated genomic DNA (Homo sapiens) CpG-island No: 22647
gttataagataatatagatgaggttattagttattattttttttacggttttttttttttttatttttcgtttttttttttatttcgtaatttttcgcgtttttttttttttttcgtttttttttagtttttttttttatttcgtttttcgattttttttttttgcgttatttttttttttcgttttttatttcggttcgtagttttatttggcgcgcggtttttttttcggagcggtttattcgtttaggggaggcgtattttcggtcgcgattacgtatatttcggggcggtttaggcgtttacgttttttcggcggattttattttttttcggttattattttttcgtgagttttttttaggggtttttaggcggttttacgatttcgtatttttttttcggatatattttcgcgtgtttatagatttacggcggtcggcggtcggattttttttattttttcggtttttttttcggtttttatttttttttttcggttttttattttcgtttcgtttcgttt

SEQ ID NO: 22648 - DNA, 526 bp, Artificial Sequence
  chemically treated genomic DNA (Homo sapiens) CpG-island No: 22648
aaacgaaacgaaacgaaaataaaaaaccgaaaaaaaaaaataaaaaccgaaaaaaaaaccgaaaaaataaaaaaaatccgaccgccgaccgccgtaaatctataaacacgcgaaaatatatccgaaaaaaaaatacgaaatcgtaaaaccgcctaaaaacccctaaaaaaaactcacgaaaaaataataaccgaaaaaaaataaaatccgccgaaaaaacgtaaacgcctaaaccgccccgaaatatacgtaatcgcgaccgaaaatacgcctcccctaaacgaataaaccgctccgaaaaaaaaaccgcgcgccaaataaaactacgaaccgaaataaaaaacgaaaaaaaaaaataacgcaaaaaaaaaaaatcgaaaaacgaaataaaaaaaaaaactaaaaaaaaacgaaaaaaaaaaaaaaacgcgaaaaattacgaaataaaaaaaaaaacgaaaaataaaaaaaaaaaaaaccgtaaaaaaaataataactaataacctcatctatattatcttataac

SEQ ID NO: 22649 - DNA, 975 bp, Artificial Sequence
  chemically treated genomic DNA (Homo sapiens) CpG-island No: 22649
agcggttagttgtcggtacgtgcgtatggtgtgagttcggtggtcggcgttacgttagtggttaatatttcgcgggtgaattgcgggattatcgtttgaattttattttgcgggttaattatcgtcgtaatgtcgttgttggtgttgcgtaatagtgggcgcgttagttttagcgtacgtattcgcgttatttggaagtgttgttatggattaatagatttattaaattacgtatcgttggagatagttagtagatagtcggtattcgggcggaagtatcgcgtatttgttcgtcgagaatgatttcgtagtaaatagcgcgtagtttaatattattgcgatagggggtggatattggttcggtgacgagattggcgattaagacgggtacgagcgattaattcggggaaatcgtaaaggtttaggtttggttacgacgtgatcgacgtaggttttttcggtttggcggatttataataatagtattatgtaagcgcgttaatgatgaagtcggtattggcggggagatagttttgtttaatttgtgatatcgcggcgttggtgggggatatagtcgtgtcgttggtgatgttaatgagtatgtcgcgaaatgttaatatgttcgcgagggtgataataaatgaagggattttacggtacgcgatttattattcgttttaggtatcgagaagtagttttagaattagcgttataatgatggtaagtggtaaaggttagtttaattagacgttataaatcgtcgcgacgttatttaatagttttattattgagtcgacggaaaggtcgattttagtagaaattatgacgaatattatttttatcgcgaggatgtcggtaatcgcggtttggcgtaataggttggagacgttacgggcgtttaagtaggtattatcggtggtttaggtaaagaatagtatgattgcgatgatagttgtaattattacgaagatttgt

SEQ ID NO: 22650 - DNA, 975 bp, Artificial Sequence
  chemically treated genomic DNA (Homo sapiens) CpG-island No: 22650
acaaatcttcgtaataattacaactatcatcgcaatcatactattctttacctaaaccaccgataatacctacttaaacgcccgtaacgtctccaacctattacgccaaaccgcgattaccgacatcctcgcgataaaaataatattcgtcataatttctactaaaatcgacctttccgtcgactcaataataaaactattaaataacgtcgcgacgatttataacgtctaattaaactaacctttaccacttaccatcattataacgctaattctaaaactacttctcgatacctaaaacgaataataaatcgcgtaccgtaaaatcccttcatttattatcaccctcgcgaacatattaacatttcgcgacatactcattaacatcaccaacgacacgactatatcccccaccaacgccgcgatatcacaaattaaacaaaactatctccccgccaataccgacttcatcattaacgcgcttacataatactattattataaatccgccaaaccgaaaaaacctacgtcgatcacgtcgtaaccaaacctaaacctttacgatttccccgaattaatcgctcgtacccgtcttaatcgccaatctcgtcaccgaaccaatatccaccccctatcgcaataatattaaactacgcgctatttactacgaaatcattctcgacgaacaaatacgcgatacttccgcccgaataccgactatctactaactatctccaacgatacgtaatttaataaatctattaatccataacaacacttccaaataacgcgaatacgtacgctaaaactaacgcgcccactattacgcaacaccaacaacgacattacgacgataattaacccgcaaaataaaattcaaacgataatcccgcaattcacccgcgaaatattaaccactaacgtaacgccgaccaccgaactcacaccatacgcacgtaccgacaactaaccgct

SEQ ID NO: 22651 - DNA, 975 bp, Artificial Sequence
  chemically treated genomic DNA (Homo sapiens) CpG-island No: 22651
gtaggttttcgtgatgattgtagttattatcgtaattatgttgttttttatttggattatcgatggtgtttatttaagcgttcgtaacgtttttaatttgttacgttagatcgcgattatcggtattttcgcggtaggaatggtgttcgttataatttttgttgaaatcgattttttcgtcggtttaatgatggggttgttaggtggcgtcgcggcgatttgtgacgtttggttaggttggtttttgttatttattattattgtgacgttggttttgggattgtttttcggtgtttggaacggatggtgggtcgcgtatcgtaaagtttttttatttattgttattttcgcgggtatgttggtatttcgcggtatatttattggtattattaacggtacgattgtattttttattagcgtcgcgatgttataaattgggtaaagttattttttcgttagtatcggttttattattggcgcgtttgtataatgttattgttgtggattcgttaaatcggaagggtttacgtcgattacgtcgtaattaaatttgggtttttgcgattttttcggattaatcgttcgtattcgttttgatcgttagtttcgttatcgggttaatatttattttttgtcgtaatggtattgagttacgcgttatttgttacgagattattttcggcgagtaagtgcgcgatattttcgttcggatatcgattatttgttgattatttttaacgatgcgtggtttggtaaatttattggtttatggtaatatttttagatggcgcgaatgcgtgcgttggagttggcgcgtttattgttgcgtagtattaataacggtattacggcggtgattggttcgtagggtgagatttaggcgatgatttcgtagtttattcgcgaggtgttaattattaacgtgacgtcgattatcggatttatattatacgtacgtatcggtaattggtcgtt

SEQ ID NO: 22652 - DNA, 975 bp, Artificial Sequence
  chemically treated genomic DNA (Homo sapiens) CpG-island No: 22652
aacgaccaattaccgatacgtacgtataatataaatccgataatcgacgtcacgttaataattaacacctcgcgaataaactacgaaatcatcgcctaaatctcaccctacgaaccaatcaccgccgtaataccgttattaatactacgcaacaataaacgcgccaactccaacgcacgcattcgcgccatctaaaaatattaccataaaccaataaatttaccaaaccacgcatcgttaaaaataatcaacaaataatcgatatccgaacgaaaatatcgcgcacttactcgccgaaaataatctcgtaacaaataacgcgtaactcaataccattacgacaaaaaataaatattaacccgataacgaaactaacgatcaaaacgaatacgaacgattaatccgaaaaaatcgcaaaaacccaaatttaattacgacgtaatcgacgtaaacccttccgatttaacgaatccacaacaataacattatacaaacgcgccaataataaaaccgatactaacgaaaaaataactttacccaatttataacatcgcgacgctaataaaaaatacaatcgtaccgttaataataccaataaatataccgcgaaataccaacatacccgcgaaaataacaataaataaaaaaactttacgatacgcgacccaccatccgttccaaacaccgaaaaacaatcccaaaaccaacgtcacaataataataaataacaaaaaccaacctaaccaaacgtcacaaatcgccgcgacgccacctaacaaccccatcattaaaccgacgaaaaaatcgatttcaacaaaaattataacgaacaccattcctaccgcgaaaataccgataatcgcgatctaacgtaacaaattaaaaacgttacgaacgcttaaataaacaccatcgataatccaaataaaaaacaacataattacgataataactacaatcatcacgaaaacctac

SEQ ID NO: 22653 - DNA, 508 bp, Artificial Sequence
  chemically treated genomic DNA (Homo sapiens) CpG-island No: 22653
tttttgagtttttatcggatcgatatcggatttttagatgttaatttcgcgtttaataattttagttagtttcgggttgggcgcgtttgtttgttagttttatagcgcgcgttttcgtcgagtcgcggcgggttatttatttgcggcggtggttgggtttttcgtgcggtcggacggcggtttaggtttcgcgtcgttgttggcgtcgttaggggacggcggcggcggttttttttttttgcgtcgggtagtggagggttgggtgtttttacggggtatggtcgttggggtcgggggatagtcgggagtaagttagttcgcgggtcgttatatcgcgttcgttttattcggggaaatttcggtttatcggttttcgagagtttcgtttaatatttcgtttagaggtagcgggatttcgggaagggagttatcgaaagatacgagtggtaagaaggtaggattggttttttaataagatttatgtaagtgggaaaatttagacgtgttt

SEQ ID NO: 22654 - DNA, 508 bp, Artificial Sequence
  chemically treated genomic DNA (Homo sapiens) CpG-island No: 22654
aaacacgtctaaattttcccacttacataaatcttattaaaaaaccaatcctaccttcttaccactcgtatctttcgataactcccttcccgaaatcccgctacctctaaacgaaatattaaacgaaactctcgaaaaccgataaaccgaaatttccccgaataaaacgaacgcgatataacgacccgcgaactaacttactcccgactatcccccgaccccaacgaccataccccgtaaaaacacccaaccctccactacccgacgcaaaaaaaaaaaaccgccgccgccgtcccctaacgacgccaacaacgacgcgaaacctaaaccgccgtccgaccgcacgaaaaacccaaccaccgccgcaaataaataacccgccgcgactcgacgaaaacgcgcgctataaaactaacaaacaaacgcgcccaacccgaaactaactaaaattattaaacgcgaaattaacatctaaaaatccgatatcgatccgataaaaactcaaaaa

SEQ ID NO: 22655 - DNA, 508 bp, Artificial Sequence
  chemically treated genomic DNA (Homo sapiens) CpG-island No: 22655
aggtacgtttagatttttttatttatataggttttgttaagaaattagttttgtttttttgttattcgtgtttttcgatggtttttttttcgaagtttcgttgtttttaagcggagtgttaagcggggttttcggaagtcggtggatcgagattttttcgggtggggcgggcgcggtgtagcggttcgcgggttgatttgttttcggttgtttttcggttttagcgattatgtttcgtaaaggtatttagttttttattgttcggcgtagagaggaagggtcgtcgtcgtcgttttttgacggcgttagtagcgacgcggagtttgagtcgtcgttcggtcgtacggagagtttagttatcgtcgtaggtgagtgattcgtcgcgattcggcgggaacgcgcgttgtgggattggtaggtaaacgcgtttagttcgaggttggttggggttgttgagcgcggagttgatatttgaaggttcggtgtcggttcggtagaggtttaggaa

SEQ ID NO: 22656 - DNA, 508 bp, Artificial Sequence
  chemically treated genomic DNA (Homo sapiens) CpG-island No: 22656
ttcctaaacctctaccgaaccgacaccgaaccttcaaatatcaactccgcgctcaacaaccccaaccaacctcgaactaaacgcgtttacctaccaatcccacaacgcgcgttcccgccgaatcgcgacgaatcactcacctacgacgataactaaactctccgtacgaccgaacgacgactcaaactccgcgtcgctactaacgccgtcaaaaaacgacgacgacgacccttcctctctacgccgaacaataaaaaactaaatacctttacgaaacataatcgctaaaaccgaaaaacaaccgaaaacaaatcaacccgcgaaccgctacaccgcgcccgccccacccgaaaaaatctcgatccaccgacttccgaaaaccccgcttaacactccgcttaaaaacaacgaaacttcgaaaaaaaaaccatcgaaaaacacgaataacaaaaaaacaaaactaatttcttaacaaaacctatataaataaaaaaatctaaacgtacct

SEQ ID NO: 22657 - DNA, 644 bp, Artificial Sequence
  chemically treated genomic DNA (Homo sapiens) CpG-island No: 22657
cggttgtcgagttttgcgtttcggaaggcgttttttcggttcgtggggttcggaagatagaagggtttatggatgggtaggggaaggaagaagatgcgggtttttaaaggcgcgtggtggcgaggtgaggcgcggcgcggcgcggggttgtgaggtttcggaggtgttttagtttaaggtggttagaggtttaatgtgacgttacggtaatttcgggtcgttagacgggatttcgggtttcgggattttgggttattaagcgtgttaagcgtagttagttcgtgcgcgcgcgcgtatttttatttatatttatatttgtttcgggaggtttgtgtagttggcgaggaacgttaaaaattttgattttttttgttcggcgttgaattttattttttttcgtttggagtttacgcgcgcgcgtatatatatataatttttttaaattattcgggagaagtaggagaaacgtttttttttgagtcgcgtaggtttcgggcgtagcgcgtttatttttttttttgcggttcggaggaggcgagaggtaatcggggcggcgagggaggagagaatataaaagaagagataggagaaaagtgggggagaaaggtaagagggagaaggaggaggggagaggggagatagga

SEQ ID NO: 22658 - DNA, 644 bp, Artificial Sequence
  chemically treated genomic DNA (Homo sapiens) CpG-island No: 22658
tcctatctcccctctcccctcctccttctccctcttacctttctcccccacttttctcctatctcttcttttatattctctcctccctcgccgccccgattacctctcgcctcctccgaaccgcaaaaaaaaaaataaacgcgctacgcccgaaacctacgcgactcaaaaaaaaacgtttctcctacttctcccgaataatttaaaaaaattatatatatatacgcgcgcgcgtaaactccaaacgaaaaaaaataaaattcaacgccgaacaaaaaaaatcaaaatttttaacgttcctcgccaactacacaaacctcccgaaacaaatataaatataaataaaaatacgcgcgcgcgcacgaactaactacgcttaacacgcttaataacccaaaatcccgaaacccgaaatcccgtctaacgacccgaaattaccgtaacgtcacattaaacctctaaccaccttaaactaaaacacctccgaaacctcacaaccccgcgccgcgccgcgcctcacctcgccaccacgcgcctttaaaaacccgcatcttcttccttcccctacccatccataaacccttctatcttccgaaccccacgaaccgaaaaaacgccttccgaaacgcaaaactcgacaaccg

SEQ ID NO: 22659 - DNA, 644 bp, Artificial Sequence
  chemically treated genomic DNA (Homo sapiens) CpG-island No: 22659
ttttgtttttttttttttttttttttttttttttttgttttttttttttattttttttttgtttttttttttgtatttttttttttttcgtcgtttcggttgtttttcgtttttttcgggtcgtaggggaggaggtgagcgcgttgcgttcggggtttgcgcggtttagagggaggcgttttttttatttttttcgggtaatttggagaggttgtgtgtgtgtgcgcgcgcgcgtgagttttaggcgaaaaggggtaggatttagcgtcgagtagagagggttagggtttttgacgtttttcgttagttgtataaatttttcggagtaagtgtgagtgtgggtgagagtgcgcgcgcgcgtacgggttggttgcgtttggtacgtttggtggtttagggtttcggggttcggggtttcgtttggcggttcgggattatcgtgacgttatattgagtttttggttattttggattgggatattttcggagttttatagtttcgcgtcgcgtcgcgttttatttcgttattacgcgtttttgggaattcgtattttttttttttttttgtttatttatgggtttttttgtttttcggattttacgggtcggaggggcgtttttcggagcgtagggttcggtagtcg

SEQ ID NO: 22660 - DNA, 644 bp, Artificial Sequence
  chemically treated genomic DNA (Homo sapiens) CpG-island No: 22660
cgactaccgaaccctacgctccgaaaaacgcccctccgacccgtaaaatccgaaaaacaaaaaaacccataaataaacaaaaaaaaaaaaaaaatacgaattcccaaaaacgcgtaataacgaaataaaacgcgacgcgacgcgaaactataaaactccgaaaatatcccaatccaaaataaccaaaaactcaatataacgtcacgataatcccgaaccgccaaacgaaaccccgaaccccgaaaccctaaaccaccaaacgtaccaaacgcaaccaacccgtacgcgcgcgcgcactctcacccacactcacacttactccgaaaaatttatacaactaacgaaaaacgtcaaaaaccctaaccctctctactcgacgctaaatcctaccccttttcgcctaaaactcacgcgcgcgcgcacacacacacaacctctccaaattacccgaaaaaaataaaaaaaacgcctccctctaaaccgcgcaaaccccgaacgcaacgcgctcacctcctcccctacgacccgaaaaaaacgaaaaacaaccgaaacgacgaaaaaaaaaaaaatacaaaaaaaaaaacaaaaaaaaaataaaaaaaaaaaacaaaaaaaaaaaaaaaaaaaaaaaaaaaaaaacaaaa

SEQ ID NO: 22661 - DNA, 975 bp, Artificial Sequence
  chemically treated genomic DNA (Homo sapiens) CpG-island No: 22661
ggggcggcgagaacgatttcggtttaggcgggaaaggaaagatggaaagggggcgtaggaaatgggcgttaaagaaagaagtgagaaattgcggaggaggaagtcgtttttggaagaggcggggtaaaggggaagcgagaatggagtgtttgtattttcgagagggaagggttagagtttttttcgattagggtcggcggggcggacgtttggggaaggggcgttcgggcgggttgagggggcggcgcggtgtttaaggttttcggggtttttatttgaatcgtttttgtttcgtcgtgttttagagttgtagtttgatttttttgttcggttcgatttttagtaggcgggagaagaagtttacgtcgacggtggggtcgtaggcgggggagcgtagttcggggaagcggttttgggtgaagcggtgtaggaggtaggatttgtttacggtggagttttcgattacgatgaggcggaattggtagatttagatggtttttatcgtttacgtgtttcgttggttttcgggtcgttttattcgcgggttaagttcggcggcgggaattgtttttttagtatttcgcgggcgttcgttcgtcgttttttagtatatttttgcggttgcggtcgtcgtttggtgttcgttttttcgggagagagaggcggggttaggttcggttaggggcggggtttttggacgggggcggggcgggggcggtggcgcgtgggagggggaagtaggtttgttgtcgcgaattttcgtttttgatcggttgtaaattatttttttttaacgtttattgggcgtcggtaggaaagtgggcgtggcgggaagacgtgatagtagtaataattaaggaaaatgaagtaaggttttaatttcgggagggttagttaatgaaaagtgagagtcgtttttttataggcgttagggcgggttggttagattagggttttgattttggaagtttttga

SEQ ID NO: 22662 - DNA, 975 bp, Artificial Sequence
  chemically treated genomic DNA (Homo sapiens) CpG-island No: 22662
tcaaaaacttccaaaatcaaaaccctaatctaaccaacccgccctaacgcctataaaaaaacgactctcacttttcattaactaaccctcccgaaattaaaaccttacttcattttccttaattattactactatcacgtcttcccgccacgcccactttcctaccgacgcccaataaacgttaaaaaaaaataatttacaaccgatcaaaaacgaaaattcgcgacaacaaacctacttccccctcccacgcgccaccgcccccgccccgcccccgtccaaaaaccccgcccctaaccgaacctaaccccgcctctctctcccgaaaaaacgaacaccaaacgacgaccgcaaccgcaaaaatatactaaaaaacgacgaacgaacgcccgcgaaatactaaaaaaacaattcccgccgccgaacttaacccgcgaataaaacgacccgaaaaccaacgaaacacgtaaacgataaaaaccatctaaatctaccaattccgcctcatcgtaatcgaaaactccaccgtaaacaaatcctacctcctacaccgcttcacccaaaaccgcttccccgaactacgctcccccgcctacgaccccaccgtcgacgtaaacttcttctcccgcctactaaaaatcgaaccgaacaaaaaaatcaaactacaactctaaaacacgacgaaacaaaaacgattcaaataaaaaccccgaaaaccttaaacaccgcgccgccccctcaacccgcccgaacgccccttccccaaacgtccgccccgccgaccctaatcgaaaaaaactctaacccttccctctcgaaaatacaaacactccattctcgcttcccctttaccccgcctcttccaaaaacgacttcctcctccgcaatttctcacttctttctttaacgcccatttcctacgccccctttccatctttcctttcccgcctaaaccgaaatcgttctcgccgcccc

SEQ ID NO: 22663 - DNA, 975 bp, Artificial Sequence
  chemically treated genomic DNA (Homo sapiens) CpG-island No: 22663
ttagggatttttaaaattagagttttaatttgattaattcgttttgacgtttgtaagaaaacgatttttattttttattggttgattttttcggagttgagattttgttttattttttttggttgttgttgttgttacgttttttcgttacgtttatttttttgtcggcgtttagtgagcgttgagggagagtgatttgtagtcggttaggggcgggagttcgcggtagtaaatttgttttttttttttacgcgttatcgttttcgtttcgttttcgtttagaggtttcgtttttagtcgggtttggtttcgtttttttttttcgagagggcgggtattaggcggcggtcgtagtcgtaggaatatgttggaaggcggcgggcgggcgttcgcgaggtgttgaaaggatagttttcgtcgtcgaatttagttcgcgggtggggcggttcgggagttagcggggtacgtgagcgatggagattatttggatttattagtttcgttttatcgtgatcggggattttatcgtgggtaagttttgttttttgtatcgttttatttagggtcgttttttcgggttgcgttttttcgtttgcgattttatcgtcggcgtggattttttttttcgtttgttggagatcgagtcgggtaagaggattaagttatagttttgggatacggcgggataggagcggtttaggtagggatttcggggattttgggtatcgcgtcgtttttttagttcgttcggacgttttttttttaggcgttcgtttcgtcggttttggtcgggagaggttttggtttttttttttcgaaagtgtaaatattttattttcgttttttttttgtttcgttttttttagggacgattttttttttcgtaattttttatttttttttttggcgtttattttttgcgttttttttttattttttttttttcgtttgaatcggggtcgttttcgtcgtttt

SEQ ID NO: 22664 - DNA, 975 bp, Artificial Sequence
  chemically treated genomic DNA (Homo sapiens) CpG-island No: 22664
aaaacgacgaaaacgaccccgattcaaacgaaaaaaaaaaaataaaaaaaaaacgcaaaaaataaacgccaaaaaaaaaaataaaaaattacgaaaaaaaaaatcgtccctaaaaaaaacgaaacaaaaaaaaaacgaaaataaaatatttacactttcgaaaaaaaaaaaccaaaacctctcccgaccaaaaccgacgaaacgaacgcctaaaaaaaaaacgtccgaacgaactaaaaaaacgacgcgatacccaaaatccccgaaatccctacctaaaccgctcctatcccgccgtatcccaaaactataacttaatcctcttacccgactcgatctccaacaaacgaaaaaaaaaatccacgccgacgataaaatcgcaaacgaaaaaacgcaacccgaaaaaacgaccctaaataaaacgatacaaaaaacaaaacttacccacgataaaatccccgatcacgataaaacgaaactaataaatccaaataatctccatcgctcacgtaccccgctaactcccgaaccgccccacccgcgaactaaattcgacgacgaaaactatcctttcaacacctcgcgaacgcccgcccgccgccttccaacatattcctacgactacgaccgccgcctaatacccgccctctcgaaaaaaaaaaacgaaaccaaacccgactaaaaacgaaacctctaaacgaaaacgaaacgaaaacgataacgcgtaaaaaaaaaaaacaaatttactaccgcgaactcccgcccctaaccgactacaaatcactctccctcaacgctcactaaacgccgacaaaaaaataaacgtaacgaaaaaacgtaacaacaacaacaaccaaaaaaaataaaacaaaatctcaactccgaaaaaatcaaccaataaaaaataaaaatcgttttcttacaaacgtcaaaacgaattaatcaaattaaaactctaattttaaaaatccctaa

SEQ ID NO: 22665 - DNA, 1067 bp, Artificial Sequence
  chemically treated genomic DNA (Homo sapiens) CpG-island No: 22665
gggggttgggcgggggtgatttttgggggataaggggcggtggagtttagggaatgttaaagttttgtcgcggttttcgacgcgcgtttttcgtttttcgtttttttttcgttttcgattgaggtcgggtttttcgtcggattgatgtcgcgcgtttgcgtgttgtggtcgaatcgtcgaatttagaggtcggttttagaaaattcgagcgagtagggggcggcgcgtaggagggaggagaattgggggcgcgggaggttggtgggtgtcgggggtggagatgtagaagatgtgacgtcgcggttcggcgggtgttagattagcggacgcggtgttcgcggttgtaacgggatttcgggcgttgtagtttgggaggcggttttttttaggcggcgttcgcggagatatttattcgtgaattttaggtttcgggtcgtcggttcgtcgcgtattaggggtcggcggatagaagagcggtcgagcggttcgaggttgggggatcgcgggcgcggtcgcgcgttgtcgggcgggaggttggggggtcggggtcggggtcgtgtttcggagcgggtcggaggtcggggtcggggtcgggggacggcggtttttcgcgcggttttagcggttcggggatttcggtcgggtttcgtagggattatggtagtcgggagtattattacgttgttcgttttgttcgaggatggcggtagcggcgttttttcgttcggttattttaaggattttaagcggttgtattgtaaaaacgggggtttttttttgcgtatttatttcgacggtcgagttgacggggttcgggagaagagcgatttttatagtgagtgtcgattcgtttttttcgttttatttttatttcgtgggttttcgttcgtttttttttttttagtttgtatttttttttcggatttttattgcgattttagcggttcgtgtggtttttggtcgcgcggttttcggcggtttcgggtttattatttattttttttttttcgggttgcggcgtaggttcgggtgttttttggggttttggggtgtgttaatttgttttg

SEQ ID NO: 22666 - DNA, 1067 bp, Artificial Sequence
  chemically treated genomic DNA (Homo sapiens) CpG-island No: 22666
caaaacaaattaacacaccccaaaaccccaaaaaacacccgaacctacgccgcaacccgaaaaaaaaaaaataaataataaacccgaaaccgccgaaaaccgcgcgaccaaaaaccacacgaaccgctaaaatcgcaataaaaatccgaaaaaaaaatacaaactaaaaaaaaaaaaacgaacgaaaacccacgaaataaaaataaaacgaaaaaaacgaatcgacactcactataaaaatcgctcttctcccgaaccccgtcaactcgaccgtcgaaataaatacgcaaaaaaaaacccccgtttttacaatacaaccgcttaaaatccttaaaataaccgaacgaaaaaacgccgctaccgccatcctcgaacaaaacgaacaacgtaataatactcccgactaccataatccctacgaaacccgaccgaaatccccgaaccgctaaaaccgcgcgaaaaaccgccgtcccccgaccccgaccccgacctccgacccgctccgaaacacgaccccgaccccgaccccccaacctcccgcccgacaacgcgcgaccgcgcccgcgatcccccaacctcgaaccgctcgaccgctcttctatccgccgacccctaatacgcgacgaaccgacgacccgaaacctaaaattcacgaataaatatctccgcgaacgccgcctaaaaaaaaccgcctcccaaactacaacgcccgaaatcccgttacaaccgcgaacaccgcgtccgctaatctaacacccgccgaaccgcgacgtcacatcttctacatctccacccccgacacccaccaacctcccgcgcccccaattctcctccctcctacgcgccgccccctactcgctcgaattttctaaaaccgacctctaaattcgacgattcgaccacaacacgcaaacgcgcgacatcaatccgacgaaaaacccgacctcaatcgaaaacgaaaaaaaaacgaaaaacgaaaaacgcgcgtcgaaaaccgcgacaaaactttaacattccctaaactccaccgccccttatcccccaaaaatcacccccgcccaaccccc

SEQ ID NO: 22667 - DNA, 1067 bp, Artificial Sequence
  chemically treated genomic DNA (Homo sapiens) CpG-island No: 22667
tagggtaaattggtatattttaaagttttaggggatattcgggtttacgtcgtagttcggaaaggagggggtgagtggtgaattcgaaatcgtcgagggtcgcgcggttagaaattatacggatcgttagggtcgtagtgaagattcgggaggagggtgtaggttggaggggagagagcgggcgagaatttacgaaatggaaatgaggcggagagagcgggtcggtatttattgtgagggtcgtttttttttcggatttcgttaattcggtcgtcggggtggatgcgtaggaagaagttttcgtttttgtagtatagtcgtttggggtttttgaagtggtcgggcgggaaggcgtcgttgtcgttattttcgggtaaggcgggtagcgtggtgatgttttcggttgttatggtttttgcggggttcggtcgggattttcgagtcgttggagtcgcgcggggagtcgtcgtttttcggtttcggtttcggttttcgattcgtttcggggtacggtttcggtttcggttttttagtttttcgttcggtagcgcgcggtcgcgttcgcggttttttagtttcgagtcgttcggtcgtttttttgttcgtcggtttttggtgcgcggcgagtcggcggttcgggatttggggtttacggatgggtgttttcgcggacgtcgtttggggagagtcgttttttaagttgtagcgttcgggatttcgttgtaatcgcgggtatcgcgttcgttaatttggtattcgtcgggtcgcggcgttatattttttatatttttattttcgatatttattagtttttcgcgtttttagttttttttttttttgcgcgtcgttttttattcgttcgggttttttggggtcggtttttgagttcggcggttcggttataatacgtaagcgcgcgatattagttcggcggggagttcggttttagtcgggggcgggggagaggcgaggggcggggggcgcgcgtcggaggtcgcggtagggttttggtattttttgggttttatcgttttttattttttaaaagttattttcgtttaattttt

SEQ ID NO: 22668 - DNA, 1067 bp, Artificial Sequence
  chemically treated genomic DNA (Homo sapiens) CpG-island No: 22668
aaaaattaaacgaaaataacttttaaaaaataaaaaacgataaaacccaaaaaataccaaaaccctaccgcgacctccgacgcgcgccccccgcccctcgcctctcccccgcccccgactaaaaccgaactccccgccgaactaatatcgcgcgcttacgtattataaccgaaccgccgaactcaaaaaccgaccccaaaaaacccgaacgaataaaaaacgacgcgcaaaaaaaaaaaaaactaaaaacgcgaaaaactaataaatatcgaaaataaaaatataaaaaatataacgccgcgacccgacgaataccaaattaacgaacgcgatacccgcgattacaacgaaatcccgaacgctacaacttaaaaaacgactctccccaaacgacgtccgcgaaaacacccatccgtaaaccccaaatcccgaaccgccgactcgccgcgcaccaaaaaccgacgaacaaaaaaacgaccgaacgactcgaaactaaaaaaccgcgaacgcgaccgcgcgctaccgaacgaaaaactaaaaaaccgaaaccgaaaccgtaccccgaaacgaatcgaaaaccgaaaccgaaaccgaaaaacgacgactccccgcgcgactccaacgactcgaaaatcccgaccgaaccccgcaaaaaccataacaaccgaaaacatcaccacgctacccgccttacccgaaaataacgacaacgacgccttcccgcccgaccacttcaaaaaccccaaacgactatactacaaaaacgaaaacttcttcctacgcatccaccccgacgaccgaattaacgaaatccgaaaaaaaaacgaccctcacaataaataccgacccgctctctccgcctcatttccatttcgtaaattctcgcccgctctctcccctccaacctacaccctcctcccgaatcttcactacgaccctaacgatccgtataatttctaaccgcgcgaccctcgacgatttcgaattcaccactcaccccctcctttccgaactacgacgtaaacccgaatatcccctaaaactttaaaatataccaatttacccta

SEQ ID NO: 22669 - DNA, 1063 bp, Artificial Sequence
  chemically treated genomic DNA (Homo sapiens) CpG-island No: 22669
tttattacgtcgcgcgttttcggttttaacgtatttttaggatttagggttttttaagttgtaatttagtagggtttttttgtttgtttttattttgtgttttcggtaacgatttcgcgcgtttatattttcgtgtcgttttagttattagttcgtaatttttagttttaaaacgttggagtttagaatttagtttaggtgcgttcgtcggttttttagggagattggggttgattgtaggtacgcgggggcgggaagatagttttttgtttttggttgcgatggaggcggatttgggcggggtcgaaacgggggcggggttaagtgtgggggcgtagttaggcgtgggggcgggtcggcgtcggcgtcgcggtcggcggtagcgtttttttaagttttcgcggttgcgtttcggtttcggattcgggttatttacggggtagtgggtgtttttcggtttcggatattgtaagttttagaaggtaaatttgcgtgggagtcgcgtatttggagcgcgagggtatttatgatgagggcgggaggttggatggcgatagaagggagcgtttcgcggcgagttttttaagaaagttgaattcgttttaagttttttgtgtttcggtttgtatttagtgaatgggtggcgggtttatttgttgcgggtggttttttggcgcgggagggacgcggaggtgattggattaattcgtttgggcggtagtttagatttttgtcgggaatcgcgtatcgtagtggtgtagtttttgttcgagaaaggttggtatgtgcggtgtagtcgtgttttgcgtagtagtagggggatcgtcggtttgggagtacgcgagtcggttaggcgttttcggttgtttagaggtatagttttttaattttttttttttttaggtaagattaattcggtgttgtttttttcggcgttgatttcgaggttcggttatggacggcgagagcgaggtggatttttttagtaatagtataatttttttgtggcggaggcggtcgattttttagttttattaggttttgggtcggagtaagtcgaggt

SEQ ID NO: 22670 - DNA, 1063 bp, Artificial Sequence
  chemically treated genomic DNA (Homo sapiens) CpG-island No: 22670
acctcgacttactccgacccaaaacctaataaaactaaaaaatcgaccgcctccgccacaaaaaaattatactattactaaaaaaatccacctcgctctcgccgtccataaccgaacctcgaaatcaacgccgaaaaaaacaacaccgaattaatcttacctaaaaaaaaaaaaaattaaaaaactatacctctaaacaaccgaaaacgcctaaccgactcgcgtactcccaaaccgacgatccccctactactacgcaaaacacgactacaccgcacataccaacctttctcgaacaaaaactacaccactacgatacgcgattcccgacaaaaatctaaactaccgcccaaacgaattaatccaatcacctccgcgtccctcccgcgccaaaaaaccacccgcaacaaataaacccgccacccattcactaaatacaaaccgaaacacaaaaaacttaaaacgaattcaactttcttaaaaaactcgccgcgaaacgctcccttctatcgccatccaacctcccgccctcatcataaataccctcgcgctccaaatacgcgactcccacgcaaatttaccttctaaaacttacaatatccgaaaccgaaaaacacccactaccccgtaaataacccgaatccgaaaccgaaacgcaaccgcgaaaacttaaaaaaacgctaccgccgaccgcgacgccgacgccgacccgcccccacgcctaactacgcccccacacttaaccccgcccccgtttcgaccccgcccaaatccgcctccatcgcaaccaaaaacaaaaaactatcttcccgcccccgcgtacctacaatcaaccccaatctccctaaaaaaccgacgaacgcacctaaactaaattctaaactccaacgttttaaaactaaaaattacgaactaataactaaaacgacacgaaaatataaacgcgcgaaatcgttaccgaaaacacaaaataaaaacaaacaaaaaaaccctactaaattacaacttaaaaaaccctaaatcctaaaaatacgttaaaaccgaaaacgcgcgacgtaataaa

SEQ ID NO: 22671 - DNA, 1063 bp, Artificial Sequence
  chemically treated genomic DNA (Homo sapiens) CpG-island No: 22671
gtttcggtttgtttcggtttagaatttggtggggttgaggaatcgatcgttttcgttataaaggggttatgttgttgttagaaaaatttatttcgttttcgtcgtttatagtcgggtttcgaagttagcgtcgggaggagtaatatcgagttagttttgtttaaagaggaaagaagttaggaaattgtgtttttggataatcggggacgtttggtcgattcgcgtgtttttagatcggcggtttttttgttgttgcgtaggatacgattgtatcgtatatattagtttttttcgggtaaaaattgtattattgcggtgcgcggttttcggtagaaatttgggttgtcgtttaggcggattaatttaattattttcgcgtttttttcgcgttaaaagattattcgtagtaaatgagttcgttatttatttattgagtgtaagtcgaggtataagaaatttgggacgagtttagtttttttgggaaattcgtcgcgggacgtttttttttgtcgttatttagtttttcgtttttattatgggtattttcgcgttttaggtgcgcggtttttacgtaaatttattttttggggtttgtaatgttcggggtcgaggagtatttattatttcgtgggtggttcgggttcgggatcgaagcgtagtcgcgagagtttaggagagcgttgtcgtcgatcgcggcgtcggcgtcggttcgtttttacgtttgattacgtttttatatttggtttcgttttcgtttcggtttcgtttagattcgtttttatcgtagttagaagtaagaagttgttttttcgttttcgcgtgtttataattagttttagtttttttgggaaatcgacgagcgtatttgagttgggttttgagttttagcgttttggggttagaagttgcggattagtagttgaggcggtacgggagtgtaggcgcgcggggtcgttgtcgggggtatagagtgagaataagtaagggagttttgttgaattgtagtttaggaagttttgaattttggaggtgcgttgaaatcgagaacgcgcggcgtagtaga

SEQ ID NO: 22672 - DNA, 1063 bp, Artificial Sequence
  chemically treated genomic DNA (Homo sapiens) CpG-island No: 22672
tctactacgccgcgcgttctcgatttcaacgcacctccaaaattcaaaacttcctaaactacaattcaacaaaactcccttacttattctcactctatacccccgacaacgaccccgcgcgcctacactcccgtaccgcctcaactactaatccgcaacttctaaccccaaaacgctaaaactcaaaacccaactcaaatacgctcgtcgatttcccaaaaaaactaaaactaattataaacacgcgaaaacgaaaaaacaacttcttacttctaactacgataaaaacgaatctaaacgaaaccgaaacgaaaacgaaaccaaatataaaaacgtaatcaaacgtaaaaacgaaccgacgccgacgccgcgatcgacgacaacgctctcctaaactctcgcgactacgcttcgatcccgaacccgaaccacccacgaaataataaatactcctcgaccccgaacattacaaaccccaaaaaataaatttacgtaaaaaccgcgcacctaaaacgcgaaaatacccataataaaaacgaaaaactaaataacgacaaaaaaaaacgtcccgcgacgaatttcccaaaaaaactaaactcgtcccaaatttcttatacctcgacttacactcaataaataaataacgaactcatttactacgaataatcttttaacgcgaaaaaaacgcgaaaataattaaattaatccgcctaaacgacaacccaaatttctaccgaaaaccgcgcaccgcaataatacaatttttacccgaaaaaaactaatatatacgatacaatcgtatcctacgcaacaacaaaaaaaccgccgatctaaaaacacgcgaatcgaccaaacgtccccgattatccaaaaacacaatttcctaacttctttcctctttaaacaaaactaactcgatattactcctcccgacgctaacttcgaaacccgactataaacgacgaaaacgaaataaatttttctaacaacaacataacccctttataacgaaaacgatcgattcctcaaccccaccaaattctaaaccgaaacaaaccgaaac

SEQ ID NO: 22673 - DNA, 1185 bp, Artificial Sequence
  chemically treated genomic DNA (Homo sapiens) CpG-island No: 22673
tcgttcggcgtggttgttgaatggaaattatatatttgagttttatatttttttcgtgtgtgagttgcgtgggagtttttcgtcgtgtgttgttacgggtttttcgtggttgtacgttcgtttttgttagtttttaatagagtcgtttagaataggagagaatatttatttatcgtgatatatttatattttttttcggtaacgttacgcgtaaatagttattcgcgttttagcgtattcgttttatatttcgtaggcggtttttgggatttttataatgcggtttttttttcgcgtggttgttatatacgttttttttttcgagtgcgtaggtatataatgtattcgtatatatataagtatacgtatatatatgtatatttatacgtgcgcgttttttcggttcgcgaggtagtagtttgcgtatttgtttttgagagtcgcggcgtgggggttacggtgttgtgttttagttttatcgtcgcgtttttgtcgggggtcgttcggtacgttaggcgttcgtcgcggtttttacgtatttatttttcgtgcgcgtgtgtcggggcggcgtcgcggttcggtcgggatacgcgcgttttcggcggcgtcgtattttggtttttttgttggcggttcggggagttgtttagtatcgcgtttacgtcgtcgttcgttttttcgcgttcgggttcggagcgtatttatttttaattagtagaagtagtagcggcgaaagtagcggcggtagtcgggcggttcgtagtagtcggtttatggtgtagtcgtcgtcgtttgtagtcgtagcggcgcggcgttcgggttcgcgttaggggtcgcgcgggcggcggcggcggcgcgcgttcgttttattggttcgtatggtcgttatttacgttcggtttcgttcggtcgcgtgtcgcgggcgcgttttcgcggagacgaagcggacgcgcgggcggtcgttttttcgttcgtttttttcgttaggtcggttaattagtatcgtcgaggttcgggggtttggttcggtcgttcgtagatttgggtttcgtatttcgcgttcggatgtcgtttttttttcgcgcggttattcgttttttgggaagtagagtgggtagttgtggtagatgggattgatgggacgaggacgacgcgtggaaatgattgtgagggtggatagaggtt

SEQ ID NO: 22674 - DNA, 1185 bp, Artificial Sequence
  chemically treated genomic DNA (Homo sapiens) CpG-island No: 22674
aacctctatccaccctcacaatcatttccacgcgtcgtcctcgtcccatcaatcccatctaccacaactacccactctacttcccaaaaaacgaataaccgcgcgaaaaaaaaacgacatccgaacgcgaaatacgaaacccaaatctacgaacgaccgaaccaaacccccgaacctcgacgatactaattaaccgacctaacgaaaaaaacgaacgaaaaaacgaccgcccgcgcgtccgcttcgtctccgcgaaaacgcgcccgcgacacgcgaccgaacgaaaccgaacgtaaataacgaccatacgaaccaataaaacgaacgcgcgccgccgccgccgcccgcgcgacccctaacgcgaacccgaacgccgcgccgctacgactacaaacgacgacgactacaccataaaccgactactacgaaccgcccgactaccgccgctactttcgccgctactacttctactaattaaaaataaatacgctccgaacccgaacgcgaaaaaacgaacgacgacgtaaacgcgatactaaacaactccccgaaccgccaacaaaaaaaccaaaatacgacgccgccgaaaacgcgcgtatcccgaccgaaccgcgacgccgccccgacacacgcgcacgaaaaataaatacgtaaaaaccgcgacgaacgcctaacgtaccgaacgacccccgacaaaaacgcgacgataaaactaaaacacaacaccgtaacccccacgccgcgactctcaaaaacaaatacgcaaactactacctcgcgaaccgaaaaaacgcgcacgtataaatatacatatatatacgtatacttatatatatacgaatacattatatacctacgcactcgaaaaaaaaaacgtatataacaaccacgcgaaaaaaaaaccgcattataaaaatcccaaaaaccgcctacgaaatataaaacgaatacgctaaaacgcgaataactatttacgcgtaacgttaccgaaaaaaaatataaatatatcacgataaataaatattctctcctattctaaacgactctattaaaaactaacaaaaacgaacgtacaaccacgaaaaacccgtaacaacacacgacgaaaaactcccacgcaactcacacacgaaaaaaatataaaactcaaatatataatttccattcaacaaccacgccgaacga

SEQ ID NO: 22675 - DNA, 1185 bp, Artificial Sequence
  chemically treated genomic DNA (Homo sapiens) CpG-island No: 22675
ggtttttgtttatttttatagttatttttacgcgtcgttttcgttttattagttttatttgttatagttgtttattttgttttttagggaacgggtgatcgcgcggggagagagcggtattcgggcgcgaggtgcgaggtttaggtttgcgggcggtcgggttaagttttcgagtttcggcggtgttgattggtcggtttggcgggggggacgggcggagggacggtcgttcgcgcgttcgtttcgttttcgcgggggcgcgttcgcggtacgcggtcgggcggggtcgggcgtgagtgacggttatgcggattaatggggcgggcgcgcgtcgtcgtcgtcgttcgcgcggtttttgacgcgggttcgggcgtcgcgtcgttgcggttgtaggcggcgacggttatattatgggtcggttgttgcgggtcgttcggttgtcgtcgttgttttcgtcgttgttgtttttgttggttgggggtgagtgcgtttcgggttcgagcgcgggagggcgggcggcggcgtgggcgcggtgttggatagtttttcgggtcgttaataaaggggttagagtgcggcgtcgtcgggagcgcgcgtgtttcggtcgggtcgcggcgtcgtttcgatatacgcgtacgaggagtgggtgcgtgggggtcgcggcgggcgtttggcgtgtcgggcgattttcgataaaggcgcggcggtgaagttgggatatagtatcgtggtttttacgtcgcggtttttaggggtaggtgcgtaggttgttgtttcgcgggtcgggggggcgcgtacgtgtgggtgtgtatgtgtgtgcgtgtgtttgtgtgtgtgcgagtgtattgtgtgtttgcgtattcgggggaagaggcgtgtgtgatagttacgcggggaggaggtcgtattgtgaaggttttaggggtcgtttgcggagtgtggggcgggtacgttgaggcgcgggtggttgtttacgcgtggcgttgtcgggagggagtgtgagtgtgttacggtgaatgggtatttttttttgttttgggcgattttattaggagttgataaaaacgggcgtatagttacggaaggttcgtgatagtatacggcgggaggtttttacgtagtttatatacgagggaggtgtgagatttagatgtgtggtttttatttagtagttacgtcgggcgg

SEQ ID NO: 22676 - DNA, 1185 bp, Artificial Sequence
  chemically treated genomic DNA (Homo sapiens) CpG-island No: 22676
ccgcccgacgtaactactaaataaaaaccacacatctaaatctcacacctccctcgtatataaactacgtaaaaacctcccgccgtatactatcacgaaccttccgtaactatacgcccgtttttatcaactcctaataaaatcgcccaaaacaaaaaaaaatacccattcaccgtaacacactcacactccctcccgacaacgccacgcgtaaacaaccacccgcgcctcaacgtacccgccccacactccgcaaacgacccctaaaaccttcacaatacgacctcctccccgcgtaactatcacacacgcctcttcccccgaatacgcaaacacacaatacactcgcacacacacaaacacacgcacacacatacacacccacacgtacgcgcccccccgacccgcgaaacaacaacctacgcacctacccctaaaaaccgcgacgtaaaaaccacgatactatatcccaacttcaccgccgcgcctttatcgaaaatcgcccgacacgccaaacgcccgccgcgacccccacgcacccactcctcgtacgcgtatatcgaaacgacgccgcgacccgaccgaaacacgcgcgctcccgacgacgccgcactctaacccctttattaacgacccgaaaaactatccaacaccgcgcccacgccgccgcccgccctcccgcgctcgaacccgaaacgcactcacccccaaccaacaaaaacaacaacgacgaaaacaacgacgacaaccgaacgacccgcaacaaccgacccataatataaccgtcgccgcctacaaccgcaacgacgcgacgcccgaacccgcgtcaaaaaccgcgcgaacgacgacgacgacgcgcgcccgccccattaatccgcataaccgtcactcacgcccgaccccgcccgaccgcgtaccgcgaacgcgcccccgcgaaaacgaaacgaacgcgcgaacgaccgtccctccgcccgtcccccccgccaaaccgaccaatcaacaccgccgaaactcgaaaacttaacccgaccgcccgcaaacctaaacctcgcacctcgcgcccgaataccgctctctccccgcgcgatcacccgttccctaaaaaacaaaataaacaactataacaaataaaactaataaaacgaaaacgacgcgtaaaaataactataaaaataaacaaaaacc

SEQ ID NO: 22677 - DNA, 762 bp, Artificial Sequence
  chemically treated genomic DNA (Homo sapiens) CpG-island No: 22677
gtatttcggtcgttgcgggtagttatcgtggggttggagttcgtgtcgttatttcgcgtcggatcgggtcgtcgaggttcggatttttattcgtattgtttttagtcggggtcgagttcgacgtcgttacgtgcggttttttttcgggtttcgcgtgttttcgcgtttcgagcgattttcgattgttcggtatttttttcgtgggtttttatatttagggtttttttttttaaacgtcgttttggtcgttcgagttgcgttcgagcggaaatgggtcgttcgcggagtaaggaggggaacggcggttgggtttttcgtcggggcgagggacggggttttttttttagttgcggtaggagacggggagaaggtttttttttatttgatagttcgggtcgcgtttaggatcggtcgtttcggtcgtttcggtcgtttattcgtcgttattgggtgtgcgcggatttagtataggtcgcgggatttcggtttttagcgttagattaggcggtttgggtcgggaagcgtcgcgtaaggatcgggcgcgatcggtttcgtggaatgagggttaggtaggaaaggcgaggcggggttagttcgtcgggtcgcgggtttcgcggatattttgtagtttttttcgatagcggcgatcgggaaagtaagatcgtttttttcgtttagtttaaattgcgaaaacggttatagttttataagttttagagttttagagtttttgttattatttaggttcgttttttaattttt

SEQ ID NO: 22678 - DNA, 762 bp, Artificial Sequence
  chemically treated genomic DNA (Homo sapiens) CpG-island No: 22678
aaaaattaaaaaacgaacctaaataataacaaaaactctaaaactctaaaacttataaaactataaccgttttcgcaatttaaactaaacgaaaaaaacgatcttactttcccgatcgccgctatcgaaaaaaactacaaaatatccgcgaaacccgcgacccgacgaactaaccccgcctcgcctttcctacctaaccctcattccacgaaaccgatcgcgcccgatccttacgcgacgcttcccgacccaaaccgcctaatctaacgctaaaaaccgaaatcccgcgacctatactaaatccgcgcacacccaataacgacgaataaacgaccgaaacgaccgaaacgaccgatcctaaacgcgacccgaactatcaaataaaaaaaaaccttctccccgtctcctaccgcaactaaaaaaaaaaccccgtccctcgccccgacgaaaaacccaaccgccgttcccctccttactccgcgaacgacccatttccgctcgaacgcaactcgaacgaccaaaacgacgtttaaaaaaaaaaaccctaaatataaaaacccacgaaaaaaataccgaacaatcgaaaatcgctcgaaacgcgaaaacacgcgaaacccgaaaaaaaaccgcacgtaacgacgtcgaactcgaccccgactaaaaacaatacgaataaaaatccgaacctcgacgacccgatccgacgcgaaataacgacacgaactccaaccccacgataactacccgcaacgaccgaaatac

SEQ ID NO: 22679 - DNA, 762 bp, Artificial Sequence
  chemically treated genomic DNA (Homo sapiens) CpG-island No: 22679
ggaggttagagggcgggtttgagtgataatagggattttgggattttgggatttgtgggattgtggtcgttttcgtaatttgggttggacgaaaaagacggttttgttttttcggtcgtcgttgtcgggaagggttgtagggtgttcgcgagattcgcggttcggcgagttgatttcgtttcgttttttttgtttagtttttattttacggagtcggtcgcgttcggtttttgcgcgacgtttttcggtttaggtcgtttggtttggcgttggaggtcggagtttcgcggtttgtgttggattcgcgtatatttagtggcggcggatgggcggtcggggcggtcggggcggtcggttttgagcgcggttcgggttgttaggtaaggaggggtttttttttcgttttttgtcgtagttagagggggagtttcgtttttcgtttcggcgggaagtttagtcgtcgtttttttttttgtttcgcgagcggtttattttcgttcgggcgtagttcggacggttaaggcggcgtttgggagggaaggttttggatgtgggaatttacgggaggggtgtcgggtagtcgggagtcgttcggggcgcgggggtacgcgaggttcgggagggagtcgtacgtagcggcgtcgggttcggtttcggttggaggtagtgcgggtggagattcggatttcggcgattcggttcggcgcggggtggcggtacgggttttagttttacggtggttgttcgtagcggtcgaggtgt

SEQ ID NO: 22680 - DNA, 762 bp, Artificial Sequence
  chemically treated genomic DNA (Homo sapiens) CpG-island No: 22680
acacctcgaccgctacgaacaaccaccgtaaaactaaaacccgtaccgccaccccgcgccgaaccgaatcgccgaaatccgaatctccacccgcactacctccaaccgaaaccgaacccgacgccgctacgtacgactccctcccgaacctcgcgtacccccgcgccccgaacgactcccgactacccgacacccctcccgtaaattcccacatccaaaaccttccctcccaaacgccgccttaaccgtccgaactacgcccgaacgaaaataaaccgctcgcgaaacaaaaaaaaaaacgacgactaaacttcccgccgaaacgaaaaacgaaactccccctctaactacgacaaaaaacgaaaaaaaaacccctccttacctaacaacccgaaccgcgctcaaaaccgaccgccccgaccgccccgaccgcccatccgccgccactaaatatacgcgaatccaacacaaaccgcgaaactccgacctccaacgccaaaccaaacgacctaaaccgaaaaacgtcgcgcaaaaaccgaacgcgaccgactccgtaaaataaaaactaaacaaaaaaaacgaaacgaaatcaactcgccgaaccgcgaatctcgcgaacaccctacaacccttcccgacaacgacgaccgaaaaaacaaaaccgtctttttcgtccaacccaaattacgaaaacgaccacaatcccacaaatcccaaaatcccaaaatccctattatcactcaaacccgccctctaacctcc

SEQ ID NO: 22681 - DNA, 1095 bp, Artificial Sequence
  chemically treated genomic DNA (Homo sapiens) CpG-island No: 22681
gttggttcgttcgtttatggtttttttttatttcgttttagtcgtacggcgaggagttgcgtttcgtggagaacggttgttacgataattttacgttggacgtggttagcgatagttagtcggagatgtaggagaagtattttagtttgaacggcggcggggtttttaacggttcggggagttggggggcgtttatggggggtaagcgggatttcgaggattcggacgtgttcgaggaggatacgtatttgtgagcgtagtcgaggcgtaggtcgagtgggtcgttaggattaagcgaggtggatttcgaaacggacggttcggagttcgtattagtttcgcgtttattcgggtcgttttcgcggtttggttttcggcgcgggttttttttcgtttttttcgattttatacggcggtttcggattaatttttttattttcgttcgaggggtaggttttaaagttcgttttggtttcgttttttcgtttttgaatttcggtttcgcgggcggcgggcggcgttttttgcgttttgggatttaattaaattcgttcggagattacgtcgggtttagcgcgtttgtttttttgatttatttttattttcggggttggggcggggcggggcgggcggggtatttcggggtaggggcggggtcgcggggcggggaggtcggggcgggcgggtttttcggacgtcgttgtagagcggggcggggcggggttgagcgtgtttatattcgtcgggtgcgcggtttcgtcgttcgaggtcgttcggttcgggtattatttttcgcgtcgtggatattagcgatttgttcgttttttgttgggtgggggatgtgggtcgagtgcggtgtggttttcgtaatataaggagaggagtgcgggaaagtggttcgttttcgaaaacgttttcgggttcgtgcgacgggtagaatggacgattttcgaagagcgtaggcgtttatgtttggttatagttattttcggtcgttttcggcgtgggatagtaaaatttttcgattcgtcgtttagggaattatttattgtgtgaatagtgatagaagggtatagcgagatattatagataggt

SEQ ID NO: 22682 - DNA, 1095 bp, Artificial Sequence
  chemically treated genomic DNA (Homo sapiens) CpG-island No: 22682
acctatctataatatctcgctatacccttctatcactattcacacaataaataattccctaaacgacgaatcgaaaaattttactatcccacgccgaaaacgaccgaaaataactataaccaaacataaacgcctacgctcttcgaaaatcgtccattctacccgtcgcacgaacccgaaaacgttttcgaaaacgaaccactttcccgcactcctctccttatattacgaaaaccacaccgcactcgacccacatcccccacccaacaaaaaacgaacaaatcgctaatatccacgacgcgaaaaataatacccgaaccgaacgacctcgaacgacgaaaccgcgcacccgacgaatataaacacgctcaaccccgccccgccccgctctacaacgacgtccgaaaaacccgcccgccccgacctccccgccccgcgaccccgcccctaccccgaaataccccgcccgccccgccccgccccaaccccgaaaataaaaataaatcaaaaaaacaaacgcgctaaacccgacgtaatctccgaacgaatttaattaaatcccaaaacgcaaaaaacgccgcccgccgcccgcgaaaccgaaattcaaaaacgaaaaaacgaaaccaaaacgaactttaaaacctacccctcgaacgaaaataaaaaaattaatccgaaaccgccgtataaaatcgaaaaaaacgaaaaaaaacccgcgccgaaaaccaaaccgcgaaaacgacccgaataaacgcgaaactaatacgaactccgaaccgtccgtttcgaaatccacctcgcttaatcctaacgacccactcgacctacgcctcgactacgctcacaaatacgtatcctcctcgaacacgtccgaatcctcgaaatcccgcttaccccccataaacgccccccaactccccgaaccgttaaaaaccccgccgccgttcaaactaaaatacttctcctacatctccgactaactatcgctaaccacgtccaacgtaaaattatcgtaacaaccgttctccacgaaacgcaactcctcgccgtacgactaaaacgaaataaaaaaaaaccataaacgaacgaaccaac

SEQ ID NO: 22683 - DNA, 1095 bp, Artificial Sequence
  chemically treated genomic DNA (Homo sapiens) CpG-island No: 22683
gtttgtttgtggtgtttcgttgtgtttttttgttattgtttatatagtgggtggttttttgaacggcgggtcgggagattttattgttttacgtcgggggcggtcgggagtggttgtggttaggtataggcgtttgcgtttttcgggggtcgtttattttgttcgtcgtacgggttcggaggcgttttcgggggcgggttattttttcgtatttttttttttgtgttgcgaggattatatcgtattcggtttatattttttatttagtagaaggcgaataggtcgttggtgtttacggcgcggaggatggtattcgagtcgaacgatttcgggcggcgaagtcgcgtattcgacggatgtaaatacgtttagtttcgtttcgtttcgttttgtagcggcgttcggaggattcgttcgtttcggttttttcgtttcgcggtttcgtttttgtttcggggtgtttcgttcgtttcgtttcgttttaatttcggaaataagaatgagttaagaaggtagacgcgttgggttcggcgtggttttcgggcgggtttaattgagttttagggcgtaggaagcgtcgttcgtcgttcgcggggtcggggtttaggggcgggaaagcggggttaaggcgggttttgaggtttgtttttcgggcgggagtgagggagttggttcgaagtcgtcgtgtgaagtcgggggaagcgggaaggagttcgcgtcgagggttaggtcgcgggggcggttcgggtaggcgcggggttggtgcgggtttcgggtcgttcgtttcggggtttatttcgtttggttttggcggtttattcggtttgcgtttcggttgcgtttataggtgcgtgtttttttcgaatacgttcgagttttcggggtttcgtttgttttttatgagcgttttttagtttttcgggtcgttgagggtttcgtcgtcgtttaggttggggtgttttttttgtattttcgattggttgtcgttggttacgtttagcgtggggttgtcgtggtagtcgttttttacgaagcgtagtttttcgtcgtgcgattgaggcggggtggggagaggttatgggcgagcgagttagt

SEQ ID NO: 22684 - DNA, 1095 bp, Artificial Sequence
  chemically treated genomic DNA (Homo sapiens) CpG-island No: 22684
actaactcgctcgcccataacctctccccaccccgcctcaatcgcacgacgaaaaactacgcttcgtaaaaaacgactaccacgacaaccccacgctaaacgtaaccaacgacaaccaatcgaaaatacaaaaaaaacaccccaacctaaacgacgacgaaaccctcaacgacccgaaaaactaaaaaacgctcataaaaaacaaacgaaaccccgaaaactcgaacgtattcgaaaaaaacacgcacctataaacgcaaccgaaacgcaaaccgaataaaccgccaaaaccaaacgaaataaaccccgaaacgaacgacccgaaacccgcaccaaccccgcgcctacccgaaccgcccccgcgacctaaccctcgacgcgaactccttcccgcttcccccgacttcacacgacgacttcgaaccaactccctcactcccgcccgaaaaacaaacctcaaaacccgccttaaccccgctttcccgcccctaaaccccgaccccgcgaacgacgaacgacgcttcctacgccctaaaactcaattaaacccgcccgaaaaccacgccgaacccaacgcgtctaccttcttaactcattcttatttccgaaattaaaacgaaacgaaacgaacgaaacaccccgaaacaaaaacgaaaccgcgaaacgaaaaaaccgaaacgaacgaatcctccgaacgccgctacaaaacgaaacgaaacgaaactaaacgtatttacatccgtcgaatacgcgacttcgccgcccgaaatcgttcgactcgaataccatcctccgcgccgtaaacaccaacgacctattcgccttctactaaataaaaaatataaaccgaatacgatataatcctcgcaacacaaaaaaaaaaatacgaaaaaataacccgcccccgaaaacgcctccgaacccgtacgacgaacaaaataaacgacccccgaaaaacgcaaacgcctatacctaaccacaaccactcccgaccgcccccgacgtaaaacaataaaatctcccgacccgccgttcaaaaaaccacccactatataaacaataacaaaaaaacacaacgaaacaccacaaacaaac

SEQ ID NO: 22685 - DNA, 525 bp, Artificial Sequence
  chemically treated genomic DNA (Homo sapiens) CpG-island No: 22685
tgagaacgtagcgcgttagggtcgagttttttattggtttgtttcgcgttttttaatgttagcgttaggcgtttattttgtagagcgtttcgttttttaaagaggggtgtgattcgcgagtttagataggaggtttttgtcgtggggaatatttcgtcgttttcggagttttttttgtggcgtagttttttcgttcgagtcgcgcgcggagttgtcgggggttttttagtattcgggcgtcggggttttcgttttttcgtagtttttattttagttttttgttttcgtacgttatgaagtcgtcgttttatcgttgttagaatattatttttgtggaaatcgtggttagggttaaaaaggttagggttaagacgaagtaggtgtacgtcggtttttcgggcgttagtgttattagggtttggtttcgcgcgtacgaagttagttttttggggtgatgaggtaggtttcgagtaggtcggtgaaatttttagttcggttattagtacgtggaataaggagagggag

SEQ ID NO: 22686 - DNA, 525 bp, Artificial Sequence
  chemically treated genomic DNA (Homo sapiens) CpG-island No: 22686
ctccctctccttattccacgtactaataaccgaactaaaaatttcaccgacctactcgaaacctacctcatcaccccaaaaaactaacttcgtacgcgcgaaaccaaaccctaataacactaacgcccgaaaaaccgacgtacacctacttcgtcttaaccctaacctttttaaccctaaccacgatttccacaaaaataatattctaacaacgataaaacgacgacttcataacgtacgaaaacaaaaaactaaaataaaaactacgaaaaaacgaaaaccccgacgcccgaatactaaaaaacccccgacaactccgcgcgcgactcgaacgaaaaaactacgccacaaaaaaaactccgaaaacgacgaaatattccccacgacaaaaacctcctatctaaactcgcgaatcacacccctctttaaaaaacgaaacgctctacaaaataaacgcctaacgctaacattaaaaaacgcgaaacaaaccaataaaaaactcgaccctaacgcgctacgttctca

SEQ ID NO: 22687 - DNA, 525 bp, Artificial Sequence
  chemically treated genomic DNA (Homo sapiens) CpG-island No: 22687
ttttttttttttgttttacgtgttggtgatcgagttgggggttttatcgatttgttcgggatttgttttattattttaagggattggtttcgtacgcgcgggattagattttggtggtattggcgttcgaagagtcggcgtgtatttatttcgttttggttttgatttttttaattttggttacgatttttatagaggtggtgttttggtagcggtagaacggcgattttatggcgtgcgggagtagagggttggagtgaaggttgcggaagggcgagggtttcggcgttcgggtgttaaggagttttcggtagtttcgcgcgcggttcgggcggagaagttgcgttatagaaaaagtttcgagggcggcggggtgttttttacggtaggaattttttatttaaattcgcgggttatatttttttttgagaggcgggacgttttgtagggtgagcgtttggcgttggtattgaagagcgcggagtaggttagtgaagagttcggttttgacgcgttgcgttttta

SEQ ID NO: 22688 - DNA, 525 bp, Artificial Sequence
  chemically treated genomic DNA (Homo sapiens) CpG-island No: 22688
taaaaacgcaacgcgtcaaaaccgaactcttcactaacctactccgcgctcttcaataccaacgccaaacgctcaccctacaaaacgtcccgcctctcaaaaaaaaatataacccgcgaatttaaataaaaaattcctaccgtaaaaaacaccccgccgccctcgaaactttttctataacgcaacttctccgcccgaaccgcgcgcgaaactaccgaaaactccttaacacccgaacgccgaaaccctcgcccttccgcaaccttcactccaaccctctactcccgcacgccataaaatcgccgttctaccgctaccaaaacaccacctctataaaaatcgtaaccaaaattaaaaaaatcaaaaccaaaacgaaataaatacacgccgactcttcgaacgccaataccaccaaaatctaatcccgcgcgtacgaaaccaatcccttaaaataataaaacaaatcccgaacaaatcgataaaacccccaactcgatcaccaacacgtaaaacaaaaaaaaaaaa

SEQ ID NO: 22689 - DNA, 506 bp, Artificial Sequence
  chemically treated genomic DNA (Homo sapiens) CpG-island No: 22689
cgcgtcgacggcggtttgttttgggtttttcgtcgcgcgtcgagtggcggttcggttgttgtattcgagcggcgttcgaggttttcgcgtttattcgcgtcggttaaggtcgggagttagagtttaggggagtcgtcgttttcgttttcgtattgtcggggggcgggtttaagagtgttggttaggttttgtaagtgcgagtgttcgcgagttgtaggggaggtaggacgcgttatattcgcgggggcgtttcgagtttttggggtgcgtcggcggggagggagagaaggagtttgagtattcgttgggcgcggtattgggtagaggcgcgcgtgttgtcggtgtattgaagttgttcgcgatcggcgggagcggcgtttttcgttttttcggggttcggtattcgaagcgtacggtagtttgatttcggttgggaagcgttaagttttagtagagggttgggagggagtgtaggagtatttgcggggtttgcgtagaatatatag

SEQ ID NO: 22690 - DNA, 506 bp, Artificial Sequence
  chemically treated genomic DNA (Homo sapiens) CpG-island No: 22690
ctatatattctacgcaaaccccgcaaatactcctacactccctcccaaccctctactaaaacttaacgcttcccaaccgaaatcaaactaccgtacgcttcgaataccgaaccccgaaaaaacgaaaaacgccgctcccgccgatcgcgaacaacttcaatacaccgacaacacgcgcgcctctacccaataccgcgcccaacgaatactcaaactccttctctccctccccgccgacgcaccccaaaaactcgaaacgcccccgcgaatataacgcgtcctacctcccctacaactcgcgaacactcgcacttacaaaacctaaccaacactcttaaacccgccccccgacaatacgaaaacgaaaacgacgactcccctaaactctaactcccgaccttaaccgacgcgaataaacgcgaaaacctcgaacgccgctcgaatacaacaaccgaaccgccactcgacgcgcgacgaaaaacccaaaacaaaccgccgtcgacgcg

SEQ ID NO: 22691 - DNA, 506 bp, Artificial Sequence
  chemically treated genomic DNA (Homo sapiens) CpG-island No: 22691
ttgtgtattttgcgtagatttcgtaagtgtttttgtatttttttttagttttttgttggggtttaacgttttttagtcgaggttagattgtcgtgcgtttcgagtatcggatttcgaggaagcgagaaacgtcgttttcgtcggtcgcgggtagttttagtatatcggtaatacgcgcgtttttgtttagtgtcgcgtttagcgggtgtttagatttttttttttttttttcgtcggcgtattttagggattcggaacgttttcgcgagtgtgacgcgttttgttttttttgtagttcgcggatattcgtatttgtaaggtttggttagtatttttgggttcgtttttcgatagtgcgggggcggagacgacggtttttttaggttttggttttcggttttggtcggcgcgggtaggcgcgggagtttcgagcgtcgttcggatgtagtagtcgagtcgttattcggcgcgcggcgggagatttagggtaagtcgtcgtcggcgcg

SEQ ID NO: 22692 - DNA, 506 bp, Artificial Sequence
  chemically treated genomic DNA (Homo sapiens) CpG-island No: 22692
cgcgccgacgacgacttaccctaaatctcccgccgcgcgccgaataacgactcgactactacatccgaacgacgctcgaaactcccgcgcctacccgcgccgaccaaaaccgaaaaccaaaacctaaaaaaaccgtcgtctccgcccccgcactatcgaaaaacgaacccaaaaatactaaccaaaccttacaaatacgaatatccgcgaactacaaaaaaaacaaaacgcgtcacactcgcgaaaacgttccgaatccctaaaatacgccgacgaaaaaaaaaaaaaaaaatctaaacacccgctaaacgcgacactaaacaaaaacgcgcgtattaccgatatactaaaactacccgcgaccgacgaaaacgacgtttctcgcttcctcgaaatccgatactcgaaacgcacgacaatctaacctcgactaaaaaacgttaaaccccaacaaaaaactaaaaaaaaatacaaaaacacttacgaaatctacgcaaaatacacaa

SEQ ID NO: 22693 - DNA, 800 bp, Artificial Sequence
  chemically treated genomic DNA (Homo sapiens) CpG-island No: 22693
ttagggatttatgatttgattttttcggggtcggcgtttttgcggaagcggcggtggttcgggagttagattcggtttttacgtcgtcgggagtatttttttcgttatttgcggtcgggttttttcgatagggttcggcggtttttgtaggacgcgagttggggggtttcgaaggcggtcggcgcgttttttcgcgttttttataattttcggcgttcggtttcgcgtttttgattcgggtgttatcgcggagttgcgggaggtttcggcggttttcggacgcggtcgggaaagtggcgagcgcgcgttcgcgttcgcgttttcgttcgcgaacgtcggtttcggttattttcggcgcggcgtttttcggtaagtttcgtagtcgtttgtcggaaatggttgtcggtcggtagggggagcggcggattaggcgcggtttggaaggcgggcggtcggtagttagaacggtttttgggacgtcgattttcgcgtaggcggcggcggcggcggcggcgggtttttgagttggaagtcggtaggattgttggtcgcgcgtgagttcgaggagcgggggtcgcgttcggaagggtttatgggagggtgtcggggttggtttcgagcgttggggacgcggcgggagggatcgggttcgtcgtgtttcggggaggttgttgttgttcggcggcgggaggtatgtagttttcgagcggagtaggtttgttcggtggttcgggggttcggggagaggtcgttaggttttcggtcggtagtcgggagggttaacgggtttttgggttggg

SEQ ID NO: 22694 - DNA, 800 bp, Artificial Sequence
  chemically treated genomic DNA (Homo sapiens) CpG-island No: 22694
cccaacccaaaaacccgttaaccctcccgactaccgaccgaaaacctaacgacctctccccgaacccccgaaccaccgaacaaacctactccgctcgaaaactacatacctcccgccgccgaacaacaacaacctccccgaaacacgacgaacccgatccctcccgccgcgtccccaacgctcgaaaccaaccccgacaccctcccataaacccttccgaacgcgacccccgctcctcgaactcacgcgcgaccaacaatcctaccgacttccaactcaaaaacccgccgccgccgccgccgccgcctacgcgaaaatcgacgtcccaaaaaccgttctaactaccgaccgcccgccttccaaaccgcgcctaatccgccgctccccctaccgaccgacaaccatttccgacaaacgactacgaaacttaccgaaaaacgccgcgccgaaaataaccgaaaccgacgttcgcgaacgaaaacgcgaacgcgaacgcgcgctcgccactttcccgaccgcgtccgaaaaccgccgaaacctcccgcaactccgcgataacacccgaatcaaaaacgcgaaaccgaacgccgaaaattataaaaaacgcgaaaaaacgcgccgaccgccttcgaaaccccccaactcgcgtcctacaaaaaccgccgaaccctatcgaaaaaacccgaccgcaaataacgaaaaaaatactcccgacgacgtaaaaaccgaatctaactcccgaaccaccgccgcttccgcaaaaacgccgaccccgaaaaaatcaaatcataaatccctaa

SEQ ID NO: 22695 - DNA, 800 bp, Artificial Sequence
  chemically treated genomic DNA (Homo sapiens) CpG-island No: 22695
tttagtttagggattcgttagttttttcggttgtcggtcgagggtttggcggttttttttcgggttttcgagttatcgggtaggtttatttcgttcggaggttgtatgtttttcgtcgtcgggtagtagtagttttttcggggtacggcggattcggtttttttcgtcgcgtttttagcgttcggggttagtttcggtatttttttatgagttttttcgggcgcggttttcgtttttcgggtttacgcgcggttagtagttttatcggtttttagtttagggattcgtcgtcgtcgtcgtcgtcgtttgcgcgaaagtcggcgttttagaagtcgttttggttgtcggtcgttcgttttttaggtcgcgtttgattcgtcgttttttttgtcggtcggtagttattttcgataggcgattgcggaatttgtcgaagggcgtcgcgtcggaaatggtcgaagtcggcgttcgcgagcgggggcgcggacgcgggcgcgcgttcgttattttttcgatcgcgttcgaagatcgtcgaggtttttcgtagtttcgcggtgatattcgggttaggggcgcggggtcgggcgtcggggattgtgggaggcgcgggggggcgcgtcggtcgttttcggagttttttaattcgcgttttgtaaaggtcgtcgggttttgtcgagaagattcgatcgtagatggcggggaggatgttttcggcggcgtgggaatcgggtttgattttcgagttatcgtcgttttcgtaggggcgtcggtttcgggaaagttaagttataaatttttga

SEQ ID NO: 22696 - DNA, 800 bp, Artificial Sequence
  chemically treated genomic DNA (Homo sapiens) CpG-island No: 22696
tcaaaaatttataacttaactttcccgaaaccgacgcccctacgaaaacgacgataactcgaaaatcaaacccgattcccacgccgccgaaaacatcctccccgccatctacgatcgaatcttctcgacaaaacccgacgacctttacaaaacgcgaattaaaaaactccgaaaacgaccgacgcgcccccccgcgcctcccacaatccccgacgcccgaccccgcgcccctaacccgaatatcaccgcgaaactacgaaaaacctcgacgatcttcgaacgcgatcgaaaaaataacgaacgcgcgcccgcgtccgcgcccccgctcgcgaacgccgacttcgaccatttccgacgcgacgcccttcgacaaattccgcaatcgcctatcgaaaataactaccgaccgacaaaaaaaacgacgaatcaaacgcgacctaaaaaacgaacgaccgacaaccaaaacgacttctaaaacgccgactttcgcgcaaacgacgacgacgacgacgacgaatccctaaactaaaaaccgataaaactactaaccgcgcgtaaacccgaaaaacgaaaaccgcgcccgaaaaaactcataaaaaaataccgaaactaaccccgaacgctaaaaacgcgacgaaaaaaaccgaatccgccgtaccccgaaaaaactactactacccgacgacgaaaaacatacaacctccgaacgaaataaacctacccgataactcgaaaacccgaaaaaaaaccgccaaaccctcgaccgacaaccgaaaaaactaacgaatccctaaactaaa

SEQ ID NO: 22697 - DNA, 586 bp, Artificial Sequence
  chemically treated genomic DNA (Homo sapiens) CpG-island No: 22697
  unsure (378)
attggaagttcgttttggttaaggcgtatttgaacgacgaggagacggcggtagtggaggcgatcgtgttgtttttttaggacgaattcggatcggttaggaaggtagcgttcgtttcgttggggatagtcggttatagtatttcggttattttttttttttcgatttaggcggcggtttcgaggggtaggaggcggcgagagggtagcggcggttaggggcgtagtaagtatcggaaaagttagcgagcggaagggagtaggcgaattggattttcgcgggagggggcgcgtaggggttcgtttacgttagttttggtttcgcgttcgtcgcgggttatgaaattcggttcgggtcgttatcgaattgggttatcgnggtagttagtaatttttttcgttcgttggtaacgtcgagttaatataataggggcgcgtagggaatcgtcgcggataattttttcgattgcgtttttttcgaggggtcgcgggtttcgttttgtataatcgcgttaaaaggcgtaattgaggtttaaggggaaatttggttttttggagggtttttaattttggggaagggtggtttt

SEQ ID NO: 22698 - DNA, 586 bp, Artificial Sequence
  chemically treated genomic DNA (Homo sapiens) CpG-island No: 22698
  unsure (209)
aaaaccacccttccccaaaattaaaaaccctccaaaaaaccaaatttccccttaaacctcaattacgccttttaacgcgattatacaaaacgaaacccgcgacccctcgaaaaaaacgcaatcgaaaaaattatccgcgacgattccctacgcgcccctattatattaactcgacgttaccaacgaacgaaaaaaattactaactaccncgataacccaattcgataacgacccgaaccgaatttcataacccgcgacgaacgcgaaaccaaaactaacgtaaacgaacccctacgcgccccctcccgcgaaaatccaattcgcctactcccttccgctcgctaacttttccgatacttactacgcccctaaccgccgctaccctctcgccgcctcctacccctcgaaaccgccgcctaaatcgaaaaaaaaaaaataaccgaaatactataaccgactatccccaacgaaacgaacgctaccttcctaaccgatccgaattcgtcctaaaaaaacaacacgatcgcctccactaccgccgtctcctcgtcgttcaaatacgccttaaccaaaacgaacttccaat

SEQ ID NO: 22699 - DNA, 586 bp, Artificial Sequence
  chemically treated genomic DNA (Homo sapiens) CpG-island No: 22699
  unsure (209)
ggaattatttttttttaaagttaaaagttttttaaaaagttaagtttttttttgaattttagttgcgttttttggcgcggttatatagggcgggattcgcggtttttcgggaaaagcgtagtcgggaaagttattcgcggcggttttttgcgcgtttttgttgtgttagttcggcgttgttagcggacggagaaagttgttggttgttncgatagtttagttcggtggcggttcgggtcggattttatggttcgcggcgaacgcggggttagagttggcgtgggcgagtttttgcgcgttttttttcgcggggatttagttcgtttgttttttttcgttcgttggttttttcgatgtttgttgcgtttttggtcgtcgttgttttttcgtcgttttttatttttcggagtcgtcgtttaagtcgaggaggagagaatgatcgaggtgttgtggtcggttgtttttaacgggacggacgttgtttttttggtcggttcgggttcgttttgggggaatagtacggtcgtttttattgtcgtcgttttttcgtcgtttaaatgcgttttgattaagacgggtttttagt

SEQ ID NO: 22700 - DNA, 586 bp, Artificial Sequence
  chemically treated genomic DNA (Homo sapiens) CpG-island No: 22700
  unsure (378)
actaaaaacccgtcttaatcaaaacgcatttaaacgacgaaaaaacgacgacaataaaaacgaccgtactattcccccaaaacgaacccgaaccgaccaaaaaaacaacgtccgtcccgttaaaaacaaccgaccacaacacctcgatcattctctcctcctcgacttaaacgacgactccgaaaaataaaaaacgacgaaaaaacaacgacgaccaaaaacgcaacaaacatcgaaaaaaccaacgaacgaaaaaaaacaaacgaactaaatccccgcgaaaaaaaacgcgcaaaaactcgcccacgccaactctaaccccgcgttcgccgcgaaccataaaatccgacccgaaccgccaccgaactaaactatcgnaacaaccaacaactttctccgtccgctaacaacgccgaactaacacaacaaaaacgcgcaaaaaaccgccgcgaataactttcccgactacgcttttcccgaaaaaccgcgaatcccgccctatataaccgcgccaaaaaacgcaactaaaattcaaaaaaaaacttaactttttaaaaaacttttaactttaaaaaaaaataattcc

SEQ ID NO: 22701 - DNA, 728 bp, Artificial Sequence
  chemically treated genomic DNA (Homo sapiens) CpG-island No: 22701
gtttgcggtaggcggtaggaggcgagcgtggtttaggaattttcgcgggagggtcgggacgcggcggggtttgggggcggggcggtttaacgcgtaggcgcggggttaggcgtttcgcgcggttaggggcgggcggtcgtagagtagtatcggtcgtggtttcggtagtagtaagtacgaatttcgttttcgtttcgtttcggttttcgttttttcggtttttgggtttttaaatattagttttcggtagttcgttgtgtattgcgtttttttcgttttaggatgtcggtaatcgagaaggatttagttgaggacgcgttttggaagaagatttagtagaatacgtttatacgttggtgtaacgagtattttaagtgcgtgaataaacgtatcggtaatttgtagatcgatttgagcgacgggttgcggtttatcgcgttgttcgaggtgtttagttagaagcgtatgtatcgtaagtattattagcggtttatttttcgttagatgtagttcgagaatgtgttcgtggcgttcgagtttttggatcgtgagagtattaagttcgtgtttatcggtgagttttttggtcgggtttaggcgtttattgtggtgtcgattcgttttcgcgcgtgtatttttgcggagggcgaggatttttcgtagcgcgtttttatttcggagataagggggagtcgtttttaggggtgggttatagggggtttagattt

SEQ ID NO: 22702 - DNA, 728 bp, Artificial Sequence
  chemically treated genomic DNA (Homo sapiens) CpG-island No: 22702
aaatctaaaccccctataacccacccctaaaaacgactcccccttatctccgaaataaaaacgcgctacgaaaaatcctcgccctccgcaaaaatacacgcgcgaaaacgaatcgacaccacaataaacgcctaaacccgaccaaaaaactcaccgataaacacgaacttaatactctcacgatccaaaaactcgaacgccacgaacacattctcgaactacatctaacgaaaaataaaccgctaataatacttacgatacatacgcttctaactaaacacctcgaacaacgcgataaaccgcaacccgtcgctcaaatcgatctacaaattaccgatacgtttattcacgcacttaaaatactcgttacaccaacgtataaacgtattctactaaatcttcttccaaaacgcgtcctcaactaaatccttctcgattaccgacatcctaaaacgaaaaaaacgcaatacacaacgaactaccgaaaactaatatttaaaaacccaaaaaccgaaaaaacgaaaaccgaaacgaaacgaaaacgaaattcgtacttactactaccgaaaccacgaccgatactactctacgaccgcccgcccctaaccgcgcgaaacgcctaaccccgcgcctacgcgttaaaccgccccgcccccaaaccccgccgcgtcccgaccctcccgcgaaaattcctaaaccacgctcgcctcctaccgcctaccgcaaac

SEQ ID NO: 22703 - DNA, 728 bp, Artificial Sequence
  chemically treated genomic DNA (Homo sapiens) CpG-island No: 22703
gggtttaggttttttataatttatttttggggacgatttttttttattttcgaggtgggggcgcgttgcgggaaattttcgtttttcgtaggggtgtacgcgcgggggcgggtcggtattatagtgggcgtttgggttcggttagagaatttatcgatggatacgagtttgatgtttttacggtttaggaattcgagcgttacggatatattttcgagttgtatttggcgaaaggtgggtcgttgatggtatttgcggtatatgcgtttttggttgagtatttcgagtagcgcgatgagtcgtagttcgtcgtttaggtcggtttgtaggttgtcgatgcgtttgtttacgtatttgaggtgttcgttgtattagcgtgtgaacgtgttttgttggatttttttttaaggcgcgtttttagttagatttttttcggttatcggtattttggggcggggagagcgtaatgtataacgagttgtcggggattggtgtttggaggtttaagggtcgaaggagcgagagtcgaagcggagcgggagcggggttcgtatttgttgttatcggagttacggtcggtgttgttttgcggtcgttcgtttttggtcgcgcgaggcgtttggtttcgcgtttgcgcgttgagtcgtttcgtttttaagtttcgtcgcgtttcggttttttcgcgggagtttttgggttacgttcgttttttgtcgtttgtcgtaggt

SEQ ID NO: 22704 - DNA, 728 bp, Artificial Sequence
  chemically treated genomic DNA (Homo sapiens) CpG-island No: 22704
acctacgacaaacgacaaaaaacgaacgtaacccaaaaactcccgcgaaaaaaccgaaacgcgacgaaacttaaaaacgaaacgactcaacgcgcaaacgcgaaaccaaacgcctcgcgcgaccaaaaacgaacgaccgcaaaacaacaccgaccgtaactccgataacaacaaatacgaaccccgctcccgctccgcttcgactctcgctccttcgacccttaaacctccaaacaccaatccccgacaactcgttatacattacgctctccccgccccaaaataccgataaccgaaaaaaatctaactaaaaacgcgccttaaaaaaaaatccaacaaaacacgttcacacgctaatacaacgaacacctcaaatacgtaaacaaacgcatcgacaacctacaaaccgacctaaacgacgaactacgactcatcgcgctactcgaaatactcaaccaaaaacgcatataccgcaaataccatcaacgacccacctttcgccaaatacaactcgaaaatatatccgtaacgctcgaattcctaaaccgtaaaaacatcaaactcgtatccatcgataaattctctaaccgaacccaaacgcccactataataccgacccgcccccgcgcgtacacccctacgaaaaacgaaaatttcccgcaacgcgcccccacctcgaaaataaaaaaaaatcgtccccaaaaataaattataaaaaacctaaaccc

SEQ ID NO: 22705 - DNA, 540 bp, Artificial Sequence
  chemically treated genomic DNA (Homo sapiens) CpG-island No: 22705
agtgtagcgggtggttggttttgtttcgggatattcgtagcgggttatcggcgtttcggtatcggttggcgtttagttcgtggttttgcgttttgcggaagtagggtaggtagtgcgcgtagttttagtcgcgggcgttttggcgttgttagcgttcgtagttttcggcgtgtttacggacgtagattatggtattgagggatgaggagttattttagacgcggtcgcgtggttagtatagtacgcggtcgtttaggtttcgttgtatttttgtgtggtagtattagttgtatttgtcgtcgtataggttggttattagggtcgcgggtatgtggattttttacgagagtcgtttgtttttcgcgagtacgtttttgggttcggtttttagtagtagtacgcgttcggcggggtttttcgtgagttttttagttagtacgtagttcgtcgagttcgcgtttattattatatagttgtattcgtttcggtttttagagtttgcgttggttagggttcgggtatttagggattgttgttgtt

SEQ ID NO: 22706 - DNA, 540 bp, Artificial Sequence
  chemically treated genomic DNA (Homo sapiens) CpG-island No: 22706
aacaacaacaatccctaaatacccgaaccctaaccaacgcaaactctaaaaaccgaaacgaatacaactatataataataaacgcgaactcgacgaactacgtactaactaaaaaactcacgaaaaaccccgccgaacgcgtactactactaaaaaccgaacccaaaaacgtactcgcgaaaaacaaacgactctcgtaaaaaatccacatacccgcgaccctaataaccaacctatacgacgacaaatacaactaatactaccacacaaaaatacaacgaaacctaaacgaccgcgtactatactaaccacgcgaccgcgtctaaaataactcctcatccctcaataccataatctacgtccgtaaacacgccgaaaactacgaacgctaacaacgccaaaacgcccgcgactaaaactacgcgcactacctaccctacttccgcaaaacgcaaaaccacgaactaaacgccaaccgataccgaaacgccgataacccgctacgaatatcccgaaacaaaaccaaccacccgctacact

SEQ ID NO: 22707 - DNA, 540 bp, Artificial Sequence
  chemically treated genomic DNA (Homo sapiens) CpG-island No: 22707
ggtagtagtaatttttgggtgttcgggttttggttagcgtaggttttgagagtcgggacgagtatagttatgtggtggtgggcgcgggttcggcgggttgcgtgttggttgggaggtttacggaggatttcgtcgagcgcgtgttgttgttggaggtcgggtttaaggacgtgttcgcggggagtaagcggttttcgtggaagatttatatgttcgcggttttggtggttaatttgtgcgacgataggtataattggtgttattatatagaggtgtagcggggtttggacggtcgcgtgttgtattggttacgcggtcgcgtttggggtggttttttattttttaatgttatggtttacgttcgtgggtacgtcgaggattacgagcgttggtagcgttagggcgttcgcggttgggattacgcgtattgtttgttttattttcgtaaggcgtagggttacgagttgggcgttagtcggtatcggggcgtcgatggttcgttgcgggtgtttcggggtaagattaattattcgttgtatt

SEQ ID NO: 22708 - DNA, 540 bp, Artificial Sequence
  chemically treated genomic DNA (Homo sapiens) CpG-island No: 22708
aatacaacgaataattaatcttaccccgaaacacccgcaacgaaccatcgacgccccgataccgactaacgcccaactcgtaaccctacgccttacgaaaataaaacaaacaatacgcgtaatcccaaccgcgaacgccctaacgctaccaacgctcgtaatcctcgacgtacccacgaacgtaaaccataacattaaaaaataaaaaaccaccccaaacgcgaccgcgtaaccaatacaacacgcgaccgtccaaaccccgctacacctctatataataacaccaattatacctatcgtcgcacaaattaaccaccaaaaccgcgaacatataaatcttccacgaaaaccgcttactccccgcgaacacgtccttaaacccgacctccaacaacaacacgcgctcgacgaaatcctccgtaaacctcccaaccaacacgcaacccgccgaacccgcgcccaccaccacataactatactcgtcccgactctcaaaacctacgctaaccaaaacccgaacacccaaaaattactactacc

SEQ ID NO: 22709 - DNA, 615 bp, Artificial Sequence
  chemically treated genomic DNA (Homo sapiens) CpG-island No: 22709
cgtgttcgagcgttggcggagtacgggtcgtcgcggcgcgcgtttattttcgcgtatacgtgtatgtagtgagttaggtgtattagttgtattcgttttcgggtttcgcgcgttttcgttggagtttagttagtttcgcggtttcggggtcgatcgggtcggaattgttgcgtttttatttcggacgtagagagcgcgcggggcgtcggcgtcgtcggttaaagtgtcgcggggtaggggtcgggtcgcggttattcgtttttttcgtttcggtttcgattgtcgggttttcggtcgagtcgtttcgggtgagtagtcgcggaggcgtttcgattatttcgtagtagcgtcgttcggtcgttagttcggagaggtttgggggtcggaggtttggggtcgggttggacgtcgagattcgggttcgttttatataatcgtttcgtcgcgcgaagcgaaacgggtggaacgtagattgtcgaagtttattgatttttttgagggagcgaatttttttagttacgcggggttagagcggtaggagtgttcgttgatcgattttaggttttttggtaaatgtttgtttttattaagtgagttcggatagtaatatttggg

SEQ ID NO: 22710 - DNA, 615 bp, Artificial Sequence
  chemically treated genomic DNA (Homo sapiens) CpG-island No: 22710
cccaaatattactatccgaactcacttaataaaaacaaacatttaccaaaaaacctaaaatcgatcaacgaacactcctaccgctctaaccccgcgtaactaaaaaaattcgctccctcaaaaaaatcaataaacttcgacaatctacgttccacccgtttcgcttcgcgcgacgaaacgattatataaaacgaacccgaatctcgacgtccaacccgaccccaaacctccgacccccaaacctctccgaactaacgaccgaacgacgctactacgaaataatcgaaacgcctccgcgactactcacccgaaacgactcgaccgaaaacccgacaatcgaaaccgaaacgaaaaaaacgaataaccgcgacccgacccctaccccgcgacactttaaccgacgacgccgacgccccgcgcgctctctacgtccgaaataaaaacgcaacaattccgacccgatcgaccccgaaaccgcgaaactaactaaactccaacgaaaacgcgcgaaacccgaaaacgaatacaactaatacacctaactcactacatacacgtatacgcgaaaataaacgcgcgccgcgacgacccgtactccgccaacgctcgaacacg

SEQ ID NO: 22711 - DNA, 615 bp, Artificial Sequence
  chemically treated genomic DNA (Homo sapiens) CpG-island No: 22711
tttaggtgttgttgttcgaatttatttggtggaaatagatatttattagaaagtttggggtcggttagcgggtatttttatcgttttaatttcgcgtagttgaaagaattcgtttttttaaaggagttagtgagtttcggtagtttgcgttttattcgtttcgtttcgcgcggcggggcgattgtgtaaagcgggttcgggtttcggcgtttagttcggttttaaattttcggtttttaggttttttcgggttagcggtcgggcggcgttgttgcggggtggtcggggcgttttcgcggttatttattcggggcgattcggtcgagagttcgatagtcgggatcggagcgggaggagcgggtggtcgcggttcggtttttgtttcgcggtattttaatcggcggcgtcggcgtttcgcgcgttttttgcgttcggaatggggacgtagtagtttcgattcggtcggtttcggagtcgcgaggttagttgggttttagcggaggcgcgcgaagttcgagggcgggtgtagttgatgtatttggtttattgtatgtacgtgtgcgcgggggtaggcgcgcgtcgcggcggttcgtgtttcgttagcgttcggatacg

SEQ ID NO: 22712 - DNA, 615 bp, Artificial Sequence
  chemically treated genomic DNA (Homo sapiens) CpG-island No: 22712
cgtatccgaacgctaacgaaacacgaaccgccgcgacgcgcgcctacccccgcgcacacgtacatacaataaaccaaatacatcaactacacccgccctcgaacttcgcgcgcctccgctaaaacccaactaacctcgcgactccgaaaccgaccgaatcgaaactactacgtccccattccgaacgcaaaaaacgcgcgaaacgccgacgccgccgattaaaataccgcgaaacaaaaaccgaaccgcgaccacccgctcctcccgctccgatcccgactatcgaactctcgaccgaatcgccccgaataaataaccgcgaaaacgccccgaccaccccgcaacaacgccgcccgaccgctaacccgaaaaaacctaaaaaccgaaaatttaaaaccgaactaaacgccgaaacccgaacccgctttacacaatcgccccgccgcgcgaaacgaaacgaataaaacgcaaactaccgaaactcactaactcctttaaaaaaacgaattctttcaactacgcgaaattaaaacgataaaaatacccgctaaccgaccccaaactttctaataaatatctatttccaccaaataaattcgaacaacaacacctaaa

SEQ ID NO: 22713 - DNA, 715 bp, Artificial Sequence
  chemically treated genomic DNA (Homo sapiens) CpG-island No: 22713
attattttcgtaaatttataattaagcgtttgttgtacgaaggcggggttgtagggtttttagtatttaacgtgaggtcggcgggatttcggttttcgattgtcggtttagagattatcggttgacgcgtcgtaagtcgaggcgatttcggtttagtttcgttcggtcgcggggcgttaagttcggggaagtcgtatcgggtttaagatttagcgagcgacgatgaaaggaatttggagttcgattttataagttatcggtcgaagttatagttcgtttttaatttatcgttcgagatgtaaattattttgttttattttttcgtttcggagttatcgggcgtttggtttttgtcggtttttgtatttttttttgtttttcgtttttcgagcgttataggtcgcgattagataaaatgttgacgaggacgaaggtgggtagagtttattggttgttgaaagagacgcgttttcgacgggcgtttttgtatcgttatatttgcgatttttggttaggcggaggcggtcgagttgataatcggatatgacgttaaggattgttttgtagtgttcgcggttgttagttttttattcgatttgatcgtgtagagttggttcgtatcgtttagtgaggggaagttgttttttcgtcgattgataggtttcgggtttgggtaggagaggttgttttgtatgaggtagtttgaagggtcgtt

SEQ ID NO: 22714 - DNA, 715 bp, Artificial Sequence
  chemically treated genomic DNA (Homo sapiens) CpG-island No: 22714
aacgacccttcaaactacctcatacaaaacaacctctcctacccaaacccgaaacctatcaatcgacgaaaaaacaacttcccctcactaaacgatacgaaccaactctacacgatcaaatcgaataaaaaactaacaaccgcgaacactacaaaacaatccttaacgtcatatccgattatcaactcgaccgcctccgcctaaccaaaaatcgcaaatataacgatacaaaaacgcccgtcgaaaacgcgtctctttcaacaaccaataaactctacccaccttcgtcctcgtcaacattttatctaatcgcgacctataacgctcgaaaaacgaaaaacaaaaaaaaatacaaaaaccgacaaaaaccaaacgcccgataactccgaaacgaaaaaataaaacaaaataatttacatctcgaacgataaattaaaaacgaactataacttcgaccgataacttataaaatcgaactccaaattcctttcatcgtcgctcgctaaatcttaaacccgatacgacttccccgaacttaacgccccgcgaccgaacgaaactaaaccgaaatcgcctcgacttacgacgcgtcaaccgataatctctaaaccgacaatcgaaaaccgaaatcccgccgacctcacgttaaatactaaaaaccctacaaccccgccttcgtacaacaaacgcttaattataaatttacgaaaataat

SEQ ID NO: 22715 - DNA, 715 bp, Artificial Sequence
  chemically treated genomic DNA (Homo sapiens) CpG-island No: 22715
agcggttttttaagttattttatatagggtagttttttttatttagattcggagtttattaatcgacgagaaaatagtttttttttattgggcggtgcgaattaattttgtacgattaagtcggatagaggattggtaatcgcgggtattatagggtagtttttaacgttatattcggttgttagttcggtcgttttcgtttaattagaagtcgtagatgtgacgatgtaaaaacgttcgtcgggggcgcgttttttttagtagttaatgggttttgtttattttcgttttcgttagtattttgtttaatcgcggtttgtgacgttcgaagggcggggagtagagggagatatagaaatcgataggggttaggcgttcggtggtttcgaagcggggaagtgggataagatggtttatatttcgaacggtaagttgagagcgggttgtggtttcgatcggtgatttgtaagatcggattttaggttttttttatcgtcgttcgttgagttttgagttcggtgcggttttttcgggtttagcgtttcgcggtcgggcggagttggatcgaagtcgtttcggtttgcggcgcgttagtcgatggtttttgagtcggtagtcgggggtcgaggtttcgtcggttttacgttgagtattgggagttttgtaatttcgttttcgtgtagtaagcgtttgattgtggatttgcgagggtggt

SEQ ID NO: 22716 - DNA, 715 bp, Artificial Sequence
  chemically treated genomic DNA (Homo sapiens) CpG-island No: 22716
accaccctcgcaaatccacaatcaaacgcttactacacgaaaacgaaattacaaaactcccaatactcaacgtaaaaccgacgaaacctcgacccccgactaccgactcaaaaaccatcgactaacgcgccgcaaaccgaaacgacttcgatccaactccgcccgaccgcgaaacgctaaacccgaaaaaaccgcaccgaactcaaaactcaacgaacgacgataaaaaaaacctaaaatccgatcttacaaatcaccgatcgaaaccacaacccgctctcaacttaccgttcgaaatataaaccatcttatcccacttccccgcttcgaaaccaccgaacgcctaacccctatcgatttctatatctccctctactccccgcccttcgaacgtcacaaaccgcgattaaacaaaatactaacgaaaacgaaaataaacaaaacccattaactactaaaaaaaacgcgcccccgacgaacgtttttacatcgtcacatctacgacttctaattaaacgaaaacgaccgaactaacaaccgaatataacgttaaaaactaccctataatacccgcgattaccaatcctctatccgacttaatcgtacaaaattaattcgcaccgcccaataaaaaaaaactattttctcgtcgattaataaactccgaatctaaataaaaaaaactaccctatataaaataacttaaaaaaccgct

SEQ ID NO: 22717 - DNA, 521 bp, Artificial Sequence
  chemically treated genomic DNA (Homo sapiens) CpG-island No: 22717
cgggaagcgaaagcggtggaaaggtcgtattggttatcgataatttttagttcggttaggtcggagatgttgaattattgtcggagttcggtcgtttgtcgaggtttttatatttcgtggtatcgggcgacgttaaggatgataggagaggtggttcgttattttttagttattagagttttgttttaaattttttagagatcgggatttaacgtattatggtggcggcgcgggtttggttgcggtttttagtaaaattgagaattaaggaggtgttgtcgaaagtatcgtttagcgatttatagagaagtttgcgggagtttgacggcggcggcgtagggtagcgtagtttattttagagatatcgataggtttgtaatatttttttttttttaaaatttttcgatcgttcggcggcgggcggagtttcggaagatttaggaattgagattggcgggaaaatttggttgggagtgtcggcggttgagagttgcggggtagtttttgttacgtagtttttt

SEQ ID NO: 22718 - DNA, 521 bp, Artificial Sequence
  chemically treated genomic DNA (Homo sapiens) CpG-island No: 22718
aaaaaactacgtaacaaaaactaccccgcaactctcaaccgccgacactcccaaccaaattttcccgccaatctcaattcctaaatcttccgaaactccgcccgccgccgaacgatcgaaaaattttaaaaaaaaaaaaatattacaaacctatcgatatctctaaaataaactacgctaccctacgccgccgccgtcaaactcccgcaaacttctctataaatcgctaaacgatactttcgacaacacctccttaattctcaattttactaaaaaccgcaaccaaacccgcgccgccaccataatacgttaaatcccgatctctaaaaaatttaaaacaaaactctaataactaaaaaataacgaaccacctctcctatcatccttaacgtcgcccgataccacgaaatataaaaacctcgacaaacgaccgaactccgacaataattcaacatctccgacctaaccgaactaaaaattatcgataaccaatacgacctttccaccgctttcgcttcccg

SEQ ID NO: 22719 - DNA, 521 bp, Artificial Sequence
  chemically treated genomic DNA (Homo sapiens) CpG-island No: 22719
gaagggttacgtgataggggttgtttcgtagtttttagtcgtcggtatttttagttaggttttttcgttagttttagtttttagatttttcgaggtttcgttcgtcgtcgagcggtcggaaagttttaaggagggggaagtgttgtaagtttatcgatatttttggaatagattgcgttattttgcgtcgtcgtcgttaaattttcgtagatttttttgtagatcgttgagcgatattttcggtagtatttttttgatttttagttttgttggaggtcgtaattaggttcgcgtcgttattatggtacgttgaatttcgatttttggaaggtttagggtagagttttggtgattgggggatgacgagttattttttttgttatttttagcgtcgttcggtgttacgaggtatgagagtttcggtagacggtcgggtttcggtagtgatttagtattttcggtttggtcgggttaggggttatcggtagttagtgcggtttttttatcgttttcgtttttcg

SEQ ID NO: 22720 - DNA, 521 bp, Artificial Sequence
  chemically treated genomic DNA (Homo sapiens) CpG-island No: 22720
cgaaaaacgaaaacgataaaaaaaccgcactaactaccgataacccctaacccgaccaaaccgaaaatactaaatcactaccgaaacccgaccgtctaccgaaactctcatacctcgtaacaccgaacgacgctaaaaataacaaaaaaaataactcgtcatcccccaatcaccaaaactctaccctaaaccttccaaaaatcgaaattcaacgtaccataataacgacgcgaacctaattacgacctccaacaaaactaaaaatcaaaaaaatactaccgaaaatatcgctcaacgatctacaaaaaaatctacgaaaatttaacgacgacgacgcaaaataacgcaatctattccaaaaatatcgataaacttacaacacttccccctccttaaaactttccgaccgctcgacgacgaacgaaacctcgaaaaatctaaaaactaaaactaacgaaaaaacctaactaaaaataccgacgactaaaaactacgaaacaacccctatcacgtaacccttc

SEQ ID NO: 22721 - DNA, 959 bp, Artificial Sequence
  chemically treated genomic DNA (Homo sapiens) CpG-island No: 22721
tcgcgaggtcgaggtcggggtcggggtgggttcggaggttaagttttcgaacgggaagggtcgacgggtcgtagttcggagtttagttcggtagcgggcgaggttttaggtcgttttttcgaggtttgattttgcgcgtgggtttcgtgcgttttttaagtttcgcgtgggtagagcgggttcggggtttttcgagttttcggggcggcgtcggcggtcgcgtttaggtggggcgggttcggcgggatcggtttgtgtttatttggttcgtaggaagttcggggaggcggggtcggggagttgggtgcgcgttcgtttttcggagtcgtcgtcgttagttatcgtcgtcgcgcgttagagagaagtagttttcggtttcggcggtttttgtttttcgatttcggaaggcgaagtaggttgttcggggatttcgcgcgtgggcgtttgaagtcgagattagtttgttcgggtttgggtaggcggagtagggttttggatttcgcggcgtttttcggtttcggagtaacgagcgtagcgtcggtgggtgattttcggggacgggcgggttgttttgtcgtttttgtttttgtgttttttcgagtggggatcgcggagatttgggcgggatttcggatcggagtttcgcgggagtcgggggcgtaagatcggggataggagttatttcgacgttcggatttcgggttttttttttggttggggacgcgtagggagaatttaggtagcggagtaggtggtcgagtaggtagtagtcggcggtttttttgattcgaatttaagtcgtcgttttcgatttttattgcgcgggggttgggcgcgggtgtagacgcgggtttatagcgtcggggttcgattttgataggtgtttaggggtggattttagttaggttcggcggttttagggtcgttgaaatcgttcggtttcgggtcgtggggttgag

SEQ ID NO: 22722 - DNA, 959 bp, Artificial Sequence
  chemically treated genomic DNA (Homo sapiens) CpG-island No: 22722
ctcaaccccacgacccgaaaccgaacgatttcaacgaccctaaaaccgccgaacctaactaaaatccacccctaaacacctatcaaaatcgaaccccgacgctataaacccgcgtctacacccgcgcccaacccccgcgcaataaaaatcgaaaacgacgacttaaattcgaatcaaaaaaaccgccgactactacctactcgaccacctactccgctacctaaattctccctacgcgtccccaaccaaaaaaaaaacccgaaatccgaacgtcgaaataactcctatccccgatcttacgcccccgactcccgcgaaactccgatccgaaatcccgcccaaatctccgcgatccccactcgaaaaaacacaaaaacaaaaacgacaaaacaacccgcccgtccccgaaaatcacccaccgacgctacgctcgttactccgaaaccgaaaaacgccgcgaaatccaaaaccctactccgcctacccaaacccgaacaaactaatctcgacttcaaacgcccacgcgcgaaatccccgaacaacctacttcgccttccgaaatcgaaaaacaaaaaccgccgaaaccgaaaactacttctctctaacgcgcgacgacgataactaacgacgacgactccgaaaaacgaacgcgcacccaactccccgaccccgcctccccgaacttcctacgaaccaaataaacacaaaccgatcccgccgaacccgccccacctaaacgcgaccgccgacgccgccccgaaaactcgaaaaaccccgaacccgctctacccacgcgaaacttaaaaaacgcacgaaacccacgcgcaaaatcaaacctcgaaaaaacgacctaaaacctcgcccgctaccgaactaaactccgaactacgacccgtcgacccttcccgttcgaaaacttaacctccgaacccaccccgaccccgacctcgacctcgcga

SEQ ID NO: 22723 - DNA, 959 bp, Artificial Sequence
  chemically treated genomic DNA (Homo sapiens) CpG-island No: 22723
tttagttttacggttcgaggtcgagcggttttagcgattttgggatcgtcgggtttggttggagtttatttttggatatttgttagggtcgggtttcggcgttgtaaattcgcgtttatattcgcgtttagttttcgcgtaatggggatcgggggcggcgatttgggttcgggttagggaggtcgtcggttgttatttgttcggttatttgtttcgttgtttaggttttttttgcgcgtttttagttaagaaagggattcggagttcgggcgtcgggatagtttttgttttcgattttgcgttttcggttttcgcggggtttcggttcggggtttcgtttaggttttcgcggtttttattcggaggggtatagagataaaggcggtagagtagttcgttcgttttcgagggttatttatcggcgttgcgttcgttgtttcgaggtcgaggggcgtcgcggggtttaaggttttgtttcgtttgtttaggttcgggtaggttggtttcggttttaagcgtttacgcgcggggttttcgggtagtttgtttcgtttttcggggtcgggagataggggtcgtcggggtcggaggttgtttttttttggcgcgcggcggcggtgattgacggcggcggtttcgagggacgggcgcgtatttagtttttcggtttcgttttttcgggttttttgcgagttaggtaaatataggtcgatttcgtcgggttcgttttatttggacgcggtcgtcggcgtcgtttcgggagttcggaggatttcgggttcgttttgtttacgcggaatttggggggcgtacggggtttacgcgtagggttagatttcggaggggcggtttggagtttcgttcgttgtcgaattgggtttcgaattgcggttcgtcgatttttttcgttcggaggtttggttttcgaatttatttcgatttcgatttcgatttcgcgg

SEQ ID NO: 22724 - DNA, 959 bp, Artificial Sequence
  chemically treated genomic DNA (Homo sapiens) CpG-island No: 22724
ccgcgaaatcgaaatcgaaatcgaaataaattcgaaaaccaaacctccgaacgaaaaaaatcgacgaaccgcaattcgaaacccaattcgacaacgaacgaaactccaaaccgcccctccgaaatctaaccctacgcgtaaaccccgtacgccccccaaattccgcgtaaacaaaacgaacccgaaatcctccgaactcccgaaacgacgccgacgaccgcgtccaaataaaacgaacccgacgaaatcgacctatatttacctaactcgcaaaaaacccgaaaaaacgaaaccgaaaaactaaatacgcgcccgtccctcgaaaccgccgccgtcaatcaccgccgccgcgcgccaaaaaaaaacaacctccgaccccgacgacccctatctcccgaccccgaaaaacgaaacaaactacccgaaaaccccgcgcgtaaacgcttaaaaccgaaaccaacctacccgaacctaaacaaacgaaacaaaaccttaaaccccgcgacgcccctcgacctcgaaacaacgaacgcaacgccgataaataaccctcgaaaacgaacgaactactctaccgcctttatctctatacccctccgaataaaaaccgcgaaaacctaaacgaaaccccgaaccgaaaccccgcgaaaaccgaaaacgcaaaatcgaaaacaaaaactatcccgacgcccgaactccgaatccctttcttaactaaaaacgcgcaaaaaaaacctaaacaacgaaacaaataaccgaacaaataacaaccgacgacctccctaacccgaacccaaatcgccgcccccgatccccattacgcgaaaactaaacgcgaatataaacgcgaatttacaacgccgaaacccgaccctaacaaatatccaaaaataaactccaaccaaacccgacgatcccaaaatcgctaaaaccgctcgacctcgaaccgtaaaactaaa

SEQ ID NO: 22725 - DNA, 515 bp, Artificial Sequence
  chemically treated genomic DNA (Homo sapiens) CpG-island No: 22725
gcgtaggcgtagaggaggttagcgttttttgttgtttcgtttcgcggtttttaggagataggggttacggggagagtatagttattcggcgcgaagagttttttgtatttcgtttttttttgaggttttcggatcgtttaggaaatgtttgggagttcgtttgcggagggtatagcgtcgattttcgtttttcgtttaggattcgaatgaatttggagagcggatgttagtagtggtcgaggcgttaggataggaaggatcgttagattttttaagattagtttttttcgttatcgtttttatttttttgttcgttgttttttttttaatgtttagtagcgcgtataggtttatttgtaagagttttttggttattgttatggtttcggtttgacggattcgtattataatttttaagagtttaagcgcgcgtgaggattgtaggttcggggattttatagagtaggatttgtaggcgatgtaagttatttttagtgtattaagaataaatggga

SEQ ID NO: 22726 - DNA, 515 bp, Artificial Sequence
  chemically treated genomic DNA (Homo sapiens) CpG-island No: 22726
tcccatttattcttaatacactaaaaataacttacatcgcctacaaatcctactctataaaatccccgaacctacaatcctcacgcgcgcttaaactcttaaaaattataatacgaatccgtcaaaccgaaaccataacaataaccaaaaaactcttacaaataaacctatacgcgctactaaacattaaaaaaaaaacaacgaacaaaaaaataaaaacgataacgaaaaaaactaatcttaaaaaatctaacgatccttcctatcctaacgcctcgaccactactaacatccgctctccaaattcattcgaatcctaaacgaaaaacgaaaatcgacgctataccctccgcaaacgaactcccaaacatttcctaaacgatccgaaaacctcaaaaaaaaacgaaatacaaaaaactcttcgcgccgaataactatactctccccgtaacccctatctcctaaaaaccgcgaaacgaaacaacaaaaaacgctaacctcctctacgcctacgc

SEQ ID NO: 22727 - DNA, 515 bp, Artificial Sequence
  chemically treated genomic DNA (Homo sapiens) CpG-island No: 22727
ttttatttatttttgatatattaagaatagtttgtatcgtttgtaggttttattttataggattttcgagtttgtagtttttacgcgcgtttagatttttgggagttgtagtacgaattcgttaggtcggaattatggtagtgattaaggagtttttatagatggatttgtacgcgttgttaggtattgaggagaaggtagcggataaagaggtgagaacggtggcgaggaaggttgattttgagaggtttggcggttttttttgttttagcgtttcggttattgttggtattcgttttttaggtttattcgggttttgggcggggagcgagggtcggcgttatgtttttcgtaggcgggtttttagatattttttggacggttcgagggttttaagaggaagcggggtatagagggtttttcgcgtcgggtggttgtgtttttttcgtggtttttgttttttagaggtcgcggggcgaggtagtaaggaacgttagttttttttgcgtttgcgt

SEQ ID NO: 22728 - DNA, 515 bp, Artificial Sequence
  chemically treated genomic DNA (Homo sapiens) CpG-island No: 22728
acgcaaacgcaaaaaaaactaacgttccttactacctcgccccgcgacctctaaaaaacaaaaaccacgaaaaaaacacaaccacccgacgcgaaaaaccctctataccccgcttcctcttaaaaccctcgaaccgtccaaaaaatatctaaaaacccgcctacgaaaaacataacgccgaccctcgctccccgcccaaaacccgaataaacctaaaaaacgaataccaacaataaccgaaacgctaaaacaaaaaaaaccgccaaacctctcaaaatcaaccttcctcgccaccgttctcacctctttatccgctaccttctcctcaatacctaacaacgcgtacaaatccatctataaaaactccttaatcactaccataattccgacctaacgaattcgtactacaactcccaaaaatctaaacgcgcgtaaaaactacaaactcgaaaatcctataaaataaaacctacaaacgatacaaactattcttaatatatcaaaaataaataaaa

SEQ ID NO: 22729 - DNA, 502 bp, Artificial Sequence
  chemically treated genomic DNA (Homo sapiens) CpG-island No: 22729
gggcgtcgtagcgtagttgtagtagtattcgggcgcgttcggggttgtgggagtcgaagtgagtgtattggatttggcggggttcgaaggtgtaggggaagcggcgcggggagagcgcgtttttgagtcgcggtagggcgtttagtatcgtgatttcgtatcggtttttcggttgtattttaattattagatttcggagcgggtcgagttaaagggaacgatttaggggtattcggagtttagggttggtaattagtacgttggggtcgtcggggcgagtgtcgttaagcgtatttcgggcgggtaggtaaagcgtcgggtcgggttcggttttaagtgaggatgttcgtttttgtagcgcggggcgatttaagagtaggtaggcgagcgttataaggagttgtcggggcgttttagtcgggtgtcgagaagttttcgttatggttacggatggtttttggcgttgggattttcggggtggggtgttttgtgtaaagaggga

SEQ ID NO: 22730 - DNA, 502 bp, Artificial Sequence
  chemically treated genomic DNA (Homo sapiens) CpG-island No: 22730
tccctctttacacaaaacaccccaccccgaaaatcccaacgccaaaaaccatccgtaaccataacgaaaacttctcgacacccgactaaaacgccccgacaactccttataacgctcgcctacctactcttaaatcgccccgcgctacaaaaacgaacatcctcacttaaaaccgaacccgacccgacgctttacctacccgcccgaaatacgcttaacgacactcgccccgacgaccccaacgtactaattaccaaccctaaactccgaatacccctaaatcgttccctttaactcgacccgctccgaaatctaataattaaaatacaaccgaaaaaccgatacgaaatcacgatactaaacgccctaccgcgactcaaaaacgcgctctccccgcgccgcttcccctacaccttcgaaccccgccaaatccaatacactcacttcgactcccacaaccccgaacgcgcccgaatactactacaactacgctacgacgccc

SEQ ID NO: 22731 - DNA, 502 bp, Artificial Sequence
  chemically treated genomic DNA (Homo sapiens) CpG-island No: 22731
tttttttttgtatagggtattttatttcgggaattttaacgttaggagttattcgtggttatggcgggggtttttcggtattcgattgggacgtttcggtagttttttgtggcgttcgtttgtttgtttttgagtcgtttcgcgttgtagggacgggtatttttatttgggatcgagttcgattcggcgttttatttgttcgttcggggtgcgtttgacggtattcgtttcgacggttttagcgtgttgattgttaattttggatttcgggtgtttttgggtcgttttttttggttcgattcgtttcgggatttggtgattggagtgtagtcgggggatcggtgcgaagttacggtattggacgttttgtcgcggtttaagggcgcgtttttttcgcgtcgttttttttgtattttcgggtttcgttaagtttagtatatttatttcggtttttatagtttcggacgcgttcgggtgttgttgtagttgcgttacgacgttt

SEQ ID NO: 22732 - DNA, 502 bp, Artificial Sequence
  chemically treated genomic DNA (Homo sapiens) CpG-island No: 22732
aaacgtcgtaacgcaactacaacaacacccgaacgcgtccgaaactataaaaaccgaaataaatatactaaacttaacgaaacccgaaaatacaaaaaaaacgacgcgaaaaaaacgcgcccttaaaccgcgacaaaacgtccaataccgtaacttcgcaccgatcccccgactacactccaatcaccaaatcccgaaacgaatcgaaccaaaaaaaacgacccaaaaacacccgaaatccaaaattaacaatcaacacgctaaaaccgtcgaaacgaataccgtcaaacgcaccccgaacgaacaaataaaacgccgaatcgaactcgatcccaaataaaaatacccgtccctacaacgcgaaacgactcaaaaacaaacaaacgaacgccacaaaaaactaccgaaacgtcccaatcgaataccgaaaaacccccgccataaccacgaataactcctaacgttaaaattcccgaaataaaataccctatacaaaaaaaaa

SEQ ID NO: 22733 - DNA, 528 bp, Artificial Sequence
  chemically treated genomic DNA (Homo sapiens) CpG-island No: 22733
cgatgtttgtgtcgatttatcgtattatgcgcgtcgtgtcgttgttcgcgtcgtttttgtcgttgttgttgttcgcgtttttggtcgttttcgtcgttcgcgttagtagagtcgagttcgttttcgcgtcgtggttcgaattcgagcgcgagtcgcggttatcgttcggttcggggttcgggaatattattcggtttgggtttggggcggcgggcggtagcggtagttttagttttaatagtagtggcgacgttttggtgattcgtatttttattttttttcgcgatttatttatttttaaggtagtcgtgatcgtggcgttcgtttttattattttttttatcgtttgtttgttgttgcgcgtttttaggtgggttttttcgtttttttttttttttcgtcggtcgatagggcggtatcgttaatttgttgtcgtcgcgcgttcgttttatttgtacgtataggtgttttggtgcgttttagttagtcgtgtgttttttgttttgttcgggagagtgggtggggggt

SEQ ID NO: 22734 - DNA, 528 bp, Artificial Sequence
  chemically treated genomic DNA (Homo sapiens) CpG-island No: 22734
accccccacccactctcccgaacaaaacaaaaaacacacgactaactaaaacgcaccaaaacacctatacgtacaaataaaacgaacgcgcgacgacaacaaattaacgataccgccctatcgaccgacgaaaaaaaaaaaaaaacgaaaaaacccacctaaaaacgcgcaacaacaaacaaacgataaaaaaaataataaaaacgaacgccacgatcacgactaccttaaaaataaataaatcgcgaaaaaaaataaaaatacgaatcaccaaaacgtcgccactactattaaaactaaaactaccgctaccgcccgccgccccaaacccaaaccgaataatattcccgaaccccgaaccgaacgataaccgcgactcgcgctcgaattcgaaccacgacgcgaaaacgaactcgactctactaacgcgaacgacgaaaacgaccaaaaacgcgaacaacaacaacgacaaaaacgacgcgaacaacgacacgacgcgcataatacgataaatcgacacaaacatcg

SEQ ID NO: 22735 - DNA, 528 bp, Artificial Sequence
  chemically treated genomic DNA (Homo sapiens) CpG-island No: 22735
gttttttatttattttttcgggtagggtaggaggtatacggttggttggggcgtattagggtatttgtgcgtgtaggtggggcgggcgcgcggcgatagtaggttggcgatgtcgttttgtcggtcggcgggggaaggaagagggcgggagggtttatttgaagacgcgtagtagtaggtaggcgatgaggagggtggtaaaggcgaacgttacgattacggttgttttgagggtgggtaggtcgcggaggaggatggaaatgcgggttattaaggcgtcgttattgttgttggagttggagttgtcgttgtcgttcgtcgttttagatttaaatcgggtggtgttttcgggtttcgggtcgggcggtggtcgcgattcgcgttcgggttcgggttacggcgcggagacggattcggttttgttggcgcgggcggcgggagcggttaggagcgcgagtagtagtagcggtaggagcggcgcgggtagcggtacggcgcgtatagtgcggtgggtcggtataggtatcg

SEQ ID NO: 22736 - DNA, 528 bp, Artificial Sequence
  chemically treated genomic DNA (Homo sapiens) CpG-island No: 22736
cgatacctataccgacccaccgcactatacgcgccgtaccgctacccgcgccgctcctaccgctactactactcgcgctcctaaccgctcccgccgcccgcgccaacaaaaccgaatccgtctccgcgccgtaacccgaacccgaacgcgaatcgcgaccaccgcccgacccgaaacccgaaaacaccacccgatttaaatctaaaacgacgaacgacaacgacaactccaactccaacaacaataacgacgccttaataacccgcatttccatcctcctccgcgacctacccaccctcaaaacaaccgtaatcgtaacgttcgcctttaccaccctcctcatcgcctacctactactacgcgtcttcaaataaaccctcccgccctcttccttcccccgccgaccgacaaaacgacatcgccaacctactatcgccgcgcgcccgccccacctacacgcacaaataccctaatacgccccaaccaaccgtatacctcctaccctacccgaaaaaataaataaaaaac

SEQ ID NO: 22737 - DNA, 629 bp, Artificial Sequence
  chemically treated genomic DNA (Homo sapiens) CpG-island No: 22737
agtagtttcgattttttaaggagaaggtttatttttttcggcgtttcggtatcgtcggtaattaagagtttttcgtgttgttttcggggtttcgcggttgtacgtagtatcggcgcgggatttgttagttcggtttcgtagtcggtcgtagtttcgcggggtcggtatcgcgggagggacgttgttataggaatcgcgtttcggatttcggttcgagaagtttcggagaggttagataggaaggttcgcgagattcgcggagtttttatgtaattacgttcggttttttttttttacggtagtttcgtacggttagtagcgtttttatagtttcgtgttttttcgcgcggttttataaaaaaattttatttttcgttatgtttggttcggtattgtttgtaatttcgcgagaagtgcgcggtttaatcggggcggtgcggaacggaattattaagtttcgcgagaatcgcgggaggcgcggtaaaaggcggagtcgagggtaggaaagtgggtgaatgaaagcggagggggttgttggattttgggggaagcggagagtcgggtttttttttatcgggtatttttgaggttcgagatttattaagtattgattgagttttgttatattt

SEQ ID NO: 22738 - DNA, 629 bp, Artificial Sequence
  chemically treated genomic DNA (Homo sapiens) CpG-island No: 22738
aaatataacaaaactcaatcaatacttaataaatctcgaacctcaaaaatacccgataaaaaaaaacccgactctccgcttcccccaaaatccaacaaccccctccgctttcattcacccactttcctaccctcgactccgccttttaccgcgcctcccgcgattctcgcgaaacttaataattccgttccgcaccgccccgattaaaccgcgcacttctcgcgaaattacaaacaataccgaaccaaacataacgaaaaataaaatttttttataaaaccgcgcgaaaaaacacgaaactataaaaacgctactaaccgtacgaaactaccgtaaaaaaaaaaaaccgaacgtaattacataaaaactccgcgaatctcgcgaaccttcctatctaacctctccgaaacttctcgaaccgaaatccgaaacgcgattcctataacaacgtccctcccgcgataccgaccccgcgaaactacgaccgactacgaaaccgaactaacaaatcccgcgccgatactacgtacaaccgcgaaaccccgaaaacaacacgaaaaactcttaattaccgacgataccgaaacgccgaaaaaaataaaccttctccttaaaaaatcgaaactact

SEQ ID NO: 22739 - DNA, 629 bp, Artificial Sequence
  chemically treated genomic DNA (Homo sapiens) CpG-island No: 22739
gaatatgatagggtttagttagtgtttaataaatttcgagttttaaaaatattcggtaaaaagaaattcggtttttcgttttttttagagtttagtaatttttttcgtttttatttatttatttttttattttcggtttcgttttttgtcgcgtttttcgcgattttcgcgagatttggtgatttcgtttcgtatcgtttcggttgagtcgcgtatttttcgcgaggttgtaggtagtgtcgggttagatatggcggaaggtagggtttttttgtggagtcgcgcgggaagatacggagttgtgggggcgttgttggtcgtgcgaagttgtcgtgggaggggaaggtcgggcgtggttgtatgggggtttcgcgggtttcgcgagtttttttgtttagttttttcggagtttttcgggtcggggttcggagcgcggtttttatgataacgtttttttcgcgatgtcgatttcgcgggattgcggtcggttgcggagtcgggttggtaggtttcgcgtcggtgttgcgtgtagtcgcggggtttcgagggtagtacgggaggtttttgattgtcggcggtgtcgggacgtcgggggaagtaagttttttttttaggaaatcgaaattgtt

SEQ ID NO: 22740 - DNA, 629 bp, Artificial Sequence
  chemically treated genomic DNA (Homo sapiens) CpG-island No: 22740
aacaatttcgatttcctaaaaaaaaaacttacttcccccgacgtcccgacaccgccgacaatcaaaaacctcccgtactaccctcgaaaccccgcgactacacgcaacaccgacgcgaaacctaccaacccgactccgcaaccgaccgcaatcccgcgaaatcgacatcgcgaaaaaaacgttatcataaaaaccgcgctccgaaccccgacccgaaaaactccgaaaaaactaaacaaaaaaactcgcgaaacccgcgaaacccccatacaaccacgcccgaccttcccctcccacgacaacttcgcacgaccaacaacgcccccacaactccgtatcttcccgcgcgactccacaaaaaaaccctaccttccgccatatctaacccgacactacctacaacctcgcgaaaaatacgcgactcaaccgaaacgatacgaaacgaaatcaccaaatctcgcgaaaatcgcgaaaaacgcgacaaaaaacgaaaccgaaaataaaaaaataaataaataaaaacgaaaaaaattactaaactctaaaaaaaacgaaaaaccgaatttctttttaccgaatatttttaaaactcgaaatttattaaacactaactaaaccctatcatattc

SEQ ID NO: 22741 - DNA, 553 bp, Artificial Sequence
  chemically treated genomic DNA (Homo sapiens) CpG-island No: 22741
tatttttacgttttttttttttttttttttttattttttcgtttttttcggttttttttttattttttttaaattttttcgtttattttcgagaaaaaaaattttttttttttttttttttttattattttttatttcgtttattttttttatttttattttttttttatttatattttttttatttttttttttatatttttattttttatttttttcgtttttttattttttatttttttttttttttttaattttttttttttattttattataattttttttttttttttttttttttttttttttcgatttttatttttttattttcgtttttaattttttttttattttttatcgttttttttcgtattttatttatttttaatttatttttttttatattttttttatagtattttatatatatatcgttagattatttcgttcgtttttcgagtttatttatttttcgttttttacgattttttacgttattcgtttaaaaaaagataaaattattttcgtcgtttaatttttttttcgaatttt

SEQ ID NO: 22742 - DNA, 553 bp, Artificial Sequence
  chemically treated genomic DNA (Homo sapiens) CpG-island No: 22742
aaaattcgaaaaaaaaattaaacgacgaaaataattttatctttttttaaacgaataacgtaaaaaatcgtaaaaaacgaaaaataaataaactcgaaaaacgaacgaaataatctaacgatatatatataaaatactataaaaaaaatataaaaaaaaataaattaaaaataaataaaatacgaaaaaaaacgataaaaaataaaaaaaaaattaaaaacgaaaataaaaaaataaaaatcgaaaaaaaaaaaaaaaaaaaaaaaaaaaaaaaattataataaaataaaaaaaaaaaattaaaaaaaaaaaaaaaaataaaaaataaaaaaacgaaaaaaataaaaaataaaaatataaaaaaaaaaataaaaaaaatataaataaaaaaaaaataaaaataaaaaaaataaacgaaataaaaaataataaaaaaaaaaaaaaaaaaaaaattttttttctcgaaaataaacgaaaaaatttaaaaaaaataaaaaaaaaaccgaaaaaaacgaaaaaataaaaaaaaaaaaaaaaaaaaaacgtaaaaata

SEQ ID NO: 22743 - DNA, 553 bp, Artificial Sequence
  chemically treated genomic DNA (Homo sapiens) CpG-island No: 22743
gggattcgggggggagattgggcggcgggggtgattttatttttttttgagcgggtagcgtggaaaatcgtggggggcgaaggataggtgggttcggggggcgggcgaaatgatttggcggtgtgtatgtggggtattatgggagagatatgggggggggtgggttggaggtggatgggatgcgggggggaacggtgggaggtggggaggggattgggggcggagatggggggatagggatcggggggaaaagggggggggggaagagggggaggttgtggtaaggtggagggggggagttgggggagggggggaggataagggatgggggggcgggggggatggggggtgggggtatggggggggggatgggaggggtgtgaatagggggggggtggggataaggagggtgggcggggtggggggtgatggggggggggggagggggggggttttttttttcggggatgggcgggggggtttgaagggggtgggggagggatcggggggggcgggggggtgaggggggggggggggggggggcgtgggggtg

SEQ ID NO: 22744 - DNA, 553 bp, Artificial Sequence
  chemically treated genomic DNA (Homo sapiens) CpG-island No: 22744
cacccccacgcccccccccccccccccccctcacccccccgccccccccgatccctcccccacccccttcaaacccccccgcccatccccgaaaaaaaaaaccccccccctccccccccccccatcaccccccaccccgcccaccctccttatccccaccccccccctattcacacccctcccatccccccccccatacccccaccccccatcccccccgcccccccatcccttatcctccccccctcccccaactccccccctccaccttaccacaacctccccctcttcccccccccccttttccccccgatccctatccccccatctccgcccccaatcccctccccacctcccaccgttcccccccgcatcccatccacctccaacccacccccccccatatctctcccataataccccacatacacaccgccaaatcatttcgcccgccccccgaacccacctatccttcgccccccacgattttccacgctacccgctcaaaaaaaaataaaatcacccccgccgcccaatctcccccccgaatccc

SEQ ID NO: 22745 - DNA, 507 bp, Artificial Sequence
  chemically treated genomic DNA (Homo sapiens) CpG-island No: 22745
tttttttgtcgcgtacgttatattatagatagagtaattttgttatttatgtcgttataggatattcgtgattcgtcgttcgatcgttgttttattttcgttttttttttatgtgatcgatcgtattatattacgattcgttcgtcgtttattatttattatcgcggagaaattttcgtcgagttcgcgtcgagcgtttaatttatattaaattatttatttattcgtatatttcgtcgtatatttttatattattcgtagcgaattcgtcgtaagggacgtatagacggtcgcgattattttttttttatatagatatttatatatatatacgagggagggagagtattttttattttttcgcgaggtatttcgaagtttttttttataagcgttttcgcggtaagtttttacgcggttataagttttagtttttttcgttatttattatgacgatttagataatgttgcggtattagtaggttttttagtgtttatttacggttg

SEQ ID NO: 22746 - DNA, 507 bp, Artificial Sequence
  chemically treated genomic DNA (Homo sapiens) CpG-island No: 22746
caaccgtaaataaacactaaaaaacctactaataccgcaacattatctaaatcgtcataataaataacgaaaaaaactaaaacttataaccgcgtaaaaacttaccgcgaaaacgcttataaaaaaaaacttcgaaatacctcgcgaaaaaataaaaaatactctccctccctcgtatatatatataaatatctatataaaaaaaaaataatcgcgaccgtctatacgtcccttacgacgaattcgctacgaataatataaaaatatacgacgaaatatacgaataaataaataatttaatataaattaaacgctcgacgcgaactcgacgaaaatttctccgcgataataaataataaacgacgaacgaatcgtaatataatacgatcgatcacataaaaaaaaaacgaaaataaaacaacgatcgaacgacgaatcacgaatatcctataacgacataaataacaaaattactctatctataatataacgtacgcgacaaaaaaa

SEQ ID NO: 22747 - DNA, 507 bp, Artificial Sequence
  chemically treated genomic DNA (Homo sapiens) CpG-island No: 22747
tagtcgtgggtggatattggggggtttgttggtgtcgtagtattgtttaggtcgttatagtgaatggcggggggggttggagtttgtagtcgcgtgaaagtttgtcgcggaggcgtttgtggaggggagtttcgagatatttcgcgggggaatgaagagtgttttttttttttcgtgtgtgtatgtggatgtttatatggagagagagtagtcgcggtcgtttgtacgttttttgcggcgagttcgttacgggtggtgtgagggtgtgcggcgaggtgtgcgggtgagtggatggtttgatgtgggttagacgttcggcgcgagttcggcgggggttttttcgcggtggtgggtggtgggcggcgggcgaatcgtggtataatgcggtcggttatatagaggaggggcgggaatgaggtaacggtcggacggcgggttacgggtgttttatgacggtatgggtgatagggttattttgtttgtggtatgacgtgcgcgatagagggg

SEQ ID NO: 22748 - DNA, 507 bp, Artificial Sequence
  chemically treated genomic DNA (Homo sapiens) CpG-island No: 22748
cccctctatcgcgcacgtcataccacaaacaaaataaccctatcacccataccgtcataaaacacccgtaacccgccgtccgaccgttacctcattcccgcccctcctctatataaccgaccgcattataccacgattcgcccgccgcccaccacccaccaccgcgaaaaaacccccgccgaactcgcgccgaacgtctaacccacatcaaaccatccactcacccgcacacctcgccgcacaccctcacaccacccgtaacgaactcgccgcaaaaaacgtacaaacgaccgcgactactctctctccatataaacatccacatacacacacgaaaaaaaaaaaacactcttcattcccccgcgaaatatctcgaaactcccctccacaaacgcctccgcgacaaactttcacgcgactacaaactccaaccccccccgccattcactataacgacctaaacaatactacgacaccaacaaaccccccaatatccacccacgacta

SEQ ID NO: 22749 - DNA, 585 bp, Artificial Sequence
  chemically treated genomic DNA (Homo sapiens) CpG-island No: 22749
cgggggagaaggggaatttatcgtagtcggggcgggcgggggggtcggcggtttacgtcgggtttatcggtgcgtggcggggcgcgcgggggcgtcggtcgtcgttcgttggggttttgttcgtcggaggttcgggggaggggcgcgcgcggtcggcgttcgcgggatattaggcggcggggggggcgtcgttcgcgcgggggcgcgtattaggtcgcgcgcggcggcggggagcggcgcggggggcgtcgggggtcgggcgggatttttttatcggcgtgagggagggggggcgggttcggattttcgcgcgcggcgggggggtcgggggggggggcgttcggattgtcgggttcgggtcggatttaaggataggaatcgcgggcggggggcgcgcgagcgggtaattcggcgggggcggtatagggttcgtggggggggggtaatcgttggggagtaatagatggcgtcgttataatgtagcgtattttttcggggggttattttttagcgtttgtagtttttatgatagtttttgaggataaagattagatcgttatgttggtcggtgttgtaagtttttaa

SEQ ID NO: 22750 - DNA, 585 bp, Artificial Sequence
  chemically treated genomic DNA (Homo sapiens) CpG-island No: 22750
ttaaaaacttacaacaccgaccaacataacgatctaatctttatcctcaaaaactatcataaaaactacaaacgctaaaaaataaccccccgaaaaaatacgctacattataacgacgccatctattactccccaacgattaccccccccccacgaaccctataccgcccccgccgaattacccgctcgcgcgccccccgcccgcgattcctatccttaaatccgacccgaacccgacaatccgaacgcccccccccccgacccccccgccgcgcgcgaaaatccgaacccgccccccctccctcacgccgataaaaaaatcccgcccgacccccgacgccccccgcgccgctccccgccgccgcgcgcgacctaatacgcgcccccgcgcgaacgacgccccccccgccgcctaatatcccgcgaacgccgaccgcgcgcgcccctcccccgaacctccgacgaacaaaaccccaacgaacgacgaccgacgcccccgcgcgccccgccacgcaccgataaacccgacgtaaaccgccgacccccccgcccgccccgactacgataaattccccttctcccccg

SEQ ID NO: 22751 - DNA, 585 bp, Artificial Sequence
  chemically treated genomic DNA (Homo sapiens) CpG-island No: 22751
ttggggatttgtagtatcggttaatatagcgatttaatttttgtttttagaaattattatggggattgtaagcgttaaagaatgatttttcgaggagatgcgttatattgtagcggcgttatttattgttttttagcgattgttttttttttacgggttttgtatcgttttcgtcggattattcgttcgcgcgtttttcgttcgcggtttttgtttttgggttcggttcgggttcggtagttcgggcgttttttttttcggttttttcgtcgcgcgcggagattcgggttcgtttttttttttttacgtcggtgaaagggtttcgttcggttttcggcgtttttcgcgtcgtttttcgtcgtcgcgcgcggtttggtgcgcgttttcgcgcgggcggcgtttttttcgtcgtttagtgtttcgcgggcgtcggtcgcgcgcgtttttttttcgggttttcggcggatagggttttagcggacggcggtcggcgttttcgcgcgtttcgttacgtatcggtgggttcggcgtaggtcgtcggttttttcgttcgtttcggttgcgataggttttttttttttttcg

SEQ ID NO: 22752 - DNA, 585 bp, Artificial Sequence
  chemically treated genomic DNA (Homo sapiens) CpG-island No: 22752
cgaaaaaaaaaaaaaacctatcgcaaccgaaacgaacgaaaaaaccgacgacctacgccgaacccaccgatacgtaacgaaacgcgcgaaaacgccgaccgccgtccgctaaaaccctatccgccgaaaacccgaaaaaaaaacgcgcgcgaccgacgcccgcgaaacactaaacgacgaaaaaaacgccgcccgcgcgaaaacgcgcaccaaaccgcgcgcgacgacgaaaaacgacgcgaaaaacgccgaaaaccgaacgaaaccctttcaccgacgtaaaaaaaaaaaaacgaacccgaatctccgcgcgcgacgaaaaaaccgaaaaaaaaaacgcccgaactaccgaacccgaaccgaacccaaaaacaaaaaccgcgaacgaaaaacgcgcgaacgaataatccgacgaaaacgatacaaaacccgtaaaaaaaaaacaatcgctaaaaaacaataaataacgccgctacaatataacgcatctcctcgaaaaatcattctttaacgcttacaatccccataataatttctaaaaacaaaaattaaatcgctatattaaccgatactacaaatccccaa

SEQ ID NO: 22753 - DNA, 503 bp, Artificial Sequence
  chemically treated genomic DNA (Homo sapiens) CpG-island No: 22753
gcgtcgcggtcgcggcgttcggttttttcggcgtcgtttttcgcgttcggtcgttttttcgttcgcgtttttttttttttttcgtttttcgttttcggtcgggcgcgtcgcgacgggcgggcggggtcgcgcgttttttcgttcgttcgcgcggcgttcgggtttttttttttcgcgtttacggtttcgtttttttcggttagtcgtcggtttttttacgttttatcggttcggcgttcgattcgtaattttcgttttcgtatcgcgttttttcgtcggttttcgttttcgtttatcgtttcgattatatcgcggagtcgtaaggtcggcgcgcgcggttaattatttattttttattcgcgatttttcgttttatattcgcggtttttacgtttacgtttaatcgtcgatttttagtagtcgtcgcgtcgtttcgcgttcgatcgttcgtttatcgtatatatattataaagcgttcgcgtttattcgtcgcgatagtacgt

SEQ ID NO: 22754 - DNA, 503 bp, Artificial Sequence
  chemically treated genomic DNA (Homo sapiens) CpG-island No: 22754
acgtactatcgcgacgaataaacgcgaacgctttataatatatatacgataaacgaacgatcgaacgcgaaacgacgcgacgactactaaaaatcgacgattaaacgtaaacgtaaaaaccgcgaatataaaacgaaaaatcgcgaataaaaaataaataattaaccgcgcgcgccgaccttacgactccgcgatataatcgaaacgataaacgaaaacgaaaaccgacgaaaaaacgcgatacgaaaacgaaaattacgaatcgaacgccgaaccgataaaacgtaaaaaaaccgacgactaaccgaaaaaaacgaaaccgtaaacgcgaaaaaaaaaaacccgaacgccgcgcgaacgaacgaaaaaacgcgcgaccccgcccgcccgtcgcgacgcgcccgaccgaaaacgaaaaacgaaaaaaaaaaaaaaacgcgaacgaaaaaacgaccgaacgcgaaaaacgacgccgaaaaaaccgaacgccgcgaccgcgacgc

SEQ ID NO: 22755 - DNA, 503 bp, Artificial Sequence
  chemically treated genomic DNA (Homo sapiens) CpG-island No: 22755
acgtgttgtcgcgacgggtgggcgcggacgttttgtggtgtgtgtacggtgggcgggcggtcgggcgcggggcggcgcggcggttgttgagggtcggcggttgggcgtgggcgtggggatcgcgagtgtggggcggggggtcgcgggtagggggtgggtgattgatcgcgcgcgtcggttttgcggtttcgcgatgtggtcggggcggtggacgggggcgggggtcggcggaggggcgcggtgcgggggcggggattgcgggtcgggcgtcgggtcgatggggcgtggggaggtcggcggttggtcggggggagcggggtcgtggacgcgagggggggaggttcgggcgtcgcgcgagcgggcgggggaacgcgcggtttcgttcgttcgtcgcggcgcgttcggtcggggacgggaggcggaagaggggggggggcgcgggcgggggaacggtcgggcgcggggagcggcgtcgggggggtcgggcgtcgcggtcgcggcgt

SEQ ID NO: 22756 - DNA, 503 bp, Artificial Sequence
  chemically treated genomic DNA (Homo sapiens) CpG-island No: 22756
acgccgcgaccgcgacgcccgacccccccgacgccgctccccgcgcccgaccgttcccccgcccgcgcccccccccctcttccgcctcccgtccccgaccgaacgcgccgcgacgaacgaacgaaaccgcgcgttcccccgcccgctcgcgcgacgcccgaacctccccccctcgcgtccacgaccccgctccccccgaccaaccgccgacctccccacgccccatcgacccgacgcccgacccgcaatccccgcccccgcaccgcgcccctccgccgacccccgcccccgtccaccgccccgaccacatcgcgaaaccgcaaaaccgacgcgcgcgatcaatcacccaccccctacccgcgaccccccgccccacactcgcgatccccacgcccacgcccaaccgccgaccctcaacaaccgccgcgccgccccgcgcccgaccgcccgcccaccgtacacacaccacaaaacgtccgcgcccacccgtcgcgacaacacgt

SEQ ID NO: 22757 - DNA, 658 bp, Artificial Sequence
  chemically treated genomic DNA (Homo sapiens) CpG-island No: 22757
gttattttcgcgaattagggaggtttttaagtcgttaaaatatatcgggatgtggttcgttaggataaaattcgcgggtttttcggttttttcgtgcgtttcgcggcggggagaggggtttaggcgttgaaatttattcgtttgcgcgttttcgagtttattttattggagcggcgttcgttcgggtttttaggttttttttttggttttgggggcgtcgcgcgggtcgggtttcgtcgggtttgtgggcgaagcgcgcggggttttgggagttcgggagttcgttttattttgtttcgaggtttcgcgtcgcggtcgtcgggtttcgggatgtggcggcggcggtagcggaagtaaggaagacgttcgcgcgttagatcggttttggggtttagaacgtcgtatcgttttacgcggttttttcgcgttattcggtcgtgcgtcgtttgttcgcgcggttttcgtcgcgttttcggtcgtgcgcgttttagcgggtcgcggggagtggggaggggtcggtcgcgggattttaggttcggatttcgagtttttttttttgtcgttgtaaaagcgttttttttgatcgagatttgcggtcggaataagttcgttgggtttttatttagaaaataggttcgttttttgagaaagaaaaaaa

SEQ ID NO: 22758 - DNA, 658 bp, Artificial Sequence
  chemically treated genomic DNA (Homo sapiens) CpG-island No: 22758
tttttttctttctcaaaaaacgaacctattttctaaataaaaacccaacgaacttattccgaccgcaaatctcgatcaaaaaaaacgcttttacaacgacaaaaaaaaaaactcgaaatccgaacctaaaatcccgcgaccgacccctccccactccccgcgacccgctaaaacgcgcacgaccgaaaacgcgacgaaaaccgcgcgaacaaacgacgcacgaccgaataacgcgaaaaaaccgcgtaaaacgatacgacgttctaaaccccaaaaccgatctaacgcgcgaacgtcttccttacttccgctaccgccgccgccacatcccgaaacccgacgaccgcgacgcgaaacctcgaaacaaaataaaacgaactcccgaactcccaaaaccccgcgcgcttcgcccacaaacccgacgaaacccgacccgcgcgacgcccccaaaaccaaaaaaaaaacctaaaaacccgaacgaacgccgctccaataaaataaactcgaaaacgcgcaaacgaataaatttcaacgcctaaacccctctccccgccgcgaaacgcacgaaaaaaccgaaaaacccgcgaattttatcctaacgaaccacatcccgatatattttaacgacttaaaaacctccctaattcgcgaaaataac

SEQ ID NO: 22759 - DNA, 658 bp, Artificial Sequence
  chemically treated genomic DNA (Homo sapiens) CpG-island No: 22759
ttttttttttttttaaaaagcgaatttgttttttggatggaggtttagcggatttgtttcggtcgtaggtttcggttagaaagaacgtttttgtagcggtagaaagggagattcgggattcgggtttggggtttcgcggtcggtttttttttatttttcgcgattcgttggaacgcgtacggtcggggacgcggcggggatcgcgcgggtaggcggcgtacggtcggatagcgcgagggggtcgcgtgaggcggtgcgacgttttgggttttaaagtcggtttagcgcgcgggcgttttttttattttcgttgtcgtcgtcgttatatttcgggattcgacggtcgcggcgcgaggtttcggggtaaggtggggcgggttttcgagtttttaggatttcgcgcgtttcgtttataggttcggcgaagttcgattcgcgcggcgtttttagggttaggggaggagtttaaggattcggacgagcgtcgttttagtagggtgagttcggggacgcgtaggcgggtgggttttagcgtttgggttttttttttcgtcgcggggcgtacggaaaaatcggggaattcgcgggttttgttttggcgagttatatttcggtgtgttttggcgatttgaagatttttttagttcgcgggagtagt

SEQ ID NO: 22760 - DNA, 658 bp, Artificial Sequence
  chemically treated genomic DNA (Homo sapiens) CpG-island No: 22760
actactcccgcgaactaaaaaaatcttcaaatcgccaaaacacaccgaaatataactcgccaaaacaaaacccgcgaattccccgatttttccgtacgccccgcgacgaaaaaaaaaacccaaacgctaaaacccacccgcctacgcgtccccgaactcaccctactaaaacgacgctcgtccgaatccttaaactcctcccctaaccctaaaaacgccgcgcgaatcgaacttcgccgaacctataaacgaaacgcgcgaaatcctaaaaactcgaaaacccgccccaccttaccccgaaacctcgcgccgcgaccgtcgaatcccgaaatataacgacgacgacaacgaaaataaaaaaaacgcccgcgcgctaaaccgactttaaaacccaaaacgtcgcaccgcctcacgcgaccccctcgcgctatccgaccgtacgccgcctacccgcgcgatccccgccgcgtccccgaccgtacgcgttccaacgaatcgcgaaaaataaaaaaaaaccgaccgcgaaaccccaaacccgaatcccgaatctccctttctaccgctacaaaaacgttctttctaaccgaaacctacgaccgaaacaaatccgctaaacctccatccaaaaaacaaattcgctttttaaaaaaaaaaaaaa

SEQ ID NO: 22761 - DNA, 500 bp, Artificial Sequence
  chemically treated genomic DNA (Homo sapiens) CpG-island No: 22761
gaacgttcgcggttttcggtattcgttttttatttttaaagggggtatatacgttattaatttttattttatcgaggattagcgttttttttaatcgcgattttttcgaaaggttaggtagaaaattaacgtgttcgtttttgattatatcgtcgggatgtcgttttttgtcgagaatgatatttttagtcgtttagttattttataggttcgggatagtattttgggagttgggcggagacgtttaaattttaacgtttttagaaagaagtttgtgaagaaaaggtgaagagcgagttttcgtaggtaaattggatgggcgtttggtcgtcgtggagtttcggtgatttattattttagttatgtcgtttttaggattattcgatggaaattaataggcgggttttacggtgcggttttgttcgtttatgttttgtcgggtttgtacggaattggattgttttatggtttgtgagtatcggagcgtttggttgtttgtt

SEQ ID NO: 22762 - DNA, 500 bp, Artificial Sequence
  chemically treated genomic DNA (Homo sapiens) CpG-island No: 22762
aacaaacaaccaaacgctccgatactcacaaaccataaaacaatccaattccgtacaaacccgacaaaacataaacgaacaaaaccgcaccgtaaaacccgcctattaatttccatcgaataatcctaaaaacgacataactaaaataataaatcaccgaaactccacgacgaccaaacgcccatccaatttacctacgaaaactcgctcttcaccttttcttcacaaacttctttctaaaaacgttaaaatttaaacgtctccgcccaactcccaaaatactatcccgaacctataaaataactaaacgactaaaaatatcattctcgacaaaaaacgacatcccgacgatataatcaaaaacgaacacgttaattttctacctaacctttcgaaaaaatcgcgattaaaaaaaacgctaatcctcgataaaataaaaattaataacgtatataccccctttaaaaataaaaaacgaataccgaaaaccgcgaacgttc

SEQ ID NO: 22763 - DNA, 500 bp, Artificial Sequence
  chemically treated genomic DNA (Homo sapiens) CpG-island No: 22763
ggtaggtagttaggcgtttcgatgtttataggttatgggatagtttagtttcgtgtagattcggtagggtatgggcgggtagaatcgtatcgtgaagttcgtttgttaatttttatcgggtggttttggagacgatatggttggggtaatgggttatcggaattttacggcggttagacgtttatttaatttgtttgcgggaattcgttttttattttttttttataaatttttttttggaagcgttgggatttaagcgttttcgtttagtttttaaggtgttgtttcggatttgtagggtagttgagcggttggagatgttattttcgataaagggcgatatttcggcgatgtagttaggggcgaatacgttggttttttgtttggtttttcgggagagtcgcggttgagggaagcgttgattttcggtgagatgggggttgatggcgtatgtgttttttttgggagtgggaagcgagtatcggaggtcgcgggcgttt

SEQ ID NO: 22764 - DNA, 500 bp, Artificial Sequence
  chemically treated genomic DNA (Homo sapiens) CpG-island No: 22764
aaacgcccgcgacctccgatactcgcttcccactcccaaaaaaaacacatacgccatcaacccccatctcaccgaaaatcaacgcttccctcaaccgcgactctcccgaaaaaccaaacaaaaaaccaacgtattcgcccctaactacatcgccgaaatatcgccctttatcgaaaataacatctccaaccgctcaactaccctacaaatccgaaacaacaccttaaaaactaaacgaaaacgcttaaatcccaacgcttccaaaaaaaaatttataaaaaaaaaataaaaaacgaattcccgcaaacaaattaaataaacgtctaaccgccgtaaaattccgataacccattaccccaaccatatcgtctccaaaaccacccgataaaaattaacaaacgaacttcacgatacgattctacccgcccataccctaccgaatctacacgaaactaaactatcccataacctataaacatcgaaacgcctaactacctacc

SEQ ID NO: 22765 - DNA, 692 bp, Artificial Sequence
  chemically treated genomic DNA (Homo sapiens) CpG-island No: 22765
gtttatttagggcgggagatattttcgaggcgttttttttttttttcgcggtcgggtttttatcggggtcgtttttttttttggtttttcggggacgtcgcggattcgagttgtatagttagaagaggacgttgaaaaggcgttaggtagtcgtttcgaattaggttttttcggttgtcgggtttgtaggtttttatcgttgcggttttacggatttagagtttgagggcgcggagggggttgcgggggcgggattaggattttcgaggggcgttcggggcggggttagagagagttcggggttgttagaggcgaggttttgaggaggcggggtcgggaggtttcggagtttaagaggcggggttagaggcgtagggggttgcgaggggcggattttgggggcgtgatcggggggggcgtttggggatttaggggcggggcgttagggggcgggattaagggacgttcgaggggcgttcggttagtttcgttagagcgcgagtcgttagttcgtaacggtcgttagtgtgaggggcgggagggaaagaagaggggtttaaattagattttttaaaatatagagtaagcgttagaggcgtcggtattttaggtgtcgtcgttttttgttgtatagggttcggcgtataggtttttttttttttaagttttttttttttttttcgttttatttt

SEQ ID NO: 22766 - DNA, 692 bp, Artificial Sequence
  chemically treated genomic DNA (Homo sapiens) CpG-island No: 22766
aaaataaaacgaaaaaaaaaaaaaaaacttaaaaaaaaaaaaacctatacgccgaaccctatacaacaaaaaacgacgacacctaaaataccgacgcctctaacgcttactctatattttaaaaaatctaatttaaacccctcttctttccctcccgcccctcacactaacgaccgttacgaactaacgactcgcgctctaacgaaactaaccgaacgcccctcgaacgtcccttaatcccgccccctaacgccccgcccctaaatccccaaacgccccccccgatcacgcccccaaaatccgcccctcgcaaccccctacgcctctaaccccgcctcttaaactccgaaacctcccgaccccgcctcctcaaaacctcgcctctaacaaccccgaactctctctaaccccgccccgaacgcccctcgaaaatcctaatcccgcccccgcaaccccctccgcgccctcaaactctaaatccgtaaaaccgcaacgataaaaacctacaaacccgacaaccgaaaaaacctaattcgaaacgactacctaacgccttttcaacgtcctcttctaactatacaactcgaatccgcgacgtccccgaaaaaccaaaaaaaaaaacgaccccgataaaaacccgaccgcgaaaaaaaaaaaaaacgcctcgaaaatatctcccgccctaaataaac

SEQ ID NO: 22767 - DNA, 692 bp, Artificial Sequence
  chemically treated genomic DNA (Homo sapiens) CpG-island No: 22767
agggtagggcgggagaaggggagggggtttgaggagggagggatttgtacgtcgagttttgtgtagtaggaagcggcgatatttgggatgtcgacgtttttggcgtttgttttgtgttttaaaaaatttaatttaaattttttttttttttttttcgttttttatattggcgatcgttacgggttggcggttcgcgttttggcgggattagtcgagcgtttttcgagcgttttttggtttcgttttttaacgtttcgtttttaggtttttaagcgtttttttcggttacgtttttaaggttcgtttttcgtagttttttacgtttttggtttcgttttttgggtttcgaagtttttcggtttcgtttttttaagatttcgtttttggtagtttcgagttttttttggtttcgtttcgagcgtttttcgggagttttggtttcgttttcgtagtttttttcgcgtttttaagttttaagttcgtgaagtcgtagcggtgggggtttgtaggttcggtagtcgggagggtttggttcggggcggttgtttggcgtttttttaacgtttttttttgattgtgtagttcgaattcgcggcgttttcggagggttagagggggaaacgatttcgatagaaattcgatcgcgaaggggaggaggggcgtttcggaaatgtttttcgttttaaatgagt

SEQ ID NO: 22768 - DNA, 692 bp, Artificial Sequence
  chemically treated genomic DNA (Homo sapiens) CpG-island No: 22768
actcatttaaaacgaaaaacatttccgaaacgcccctcctccccttcgcgatcgaatttctatcgaaatcgtttccccctctaaccctccgaaaacgccgcgaattcgaactacacaatcaaaaaaaaacgttaaaaaaacgccaaacaaccgccccgaaccaaaccctcccgactaccgaacctacaaacccccaccgctacgacttcacgaacttaaaacttaaaaacgcgaaaaaaactacgaaaacgaaaccaaaactcccgaaaaacgctcgaaacgaaaccaaaaaaaactcgaaactaccaaaaacgaaatcttaaaaaaacgaaaccgaaaaacttcgaaacccaaaaaacgaaaccaaaaacgtaaaaaactacgaaaaacgaaccttaaaaacgtaaccgaaaaaaacgcttaaaaacctaaaaacgaaacgttaaaaaacgaaaccaaaaaacgctcgaaaaacgctcgactaatcccgccaaaacgcgaaccgccaacccgtaacgatcgccaatataaaaaacgaaaaaaaaaaaaaaaaaatttaaattaaattttttaaaacacaaaacaaacgccaaaaacgtcgacatcccaaatatcgccgcttcctactacacaaaactcgacgtacaaatccctccctcctcaaaccccctccccttctcccgccctaccct

SEQ ID NO: 22769 - DNA, 665 bp, Artificial Sequence
  chemically treated genomic DNA (Homo sapiens) CpG-island No: 22769
gtaggcgttgcggtcgcgaattttaggttcgggagtgtgggcggggtttgcgtgtgggcggggtcgcggcgttagcgttcgttacgggcgagggcgtggtcgattcggcgttagttcgttcgttcgttcgtcggttttcgcgtttttttcgcgtcggttttttcgcgggtgattagttggtttgcgtttttttgacgtgggttggggtacgttatcgtcgaatggtagtttttagaaagttatcgcgagtaaggtgagggtatttcgtcggtagtcggcgttcgggtagcgtgtagttttcgtttgcgcggtcgcgcgtgttgtatttcggcgggtagggacgcgcgggtgaggagttcggttcgtcgtagtttggcgagggtcgcgttcgtcggagtttcggaataggagtcgggggaaggggtttatgaggtcgggcgagattcggttcgttttcggagggtcggtgggtacggggcggttcgagtttggtttttggacgcgtatgttcgcggaattgttgtattcggtttgagggggcggcggtcgttatagtttttggttcgcgggaaggtttcgtttttggaggaagttggttttttttcgtgttcggggaggtgggcgagtttttgttttcgtttttgttatttaggaatttaaatttt

SEQ ID NO: 22770 - DNA, 665 bp, Artificial Sequence
  chemically treated genomic DNA (Homo sapiens) CpG-island No: 22770
aaaatttaaattcctaaataacaaaaacgaaaacaaaaactcgcccacctccccgaacacgaaaaaaaaccaacttcctccaaaaacgaaaccttcccgcgaaccaaaaactataacgaccgccgccccctcaaaccgaatacaacaattccgcgaacatacgcgtccaaaaaccaaactcgaaccgccccgtacccaccgaccctccgaaaacgaaccgaatctcgcccgacctcataaaccccttcccccgactcctattccgaaactccgacgaacgcgaccctcgccaaactacgacgaaccgaactcctcacccgcgcgtccctacccgccgaaatacaacacgcgcgaccgcgcaaacgaaaactacacgctacccgaacgccgactaccgacgaaataccctcaccttactcgcgataactttctaaaaactaccattcgacgataacgtaccccaacccacgtcaaaaaaacgcaaaccaactaatcacccgcgaaaaaaccgacgcgaaaaaaacgcgaaaaccgacgaacgaacgaacgaactaacgccgaatcgaccacgccctcgcccgtaacgaacgctaacgccgcgaccccgcccacacgcaaaccccgcccacactcccgaacctaaaattcgcgaccgcaacgcctac

SEQ ID NO: 22771 - DNA, 665 bp, Artificial Sequence
  chemically treated genomic DNA (Homo sapiens) CpG-island No: 22771
gaggtttagatttttgggtaatagaagcgagggtaaaggttcgtttattttttcggatacgaagaggggttaattttttttaagaacggggttttttcgcgggttaggaattgtgacggtcgtcgtttttttaggtcgagtgtagtagtttcgcgggtatacgcgtttaggaattagattcgggtcgtttcgtgtttatcgatttttcggaaacgaatcggatttcgttcggttttatggattttttttttcggtttttgtttcggggtttcggcgagcgcggttttcgttagattgcggcgggtcgggttttttattcgcgcgtttttgttcgtcgaggtgtaatacgcgcggtcgcgtaggcgagggttgtacgttgttcggacgtcggttgtcggcggagtgtttttattttattcgcggtggttttttggaggttgttattcggcggtgacgtgttttagtttacgttaggggagcgtagattagttgattattcgcggaagggtcggcgcgaaggaggcgcgagagtcggcgggcgggcgggcgggttagcgtcgggtcggttacgttttcgttcgtggcgggcgttggcgtcgcggtttcgtttatacgtaggtttcgtttatattttcggatttggggttcgcggtcgtagcgtttgt

SEQ ID NO: 22772 - DNA, 665 bp, Artificial Sequence
  chemically treated genomic DNA (Homo sapiens) CpG-island No: 22772
acaaacgctacgaccgcgaaccccaaatccgaaaatataaacgaaacctacgtataaacgaaaccgcgacgccaacgcccgccacgaacgaaaacgtaaccgacccgacgctaacccgcccgcccgcccgccgactctcgcgcctccttcgcgccgacccttccgcgaataatcaactaatctacgctcccctaacgtaaactaaaacacgtcaccgccgaataacaacctccaaaaaaccaccgcgaataaaataaaaacactccgccgacaaccgacgtccgaacaacgtacaaccctcgcctacgcgaccgcgcgtattacacctcgacgaacaaaaacgcgcgaataaaaaacccgacccgccgcaatctaacgaaaaccgcgctcgccgaaaccccgaaacaaaaaccgaaaaaaaaaatccataaaaccgaacgaaatccgattcgtttccgaaaaatcgataaacacgaaacgacccgaatctaattcctaaacgcgtatacccgcgaaactactacactcgacctaaaaaaacgacgaccgtcacaattcctaacccgcgaaaaaaccccgttcttaaaaaaaattaacccctcttcgtatccgaaaaaataaacgaacctttaccctcgcttctattacccaaaaatctaaacctc

SEQ ID NO: 22773 - DNA, 744 bp, Artificial Sequence
  chemically treated genomic DNA (Homo sapiens) CpG-island No: 22773
cgtcgttatttcggcgttttttaggttttgttcgcgagtttttatttcgattgcgtattcgcgattttagttcgaggggcggggatttttttggagcgacgggacgcgacgttaatcgcgacgaggtttcgtttcgtggcgcggtttgaaattttgcggggtttaacggttcgcggagcggttacgcggagtgatatcgtcggtgtttgcgggtggttgttgttttcggggtcgtgtggagtaggtttggatttggatttacggttgtttggagcgttcgttatgaggagaaggtgcgggttgcggggaaatcgaggggacgcgggagggagcgacgttcgtttcggttgcggggtttgtttaggggtgcgggattcgtgcggggtttcgggtttagatcgttacggtagtcggcgtcgagggaggtcgggggcgttgaggggtagggtttggaggcggcgagttagtgcgagggtcgcggcggtgagatttgacgcgttgttcgtcggcggtcgtaggtgttcgtaggtttagacgttcgggtgggagtcgagcgtcggtgttcggacgcggtagggtagtcgaggttcggggttcggggcggtttttatttaggcggttagcgttggcgttcggattttatttttttcgttcgtagcgttttaggtgtcgttgtttggcgtagatgattcgttgtaaattttttgtggtcgtggtttttttttaaagttgttaagtttattt

SEQ ID NO: 22774 - DNA, 744 bp, Artificial Sequence
  chemically treated genomic DNA (Homo sapiens) CpG-island No: 22774
aaataaacttaacaactttaaaaaaaaaccacgaccacaaaaaatttacaacgaatcatctacgccaaacaacgacacctaaaacgctacgaacgaaaaaaataaaatccgaacgccaacgctaaccgcctaaataaaaaccgccccgaaccccgaacctcgactaccctaccgcgtccgaacaccgacgctcgactcccacccgaacgtctaaacctacgaacacctacgaccgccgacgaacaacgcgtcaaatctcaccgccgcgaccctcgcactaactcgccgcctccaaaccctacccctcaacgcccccgacctccctcgacgccgactaccgtaacgatctaaacccgaaaccccgcacgaatcccgcacccctaaacaaaccccgcaaccgaaacgaacgtcgctccctcccgcgtcccctcgatttccccgcaacccgcaccttctcctcataacgaacgctccaaacaaccgtaaatccaaatccaaacctactccacacgaccccgaaaacaacaaccacccgcaaacaccgacgatatcactccgcgtaaccgctccgcgaaccgttaaaccccgcaaaatttcaaaccgcgccacgaaacgaaacctcgtcgcgattaacgtcgcgtcccgtcgctccaaaaaaatccccgcccctcgaactaaaatcgcgaatacgcaatcgaaataaaaactcgcgaacaaaacctaaaaaacgccgaaataacgacg

SEQ ID NO: 22775 - DNA, 744 bp, Artificial Sequence
  chemically treated genomic DNA (Homo sapiens) CpG-island No: 22775
aaataaatttaatagttttaaagaaaagttacgattatagaaggtttataacgagttatttgcgttaagtagcggtatttgagacgttgcgggcggggagggtggggttcgagcgttagcgttgatcgtttgggtggaggtcgtttcgggtttcgggtttcgattattttgtcgcgttcgggtatcggcgttcggtttttattcgggcgtttgagtttgcgggtatttgcggtcgtcggcggatagcgcgttaggttttatcgtcgcggttttcgtattggttcgtcgtttttagattttgttttttagcgttttcggtttttttcggcgtcgattgtcgtgacgatttaggttcgggatttcgtacgggtttcgtatttttgaataggtttcgtagtcgaaacgagcgtcgttttttttcgcgttttttcgattttttcgtaattcgtattttttttttatggcggacgttttaagtagtcgtgagtttaggtttagatttattttatacggtttcgagagtaataattattcgtaaatatcggcgatgttatttcgcgtagtcgtttcgcgagtcgttgagtttcgtaaaattttaaatcgcgttacggggcgaagtttcgtcgcgattggcgtcgcgtttcgtcgttttaagaaaattttcgtttttcgggttgaagtcgcgggtgcgtaatcggggtggggattcgcgagtagggtttgggaagcgtcggagtggcggcg

SEQ ID NO: 22776 - DNA, 744 bp, Artificial Sequence
  chemically treated genomic DNA (Homo sapiens) CpG-island No: 22776
cgccgccactccgacgcttcccaaaccctactcgcgaatccccaccccgattacgcacccgcgacttcaacccgaaaaacgaaaattttcttaaaacgacgaaacgcgacgccaatcgcgacgaaacttcgccccgtaacgcgatttaaaattttacgaaactcaacgactcgcgaaacgactacgcgaaataacatcgccgatatttacgaataattattactctcgaaaccgtataaaataaatctaaacctaaactcacgactacttaaaacgtccgccataaaaaaaaaatacgaattacgaaaaaatcgaaaaaacgcgaaaaaaaacgacgctcgtttcgactacgaaacctattcaaaaatacgaaacccgtacgaaatcccgaacctaaatcgtcacgacaatcgacgccgaaaaaaaccgaaaacgctaaaaaacaaaatctaaaaacgacgaaccaatacgaaaaccgcgacgataaaacctaacgcgctatccgccgacgaccgcaaatacccgcaaactcaaacgcccgaataaaaaccgaacgccgatacccgaacgcgacaaaataatcgaaacccgaaacccgaaacgacctccacccaaacgatcaacgctaacgctcgaaccccaccctccccgcccgcaacgtctcaaataccgctacttaacgcaaataactcgttataaaccttctataatcgtaacttttctttaaaactattaaatttattt

SEQ ID NO: 22777 - DNA, 614 bp, Artificial Sequence
  chemically treated genomic DNA (Homo sapiens) CpG-island No: 22777
ttacgtaacggtttgttcggcggaatttatcgttgcggttcgggaggtaggcggggaggggcgcgcgtttttatttcggagcggcggttcggttcgcggttttcgtcgtcgtcgtcgtcgtttcgtttatcgagcggtcggcgtcggcgattggttcggcgcggtttagtaggttcggttcggttcgttttttcgtgcgtttcggttcgttgttaggcgtttttttaggagcggttcgggaatttgcgggcgttcgtcgtcgtttttcggtttcggtcgtcgtcgtttaatgatattatcgttaggagaagaaagacgcggtcgttcgttcggttcgcgttcggttcgcgtcgtttcgcgttttgcgtagttttcgttttaggtcgtgcgcggggcggcggcggcggttgggagcgggcggggaagggaaaggggaaggggagcggggagcggatggggagggagtcgggggtgggggcgggcgcgtatttgcgtttatttgtttcgggttcgtcgtgcgtttcgcgtttttggtcggggtattcggaagtttttgtttatgttttgaattcgtgagcgttgaaatgatgaagtattttttagaatgttttttt

SEQ ID NO: 22778 - DNA, 614 bp, Artificial Sequence
  chemically treated genomic DNA (Homo sapiens) CpG-island No: 22778
aaaaaaacattctaaaaaatacttcatcatttcaacgctcacgaattcaaaacataaacaaaaacttccgaataccccgaccaaaaacgcgaaacgcacgacgaacccgaaacaaataaacgcaaatacgcgcccgcccccacccccgactccctccccatccgctccccgctccccttcccctttcccttccccgcccgctcccaaccgccgccgccgccccgcgcacgacctaaaacgaaaactacgcaaaacgcgaaacgacgcgaaccgaacgcgaaccgaacgaacgaccgcgtctttcttctcctaacgataatatcattaaacgacgacgaccgaaaccgaaaaacgacgacgaacgcccgcaaattcccgaaccgctcctaaaaaaacgcctaacaacgaaccgaaacgcacgaaaaaacgaaccgaaccgaacctactaaaccgcgccgaaccaatcgccgacgccgaccgctcgataaacgaaacgacgacgacgacgacgaaaaccgcgaaccgaaccgccgctccgaaataaaaacgcgcgcccctccccgcctacctcccgaaccgcaacgataaattccgccgaacaaaccgttacgtaa

SEQ ID NO: 22779 - DNA, 614 bp, Artificial Sequence
  chemically treated genomic DNA (Homo sapiens) CpG-island No: 22779
aaaagagtattttgggaagtattttattattttaacgtttacgaatttaaaatataaataaaggttttcgagtgtttcggttaggggcgcggggcgtacggcgggttcggggtaggtaagcgtaggtgcgcgttcgtttttattttcggttttttttttattcgtttttcgtttttttttttttttttttttttcgttcgtttttagtcgtcgtcgtcgtttcgcgtacggtttggagcggaggttgcgtagggcgcggggcggcgcgggtcgggcgcgggtcgggcggacggtcgcgtttttttttttttggcggtgatgttattgggcgacggcggtcgaggtcggggggcggcggcgggcgttcgtaggttttcgagtcgtttttgagaaggcgtttgatagcgggtcggggcgtacggagaagcgggtcgggtcggatttgttgggtcgcgtcgagttaatcgtcggcgtcggtcgttcgatgggcgaggcggcggcggcggcggcgggggtcgcgggtcgggtcgtcgtttcgaggtgaaggcgcgcgttttttttcgtttgtttttcgggtcgtagcgatgaatttcgtcgagtaaatcgttacgtgg

SEQ ID NO: 22780 - DNA, 614 bp, Artificial Sequence
  chemically treated genomic DNA (Homo sapiens) CpG-island No: 22780
ccacgtaacgatttactcgacgaaattcatcgctacgacccgaaaaacaaacgaaaaaaaacgcgcgccttcacctcgaaacgacgacccgacccgcgacccccgccgccgccgccgccgcctcgcccatcgaacgaccgacgccgacgattaactcgacgcgacccaacaaatccgacccgacccgcttctccgtacgccccgacccgctatcaaacgccttctcaaaaacgactcgaaaacctacgaacgcccgccgccgccccccgacctcgaccgccgtcgcccaataacatcaccgccaaaaaaaaaaaaacgcgaccgtccgcccgacccgcgcccgacccgcgccgccccgcgccctacgcaacctccgctccaaaccgtacgcgaaacgacgacgacgactaaaaacgaacgaaaaaaaaaaaaaaaaaaaaaaacgaaaaacgaataaaaaaaaaaccgaaaataaaaacgaacgcgcacctacgcttacctaccccgaacccgccgtacgccccgcgcccctaaccgaaacactcgaaaacctttatttatattttaaattcgtaaacgttaaaataataaaatacttcccaaaatactctttt

SEQ ID NO: 22781 - DNA, 509 bp, Artificial Sequence
  chemically treated genomic DNA (Homo sapiens) CpG-island No: 22781
gcgggttcgttttaggtcgtcgggggtcgttcgttagcgtcgttcgttgtgttgggagcgcgggtcgtgggcgtcgttcggttttgttcgcggcgttttcgttgtcggttacggcgtttagcgtttgtgttttgtattgtaggtttatttcgagtttcggagcgagagcgagtgtttgagtaatattcgcgagtttttgcgcggttgcggggtttttttgcggttggaggtgagcgcgggcggttacgggtcgagggaggggtcgggaagacggggttgggttcggggtgggtgtttcgttttagtcggattttttgtttttttcgcgttcggattcgatttttttcggttgttcgagagttcgggatgtgtggaacggggcgttgcgggtttgggtaatggtcgggaggtggcggcgcgcgggttatttttagggtagggtggagtttgcgtgtggaattttagatattgttttcgttttagtgaggaagagtggttttggtcgttgg

SEQ ID NO: 22782 - DNA, 509 bp, Artificial Sequence
  chemically treated genomic DNA (Homo sapiens) CpG-island No: 22782
ccaacgaccaaaaccactcttcctcactaaaacgaaaacaatatctaaaattccacacgcaaactccaccctaccctaaaaataacccgcgcgccgccacctcccgaccattacccaaacccgcaacgccccgttccacacatcccgaactctcgaacaaccgaaaaaaatcgaatccgaacgcgaaaaaaacaaaaaatccgactaaaacgaaacacccaccccgaacccaaccccgtcttcccgacccctccctcgacccgtaaccgcccgcgctcacctccaaccgcaaaaaaaccccgcaaccgcgcaaaaactcgcgaatattactcaaacactcgctctcgctccgaaactcgaaataaacctacaatacaaaacacaaacgctaaacgccgtaaccgacaacgaaaacgccgcgaacaaaaccgaacgacgcccacgacccgcgctcccaacacaacgaacgacgctaacgaacgacccccgacgacctaaaacgaacccgc

SEQ ID NO: 22783 - DNA, 509 bp, Artificial Sequence
  chemically treated genomic DNA (Homo sapiens) CpG-island No: 22783
ttagcgattagaattatttttttttattggaacgagagtaatgtttggggttttatacgtagattttattttgttttgggggtggttcgcgcgtcgttatttttcggttattatttaaattcgtaacgtttcgttttatatatttcggattttcgagtagtcggggagggtcggattcgggcgcggaggaggtaggaggttcggttggagcgaagtatttatttcgggtttaatttcgttttttcggtttttttttcggttcgtggtcgttcgcgtttatttttagtcgtagggaagtttcgtagtcgcgtaggaattcgcggatgttgtttaggtattcgttttcgtttcggggttcggggtagatttgtaatatagagtataagcgttgagcgtcgtggtcggtagcggggacgtcgcggataaggtcgagcgacgtttacggttcgcgtttttaatatagcgggcgacgttggcgagcggttttcgacggtttggagcgagttcgt

SEQ ID NO: 22784 - DNA, 509 bp, Artificial Sequence
  chemically treated genomic DNA (Homo sapiens) CpG-island No: 22784
acgaactcgctccaaaccgtcgaaaaccgctcgccaacgtcgcccgctatattaaaaacgcgaaccgtaaacgtcgctcgaccttatccgcgacgtccccgctaccgaccacgacgctcaacgcttatactctatattacaaatctaccccgaaccccgaaacgaaaacgaatacctaaacaacatccgcgaattcctacgcgactacgaaacttccctacgactaaaaataaacgcgaacgaccacgaaccgaaaaaaaaaccgaaaaaacgaaattaaacccgaaataaatacttcgctccaaccgaacctcctacctcctccgcgcccgaatccgaccctccccgactactcgaaaatccgaaatatataaaacgaaacgttacgaatttaaataataaccgaaaaataacgacgcgcgaaccacccccaaaacaaaataaaatctacgtataaaaccccaaacattactctcgttccaataaaaaaaaataattctaatcgctaa

SEQ ID NO: 22785 - DNA, 656 bp, Artificial Sequence
  chemically treated genomic DNA (Homo sapiens) CpG-island No: 22785
gatcgtgattttggtcggtcgttgtggttggggtcggttaagtcgaatatcggttatacgtaagcggcggcgggtgtggttggtgtgattaagatggtgatggcgatgcggtacgggtagttgttacgtacgttgtacgtggatatgtcgtcgtcggaggtggattggtcggcggggacggtttaattttttacggagaatacgttttggtttaggagtggtcgtgttcgtcgggtgggggtgtcgtcgttcgggattagtggtattaacgcgtacgttattttcgaatagttttcgggagtgtcgagttagtttgcggggtcgggttcgggttttgtcgtggatgtttcggtggtgtcgtggatggtgtcgggtaaaatattcgaagcgttattcgcgtaggtaacggcgttgatgatttatttggacgagcgatttgatgttttttcgttggatgttgggtattcgttggcgttgatatcggtcgtttttggatgagcgagcggtggtgttggggtcggatcgtgaaaacgttgttgtgcggtgtgaaagcgttgttttgtcggttattgaggtttttgggttgggggattcggatttgtgggggttggggggtcgtattcgggtttgtgtttttcggttagggtggttaattg

SEQ ID NO: 22786 - DNA, 656 bp, Artificial Sequence
  chemically treated genomic DNA (Homo sapiens) CpG-island No: 22786
caattaaccaccctaaccgaaaaacacaaacccgaatacgaccccccaacccccacaaatccgaatcccccaacccaaaaacctcaataaccgacaaaacaacgctttcacaccgcacaacaacgttttcacgatccgaccccaacaccaccgctcgctcatccaaaaacgaccgatatcaacgccaacgaatacccaacatccaacgaaaaaacatcaaatcgctcgtccaaataaatcatcaacgccgttacctacgcgaataacgcttcgaatattttacccgacaccatccacgacaccaccgaaacatccacgacaaaacccgaacccgaccccgcaaactaactcgacactcccgaaaactattcgaaaataacgtacgcgttaataccactaatcccgaacgacgacacccccacccgacgaacacgaccactcctaaaccaaaacgtattctccgtaaaaaattaaaccgtccccgccgaccaatccacctccgacgacgacatatccacgtacaacgtacgtaacaactacccgtaccgcatcgccatcaccatcttaatcacaccaaccacacccgccgccgcttacgtataaccgatattcgacttaaccgaccccaaccacaacgaccgaccaaaatcacgatc

SEQ ID NO: 22787 - DNA, 656 bp, Artificial Sequence
  chemically treated genomic DNA (Homo sapiens) CpG-island No: 22787
taattgattattttgatcggaaaatataaattcgaatgcggttttttagtttttatagattcgggttttttaatttaaaagttttaatgatcggtaagatagcgtttttatatcgtataataacgtttttacggttcgattttagtattatcgttcgtttatttaagaacggtcggtgttaacgttagcgagtatttaatatttagcgaggagatattaggtcgttcgtttagataggttattaacgtcgttgtttgcgcggatagcgtttcgggtgttttgttcgatattatttacggtattatcggaatatttacgatagaattcgaattcggtttcgtagattgattcggtattttcgggggttgttcgaggatgacgtgcgcgttagtattattgatttcgaacgacgatatttttattcgacgaatacgattatttttgggttagggcgtgtttttcgtaaggagttgaatcgttttcgtcgattaatttattttcggcgacgatatatttacgtgtaacgtgcgtggtagttgttcgtgtcgtatcgttattattattttgattatattagttatattcgtcgtcgtttgcgtatgatcgatgttcgatttgatcgattttaattataacggtcggttaggattacgatt

SEQ ID NO: 22788 - DNA, 656 bp, Artificial Sequence
  chemically treated genomic DNA (Homo sapiens) CpG-island No: 22788
aatcgtaatcctaaccgaccgttataattaaaatcgatcaaatcgaacatcgatcatacgcaaacgacgacgaatataactaatataatcaaaataataataacgatacgacacgaacaactaccacgcacgttacacgtaaatatatcgtcgccgaaaataaattaatcgacgaaaacgattcaactccttacgaaaaacacgccctaacccaaaaataatcgtattcgtcgaataaaaatatcgtcgttcgaaatcaataatactaacgcgcacgtcatcctcgaacaacccccgaaaataccgaatcaatctacgaaaccgaattcgaattctatcgtaaatattccgataataccgtaaataatatcgaacaaaacacccgaaacgctatccgcgcaaacaacgacgttaataacctatctaaacgaacgacctaatatctcctcgctaaatattaaatactcgctaacgttaacaccgaccgttcttaaataaacgaacgataatactaaaatcgaaccgtaaaaacgttattatacgatataaaaacgctatcttaccgatcattaaaacttttaaattaaaaaacccgaatctataaaaactaaaaaaccgcattcgaatttatattttccgatcaaaataatcaatta

SEQ ID NO: 22789 - DNA, 590 bp, Artificial Sequence
  chemically treated genomic DNA (Homo sapiens) CpG-island No: 22789
  unsure (122, 560)
ggcgggaaatcgcgtcgggttcgtcgcgttacggaatcggttaacgcgcggggagaggacgaatgtttaaagggcgtcggggcggttcgtttttttattagggagacgggtaatagttcganggttttttatcgtttggttttgagagagtcgtagttagcggtttacgttggttcgtcgtcgtcgtcgataaattcgtgggaagggggcgtcgtcgttcggaaatattttgatttttcgaacgattaggttcgcgatcgggtcgggcgtcgatttaggcggttataagacgttattaggaaagaacggggacgtttattttttagggcgaaaaatcgtttattagggcgacggtttataacgggaatcgatatttaaaataaggtgtttggggcgcggggggtcggaaggttttacggcggatttcgtaggggagttttttatcgagtagttgggcgggggaaagtcggtcgaacgcgggcgagaaaggaaagggaaaaaggggaataggagcgggaggaacggtcgttggtaaacggagcggggttcgtagcgcgggnttttttattattcgtcggcgcgaaaggcgg

SEQ ID NO: 22790 - DNA, 590 bp, Artificial Sequence
  chemically treated genomic DNA (Homo sapiens) CpG-island No: 22790
  unsure (31, 469)
ccgcctttcgcgccgacgaataataaaaaancccgcgctacgaaccccgctccgtttaccaacgaccgttcctcccgctcctattcccctttttccctttcctttctcgcccgcgttcgaccgactttcccccgcccaactactcgataaaaaactcccctacgaaatccgccgtaaaaccttccgaccccccgcgccccaaacaccttattttaaatatcgattcccgttataaaccgtcgccctaataaacgatttttcgccctaaaaaataaacgtccccgttctttcctaataacgtcttataaccgcctaaatcgacgcccgacccgatcgcgaacctaatcgttcgaaaaatcaaaatatttccgaacgacgacgcccccttcccacgaatttatcgacgacgacgacgaaccaacgtaaaccgctaactacgactctctcaaaaccaaacgataaaaaaccntcgaactattacccgtctccctaataaaaaaacgaaccgccccgacgccctttaaacattcgtcctctccccgcgcgttaaccgattccgtaacgcgacgaacccgacgcgatttcccgcc

SEQ ID NO: 22791 - DNA, 590 bp, Artificial Sequence
  chemically treated genomic DNA (Homo sapiens) CpG-island No: 22791
  unsure (31, 469)
tcgtttttcgcgtcggcgggtggtggggggnttcgcgttgcgggtttcgtttcgtttgttagcggtcgtttttttcgtttttgttttttttttttttttttttttttcgttcgcgttcggtcggttttttttcgtttagttgttcggtggggggtttttttgcggggttcgtcgtggggtttttcggtttttcgcgttttaagtattttgttttgggtgtcggttttcgttgtgggtcgtcgttttgataggcggtttttcgttttggggggtgggcgttttcgtttttttttggtggcgttttgtggtcgtttgggtcggcgttcggttcggtcgcgggtttggtcgttcgagggattagggtgttttcgggcggcggcgttttttttttacgggtttgtcggcggcggcggcgggttagcgtggatcgttggttgcggtttttttagggttaggcggtgaagggttntcgggttgttgttcgtttttttggtgggggggcgggtcgtttcggcgttttttaaatattcgtttttttttcgcgcgttggtcggtttcgtggcgcggcgggttcggcgcggtttttcgtt

SEQ ID NO: 22792 - DNA, 590 bp, Artificial Sequence
  chemically treated genomic DNA (Homo sapiens) CpG-island No: 22792
  unsure (122, 560)
aacgaaaaaccgcgccgaacccgccgcgccacgaaaccgaccaacgcgcgaaaaaaaaacgaatatttaaaaaacgccgaaacgacccgcccccccaccaaaaaaacgaacaacaacccganaacccttcaccgcctaaccctaaaaaaaccgcaaccaacgatccacgctaacccgccgccgccgccgacaaacccgtaaaaaaaaaacgccgccgcccgaaaacaccctaatccctcgaacgaccaaacccgcgaccgaaccgaacgccgacccaaacgaccacaaaacgccaccaaaaaaaaacgaaaacgcccaccccccaaaacgaaaaaccgcctatcaaaacgacgacccacaacgaaaaccgacacccaaaacaaaatacttaaaacgcgaaaaaccgaaaaaccccacgacgaaccccgcaaaaaaaccccccaccgaacaactaaacgaaaaaaaaccgaccgaacgcgaacgaaaaaaaaaaaaaaaaaaaaaaaacaaaaacgaaaaaaacgaccgctaacaaacgaaacgaaacccgcaacgcgaanccccccaccacccgccgacgcgaaaaacga

SEQ ID NO: 22793 - DNA, 1006 bp, Artificial Sequence
  chemically treated genomic DNA (Homo sapiens) CpG-island No: 22793
tggaacgtaagattttttgattttttttttcgagcgaaattgtatatagagtagggaagttttgtcgcgttgggttcggaggaaagaggaggtcgtggacggggaagaggtcgggtttcgtttttttagcgtcgtcgtttgggcgatttttttattttcggttcgggttcgaagcggcgcggtttagagaagaggaagaaagacgaaaaggaattttgttcgtggttttagttagtaggcgggttaggtttcgtaggggggtggtcggagaaatttgcgattttggcgatttgggttcgcgggagtaagggtcggggcggttttggggattgagttttagcgcgggggttgcggtagtaattttttcggaggaagtttgtcgcgaattttagcgacgcggtgtttcgttcgttgcgcgatgttttttgggtttcggtcgggtttagacgttcggcgcgttcgttttcggatttttgttttttcgggacgttttgtagaatttcggtttcgcgtttcgcgtttatttattatttgcgttatttttagtagggtcgcgtgggtgcgggggtagttgaggtttagtagtttttttaaggggttcgcgttgggttgggtcgcgtcggtttcgggttcgagcgcgttgtcgttgttgtacgtggtgcggacgagttcggtttcgtgcgatattgcgcggttttagttcgttggtcgttttttcgggtagttgtttaggggttagatatagagggcgggtcgggggcgggcgggggcgggcgttggcgagggcggggcgttcgggtttttgtttcgttgttggagacgcggagtcgtttttggcgggattttttcggtgattggtcggtcggcgttttttagaaaggtagcggtagtttcggttttcgtagatgcgcggaagttagattggagcgagaggaaatcggatgttttgggtcgtggttttttcgaggtgggtaaggttcggattatagttggtattgagtttttt

SEQ ID NO: 22794 - DNA, 1006 bp, Artificial Sequence
  chemically treated genomic DNA (Homo sapiens) CpG-island No: 22794
aaaaaactcaataccaactataatccgaaccttacccacctcgaaaaaaccacgacccaaaacatccgatttcctctcgctccaatctaacttccgcgcatctacgaaaaccgaaactaccgctacctttctaaaaaacgccgaccgaccaatcaccgaaaaaatcccgccaaaaacgactccgcgtctccaacaacgaaacaaaaacccgaacgccccgccctcgccaacgcccgcccccgcccgcccccgacccgccctctatatctaacccctaaacaactacccgaaaaaacgaccaacgaactaaaaccgcgcaatatcgcacgaaaccgaactcgtccgcaccacgtacaacaacgacaacgcgctcgaacccgaaaccgacgcgacccaacccaacgcgaaccccttaaaaaaactactaaacctcaactacccccgcacccacgcgaccctactaaaaataacgcaaataataaataaacgcgaaacgcgaaaccgaaattctacaaaacgtcccgaaaaaacaaaaatccgaaaacgaacgcgccgaacgtctaaacccgaccgaaacccaaaaaacatcgcgcaacgaacgaaacaccgcgtcgctaaaattcgcgacaaacttcctccgaaaaaattactaccgcaacccccgcgctaaaactcaatccccaaaaccgccccgacccttactcccgcgaacccaaatcgccaaaatcgcaaatttctccgaccacccccctacgaaacctaacccgcctactaactaaaaccacgaacaaaattccttttcgtctttcttcctcttctctaaaccgcgccgcttcgaacccgaaccgaaaataaaaaaatcgcccaaacgacgacgctaaaaaaacgaaacccgacctcttccccgtccacgacctcctctttcctccgaacccaacgcgacaaaacttccctactctatatacaatttcgctcgaaaaaaaaaatcaaaaaatcttacgttcca

SEQ ID NO: 22795 - DNA, 1006 bp, Artificial Sequence
  chemically treated genomic DNA (Homo sapiens) CpG-island No: 22795
aggaggtttagtattagttgtggttcgggttttgtttatttcggagaggttacgatttaaggtattcggttttttttcgttttagtttaattttcgcgtatttacgagggtcgggattgtcgttatttttttggaaggcgtcggtcggttagttatcggagggatttcgttagaggcggtttcgcgtttttagtagcggggtagggattcgggcgtttcgttttcgttagcgttcgttttcgttcgttttcggttcgttttttgtatttggtttttgggtagttgttcggggaggcggttagcgagttggggtcgcgtaatgtcgtacggagtcgggttcgttcgtattacgtgtagtagcggtagcgcgttcggattcggggtcggcgcggtttagtttagcgcgagttttttggaggggttgttggattttagttattttcgtatttacgcggttttgttgaaagtggcgtaaatggtaagtgagcgcggggcgcgaggtcgaggttttatagggcgtttcgggaaagtaggggttcgggagcggacgcgtcgggcgtttggattcggtcggagtttagggagtatcgcgtagcgggcggggtatcgcgtcgttaaagttcgcggtaggtttttttcgggaaagttgttgtcgtagttttcgcgttggagtttagtttttagagtcgtttcggtttttgttttcgcggatttaggtcgttagggtcgtaagttttttcggttatttttttgcgaagtttgattcgtttattgattgaaattacgggtaaagttttttttcgttttttttttttttttttgggtcgcgtcgtttcgaattcgagtcgggggtggaagagtcgtttaggcggcggcgttgagggagcgaaattcgatttttttttcgtttacggttttttttttttttcgaatttagcgcggtagggtttttttgttttgtgtgtagtttcgttcgaaggaggaggttagagggttttgcgtttta

SEQ ID NO: 22796 - DNA, 1006 bp, Artificial Sequence
  chemically treated genomic DNA (Homo sapiens) CpG-island No: 22796
taaaacgcaaaaccctctaacctcctccttcgaacgaaactacacacaaaacaaaaaaaccctaccgcgctaaattcgaaaaaaaaaaaaaaccgtaaacgaaaaaaaaatcgaatttcgctccctcaacgccgccgcctaaacgactcttccacccccgactcgaattcgaaacgacgcgacccaaaaaaaaaaaaaaaaaacgaaaaaaaactttacccgtaatttcaatcaataaacgaatcaaacttcgcaaaaaaataaccgaaaaaacttacgaccctaacgacctaaatccgcgaaaacaaaaaccgaaacgactctaaaaactaaactccaacgcgaaaactacgacaacaactttcccgaaaaaaacctaccgcgaactttaacgacgcgataccccgcccgctacgcgatactccctaaactccgaccgaatccaaacgcccgacgcgtccgctcccgaacccctactttcccgaaacgccctataaaacctcgacctcgcgccccgcgctcacttaccatttacgccactttcaacaaaaccgcgtaaatacgaaaataactaaaatccaacaacccctccaaaaaactcgcgctaaactaaaccgcgccgaccccgaatccgaacgcgctaccgctactacacgtaatacgaacgaacccgactccgtacgacattacgcgaccccaactcgctaaccgcctccccgaacaactacccaaaaaccaaatacaaaaaacgaaccgaaaacgaacgaaaacgaacgctaacgaaaacgaaacgcccgaatccctaccccgctactaaaaacgcgaaaccgcctctaacgaaatccctccgataactaaccgaccgacgccttccaaaaaaataacgacaatcccgaccctcgtaaatacgcgaaaattaaactaaaacgaaaaaaaaccgaataccttaaatcgtaacctctccgaaataaacaaaacccgaaccacaactaatactaaacctcct

SEQ ID NO: 22797 - DNA, 739 bp, Artificial Sequence
  chemically treated genomic DNA (Homo sapiens) CpG-island No: 22797
  unsure (453, 709..)
ggtagtacgtcgtagaggattttttcgagtttgttggtatcggtggcgcgaatgttttttatcgggtcgggtttaatcgtttttatcgtttcggaaagtagtttggagagtacgtcggtggtgtggataaatagcgttatacgttagtacgttagcgaacgggtcgaggtcgacggcgattacgaatagtatggcgaagattatttcgttaatggcgcggtaggcgtttattaggcggcgaacgggttggtaaatttattacggtattaggttttcggcgtttattaggttaaaggggatggagagaattatcgttagcgcggtgttttagacggcgatttgtagcgtgacggttatttcggtgaggtaattttgttattggttgaaatcgggcgtgaagaagtcggcggcgaacgtcgttatgttgtcgtcgtttttgattagcgtaacggnggttattttcgcgttttgttacgagacgattaatacggcgagtataacggtttagtttagaagcgagaattagttgcgtttgggtggggcgatggtgatggtttgtatgtttggtttcggtttgtaggtcggataaggtgtttgtacgtattcggtattaacgtttgtatattgtcggatgcgaacgcggggcgttttatttcgattacgatttattgtaacgttttatttaacgaatttatcgcgtttagtcgtnntgtttaagtcgatttaggttatttaattg

SEQ ID NO: 22798 - DNA, 739 bp, Artificial Sequence
  chemically treated genomic DNA (Homo sapiens) CpG-island No: 22798
  unsure (30..31, 287)
caattaaataacctaaatcgacttaaacannacgactaaacgcgataaattcgttaaataaaacgttacaataaatcgtaatcgaaataaaacgccccgcgttcgcatccgacaatatacaaacgttaataccgaatacgtacaaacaccttatccgacctacaaaccgaaaccaaacatacaaaccatcaccatcgccccacccaaacgcaactaattctcgcttctaaactaaaccgttatactcgccgtattaatcgtctcgtaacaaaacgcgaaaataaccnccgttacgctaatcaaaaacgacgacaacataacgacgttcgccgccgacttcttcacgcccgatttcaaccaataacaaaattacctcaccgaaataaccgtcacgctacaaatcgccgtctaaaacaccgcgctaacgataattctctccatcccctttaacctaataaacgccgaaaacctaataccgtaataaatttaccaacccgttcgccgcctaataaacgcctaccgcgccattaacgaaataatcttcgccatactattcgtaatcgccgtcgacctcgacccgttcgctaacgtactaacgtataacgctatttatccacaccaccgacgtactctccaaactactttccgaaacgataaaaacgattaaacccgacccgataaaaaacattcgcgccaccgataccaacaaactcgaaaaaatcctctacgacgtactacc

SEQ ID NO: 22799 - DNA, 739 bp, Artificial Sequence
  chemically treated genomic DNA (Homo sapiens) CpG-island No: 22799
  unsure (30..31, 287)
tagttggatgatttggatcggtttgaatannacggttaagcgcgatgagttcgttgagtaaagcgttgtagtaaatcgtagtcggaataagacgtttcgcgttcgtattcgataatgtgtaggcgttgatgtcggatgcgtgtaagtattttattcggtttatagatcggagttaaatatgtaaattattattatcgttttatttaagcgtagttggttttcgtttttgagttgggtcgttgtattcgtcgtgttggtcgtttcgtggtagggcgcggaaatggttntcgttacgttgattaaagacggcggtaatatggcgacgttcgtcgtcgatttttttacgttcgattttagttagtggtaggattattttatcgaaatggtcgttacgttgtaaatcgtcgtttggggtatcgcgttggcggtggttttttttattttttttggtttgatgagcgtcgaaaatttggtgtcgtggtgggtttattagttcgttcgtcgtttgatggacgtttgtcgcgttattaacgaaatggttttcgttatgttgttcgtggtcgtcgtcggtttcggttcgttcgttggcgtgttggcgtgtggcgttgtttatttatattatcggcgtgttttttaagttgtttttcgaagcggtggaagcgattgagttcggttcggtggaaggtattcgcgttatcggtgttaataagttcgaagagattttttacggcgtgttgtt

SEQ ID NO: 22800 - DNA, 739 bp, Artificial Sequence
  chemically treated genomic DNA (Homo sapiens) CpG-island No: 22800
  unsure (453, 709..)
aacaacacgccgtaaaaaatctcttcgaacttattaacaccgataacgcgaataccttccaccgaaccgaactcaatcgcttccaccgcttcgaaaaacaacttaaaaaacacgccgataatataaataaacaacgccacacgccaacacgccaacgaacgaaccgaaaccgacgacgaccacgaacaacataacgaaaaccatttcgttaataacgcgacaaacgtccatcaaacgacgaacgaactaataaacccaccacgacaccaaattttcgacgctcatcaaaccaaaaaaaataaaaaaaaccaccgccaacgcgataccccaaacgacgatttacaacgtaacgaccatttcgataaaataatcctaccactaactaaaatcgaacgtaaaaaaatcgacgacgaacgtcgccatattaccgccgtctttaatcaacgtaacganaaccatttccgcgccctaccacgaaacgaccaacacgacgaatacaacgacccaactcaaaaacgaaaaccaactacgcttaaataaaacgataataataatttacatatttaactccgatctataaaccgaataaaatacttacacgcatccgacatcaacgcctacacattatcgaatacgaacgcgaaacgtcttattccgactacgatttactacaacgctttactcaacgaactcatcgcgcttaaccgtnntattcaaaccgatccaaatcatccaacta

SEQ ID NO: 22801 - DNA, 769 bp, Artificial Sequence
  chemically treated genomic DNA (Homo sapiens) CpG-island No: 22801
tcgtttttcgtgtgttgatattaaatgcgtcgcgcggtacgggcgtggtaatggtcggaatacgtgttttatgttagttaatgtcggtgttgataatggtcgcgttcgtcgttttaatggtttgcgttattttatcgtttcggtaaaagtttcgtcgttttcgattaggtcgagtatcgatagtcggtagataataatgaagtcgttgtcgacgcgttcgcgtatcgtacgtattatttttacggtaaatcgtattcggttgcggtaatcgtcgttttattggttattacgttgattggtgcgtacgttagaaattcgttgattaaatatttttcggaatttattatttttatatcgtcgtattttgtttttcgcgttagttgcgcgtagtaggcgaaattgtcgattagttgtaggatttttttatggtttaatttatggggtacgaaacggttgatgggggtttgtaatgcggacggggcgattagatgcggttggtagttgtagcgttcggtatgtaaaatttgtagggttattttgtcgtttttttgatgtatcgtttcggtaatggtgcgatggtgtgggatttggttggcgtcgttgagtatttcgttattttttatgttaacgtttgttaaatttggtgtaatgtcgtcgttgataattagcgttacgtcgtgacgggcgcgttcggtataaaacgttgttagtcgttcggtaacgttcgggtatttttgggatttattttttttttaaagagataattttg

SEQ ID NO: 22802 - DNA, 769 bp, Artificial Sequence
  chemically treated genomic DNA (Homo sapiens) CpG-island No: 22802
caaaattatctctttaaaaaaaaaataaatcccaaaaatacccgaacgttaccgaacgactaacaacgttttataccgaacgcgcccgtcacgacgtaacgctaattatcaacgacgacattacaccaaatttaacaaacgttaacataaaaaataacgaaatactcaacgacgccaaccaaatcccacaccatcgcaccattaccgaaacgatacatcaaaaaaacgacaaaataaccctacaaattttacataccgaacgctacaactaccaaccgcatctaatcgccccgtccgcattacaaacccccatcaaccgtttcgtaccccataaattaaaccataaaaaaatcctacaactaatcgacaatttcgcctactacgcgcaactaacgcgaaaaacaaaatacgacgatataaaaataataaattccgaaaaatatttaatcaacgaatttctaacgtacgcaccaatcaacgtaataaccaataaaacgacgattaccgcaaccgaatacgatttaccgtaaaaataatacgtacgatacgcgaacgcgtcgacaacgacttcattattatctaccgactatcgatactcgacctaatcgaaaacgacgaaacttttaccgaaacgataaaataacgcaaaccattaaaacgacgaacgcgaccattatcaacaccgacattaactaacataaaacacgtattccgaccattaccacgcccgtaccgcgcgacgcatttaatatcaacacacgaaaaacga

SEQ ID NO: 22803 - DNA, 769 bp, Artificial Sequence
  chemically treated genomic DNA (Homo sapiens) CpG-island No: 22803
taaaattatttttttaagaaagagataaattttaagaatattcggacgttgtcgagcggttggtagcgttttatgtcgaacgcgttcgttacggcgtggcgttgattgttagcggcggtattgtattagatttaataggcgttggtatggaaggtggcgaaatgtttaacgacgttagttagattttatattatcgtattattatcgaagcggtatattaggaaggcggtaaaatagttttgtaaattttgtatatcgggcgttatagttattaatcgtatttggtcgtttcgttcgtattgtaggtttttattaatcgtttcgtgttttatgagttaagttatgaagagattttgtaattgatcgataatttcgtttgttgcgcgtaattggcgcgggaggtaggatacgacggtgtagaggtgatgggtttcgaagggtatttgattaacgaatttttgacgtgcgtattaattagcgtagtgattagtggggcggcgattatcgtaatcggatgcgatttgtcgtagaagtagtgcgtgcggtgcgcgaacgcgtcggtaacgattttattattatttatcgattgtcgatgttcgatttggtcgaagacggcgggatttttgtcgaaacggtagagtggcgtaggttattgaagcggcgggcgcgattattattaatatcggtattggttggtatgaagtacgtatttcgattattgttacgttcgtgtcgcgcggcgtatttagtgttaatatacggggagcgg

SEQ ID NO: 22804 - DNA, 769 bp, Artificial Sequence
  chemically treated genomic DNA (Homo sapiens) CpG-island No: 22804
ccgctccccgtatattaacactaaatacgccgcgcgacacgaacgtaacaataatcgaaatacgtacttcataccaaccaataccgatattaataataatcgcgcccgccgcttcaataacctacgccactctaccgtttcgacaaaaatcccgccgtcttcgaccaaatcgaacatcgacaatcgataaataataataaaatcgttaccgacgcgttcgcgcaccgcacgcactacttctacgacaaatcgcatccgattacgataatcgccgccccactaatcactacgctaattaatacgcacgtcaaaaattcgttaatcaaatacccttcgaaacccatcacctctacaccgtcgtatcctacctcccgcgccaattacgcgcaacaaacgaaattatcgatcaattacaaaatctcttcataacttaactcataaaacacgaaacgattaataaaaacctacaatacgaacgaaacgaccaaatacgattaataactataacgcccgatatacaaaatttacaaaactattttaccgccttcctaatataccgcttcgataataatacgataatataaaatctaactaacgtcgttaaacatttcgccaccttccataccaacgcctattaaatctaatacaataccgccgctaacaatcaacgccacgccgtaacgaacgcgttcgacataaaacgctaccaaccgctcgacaacgtccgaatattcttaaaatttatctctttcttaaaaaaataatttta

SEQ ID NO: 22805 - DNA, 877 bp, Artificial Sequence
  chemically treated genomic DNA (Homo sapiens) CpG-island No: 22805
tcgtatacgtttattatttttcgtaggtatatatgtatatacgcgcgcgtatacgtatatatatttttagttcggatcggtcgatttgtttttcggggtttttttcgtaggtaggttttttcgtcgagttttcgaaaaggggcggtcgtggcggttttggcgtttagttgggtaacgtttcgtggtattttatcgtttttttttgttgtgtttagcgtttcgattgaagattcggatttttagttttcggcggtttttcgtttagtttagagatcgtagtttcgtcgtttcgttgtttttgagtcgttttcggttcggtttcggttcgtagcgtttttattaggcgggcggttaggtttcgcgtttcgtatttcgtatttcgcgtttttttttagcggcgtcgttttttggtttcgagtttcgtttttcggcgaagtcgttcgcgtcggggtttcgcggtagtcggttttgacggttttttcgttcgttcgttttcgttttcgcgttttttttttttttttttttttttttttttttatttagttcgttattcgcggtttttttatattcgggcgggtaggtaggcgtttatagtagcgcggagtcgcggttatttcggtgtcgggcgtttttacgcgcgtttatttatttagcgttgttaattagtcgcggcgggcgtttcgttgtgagtttggcgagagtaattatatatttttagggcggtttagtatatatatttatacgcgcgttaggaaatatattcgtaggttagagggcgcgcgtatatacgcgtatatatggtagtttgttttaggatggtatttcgggtaataggagttttatcgtttgttaagtagaagtataatggataatttta

SEQ ID NO: 22806 - DNA, 877 bp, Artificial Sequence
  chemically treated genomic DNA (Homo sapiens) CpG-island No: 22806
taaaattatccattatacttctacttaacaaacgataaaactcctattacccgaaataccatcctaaaacaaactaccatatatacgcgtatatacgcgcgccctctaacctacgaatatatttcctaacgcgcgtataaatatatatactaaaccgccctaaaaatatataattactctcgccaaactcacaacgaaacgcccgccgcgactaattaacaacgctaaataaataaacgcgcgtaaaaacgcccgacaccgaaataaccgcgactccgcgctactataaacgcctacctacccgcccgaatataaaaaaaccgcgaataacgaactaaataaaaaaaaaaaaaaaaaaaaaaaaaaaaaaaacgcgaaaacgaaaacgaacgaacgaaaaaaccgtcaaaaccgactaccgcgaaaccccgacgcgaacgacttcgccgaaaaacgaaactcgaaaccaaaaaacgacgccgctaaaaaaaaacgcgaaatacgaaatacgaaacgcgaaacctaaccgcccgcctaataaaaacgctacgaaccgaaaccgaaccgaaaacgactcaaaaacaacgaaacgacgaaactacgatctctaaactaaacgaaaaaccgccgaaaactaaaaatccgaatcttcaatcgaaacgctaaacacaacaaaaaaaaacgataaaataccacgaaacgttacccaactaaacgccaaaaccgccacgaccgccccttttcgaaaactcgacgaaaaaacctacctacgaaaaaaaccccgaaaaacaaatcgaccgatccgaactaaaaatatatatacgtatacgcgcgcgtatatacatatatacctacgaaaaataataaacgtatacga

SEQ ID NO: 22807 - DNA, 877 bp, Artificial Sequence
  chemically treated genomic DNA (Homo sapiens) CpG-island No: 22807
tagaattgtttattgtatttttatttagtaaacggtgggatttttattgttcggggtgttattttggggtaggttgttatgtgtgcgcgtgtgtgcgcgcgttttttgatttgcgagtgtgttttttggcgcgcgtgtggatgtgtgtgttgggtcgttttgggagtgtgtgattgttttcgttaggtttatagcgaggcgttcgtcgcggttgattgatagcgttgggtgaatgagcgcgcgtggaggcgttcggtatcgaggtggtcgcggtttcgcgttgttgtgagcgtttgtttgttcgttcgggtgtggggggatcgcgggtggcgggttgggtgggaggaggaggaggaggaggaggagagagggcgcgggagcgagggcgggcggacgggagggtcgttagagtcggttgtcgcggagtttcggcgcgggcggtttcgtcggggagcgaggttcggagttaggaggcggcgtcgttgggagggagcgcggagtgcggagtgcggagcgcggggtttggtcgttcgtttggtgagagcgttgcgggtcggggtcgggtcgggggcggtttaggggtagcggggcggcgaggttgcggtttttggattaggcgaggggtcgtcgggggttggaggttcggatttttagtcggggcgttgggtataatagagagaagcggtgagatattacgaagcgttgtttagttgggcgttagggtcgttacgatcgttttttttcggagattcggcgaggagatttgtttgcgggagagatttcggggagtaggtcggtcggttcgggttgggggtgtgtgtgcgtgtgcgcgcgcgtgtgtgtatgtgtgtttgcgaggggtggtgggcgtgtacga

SEQ ID NO: 22808 - DNA, 877 bp, Artificial Sequence
  chemically treated genomic DNA (Homo sapiens) CpG-island No: 22808
tcgtacacgcccaccacccctcgcaaacacacatacacacacgcgcgcgcacacgcacacacacccccaacccgaaccgaccgacctactccccgaaatctctcccgcaaacaaatctcctcgccgaatctccgaaaaaaaacgatcgtaacgaccctaacgcccaactaaacaacgcttcgtaatatctcaccgcttctctctattatacccaacgccccgactaaaaatccgaacctccaacccccgacgacccctcgcctaatccaaaaaccgcaacctcgccgccccgctacccctaaaccgcccccgacccgaccccgacccgcaacgctctcaccaaacgaacgaccaaaccccgcgctccgcactccgcactccgcgctccctcccaacgacgccgcctcctaactccgaacctcgctccccgacgaaaccgcccgcgccgaaactccgcgacaaccgactctaacgaccctcccgtccgcccgccctcgctcccgcgccctctctcctcctcctcctcctcctcctcccacccaacccgccacccgcgatccccccacacccgaacgaacaaacaaacgctcacaacaacgcgaaaccgcgaccacctcgataccgaacgcctccacgcgcgctcattcacccaacgctatcaatcaaccgcgacgaacgcctcgctataaacctaacgaaaacaatcacacactcccaaaacgacccaacacacacatccacacgcgcgccaaaaaacacactcgcaaatcaaaaaacgcgcgcacacacgcgcacacataacaacctaccccaaaataacaccccgaacaataaaaatcccaccgtttactaaataaaaatacaataaacaattcta

SEQ ID NO: 22809 - DNA, 500 bp, Artificial Sequence
  chemically treated genomic DNA (Homo sapiens) CpG-island No: 22809
gttcgcggtaggcgtcggtcgtattggtgagggggcgcgggttgtttggttagggtagtttttttagtttcgggttggagtcggagtcggagtcggatttcgcgtatatcgttacgttaatttaaatttatatcgttttttttattttatcgtcgtaggttcgttgggttcgtagcgggtttttttaggtagcgttttttacgttttttttataatgtttcgcgttaggtttcgtttcggttcgtcgtggagatcggcgcgtgaggaatttatcggtatcggtcgcgcgttggtagtcgtcggtgtggttgtattttattaatttcgtgcgtcgcggttgggcgtcggagagtgcgtgtgttttttttttgtacgcggtgtttgggttcggttaggcggggttcgtcgttagggtttgaggatgggggagtagttataggaagcgatttcgcgatggtaaggtgggtatgggttcggggttagggttttgttggagtcgg

SEQ ID NO: 22810 - DNA, 500 bp, Artificial Sequence
  chemically treated genomic DNA (Homo sapiens) CpG-island No: 22810
ccgactccaacaaaaccctaaccccgaacccatacccaccttaccatcgcgaaatcgcttcctataactactcccccatcctcaaaccctaacgacgaaccccgcctaaccgaacccaaacaccgcgtacaaaaaaaaaacacacgcactctccgacgcccaaccgcgacgcacgaaattaataaaatacaaccacaccgacgactaccaacgcgcgaccgataccgataaattcctcacgcgccgatctccacgacgaaccgaaacgaaacctaacgcgaaacattataaaaaaaacgtaaaaaacgctacctaaaaaaacccgctacgaacccaacgaacctacgacgataaaataaaaaaaacgatataaatttaaattaacgtaacgatatacgcgaaatccgactccgactccgactccaacccgaaactaaaaaaactaccctaaccaaacaacccgcgccccctcaccaatacgaccgacgcctaccgcgaac

SEQ ID NO: 22811 - DNA, 500 bp, Artificial Sequence
  chemically treated genomic DNA (Homo sapiens) CpG-island No: 22811
tcggttttagtaaagttttagtttcgggtttatgtttattttgttatcgcggggtcgttttttgtagttatttttttatttttaaattttggcggcggatttcgtttggtcgagtttaagtatcgcgtgtaggagagaagtatacgtatttttcgacgtttagtcgcggcgtacgggattggtgaggtgtagttatatcggcgattattagcgcgcggtcggtatcggtaggttttttacgcgtcggtttttacggcgagtcggggcggggtttggcgcggagtattgtgggaaaggcgtggaggacgttgtttggggagattcgttgcgggtttagcgggtttgcggcggtggggtggagagggcggtgtaggtttaggttgacgtggcggtgtgcgcgggattcggtttcggtttcggttttaattcggagttgagggaattgttttggttaagtagttcgcgtttttttattaatgcggtcggcgtttgtcgcgggt

SEQ ID NO: 22812 - DNA, 500 bp, Artificial Sequence
  chemically treated genomic DNA (Homo sapiens) CpG-island No: 22812
acccgcgacaaacgccgaccgcattaataaaaaaacgcgaactacttaaccaaaacaattccctcaactccgaattaaaaccgaaaccgaaaccgaatcccgcgcacaccgccacgtcaacctaaacctacaccgccctctccaccccaccgccgcaaacccgctaaacccgcaacgaatctccccaaacaacgtcctccacgcctttcccacaatactccgcgccaaaccccgccccgactcgccgtaaaaaccgacgcgtaaaaaacctaccgataccgaccgcgcgctaataatcgccgatataactacacctcaccaatcccgtacgccgcgactaaacgtcgaaaaatacgtatacttctctcctacacgcgatacttaaactcgaccaaacgaaatccgccgccaaaatttaaaaataaaaaaataactacaaaaaacgaccccgcgataacaaaataaacataaacccgaaactaaaactttactaaaaccga

SEQ ID NO: 22813 - DNA, 631 bp, Artificial Sequence
  chemically treated genomic DNA (Homo sapiens) CpG-island No: 22813
tcgggcgacgcgcggggttggggcgggtcggcggtttcggggagtggcggtcgggagttcgcgaacgcgggtgggcgtcgtcgttttattaatcgggcgttttcgggaagttcgggcggggttcgtcgtttatatataggattagcgttttttaaattttatttttgggaaaagtcgtcgtattttttatttaaattcgcggagtcgaggggttgggtaggggttgggcgggcgcgggggtcggcgaggcggattcgggaacgggtggattcgggcggttaagtttttttagcgtcggtttaatcgtttcggttcgggttagtttagcggggcgggggtcggcgatataaaggcggcggcgggtttttcgggttttcggtttcgggtagtcgtagggcgtttcgggtcgtcggattttttttcgcgttgcggttcgttagtcggcgtcgttcgtcgttcgtttttagtcgttcggcgaggcgcggtttttttcgtcggcgcggggttttttggttaatttttgttcggtagcgcggtcgttgattggagaaggcggggcgtcggggtagcggggatttttttttatttttttcgttttttttttttgtttttttattgtcggcgttttttt

SEQ ID NO: 22814 - DNA, 631 bp, Artificial Sequence
  chemically treated genomic DNA (Homo sapiens) CpG-island No: 22814
aaaaaaacgccgacaataaaaaaacaaaaaaaaaaaacgaaaaaaataaaaaaaaatccccgctaccccgacgccccgccttctccaatcaacgaccgcgctaccgaacaaaaattaaccaaaaaaccccgcgccgacgaaaaaaaccgcgcctcgccgaacgactaaaaacgaacgacgaacgacgccgactaacgaaccgcaacgcgaaaaaaaatccgacgacccgaaacgccctacgactacccgaaaccgaaaacccgaaaaacccgccgccgcctttatatcgccgacccccgccccgctaaactaacccgaaccgaaacgattaaaccgacgctaaaaaaacttaaccgcccgaatccacccgttcccgaatccgcctcgccgacccccgcgcccgcccaacccctacccaacccctcgactccgcgaatttaaataaaaaatacgacgacttttcccaaaaataaaatttaaaaaacgctaatcctatatataaacgacgaaccccgcccgaacttcccgaaaacgcccgattaataaaacgacgacgcccacccgcgttcgcgaactcccgaccgccactccccgaaaccgccgacccgccccaaccccgcgcgtcgcccga

SEQ ID NO: 22815 - DNA, 631 bp, Artificial Sequence
  chemically treated genomic DNA (Homo sapiens) CpG-island No: 22815
ggggaagcgtcgatagtgggggagtagggggaggggacgaggaaggtgggggggggttttcgttgtttcggcgtttcgttttttttaattagcggtcgcgttgtcgggtaggggttaattaggggatttcgcgtcggcggaggaagtcgcgtttcgtcggacggttgagggcgggcgacgggcggcgtcggttgacgggtcgtaacgcgaggggaggttcggcggttcggggcgttttgcgattgttcgaggtcggaggttcggaggattcgtcgtcgtttttgtgtcgtcggttttcgtttcgttggattggttcgggtcggggcggttgggtcggcgttgaaggggtttggtcgttcgggtttattcgttttcggattcgtttcgtcggttttcgcgttcgtttaatttttgtttagtttttcggtttcgcgagtttgggtgagaagtgcggcggttttttttagggatggagtttagaggacgttaattttatgtgtgagcggcggatttcgttcggatttttcggaggcgttcggttagtgaggcgacggcgtttattcgcgttcgcgggttttcggtcgttatttttcggagtcgtcggttcgttttagtttcgcgcgtcgttcgg

SEQ ID NO: 22816 - DNA, 631 bp, Artificial Sequence
  chemically treated genomic DNA (Homo sapiens) CpG-island No: 22816
ccgaacgacgcgcgaaactaaaacgaaccgacgactccgaaaaataacgaccgaaaacccgcgaacgcgaataaacgccgtcgcctcactaaccgaacgcctccgaaaaatccgaacgaaatccgccgctcacacataaaattaacgtcctctaaactccatccctaaaaaaaaccgccgcacttctcacccaaactcgcgaaaccgaaaaactaaacaaaaattaaacgaacgcgaaaaccgacgaaacgaatccgaaaacgaataaacccgaacgaccaaaccccttcaacgccgacccaaccgccccgacccgaaccaatccaacgaaacgaaaaccgacgacacaaaaacgacgacgaatcctccgaacctccgacctcgaacaatcgcaaaacgccccgaaccgccgaacctcccctcgcgttacgacccgtcaaccgacgccgcccgtcgcccgccctcaaccgtccgacgaaacgcgacttcctccgccgacgcgaaatcccctaattaacccctacccgacaacgcgaccgctaattaaaaaaaacgaaacgccgaaacaacgaaaacccccccccaccttcctcgtcccctccccctactcccccactatcgacgcttcccc

SEQ ID NO: 22817 - DNA, 719 bp, Artificial Sequence
  chemically treated genomic DNA (Homo sapiens) CpG-island No: 22817
  unsure (255..256, 392, 660)
cgtattatcggatgtagtaacggcgggtttttcgcgatcgtttcgcgttacggttgatgttttttttcggttttgcggtatttgtatttcgggaacgatttacggaaattatgtttcgtacgtagtttatttagtagttggcggaagggaatagagagcgttttataggtcgtaatatcgttggtttagagcgtattatcgtcgggtcgaggtaattttttagttgttagaatcgtttttgcggggtggcgtttnnataatgttatatcggtatgttagttgtcggtatttggcggattattcgtatgggtattagtacgatgatttcgttaattttttcggtatgcggggtaatagggtgaatatgttattcgttaaatacgttgggtagngcgcgtagttgttgcgtcgtaatagtttattgcgtagaatattatttgatgcgtatcgtatggtaagttgttaattgagtattttatcggtcgttagtcgattcgaatttgttcgaatagtttagcggtattttacgttatatgatttttattaggttacgttttacgcgtatagtttaagaggtattattcggtcgtatttattttcgaattcggttattattacggtcgtattattcgtcgttatttcgtatgtcggagtcgtttngaataatattttagtttaaatgggatttttgagttttacgattttgtattaaatgattt

SEQ ID NO: 22818 - DNA, 719 bp, Artificial Sequence
  chemically treated genomic DNA (Homo sapiens) CpG-island No: 22818
  unsure (60, 328, 464..)
aaatcatttaatacaaaatcgtaaaactcaaaaatcccatttaaactaaaatattattcnaaacgactccgacatacgaaataacgacgaataatacgaccgtaataataaccgaattcgaaaataaatacgaccgaataatacctcttaaactatacgcgtaaaacgtaacctaataaaaatcatataacgtaaaataccgctaaactattcgaacaaattcgaatcgactaacgaccgataaaatactcaattaacaacttaccatacgatacgcatcaaataatattctacgcaataaactattacgacgcaacaactacgcgcnctacccaacgtatttaacgaataacatattcaccctattaccccgcataccgaaaaaattaacgaaatcatcgtactaatacccatacgaataatccgccaaataccgacaactaacataccgatataacattatnnaaacgccaccccgcaaaaacgattctaacaactaaaaaattacctcgacccgacgataatacgctctaaaccaacgatattacgacctataaaacgctctctattcccttccgccaactactaaataaactacgtacgaaacataatttccgtaaatcgttcccgaaatacaaataccgcaaaaccgaaaaaaaacatcaaccgtaacgcgaaacgatcgcgaaaaacccgccgttactacatccgataatacg

SEQ ID NO: 22819 - DNA, 719 bp, Artificial Sequence
  chemically treated genomic DNA (Homo sapiens) CpG-island No: 22819
  unsure (60, 328, 464..)
aagttatttagtataggatcgtgggatttaagaattttatttgaattgaggtgttatttngggcgatttcgatatgcggggtgacggcgagtaatgcgatcgtagtagtagtcggattcgaagatggatgcgatcggatgatattttttagattgtgcgcgtaaggcgtgatttgatggaagttatgtgacgtggaatatcgttgggttattcgggtaaattcgggtcgattaacggtcggtaggatatttagttgatagtttattatgcggtgcgtattaagtggtgttttacgtaataagttattacggcgtagtagttacgcgtnttgtttagcgtgtttggcgaatggtatatttattttgttatttcgtatgtcgaaggggttgacgagattatcgtgttgatatttatacggataattcgttagatatcgataattggtatatcgatgtgatattatnngaacgttatttcgtaggggcgattttggtagttaaagagttatttcgattcggcggtgatacgttttggattagcggtattgcggtttatgaggcgttttttgttttttttcgttagttgttgagtgggttgcgtgcggagtatgattttcgtaaatcgttttcggaatataaatatcgtaaaatcgaggaggaatattaatcgtggcgcgaggcggtcgcgaaaaattcgtcgttgttatattcggtggtgcg

SEQ ID NO: 22820 - DNA, 719 bp, Artificial Sequence
  chemically treated genomic DNA (Homo sapiens) CpG-island No: 22820
  unsure (255..256, 392, 660)
cgcaccaccgaatataacaacgacgaatttttcgcgaccgcctcgcgccacgattaatattcctcctcgattttacgatatttatattccgaaaacgatttacgaaaatcatactccgcacgcaacccactcaacaactaacgaaaaaaaacaaaaaacgcctcataaaccgcaataccgctaatccaaaacgtatcaccgccgaatcgaaataactctttaactaccaaaatcgcccctacgaaataacgttcnnataatatcacatcgatataccaattatcgatatctaacgaattatccgtataaatatcaacacgataatctcgtcaaccccttcgacatacgaaataacaaaataaatataccattcgccaaacacgctaaacaanacgcgtaactactacgccgtaataacttattacgtaaaacaccacttaatacgcaccgcataataaactatcaactaaatatcctaccgaccgttaatcgacccgaatttacccgaataacccaacgatattccacgtcacataacttccatcaaatcacgccttacgcgcacaatctaaaaaatatcatccgatcgcatccatcttcgaatccgactactactacgatcgcattactcgccgtcaccccgcatatcgaaatcgcccnaaataacacctcaattcaaataaaattcttaaatcccacgatcctatactaaataactt

SEQ ID NO: 22821 - DNA, 675 bp, Artificial Sequence
  chemically treated genomic DNA (Homo sapiens) CpG-island No: 22821
taggcgtttttttttttgttcgtcgaaggtcgcgatggtgttttaggtgagtttttcgttgggggtggtatggcgttttagttagtagtcgtagacgaaaaagtagaagttttggtacgagtttatgttggcgtttaggttggttgttaggaggtcggcggcgcgcgttaaggttttgttttcggggtagttttcgggataggcgtcgtcgttcgtcgcgatcgggtttaggtatttgagcgttagtatagtcgttaggatggcgtagagattagcggcgaatattagtttcgatagtaggtatatttcgcgtcggttttagcgcggtagttcggatcgggtttcggtggcgttgcgcgtagcgtttaacgggaagttcgggggtagggaggtttcgcgcgcgtttttcgcgtcgtagcggtttacgtatttgattttttggaatttatcgtagtgcgtcgttagcgaatacgggggttttatggcgtcgaggtcgtcgcggtgtagatttgggttatttgggttacgggatgcgcgtggtcgtcggttttttcgtgggttttcgtatggttttggggtcgtagttgcgggaagggcggaagtaggtttaggaggcgtcgtagtcggatggggtttagggttatcgcgaggagggatataggtttgggtgtagag

SEQ ID NO: 22822 - DNA, 675 bp, Artificial Sequence
  chemically treated genomic DNA (Homo sapiens) CpG-island No: 22822
ctctacacccaaacctatatccctcctcgcgataaccctaaaccccatccgactacgacgcctcctaaacctacttccgcccttcccgcaactacgaccccaaaaccatacgaaaacccacgaaaaaaccgacgaccacgcgcatcccgtaacccaaataacccaaatctacaccgcgacgacctcgacgccataaaacccccgtattcgctaacgacgcactacgataaattccaaaaaatcaaatacgtaaaccgctacgacgcgaaaaacgcgcgcgaaacctccctacccccgaacttcccgttaaacgctacgcgcaacgccaccgaaacccgatccgaactaccgcgctaaaaccgacgcgaaatatacctactatcgaaactaatattcgccgctaatctctacgccatcctaacgactatactaacgctcaaatacctaaacccgatcgcgacgaacgacgacgcctatcccgaaaactaccccgaaaacaaaaccttaacgcgcgccgccgacctcctaacaaccaacctaaacgccaacataaactcgtaccaaaacttctactttttcgtctacgactactaactaaaacgccataccacccccaacgaaaaactcacctaaaacaccatcgcgaccttcgacgaacaaaaaaaaaaacgccta

SEQ ID NO: 22823 - DNA, 675 bp, Artificial Sequence
  chemically treated genomic DNA (Homo sapiens) CpG-island No: 22823
ttttgtatttaggtttgtgttttttttcgcggtgattttgagttttattcggttgcggcgttttttgagtttgttttcgtttttttcgtagttgcggttttagggttatgcggaggtttacgaggaggtcggcggttacgcgtatttcgtagtttaggtggtttaggtttgtatcgcggcggtttcggcgttatggagttttcgtattcgttgacggcgtattacgatgagttttaagaggttaagtacgtgagtcgttgcggcgcggggggcgcgcgcggggtttttttgttttcgggtttttcgttgggcgttgcgcgtagcgttatcggggttcggttcgggttgtcgcgttggaatcggcgcgaggtgtgtttgttgtcggggttggtgttcgtcgttgatttttgcgttattttggcggttatgttggcgtttaagtatttgggttcggtcgcggcgggcggcggcgtttgtttcgagagttgtttcgagggtaaggttttagcgcgcgtcgtcggttttttggtagttaatttggacgttagtatggattcgtattagaatttttattttttcgtttgcggttgttgattgaagcgttatgttatttttaacgaaaagtttatttaaagtattatcgcggttttcggcgagtagaaagaggagcgtttg

SEQ ID NO: 22824 - DNA, 675 bp, Artificial Sequence
  chemically treated genomic DNA (Homo sapiens) CpG-island No: 22824
caaacgctcctctttctactcgccgaaaaccgcgataatactttaaataaacttttcgttaaaaataacataacgcttcaatcaacaaccgcaaacgaaaaaataaaaattctaatacgaatccatactaacgtccaaattaactaccaaaaaaccgacgacgcgcgctaaaaccttaccctcgaaacaactctcgaaacaaacgccgccgcccgccgcgaccgaacccaaatacttaaacgccaacataaccgccaaaataacgcaaaaatcaacgacgaacaccaaccccgacaacaaacacacctcgcgccgattccaacgcgacaacccgaaccgaaccccgataacgctacgcgcaacgcccaacgaaaaacccgaaaacaaaaaaaccccgcgcgcgccccccgcgccgcaacgactcacgtacttaacctcttaaaactcatcgtaatacgccgtcaacgaatacgaaaactccataacgccgaaaccgccgcgatacaaacctaaaccacctaaactacgaaatacgcgtaaccgccgacctcctcgtaaacctccgcataaccctaaaaccgcaactacgaaaaaaacgaaaacaaactcaaaaaacgccgcaaccgaataaaactcaaaatcaccgcgaaaaaaaacacaaacctaaatacaaaa

SEQ ID NO: 22825 - DNA, 658 bp, Artificial Sequence
  chemically treated genomic DNA (Homo sapiens) CpG-island No: 22825
acggtcgtgatcgtgattttggtcggtcgttgtggttggggtcggttaagtcgaatatcggttatacgtaagcggcggcgggtgtggttggtgtgattaagatggtgatggcgatgcggtacgggtagttgttacgtacgttgtacgtggaatcgtcgtcgtcggaggtggattggtcggcggggacggtttaattttttacggagaatacgttttggtttaggagtggtcgtgttcgtcgggtgggggtgtcgtcgttcgggattagtggtattaacgcgtacgttattttcgaatagttttcgggagtgtcgagttagtttgcggggtcgggttcgggttttgtcgtggatgtttcggtggtgtcgtggatggtgtcgggtaaaatattcgaagcgttattcgcgtaggtaacggcgttgatgatttatttggacgagcgatttgatgttttttcgttggatgttgggtattcgttggcgttgatacggtcggcgttggatgagcgagcggtggtgttggggtcggatcgtgaaatcgttgttgtgcgggggggaaaacgttgttttggcgggtatgaggtttttgggttggtgattcggtttgtggggggttgggggttcgtaacggggtttgtgtttttttcgttaaggtggtt

SEQ ID NO: 22826 - DNA, 658 bp, Artificial Sequence
  chemically treated genomic DNA (Homo sapiens) CpG-island No: 22826
aaccaccttaacgaaaaaaacacaaaccccgttacgaacccccaaccccccacaaaccgaatcaccaacccaaaaacctcatacccgccaaaacaacgttttcccccccgcacaacaacgatttcacgatccgaccccaacaccaccgctcgctcatccaacgccgaccgtatcaacgccaacgaatacccaacatccaacgaaaaaacatcaaatcgctcgtccaaataaatcatcaacgccgttacctacgcgaataacgcttcgaatattttacccgacaccatccacgacaccaccgaaacatccacgacaaaacccgaacccgaccccgcaaactaactcgacactcccgaaaactattcgaaaataacgtacgcgttaataccactaatcccgaacgacgacacccccacccgacgaacacgaccactcctaaaccaaaacgtattctccgtaaaaaattaaaccgtccccgccgaccaatccacctccgacgacgacgattccacgtacaacgtacgtaacaactacccgtaccgcatcgccatcaccatcttaatcacaccaaccacacccgccgccgcttacgtataaccgatattcgacttaaccgaccccaaccacaacgaccgaccaaaatcacgatcacgaccgt

SEQ ID NO: 22827 - DNA, 658 bp, Artificial Sequence
  chemically treated genomic DNA (Homo sapiens) CpG-island No: 22827
gattattttgacggaaaaaatataaatttcgttgcgggtttttagttttttatagatcgggttattaatttagaagttttatgttcgttaagatagcgttttttttttcgtataataacggttttacggttcgattttagtattatcgttcgtttatttagcgtcgatcgtgttaacgttagcgagtatttaatatttagcgaggagatattaggtcgttcgtttagataggttattaacgtcgttgtttgcgcggatagcgtttcgggtgttttgttcgatattatttacggtattatcggaatatttacgatagaattcgaattcggtttcgtagattgattcggtattttcgggggttgttcgaggatgacgtgcgcgttagtattattgatttcgaacgacgatatttttattcgacgaatacgattatttttgggttagggcgtgtttttcgtaaggagttgaatcgttttcgtcgattaatttattttcggcgacggcgattttacgtgtaacgtgcgtggtagttgttcgtgtcgtatcgttattattattttgattatattagttatattcgtcgtcgtttgcgtatgatcgatgttcgatttgatcgattttaattataacggtcggttaggattacgattacggtcgt

SEQ ID NO: 22828 - DNA, 658 bp, Artificial Sequence
  chemically treated genomic DNA (Homo sapiens) CpG-island No: 22828
acgaccgtaatcgtaatcctaaccgaccgttataattaaaatcgatcaaatcgaacatcgatcatacgcaaacgacgacgaatataactaatataatcaaaataataataacgatacgacacgaacaactaccacgcacgttacacgtaaaatcgccgtcgccgaaaataaattaatcgacgaaaacgattcaactccttacgaaaaacacgccctaacccaaaaataatcgtattcgtcgaataaaaatatcgtcgttcgaaatcaataatactaacgcgcacgtcatcctcgaacaacccccgaaaataccgaatcaatctacgaaaccgaattcgaattctatcgtaaatattccgataataccgtaaataatatcgaacaaaacacccgaaacgctatccgcgcaaacaacgacgttaataacctatctaaacgaacgacctaatatctcctcgctaaatattaaatactcgctaacgttaacacgatcgacgctaaataaacgaacgataatactaaaatcgaaccgtaaaaccgttattatacgaaaaaaaaaacgctatcttaacgaacataaaacttctaaattaataacccgatctataaaaaactaaaaacccgcaacgaaatttatattttttccgtcaaaataatc

SEQ ID NO: 22829 - DNA, 551 bp, Artificial Sequence
  chemically treated genomic DNA (Homo sapiens) CpG-island No: 22829
  unsure (529, 532, 538, 548)
ttttttcgcgttttgtttttgtgcgttttttttttttttttttttttgttcgtttttttttttttttttttttacgtattcgtttttcgcgcgtagggatttttgggtaaggttattgcgtttcggattcgcggtcgttggtagggcgtttagggggcgtatttacgcggatgacgtagcgcgaggagtttttgtcgtttaggttgatcgtgagcgagaagagcgcggcggcgttgtatacgttttgcgttttgtatagtagtcggttgaggttttatcgcgtcgcgattttcggacgttttttcgcgtcgtttaggttttagttttcgtagttttcgatgatttttagtatgggtcgcgggtttagtcgttcgatttcgcgtatgtcgaggtacgagcggaagaaggcgcgtattttgcgttggaacgcgtcgttaggtttatattcgggtcgcgttagtaggcgtcgtaggcgtttttcgttttgttcgacgatggtcgcggtggtgtgataaattgttatttattnttnttaagnggaaattatnttt

SEQ ID NO: 22830 - DNA, 551 bp, Artificial Sequence
  chemically treated genomic DNA (Homo sapiens) CpG-island No: 22830
  unsure (4, 14, 20, 23)
aaanataatttccncttaanaanaataaataacaatttatcacaccaccgcgaccatcgtcgaacaaaacgaaaaacgcctacgacgcctactaacgcgacccgaatataaacctaacgacgcgttccaacgcaaaatacgcgccttcttccgctcgtacctcgacatacgcgaaatcgaacgactaaacccgcgacccatactaaaaatcatcgaaaactacgaaaactaaaacctaaacgacgcgaaaaaacgtccgaaaatcgcgacgcgataaaacctcaaccgactactatacaaaacgcaaaacgtatacaacgccgccgcgctcttctcgctcacgatcaacctaaacgacaaaaactcctcgcgctacgtcatccgcgtaaatacgccccctaaacgccctaccaacgaccgcgaatccgaaacgcaataaccttacccaaaaatccctacgcgcgaaaaacgaatacgtaaaaaaaaaaaaaaaaaaaaacgaacaaaaaaaaaaaaaaaaaaaaaacgcacaaaaacaaaacgcgaaaaaa

SEQ ID NO: 22831 - DNA, 551 bp, Artificial Sequence
  chemically treated genomic DNA (Homo sapiens) CpG-island No: 22831
  unsure (4, 14, 20, 23)
aggnatgatttttntttggnaangatgagtagtagtttattatattatcgcggttatcgtcgagtaaaacgaggagcgtttacggcgtttgttggcgcggttcgggtgtgggtttggcggcgcgttttagcgtaaggtgcgcgttttttttcgttcgtgtttcgatatgcgcgagatcgagcgattgggttcgcgatttatgttagaggttatcgaggattgcgggggttgggatttgggcggcgcggaggagcgttcgggggtcgcggcgcgatgggattttaatcggttgttgtataaggcgtagggcgtgtatagcgtcgtcgcgtttttttcgtttacggttagtttggacgataggaatttttcgcgttacgttattcgcgtgagtgcgttttttgagcgttttgttagcggtcgcggattcggggcgtagtggttttgtttaggggtttttgcgcgcgggaggcgggtgcgtgagaggagaggagggaagagacgagtaggagaggggaggggaggggagcgtatagaggtagagcgcgggagga

SEQ ID NO: 22832 - DNA, 551 bp, Artificial Sequence
  chemically treated genomic DNA (Homo sapiens) CpG-island No: 22832
  unsure (529, 532, 538, 548)
tcctcccgcgctctacctctatacgctcccctcccctcccctctcctactcgtctcttccctcctctcctctcacgcacccgcctcccgcgcgcaaaaacccctaaacaaaaccactacgccccgaatccgcgaccgctaacaaaacgctcaaaaaacgcactcacgcgaataacgtaacgcgaaaaattcctatcgtccaaactaaccgtaaacgaaaaaaacgcgacgacgctatacacgccctacgccttatacaacaaccgattaaaatcccatcgcgccgcgacccccgaacgctcctccgcgccgcccaaatcccaacccccgcaatcctcgataacctctaacataaatcgcgaacccaatcgctcgatctcgcgcatatcgaaacacgaacgaaaaaaaacgcgcaccttacgctaaaacgcgccgccaaacccacacccgaaccgcgccaacaaacgccgtaaacgctcctcgttttactcgacgataaccgcgataatataataaactactactcatcnttnccaaanaaaaatcatncct

SEQ ID NO: 22833 - DNA, 526 bp, Artificial Sequence
  chemically treated genomic DNA (Homo sapiens) CpG-island No: 22833
ttatggttttgcgtgttttttacggtaattaattgtttacggttgtcgtatgcgcggtattgatttagttttttttcgcggtgtatcgtcgttatttgattaaaacggttatggttatagcgggttatataatcggaatagttagtgaagtttagtaattgatcgtaacggttttacgttatggtttttcggttgtcggtggtatttttcgttgcgtagggtaagttattgtgtggattattataacggtagcgggtgatatcgtcgttaggggtagttttttgaattagacggttttatttattatattttcggcgtatttttagttcgttaggttcggtggttgacgttaattggttgtggtggttattgtaaaacgtcgatgttttgttattcggcgtggtgatgcgcgtgatgaggttcgttattatattcggattgtattttgttgttttgtttgcggtattcgtttgtgttttgagtttgtttatcgcgttaaattgattttgcgtgacgttgtcgttgt

SEQ ID NO: 22834 - DNA, 526 bp, Artificial Sequence
  chemically treated genomic DNA (Homo sapiens) CpG-island No: 22834
acaacgacaacgtcacgcaaaatcaatttaacgcgataaacaaactcaaaacacaaacgaataccgcaaacaaaacaacaaaatacaatccgaatataataacgaacctcatcacgcgcatcaccacgccgaataacaaaacatcgacgttttacaataaccaccacaaccaattaacgtcaaccaccgaacctaacgaactaaaaatacgccgaaaatataataaataaaaccgtctaattcaaaaaactacccctaacgacgatatcacccgctaccgttataataatccacacaataacttaccctacgcaacgaaaaataccaccgacaaccgaaaaaccataacgtaaaaccgttacgatcaattactaaacttcactaactattccgattatataacccgctataaccataaccgttttaatcaaataacgacgatacaccgcgaaaaaaaactaaatcaataccgcgcatacgacaaccgtaaacaattaattaccgtaaaaaacacgcaaaaccataa

SEQ ID NO: 22835 - DNA, 526 bp, Artificial Sequence
  chemically treated genomic DNA (Homo sapiens) CpG-island No: 22835
atagcggtagcgttacgtagagttagtttgacgcggtgggtaggtttagggtatagacggatgtcgtaggtaggataatagaatatagttcggatgtggtgacgggttttattacgcgtattattacgtcggatggtagggtatcggcgttttataataattattatagttagttaacgttagttatcgggtttgacgggttggaaatacgtcgggaatatgatgaatggggtcgtttgatttaggaaattgtttttgacggcgatattattcgttatcgttatgataatttatatagtgatttattttgcgtaacggaagatgttatcggtagtcggaaaattatgacgtggagtcgttacggttagttgttgagttttattgattgtttcggttatgtaattcgttatgattatgatcgttttggttaggtgacggcggtgtatcgcgaggaagggttgagttagtatcgcgtatacgatagtcgtggatagttaattgtcgtgaaagatacgtagggttatga

SEQ ID NO: 22836 - DNA, 526 bp, Artificial Sequence
  chemically treated genomic DNA (Homo sapiens) CpG-island No: 22836
tcataaccctacgtatctttcacgacaattaactatccacgactatcgtatacgcgatactaactcaacccttcctcgcgatacaccgccgtcacctaaccaaaacgatcataatcataacgaattacataaccgaaacaatcaataaaactcaacaactaaccgtaacgactccacgtcataattttccgactaccgataacatcttccgttacgcaaaataaatcactatataaattatcataacgataacgaataatatcgccgtcaaaaacaatttcctaaatcaaacgaccccattcatcatattcccgacgtatttccaacccgtcaaacccgataactaacgttaactaactataataattattataaaacgccgataccctaccatccgacgtaataatacgcgtaataaaacccgtcaccacatccgaactatattctattatcctacctacgacatccgtctataccctaaacctacccaccgcgtcaaactaactctacgtaacgctaccgctat

SEQ ID NO: 22837 - DNA, 1536 bp, Artificial Sequence
  chemically treated genomic DNA (Homo sapiens) CpG-island No: 22837
tttagtgggttgtttattagattcggtagttgcgtttggtatttacgggtttatcgaacgttgtttggaacggttggtttgtattatattggaacgtattttttagatgtagatcgttgaatatattacgtatgtaggtagtgtttttatagcgaatattcgtcgttttatggcgggtgtatcggatttgcggggtagattgtttgggtggtttttttggttaaaagttttggtcgattcggaaatttagtcgattatgttgcgtatgaagttcgatttggttgagttttgtttggcggtttgtgaaagtaaattggacgagaaaacgttcgagtgggatgaacgcgtttttttcggcgtggtgatggttgcgggtggatattcgggtgattatcgtatcggtgacgtgatttacggtttgtcgttggaagaagtggtaggcggtaaagtgttttacgcgggtataaaattggcggatgacgagtaggtagtgattaacggcgggcgcgtattgtgcgttatcgcgttgggttatatcgtggtagaagcgtagaaacgcgtttatgttttaatgatcgatatttattgggacgattgtttttgtcggaaagatatcggttggcgcgttatcgaacgcgagtagaattaacgcgatagttttgttaatagcgttttgcgcgtgatttttaattgacgggcggtttcggttttgttgtcgttcgttttttttagcgtcgttagaattatttttttttttatttttattaacggttgaatattttgattttgttttagcgggatcggcgtattggtaatcgttagcggtagttcgcgttcggaaatatatttttcggttagtagtattattgttcgttttatcgcgttttttagtttacgaatatttttcggttagtcgtaatgaattaatagatttatcgtttggggcgtaaaattttttatcgttttgcgattacgttcggtaaagcgttgtagaaaatggttagttagtagagggatattttttcgtcgttgtcgtagcgatggtattttaatcgttattatatttaggcgatagtagagattttggcgaaaacgttcggtatttatttttgcggtaagatcgcgatgggtcgtcgtaattagtcggatattaatcgagataatttggttgttatcgatacgttgaatttcgcgtttgatgatttatattttgttatcgttgatgaaatttttttttggcgttaatttggtttcgtgttggggttgatggtatttttttattttttcgttcgtttgacgttgttttgcgcggcgtggattgttatcgtcgaatataaagacgattcgcgaatgtcggggaaaacgtagttttaaaatatgtcggatgcggcgtaaacgttttattcggtatacgattttattcggtttggtttttcgtaggtcggataagatgcgttaatcgtattcggttataatgcgtatataattttttgaaattcgtttttagagtttttttagttatttatttgggagtaa

SEQ ID NO: 22838 - DNA, 1536 bp, Artificial Sequence
  chemically treated genomic DNA (Homo sapiens) CpG-island No: 22838
ttactcccaaataaataactaaaaaaactctaaaaacgaatttcaaaaaattatatacgcattataaccgaatacgattaacgcatcttatccgacctacgaaaaaccaaaccgaataaaatcgtataccgaataaaacgtttacgccgcatccgacatattttaaaactacgttttccccgacattcgcgaatcgtctttatattcgacgataacaatccacgccgcgcaaaacaacgtcaaacgaacgaaaaaataaaaaaataccatcaaccccaacacgaaaccaaattaacgccaaaaaaaaatttcatcaacgataacaaaatataaatcatcaaacgcgaaattcaacgtatcgataacaaccaaattatctcgattaatatccgactaattacgacgacccatcgcgatcttaccgcaaaaataaataccgaacgttttcgccaaaatctctactatcgcctaaatataataacgattaaaataccatcgctacgacaacgacgaaaaaatatccctctactaactaaccattttctacaacgctttaccgaacgtaatcgcaaaacgataaaaaattttacgccccaaacgataaatctattaattcattacgactaaccgaaaaatattcgtaaactaaaaaacgcgataaaacgaacaataatactactaaccgaaaaatatatttccgaacgcgaactaccgctaacgattaccaatacgccgatcccgctaaaacaaaatcaaaatattcaaccgttaataaaaataaaaaaaaaaataattctaacgacgctaaaaaaaacgaacgacaacaaaaccgaaaccgcccgtcaattaaaaatcacgcgcaaaacgctattaacaaaactatcgcgttaattctactcgcgttcgataacgcgccaaccgatatctttccgacaaaaacaatcgtcccaataaatatcgatcattaaaacataaacgcgtttctacgcttctaccacgatataacccaacgcgataacgcacaatacgcgcccgccgttaatcactacctactcgtcatccgccaattttatacccgcgtaaaacactttaccgcctaccacttcttccaacgacaaaccgtaaatcacgtcaccgatacgataatcacccgaatatccacccgcaaccatcaccacgccgaaaaaaacgcgttcatcccactcgaacgttttctcgtccaatttactttcacaaaccgccaaacaaaactcaaccaaatcgaacttcatacgcaacataatcgactaaatttccgaatcgaccaaaacttttaaccaaaaaaaccacccaaacaatctaccccgcaaatccgatacacccgccataaaacgacgaatattcgctataaaaacactacctacatacgtaatatattcaacgatctacatctaaaaaatacgttccaatataatacaaaccaaccgttccaaacaacgttcgataaacccgtaaataccaaacgcaactaccgaatctaataaacaacccactaaa

SEQ ID NO: 22839 - DNA, 1536 bp, Artificial Sequence
  chemically treated genomic DNA (Homo sapiens) CpG-island No: 22839
ttgtttttaaatagatggttgaagaggttttggggacgagttttaagaggttatgtgcgtattatagtcggatgcgattggcgtattttattcggtttacggggagttaggtcgaataaaatcgtatgtcggataaggcgtttacgtcgtattcggtatattttaaggttgcgtttttttcggtattcgcgggtcgtttttatattcggcggtggtaatttacgtcgcgtaaaatagcgttaaacgggcgaagaagtagaaaaatgttattagttttagtacggaattaaattggcgttagagggggattttattaacgatggtagggtgtaggttattaaacgcgaagtttagcgtgtcggtagtaattagattatttcggttgatgttcggttgattgcggcgatttatcgcgattttgtcgtagaggtgaatgtcgggcgttttcgttaggatttttattatcgtttgaatgtggtggcgattgaagtattatcgttgcggtaacggcgggaagatatttttttgttggttggttattttttgtagcgttttgtcgagcgtaatcgtaaggcggtaaaaggttttacgttttaggcgatggatttgttgatttattacgattggtcgggaaatattcgtgagttggaaaacgcggtggaacgggtagtggtgttgttgatcggggaatatattttcgaacgcgagttgtcgttggcgattgttagtacgtcgatttcgttgggataaagttaggatatttagtcgttggtggaagtggaaaaagaggtgattttggcggcgttggagaaaacgggcggtaataaaatcgaagtcgttcgttagttagggattacgcgtaaaacgttattggtaaaattgtcgcgttagttttgttcgcgttcgatagcgcgttagtcgatattttttcggtagaagtagtcgttttagtggatatcggttattaaggtataggcgcgtttttgcgtttttgttacggtatgatttagcgcggtgacgtatagtacgcgttcgtcgttggttattatttgttcgttattcgttagttttgtgttcgcgtggaatattttgtcgtttgttattttttttagcggtaggtcgtggattacgttatcggtgcggtaattattcggatatttattcgtagttattattacgtcgagagaagcgcgtttattttattcggacgttttttcgtttagtttgtttttataggtcgttaggtagagtttaattagatcggattttatgcgtagtataatcggttgggttttcggatcgattaaagtttttgattagggaagttatttaggtagtttatttcgtaagttcggtatattcgttataaaacggcggatgttcgttgtggaaatattgtttgtatgcgtggtgtatttaacgatttgtatttgaaaggtacgttttagtgtggtgtagattaatcgttttaggtaacgttcgatgaattcgtaaatgttaaacgtaattatcgggtttggtaagtagtttattgag

SEQ ID NO: 22840 - DNA, 1536 bp, Artificial Sequence
  chemically treated genomic DNA (Homo sapiens) CpG-island No: 22840
ctcaataaactacttaccaaacccgataattacgtttaacatttacgaattcatcgaacgttacctaaaacgattaatctacaccacactaaaacgtacctttcaaatacaaatcgttaaatacaccacgcatacaaacaatatttccacaacgaacatccgccgttttataacgaatataccgaacttacgaaataaactacctaaataacttccctaatcaaaaactttaatcgatccgaaaacccaaccgattatactacgcataaaatccgatctaattaaactctacctaacgacctataaaaacaaactaaacgaaaaaacgtccgaataaaataaacgcgcttctctcgacgtaataataactacgaataaatatccgaataattaccgcaccgataacgtaatccacgacctaccgctaaaaaaaataacaaacgacaaaatattccacgcgaacacaaaactaacgaataacgaacaaataataaccaacgacgaacgcgtactatacgtcaccgcgctaaatcataccgtaacaaaaacgcaaaaacgcgcctataccttaataaccgatatccactaaaacgactacttctaccgaaaaaatatcgactaacgcgctatcgaacgcgaacaaaactaacgcgacaattttaccaataacgttttacgcgtaatccctaactaacgaacgacttcgattttattaccgcccgttttctccaacgccgccaaaatcacctctttttccacttccaccaacgactaaatatcctaactttatcccaacgaaatcgacgtactaacaatcgccaacgacaactcgcgttcgaaaatatattccccgatcaacaacaccactacccgttccaccgcgttttccaactcacgaatatttcccgaccaatcgtaataaatcaacaaatccatcgcctaaaacgtaaaaccttttaccgccttacgattacgctcgacaaaacgctacaaaaaataaccaaccaacaaaaaaatatcttcccgccgttaccgcaacgataatacttcaatcgccaccacattcaaacgataataaaaatcctaacgaaaacgcccgacattcacctctacgacaaaatcgcgataaatcgccgcaatcaaccgaacatcaaccgaaataatctaattactaccgacacgctaaacttcgcgtttaataacctacaccctaccatcgttaataaaatccccctctaacgccaatttaattccgtactaaaactaataacatttttctacttcttcgcccgtttaacgctattttacgcgacgtaaattaccaccgccgaatataaaaacgacccgcgaataccgaaaaaaacgcaaccttaaaatataccgaatacgacgtaaacgccttatccgacatacgattttattcgacctaactccccgtaaaccgaataaaatacgccaatcgcatccgactataatacgcacataacctcttaaaactcgtccccaaaacctcttcaaccatctatttaaaaacaa

SEQ ID NO: 22841 - DNA, 551 bp, Artificial Sequence
  chemically treated genomic DNA (Homo sapiens) CpG-island No: 22841
gtgtagtttgtttgacgtataatatcgggaatacgaaacgcgtcgttaatttttattagttcgtcgcgagatattattatttttttttcgttggtagtggtcgttaatattaataatatcgtcgtcgtattgttattgacgatataggtatttttcgttttcgtaatacggtatagtagttgcgttacgtttcgatcgcgatgttcgcgttcggcgtcgtttagattatattcgagggttattggcgaacgtatagtttgcgtaacggtttttatcgcggttttcgtttgtaaagttcgtttaaggttggtatgtagtacggttttcgttaggttgattatcggacgtagcgcgttttgtcgttttttcgttaatcgggtatcgattttttgcgtttagtttttatattacgtaggtagcgtttggttgttacgaattatttttcgcgtttcgtcgagtatttgacgtaataattttattacgcgggtgtgattataagtattacgtaaagaaaggaaggagttatcgcgtaataagcgattaatagtcgg

SEQ ID NO: 22842 - DNA, 551 bp, Artificial Sequence
  chemically treated genomic DNA (Homo sapiens) CpG-island No: 22842
ccgactattaatcgcttattacgcgataactccttcctttctttacgtaatacttataatcacacccgcgtaataaaattattacgtcaaatactcgacgaaacgcgaaaaataattcgtaacaaccaaacgctacctacgtaatataaaaactaaacgcaaaaaatcgatacccgattaacgaaaaaacgacaaaacgcgctacgtccgataatcaacctaacgaaaaccgtactacataccaaccttaaacgaactttacaaacgaaaaccgcgataaaaaccgttacgcaaactatacgttcgccaataaccctcgaatataatctaaacgacgccgaacgcgaacatcgcgatcgaaacgtaacgcaactactataccgtattacgaaaacgaaaaatacctatatcgtcaataacaatacgacgacgatattattaatattaacgaccactaccaacgaaaaaaaaataataatatctcgcgacgaactaataaaaattaacgacgcgtttcgtattcccgatattatacgtcaaacaaactacac

SEQ ID NO: 22843 - DNA, 551 bp, Artificial Sequence
  chemically treated genomic DNA (Homo sapiens) CpG-island No: 22843
tcggttattgatcgtttattgcgcgatagtttttttttttttttgcgtgatatttatggttatattcgcgtggtggaattgttgcgttagatgttcgacgaagcgcgagaagtgattcgtggtagttagacgttgtttgcgtggtgtgaaaattgggcgtaagaagtcgatgttcggttgacgaaagaacggtagagcgcgttgcgttcggtgattaatttgacgggaatcgtgttgtatattaattttgggcgagttttataggcggaagtcgcggtggaagtcgttgcgtaggttatgcgttcgttagtgattttcgagtatgatttggacgacgtcggacgcggatatcgcgatcgggacgtggcgtagttgttgtgtcgtattacgggggcggaagatgtttgtatcgttaataataatgcggcggcggtgttattgatgttggcggttattgttagcggaaaagaggtggtggtatttcgcggcgaattggtggagattggcggcgcgtttcgtattttcgatgttatgcgttaggtaggttgtat

SEQ ID NO: 22844 - DNA, 551 bp, Artificial Sequence
  chemically treated genomic DNA (Homo sapiens) CpG-island No: 22844
atacaacctacctaacgcataacatcgaaaatacgaaacgcgccgccaatctccaccaattcgccgcgaaataccaccacctcttttccgctaacaataaccgccaacatcaataacaccgccgccgcattattattaacgatacaaacatcttccgcccccgtaatacgacacaacaactacgccacgtcccgatcgcgatatccgcgtccgacgtcgtccaaatcatactcgaaaatcactaacgaacgcataacctacgcaacgacttccaccgcgacttccgcctataaaactcgcccaaaattaatatacaacacgattcccgtcaaattaatcaccgaacgcaacgcgctctaccgttctttcgtcaaccgaacatcgacttcttacgcccaattttcacaccacgcaaacaacgtctaactaccacgaatcacttctcgcgcttcgtcgaacatctaacgcaacaattccaccacgcgaatataaccataaatatcacgcaaaaaaaaaaaaaaactatcgcgcaataaacgatcaataaccga

SEQ ID NO: 22845 - DNA, 504 bp, Artificial Sequence
  chemically treated genomic DNA (Homo sapiens) CpG-island No: 22845
cgatgtcgttggttagtttttttagtatcgtcgttagcgttacgttcgttagggttaaacgtatcggatttaattgttcgtcgttttgattgtcggtaaaggtaataattaatgaggttattagcgtttcggcgaaggttatcgttagttgtttttgcgcggaagagtaattaaatagcgtcgtatttagtataatggtaaagttggtttcggcgtttacgttaagtaagtcggggtcggtaagtgggtttcgggtgagggtttgtattaacgtttcggtaaggttaagcgcgtcgtttgttagtaaatcggtaagggtacgcggtatcgcgcgtcgagtacgatggttgaataatttattttattttttgttcgcggatcgttatattgttggtttgcgttagtgatatttttcgagttttcggggtaaacgttacggaaattaataagttaaatagcgagatattcgtttttattagtatcgtgttattgatatcgtaatta

SEQ ID NO: 22846 - DNA, 504 bp, Artificial Sequence
  chemically treated genomic DNA (Homo sapiens) CpG-island No: 22846
taattacgatatcaataacacgatactaataaaaacgaatatctcgctatttaacttattaatttccgtaacgtttaccccgaaaactcgaaaaatatcactaacgcaaaccaacaatataacgatccgcgaacaaaaaataaaataaattattcaaccatcgtactcgacgcgcgataccgcgtacccttaccgatttactaacaaacgacgcgcttaaccttaccgaaacgttaatacaaaccctcacccgaaacccacttaccgaccccgacttacttaacgtaaacgccgaaaccaactttaccattatactaaatacgacgctatttaattactcttccgcgcaaaaacaactaacgataaccttcgccgaaacgctaataacctcattaattattacctttaccgacaatcaaaacgacgaacaattaaatccgatacgtttaaccctaacgaacgtaacgctaacgacgatactaaaaaaactaaccaacgacatcg

SEQ ID NO: 22847 - DNA, 504 bp, Artificial Sequence
  chemically treated genomic DNA (Homo sapiens) CpG-island No: 22847
taattacggtattagtaatacgatgttaatgggggcgggtatttcgttgtttggtttgttgattttcgtagcgtttgtttcggagattcgagggatgttattggcgtagattagtaatatgacgattcgcgggtagagaatggggtaaattgtttaattatcgtgttcgacgcgcggtgtcgcgtatttttgtcggtttattggtaggcggcgcgtttggttttgtcggggcgttaatgtaaatttttattcgaaatttatttgtcgatttcggtttgtttagcgtgaacgtcggagttagttttgttattgtgttgggtgcggcgttgtttggttattttttcgcgtaggaataattggcgatggttttcgtcggggcgttggtggttttattgattgttgtttttatcggtagttagggcggcgggtagttaagttcggtgcgtttaattttggcgggcgtggcgttggcggcggtgttggaaggattgattagcggtatcg

SEQ ID NO: 22848 - DNA, 504 bp, Artificial Sequence
  chemically treated genomic DNA (Homo sapiens) CpG-island No: 22848
cgataccgctaatcaatccttccaacaccgccgccaacgccacgcccgccaaaattaaacgcaccgaacttaactacccgccgccctaactaccgataaaaacaacaatcaataaaaccaccaacgccccgacgaaaaccatcgccaattattcctacgcgaaaaaataaccaaacaacgccgcacccaacacaataacaaaactaactccgacgttcacgctaaacaaaccgaaatcgacaaataaatttcgaataaaaatttacattaacgccccgacaaaaccaaacgcgccgcctaccaataaaccgacaaaaatacgcgacaccgcgcgtcgaacacgataattaaacaatttaccccattctctacccgcgaatcgtcatattactaatctacgccaataacatccctcgaatctccgaaacaaacgctacgaaaatcaacaaaccaaacaacgaaatacccgcccccattaacatcgtattactaataccgtaatta

SEQ ID NO: 22849 - DNA, 571 bp, Artificial Sequence
  chemically treated genomic DNA (Homo sapiens) CpG-island No: 22849
ttacgtagtcgaagtattggtcgaaatttttatcgcgtacgtgttcgacgtattatcgtaaattatgtcgttgatatcgtcgattatattgttgatcgttatcgagatggttttataacgtttatttattagttatgttatttcggcggcggtttttattgttgcggtcgttgcggtatatagcgtagataaacgcggtaattggttatggatgtaaattgcgtttaaatgcgaaatattagcgtacgcgttatcgtttattattcgtttcgaagtgttttgttattattattataggtattgttgcggtaattttttggttattcgagtcggagttatttatagtcggaagcgtacgtcgtttatacgcgtatcggatgtcgcgttggtacgaattataatggatgaagagagatttttcgttagtaaatcgcgttcgtattgtttttttagcgtcgcgttaatatgtagtttttatttatcgtttaaatttttttgcgataacgtataatttagtttcgcggaatcgagaataaagcggatcgtcgtaaacgggattttattgacgaat

SEQ ID NO: 22850 - DNA, 571 bp, Artificial Sequence
  chemically treated genomic DNA (Homo sapiens) CpG-island No: 22850
attcgtcaataaaatcccgtttacgacgatccgctttattctcgattccgcgaaactaaattatacgttatcgcaaaaaaatttaaacgataaataaaaactacatattaacgcgacgctaaaaaaacaatacgaacgcgatttactaacgaaaaatctctcttcatccattataattcgtaccaacgcgacatccgatacgcgtataaacgacgtacgcttccgactataaataactccgactcgaataaccaaaaaattaccgcaacaatacctataataataataacaaaacacttcgaaacgaataataaacgataacgcgtacgctaatatttcgcatttaaacgcaatttacatccataaccaattaccgcgtttatctacgctatataccgcaacgaccgcaacaataaaaaccgccgccgaaataacataactaataaataaacgttataaaaccatctcgataacgatcaacaatataatcgacgatatcaacgacataatttacgataatacgtcgaacacgtacgcgataaaaatttcgaccaatacttcgactacgtaa

SEQ ID NO: 22851 - DNA, 571 bp, Artificial Sequence
  chemically treated genomic DNA (Homo sapiens) CpG-island No: 22851
gttcgttaatgaagtttcgtttgcggcgattcgttttattttcgatttcgcgaagttaaattgtgcgttatcgtaggaaggtttgagcggtaagtgggggttgtatattggcgcgacgttggaaaaatagtgcgagcgcggtttgttggcgaaagatttttttttatttattgtgattcgtattagcgcggtattcgatgcgcgtatgggcggcgtacgttttcggttatgagtaatttcggttcgggtaattaggggattatcgtaataatgtttgtggtggtggtagtagaatatttcggagcggatgatgaacggtggcgcgtgcgttgatgtttcgtatttgagcgtaatttatatttataattagttatcgcgtttgtttgcgttgtgtgtcgtaacgatcgtagtaatgggggtcgtcgtcgggatggtatggttggtggatgggcgttatgaaattatttcgatggcgattagtagtatgatcggcgatgttagcggtatgatttgcgatggtgcgtcgaatacgtgcgcgatgaaggtttcgattagtgtttcggttgcgtgg

SEQ ID NO: 22852 - DNA, 571 bp, Artificial Sequence
  chemically treated genomic DNA (Homo sapiens) CpG-island No: 22852
ccacgcaaccgaaacactaatcgaaaccttcatcgcgcacgtattcgacgcaccatcgcaaatcataccgctaacatcgccgatcatactactaatcgccatcgaaataatttcataacgcccatccaccaaccataccatcccgacgacgacccccattactacgatcgttacgacacacaacgcaaacaaacgcgataactaattataaatataaattacgctcaaatacgaaacatcaacgcacgcgccaccgttcatcatccgctccgaaatattctactaccaccaccacaaacattattacgataatcccctaattacccgaaccgaaattactcataaccgaaaacgtacgccgcccatacgcgcatcgaataccgcgctaatacgaatcacaataaataaaaaaaaatctttcgccaacaaaccgcgctcgcactatttttccaacgtcgcgccaatatacaacccccacttaccgctcaaaccttcctacgataacgcacaatttaacttcgcgaaatcgaaaataaaacgaatcgccgcaaacgaaacttcattaacgaac

SEQ ID NO: 22853 - DNA, 558 bp, Artificial Sequence
  chemically treated genomic DNA (Homo sapiens) CpG-island No: 22853
gttagcgtcgttttggaaagtatcgttagcggagatttttgttcgttttttgttatatacgtttgttgggtaaatattatattatcgtgcgtttcgatatgtataatgttggtatgttcgtcgacgatggtgatatacgtttattttttatcgttttagattttggcgcgtgagaagaggattttatcgtaaggtttttggattttaacggagatttttttcgtcgttagtagtgttttggtatcggtaattgtttgcgttgttgcgttttttagtatttttagttcggcgttggtatttttatttaacgtttttagcgtcgcggtaatcggtagttttattattttcgtgtcgggaacggtgacgtttagatcgttttttattagatttggcgaaatttaggtttttatacgtttaatcggattttttagttttgcggtagtaatcgtcgtcgtaagcgttagtgaaatcggtttagtatattttagcgtcggttttatttttttttgaacggcgaggatgtatcgttgttataacgaatttaaagttcgattaatt

SEQ ID NO: 22854 - DNA, 558 bp, Artificial Sequence
  chemically treated genomic DNA (Homo sapiens) CpG-island No: 22854
aattaatcgaactttaaattcgttataacaacgatacatcctcgccgttcaaaaaaaaataaaaccgacgctaaaatatactaaaccgatttcactaacgcttacgacgacgattactaccgcaaaactaaaaaatccgattaaacgtataaaaacctaaatttcgccaaatctaataaaaaacgatctaaacgtcaccgttcccgacacgaaaataataaaactaccgattaccgcgacgctaaaaacgttaaataaaaataccaacgccgaactaaaaatactaaaaaacgcaacaacgcaaacaattaccgataccaaaacactactaacgacgaaaaaaatctccgttaaaatccaaaaaccttacgataaaatcctcttctcacgcgccaaaatctaaaacgataaaaaataaacgtatatcaccatcgtcgacgaacataccaacattatacatatcgaaacgcacgataatataatatttacccaacaaacgtatataacaaaaaacgaacaaaaatctccgctaacgatactttccaaaacgacgctaac

SEQ ID NO: 22855 - DNA, 558 bp, Artificial Sequence
  chemically treated genomic DNA (Homo sapiens) CpG-island No: 22855
ggttgatcggattttaaattcgttatggtagcggtatattttcgtcgtttaagaggaagtaaagtcggcgttgggatgtattgaatcgattttattggcgtttgcggcggcggttgttgtcgtagaattggaaggttcggttgaacgtgtagaagtttgggtttcgttaaatttgatgaagaacggtttgggcgttatcgttttcggtacgggaatggtggggttgtcgattgtcgcggcgttgggggcgttaggtggaaatgttaacgtcgggttggaagtgttgaaagacgtaatagcgtaggtaattgtcgatgttaaagtattgttggcggcggggaaagttttcgttaagatttaggaattttgcgatgaaattttttttttacgcgttaaagtttggaacggtgagaagtgggcgtgtgttattatcgtcggcgggtatattaatattgtgtatatcgagacgtacgatggtgtggtgtttatttagtaggcgtgtgtggtagagggcgagtaagagttttcgttgacggtgttttttagaacgacgttggt

SEQ ID NO: 22856 - DNA, 558 bp, Artificial Sequence
  chemically treated genomic DNA (Homo sapiens) CpG-island No: 22856
accaacgtcgttctaaaaaacaccgtcaacgaaaactcttactcgccctctaccacacacgcctactaaataaacaccacaccatcgtacgtctcgatatacacaatattaatatacccgccgacgataataacacacgcccacttctcaccgttccaaactttaacgcgtaaaaaaaaaatttcatcgcaaaattcctaaatcttaacgaaaactttccccgccgccaacaatactttaacatcgacaattacctacgctattacgtctttcaacacttccaacccgacgttaacatttccacctaacgcccccaacgccgcgacaatcgacaaccccaccattcccgtaccgaaaacgataacgcccaaaccgttcttcatcaaatttaacgaaacccaaacttctacacgttcaaccgaaccttccaattctacgacaacaaccgccgccgcaaacgccaataaaatcgattcaatacatcccaacgccgactttacttcctcttaaacgacgaaaatataccgctaccataacgaatttaaaatccgatcaacc

SEQ ID NO: 22857 - DNA, 523 bp, Artificial Sequence
  chemically treated genomic DNA (Homo sapiens) CpG-island No: 22857
  unsure (520, 522)
taggcggttagttcgaagaaggttttatggtaatgggcgtattgggtttggcgatggtcggtatgatcgcgttggtatcggtattggtttacgttttcgggtcggtaattatttcggtttacgaaatgttcggcgttaatttatcgatgttcgtcggaatattgttggcgtgcgatatgggcggtttttttttcgttaaagagttggcgggcggcgacgtagtcgcgtggttatattttgggttaattttcgggtcgatgatggggttaacgattgtgttttttatttcggtggcgttcggtattatcgaattttttgatcgtcgttatttggcgttcggcgtgttggcgggtattgtgattatttcgattggttgtatcgttggtggtttggttgttatgtatttcggtgtgtagattaacggttagtcggtggaatttattttcgttttgattttgatgaatatgatttcggtgattattgttgcgattttggtggcgttggggttgaaatttatttngna

SEQ ID NO: 22858 - DNA, 523 bp, Artificial Sequence
  chemically treated genomic DNA (Homo sapiens) CpG-island No: 22858
  unsure (2, 4)
tncnaaataaatttcaaccccaacgccaccaaaatcgcaacaataatcaccgaaatcatattcatcaaaatcaaaacgaaaataaattccaccgactaaccgttaatctacacaccgaaatacataacaaccaaaccaccaacgatacaaccaatcgaaataatcacaatacccgccaacacgccgaacgccaaataacgacgatcaaaaaattcgataataccgaacgccaccgaaataaaaaacacaatcgttaaccccatcatcgacccgaaaattaacccaaaatataaccacgcgactacgtcgccgcccgccaactctttaacgaaaaaaaaaccgcccatatcgcacgccaacaatattccgacgaacatcgataaattaacgccgaacatttcgtaaaccgaaataattaccgacccgaaaacgtaaaccaataccgataccaacgcgatcataccgaccatcgccaaacccaatacgcccattaccataaaaccttcttcgaactaaccgccta

SEQ ID NO: 22859 - DNA, 523 bp, Artificial Sequence
  chemically treated genomic DNA (Homo sapiens) CpG-island No: 22859
  unsure (2, 4)
tntnggatgaattttagttttagcgttattagaatcgtaataatgattatcgggattatgtttattaggattagggcgaaagtgaattttatcggttggtcgttgatttgtatatcggagtatatagtaattagattattagcgatataattaatcggaatggttataatgttcgttagtacgtcgagcgttagataacgacggttagaaggttcgataatgtcgagcgttatcggaatggaaaatataatcgttggttttattatcgattcgagaattaatttagagtatagttacgcggttacgtcgtcgttcgttagttttttggcgaggaagaagtcgtttatatcgtacgttagtagtgtttcggcgaatatcgatgggttagcgtcgagtatttcgtaaatcggaataattatcggttcgagaacgtgagttagtatcggtgttagcgcggttatatcgattatcgttaggtttagtgcgtttattgttataaagtttttttcgaattgatcgtttg

SEQ ID NO: 22860 - DNA, 523 bp, Artificial Sequence
  chemically treated genomic DNA (Homo sapiens) CpG-island No: 22860
  unsure (520, 522)
caaacgatcaattcgaaaaaaactttataacaataaacgcactaaacctaacgataatcgatataaccgcgctaacaccgatactaactcacgttctcgaaccgataattattccgatttacgaaatactcgacgctaacccatcgatattcgccgaaacactactaacgtacgatataaacgacttcttcctcgccaaaaaactaacgaacgacgacgtaaccgcgtaactatactctaaattaattctcgaatcgataataaaaccaacgattatattttccattccgataacgctcgacattatcgaaccttctaaccgtcgttatctaacgctcgacgtactaacgaacattataaccattccgattaattatatcgctaataatctaattactatatactccgatatacaaatcaacgaccaaccgataaaattcactttcgccctaatcctaataaacataatcccgataatcattattacgattctaataacgctaaaactaaaattcatccnana

SEQ ID NO: 22861 - DNA, 545 bp, Artificial Sequence
  chemically treated genomic DNA (Homo sapiens) CpG-island No: 22861
ttcgtgcggagaatgcgttttgtagcgagttaagtgtcgaacgggtcgtttgtttcgaattggcgtcgataagatttgtaatcgtttcggtttgggttaagttaagtttatcgttaagaaacgcgcgttcggaaaatttattagggcgagtaattcgtaggtcgggaatggttagaatgcgttttaatagtaggtcgaggattatcggatcgttatgattttgtagttttagtatattttcgtcggtgaacgagttcgggttagggaattatagcgtaattttttgatcgagtacgttgtcgtcggcgtttttaaacggaagataatcggcgtacggcggtttaggtagtttatttagtacggtttcggtaattttacgggttttgaagtcggagatgcgtaggatgttaacgtcgttacgtttcggaggcgtggtttgggttacgatagtgttattatcgtttatgatgtttttgttgttttgtgtggcggatgcgcggtgtttattcgttttacgaaaagaaaaaaggcggttaattgatcgt

SEQ ID NO: 22862 - DNA, 545 bp, Artificial Sequence
  chemically treated genomic DNA (Homo sapiens) CpG-island No: 22862
acgatcaattaaccgccttttttcttttcgtaaaacgaataaacaccgcgcatccgccacacaaaacaacaaaaacatcataaacgataataacactatcgtaacccaaaccacgcctccgaaacgtaacgacgttaacatcctacgcatctccgacttcaaaacccgtaaaattaccgaaaccgtactaaataaactacctaaaccgccgtacgccgattatcttccgtttaaaaacgccgacgacaacgtactcgatcaaaaaattacgctataattccctaacccgaactcgttcaccgacgaaaatatactaaaactacaaaatcataacgatccgataatcctcgacctactattaaaacgcattctaaccattcccgacctacgaattactcgccctaataaattttccgaacgcgcgtttcttaacgataaacttaacttaacccaaaccgaaacgattacaaatcttatcgacgccaattcgaaacaaacgacccgttcgacacttaactcgctacaaaacgcattctccgcacgaa

SEQ ID NO: 22863 - DNA, 545 bp, Artificial Sequence
  chemically treated genomic DNA (Homo sapiens) CpG-island No: 22863
gcggttagttgatcgtttttttttttttcgtagggcggataagtatcgcgtattcgttatataaagtaataggaatattatgagcgataatgatattatcgtagtttaggttacgttttcgggacgtggcggcgttggtattttgcgtattttcggttttaaagttcgtgaagttgtcgaaatcgtgttgggtaaattgtttaagtcgtcgtacgtcgattatttttcgtttaaagacgtcgacggtagcgtgttcgattaggggattgcgttatggttttttggttcgaattcgtttatcggcgaagatgtgttggaattgtaaggttatggcggttcggtgattttcgatttgttgttaaaacgtattttgattattttcggtttgcggattgttcgttttggtgagtttttcgaacgcgcgttttttaacgataaatttgatttagtttaggtcgaggcgattgtaaattttatcgacgttagttcggaataggcggttcgttcggtatttaattcgttgtaaggcgtatttttcgtacggg

SEQ ID NO: 22864 - DNA, 545 bp, Artificial Sequence
  chemically treated genomic DNA (Homo sapiens) CpG-island No: 22864
cccgtacgaaaaatacgccttacaacgaattaaataccgaacgaaccgcctattccgaactaacgtcgataaaatttacaatcgcctcgacctaaactaaatcaaatttatcgttaaaaaacgcgcgttcgaaaaactcaccaaaacgaacaatccgcaaaccgaaaataatcaaaatacgttttaacaacaaatcgaaaatcaccgaaccgccataaccttacaattccaacacatcttcgccgataaacgaattcgaaccaaaaaaccataacgcaatcccctaatcgaacacgctaccgtcgacgtctttaaacgaaaaataatcgacgtacgacgacttaaacaatttacccaacacgatttcgacaacttcacgaactttaaaaccgaaaatacgcaaaataccaacgccgccacgtcccgaaaacgtaacctaaactacgataatatcattatcgctcataatattcctattactttatataacgaatacgcgatacttatccgccctacgaaaaaaaaaaaaacgatcaactaaccgc

SEQ ID NO: 22865 - DNA, 905 bp, Artificial Sequence
  chemically treated genomic DNA (Homo sapiens) CpG-island No: 22865
cgcgatggtgtagacgatatcgttaattagtgcgttacgggataggtcgttaatcggtttgcgtatattttgtagtatcggttcgatggagattaggtcggtagaacgttgtatcgttttgtaggtggtgttatcggtgtttagattcgggaagatgaatacggtagcgcgatttgtaatcggagagttcggcgttttggatttcgtaacgttagttattatcgtagcgtcgtattgtagcggatcgtcgattattaggttaggacgttttttttgcgttagacgagttgtttcgcgaattttttttacgtcgttatttgtattagaagtatcggtggagtaggagagtatagtaacgcgcggttcgatatcgaaggtcgtagcggaattagcggattgaatcgcgatttttgttagttgtttagcggtcggattcgggttgatcgtatagttatcgtaaacgtaaatttgtttcggtagtagtatgggggatttttagagtcgacgtgtaggcgaattagttaacgtatgaattagcgtattaaattttcggtgaaaagtttaatagtatggcgatgacggtagtagtaataaatattagcgtcgagtagattttggttacggttattatatcgatatttttagtataggtggttacgtcgttatcgtcgatagagtcggaaagtatcgttgttagattatcgtttacgaatgttcgttttatatacgggtttatattgcgttcggttatttcggcgattgttttgagatgatttaagtttttcgttattagaattatcgttacgggcgtaattagtattattgtttgattattaaaagtaggagtggaaaaatgtggtagatcgaattaggtagtatggttgacgagagtaaaatcgacggtt

SEQ ID NO: 22866 - DNA, 905 bp, Artificial Sequence
  chemically treated genomic DNA (Homo sapiens) CpG-island No: 22866
aaccgtcgattttactctcgtcaaccatactacctaattcgatctaccacatttttccactcctacttttaataatcaaacaataatactaattacgcccgtaacgataattctaataacgaaaaacttaaatcatctcaaaacaatcgccgaaataaccgaacgcaatataaacccgtatataaaacgaacattcgtaaacgataatctaacaacgatactttccgactctatcgacgataacgacgtaaccacctatactaaaaatatcgatataataaccgtaaccaaaatctactcgacgctaatatttattactactaccgtcatcgccatactattaaacttttcaccgaaaatttaatacgctaattcatacgttaactaattcgcctacacgtcgactctaaaaatcccccatactactaccgaaacaaatttacgtttacgataactatacgatcaacccgaatccgaccgctaaacaactaacaaaaatcgcgattcaatccgctaattccgctacgaccttcgatatcgaaccgcgcgttactatactctcctactccaccgatacttctaatacaaataacgacgtaaaaaaaattcgcgaaacaactcgtctaacgcaaaaaaaacgtcctaacctaataatcgacgatccgctacaatacgacgctacgataataactaacgttacgaaatccaaaacgccgaactctccgattacaaatcgcgctaccgtattcatcttcccgaatctaaacaccgataacaccacctacaaaacgatacaacgttctaccgacctaatctccatcgaaccgatactacaaaatatacgcaaaccgattaacgacctatcccgtaacgcactaattaacgatatcgtctacaccatcgcg

SEQ ID NO: 22867 - DNA, 905 bp, Artificial Sequence
  chemically treated genomic DNA (Homo sapiens) CpG-island No: 22867
agtcgtcgattttattttcgttagttatgttgtttggttcggtttgttatatttttttatttttgtttttaatggttaggtaatgatgttgattgcgttcgtggcggtgattttggtggcggaaaatttaggttattttaaggtagtcgtcgggatgatcggacgtaatatggattcgtatatggggcgggtattcgtaggcgatggtttggtaacgatgtttttcggttttgtcggcggtagcggcgtgattatttatgttgaaaatatcggtgtgatggtcgtgattaaagtttattcgacgttggtgtttgttgttgttgtcgttatcgttatgttgttgggttttttatcggaaatttggtgcgttgatttatacgttgattagttcgtttgtacgtcgattttagagattttttatgttgttgtcggaataggtttacgtttacggtgattgtgcgattaattcggattcgatcgttgaatagttggtagaaatcgcgatttagttcgttgatttcgttgcggttttcggtatcgaatcgcgcgttgttatgtttttttattttatcggtatttttggtgtaggtagcgacgtagaaaaagttcgcgaagtaattcgtttggcgtaggaaaaacgttttgatttgatgatcgacggttcgttgtagtacgacgttgcggtaatggttgacgttgcgaaatttaaagcgtcgaatttttcggttgtaggtcgcgttatcgtgtttattttttcggatttgaatatcggtaatattatttataaagcggtatagcgttttgtcgatttgatttttatcgggtcgatgttgtagggtatgcgtaagtcggttaacgatttgtttcgtggcgtattggttgacgatatcgtttatattatcgcg

SEQ ID NO: 22868 - DNA, 905 bp, Artificial Sequence
  chemically treated genomic DNA (Homo sapiens) CpG-island No: 22868
cgcgataatataaacgatatcgtcaaccaatacgccacgaaacaaatcgttaaccgacttacgcataccctacaacatcgacccgataaaaatcaaatcgacaaaacgctataccgctttataaataatattaccgatattcaaatccgaaaaaataaacacgataacgcgacctacaaccgaaaaattcgacgctttaaatttcgcaacgtcaaccattaccgcaacgtcgtactacaacgaaccgtcgatcatcaaatcaaaacgtttttcctacgccaaacgaattacttcgcgaactttttctacgtcgctacctacaccaaaaataccgataaaataaaaaaacataacaacgcgcgattcgataccgaaaaccgcaacgaaatcaacgaactaaatcgcgatttctaccaactattcaacgatcgaatccgaattaatcgcacaatcaccgtaaacgtaaacctattccgacaacaacataaaaaatctctaaaatcgacgtacaaacgaactaatcaacgtataaatcaacgcaccaaatttccgataaaaaacccaacaacataacgataacgacaacaacaacaaacaccaacgtcgaataaactttaatcacgaccatcacaccgatattttcaacataaataatcacgccgctaccgccgacaaaaccgaaaaacatcgttaccaaaccatcgcctacgaatacccgccccatatacgaatccatattacgtccgatcatcccgacgactaccttaaaataacctaaattttccgccaccaaaatcaccgccacgaacgcaatcaacatcattacctaaccattaaaaacaaaaataaaaaaatataacaaaccgaaccaaacaacataactaacgaaaataaaatcgacgact

SEQ ID NO: 22869 - DNA, 586 bp, Artificial Sequence
  chemically treated genomic DNA (Homo sapiens) CpG-island No: 22869
cgttgttagcgtcgggacgtttttatattgtgtatttgtcgtatagtaacgatcgcgaaaagcgtacgcgtttacgaaatgggtgaggtttggtatcgtttttggaatggcgggtaatagttggcgtggtattttatgttttggtgcgtattgtagtaaattaatggtatacggatgtcggggatgatggataacgtttgtcgttacgtcgtttttaattacgttttcggtatatattacgtaaacgttatcgtatagttgcgatattacggttatattatgggttgatgatagaacgtagtttattggcgcgggttttatgtttaagtaaacgtagtatttgtaattgtatcgtgacgtttagcgtcgtagtcggttcgtcggtaataattaattgcggttcgtaggagaatgttagcgtaattattattcgttggcgtatattatttgaaagtttaaacggatagcgcgatataatttttacggtattcgggatttgtattttttttagtaggttaatcgttttagttttggtttttcgacgatttattggttgatgatggcggattacgtttattatttgaag

SEQ ID NO: 22870 - DNA, 586 bp, Artificial Sequence
  chemically treated genomic DNA (Homo sapiens) CpG-island No: 22870
cttcaaataataaacgtaatccgccatcatcaaccaataaatcgtcgaaaaaccaaaactaaaacgattaacctactaaaaaaaatacaaatcccgaataccgtaaaaattatatcgcgctatccgtttaaactttcaaataatatacgccaacgaataataattacgctaacattctcctacgaaccgcaattaattattaccgacgaaccgactacgacgctaaacgtcacgatacaattacaaatactacgtttacttaaacataaaacccgcgccaataaactacgttctatcatcaacccataatataaccgtaatatcgcaactatacgataacgtttacgtaatatataccgaaaacgtaattaaaaacgacgtaacgacaaacgttatccatcatccccgacatccgtataccattaatttactacaatacgcaccaaaacataaaataccacgccaactattacccgccattccaaaaacgataccaaacctcacccatttcgtaaacgcgtacgcttttcgcgatcgttactatacgacaaatacacaatataaaaacgtcccgacgctaacaacg

SEQ ID NO: 22871 - DNA, 586 bp, Artificial Sequence
  chemically treated genomic DNA (Homo sapiens) CpG-island No: 22871
ttttagatgatggacgtgattcgttattattaattaataagtcgtcgggaagttagagttaaagcgattgatttgttggaagagatgtaaatttcggatgtcgtggaagttatgtcgcgttattcgtttgagtttttaggtggtatgcgttagcgggtaatgattgcgttggtatttttttgcgagtcgtaattgattattgtcgacgaatcgattacggcgttggacgttacggtgtagttgtaggtattgcgtttgtttaaatataaagttcgcgttagtgaattgcgttttgttattagtttatgatatggtcgtggtgtcgtaattgtgcgatagcgtttacgtgatgtatgtcggaagcgtaattgaaagcggcgtgacggtagacgttatttattattttcggtattcgtatattattggtttgttgtaatgcgtattagaatatggagtattacgttagttattattcgttattttagggacggtattaaattttatttatttcgtagacgcgtgcgtttttcgcgatcgttgttatgcggtaggtgtatagtgtgaaaacgtttcggcgttgatagcg

SEQ ID NO: 22872 - DNA, 586 bp, Artificial Sequence
  chemically treated genomic DNA (Homo sapiens) CpG-island No: 22872
cgctatcaacgccgaaacgttttcacactatacacctaccgcataacaacgatcgcgaaaaacgcacgcgtctacgaaataaataaaatttaataccgtccctaaaataacgaataataactaacgtaatactccatattctaatacgcattacaacaaaccaataatatacgaataccgaaaataataaataacgtctaccgtcacgccgctttcaattacgcttccgacatacatcacgtaaacgctatcgcacaattacgacaccacgaccatatcataaactaataacaaaacgcaattcactaacgcgaactttatatttaaacaaacgcaatacctacaactacaccgtaacgtccaacgccgtaatcgattcgtcgacaataatcaattacgactcgcaaaaaaataccaacgcaatcattacccgctaacgcataccacctaaaaactcaaacgaataacgcgacataacttccacgacatccgaaatttacatctcttccaacaaatcaatcgctttaactctaacttcccgacgacttattaattaataataacgaatcacgtccatcatctaaaa

SEQ ID NO: 22873 - DNA, 594 bp, Artificial Sequence
  chemically treated genomic DNA (Homo sapiens) CpG-island No: 22873
tcgaggtgcgttattgtattatcgaaacgtttacgcgtggcgttaagttgtgcgagtagggtttttgttaaacgatattttagttgttgaatgcgcgtttgcgcgcgatgaatttttcgttgtggattttgttgatttagtcgttgtgttaatcgttgttgttgttgttcggtacgtttaagttgattttttagcgtaaagtttattcgtttttgtaggcgtttaagtatggtttgttggcgtgttagtcggagttgcggatgttgttgttgtaatcggtgatgaatttgcgtaaagcgacgtgtgcggttggcgagataataatttatcgttatttttagtcgttgacgggtcgattgtatttggcgtagtaatttttgttgattacggtttattattttagcggcggtagacggcgttggcgtacgtagatcggtaataaaatcggtaatggttatattcgttttatgttcgatagcgttgtatattcggaatcggttgggtaaaatcgttacgttatattttcgtcgttaaattttataaatttttagttgatagcgacggttagacgattattcgtttatttaatgcgtt

SEQ ID NO: 22874 - DNA, 594 bp, Artificial Sequence
  chemically treated genomic DNA (Homo sapiens) CpG-island No: 22874
aacgcattaaataaacgaataatcgtctaaccgtcgctatcaactaaaaatttataaaatttaacgacgaaaatataacgtaacgattttacccaaccgattccgaatatacaacgctatcgaacataaaacgaatataaccattaccgattttattaccgatctacgtacgccaacgccgtctaccgccgctaaaataataaaccgtaatcaacaaaaattactacgccaaatacaatcgacccgtcaacgactaaaaataacgataaattattatctcgccaaccgcacacgtcgctttacgcaaattcatcaccgattacaacaacaacatccgcaactccgactaacacgccaacaaaccatacttaaacgcctacaaaaacgaataaactttacgctaaaaaatcaacttaaacgtaccgaacaacaacaacaacgattaacacaacgactaaatcaacaaaatccacaacgaaaaattcatcgcgcgcaaacgcgcattcaacaactaaaatatcgtttaacaaaaaccctactcgcacaacttaacgccacgcgtaaacgtttcgataatacaataacgcacctcga

SEQ ID NO: 22875 - DNA, 594 bp, Artificial Sequence
  chemically treated genomic DNA (Homo sapiens) CpG-island No: 22875
agcgtattgagtggacgaatgatcgtttggtcgtcgttgttagttgaagatttatggagtttaacgacgaaagtgtagcgtggcgattttatttagtcgatttcgggtgtatagcgttgtcgggtatgagacggatgtgattattgtcgattttgttgtcgatttgcgtgcgttaacgtcgtttgtcgtcgttgaagtagtgagtcgtaattagtaagagttattgcgttaggtgtaatcgattcgttaacggttggagatggcgatggattattatttcgttaatcgtatacgtcgttttacgtaaatttattatcgattatagtaatagtattcgtagtttcggttggtacgttagtaaattatgtttgagcgtttgtaaaagcgaatgagttttgcgttggaaaattaatttaagcgtatcgggtaatagtagtagcggttaatatagcggttgaattagtaaaatttatagcggaagatttatcgcgcgtaaacgcgtatttagtaattggaatatcgtttagtagaaattttgttcgtatagtttagcgttacgcgtgaacgtttcggtaatgtagtaacgtatttcga

SEQ ID NO: 22876 - DNA, 594 bp, Artificial Sequence
  chemically treated genomic DNA (Homo sapiens) CpG-island No: 22876
tcgaaatacgttactacattaccgaaacgttcacgcgtaacgctaaactatacgaacaaaatttctactaaacgatattccaattactaaatacgcgtttacgcgcgataaatcttccgctataaattttactaattcaaccgctatattaaccgctactactattacccgatacgcttaaattaattttccaacgcaaaactcattcgcttttacaaacgctcaaacataatttactaacgtaccaaccgaaactacgaatactattactataatcgataataaatttacgtaaaacgacgtatacgattaacgaaataataatccatcgccatctccaaccgttaacgaatcgattacacctaacgcaataactcttactaattacgactcactacttcaacgacgacaaacgacgttaacgcacgcaaatcgacaacaaaatcgacaataatcacatccgtctcatacccgacaacgctatacacccgaaatcgactaaataaaatcgccacgctacactttcgtcgttaaactccataaatcttcaactaacaacgacgaccaaacgatcattcgtccactcaatacgct

SEQ ID NO: 22877 - DNA, 1109 bp, Artificial Sequence
  chemically treated genomic DNA (Homo sapiens) CpG-island No: 22877
  unsure (878)
tttcgcgcggacgttggattatgttttaagtacggtagattttcggaaattttttcgtaatttgcgtatatttagtcggacgttcgtgatttttattacgttagaaggggagtcgggtagaacgattcggagtaggagttataattatttgatcgcgggtgatttgttggattcgttatgaggtagcgtcgagagtgataatgtcgtttattcgcgatttatatattatttttttatttagtttatttattcgtcgcgaatcggttttttttttattttcggggaataatacgttatatatgttacgattcggaatggtgtcgtcgttggtaatcgttaataattgagcgttaggtcgggcggttaatatttcggtttttttgttttagattagtttggggcgaaaagtagaaaaatcgttagagggatagcgttcggaaagtatatttagcgtggcgttaaaaatacgttttggtagatttttttacggtgcggtacggcgtacgcgggagtattattcgtttatttgtaatgtatttatcgtcgcggcggtaacggtttgttgcgtaaggacgtcgagaggattatgcggtggtgttaggttttttagtttgtttgcgaatatatattttataatgattgcggaatcgattaaattacgtcgggtacgggggaaaaatagttttttagatatatcgttaatttgatgttcggcgcgattaatgcggtggtatttacgtggtatagaaagcggcgtttgtatttgaatttatagagttacgcgtttatattaatttttaggttaagattggaggttgcgattacgtagcgtaatttattcgattttagcgtttgttcggtgattgttcgttgttttntagagacggagtcgtggtgtgagcgggtaataaaaacgtcgttattttgtatacggttagaggttgcgtcggaggtcgattcgaaatgggtcgtattaacggcgatagacggggaacgttgtaagcgtgcggcgtaaagtttatttaatcgtgtcgttagttttttcgttagttttcgcgaattagtaaagataatggtcgagcgatggcgtaatattttattaaggatat

SEQ ID NO: 22878 - DNA, 1109 bp, Artificial Sequence
  chemically treated genomic DNA (Homo sapiens) CpG-island No: 22878
  unsure (232)
atatccttaataaaatattacgccatcgctcgaccattatctttactaattcgcgaaaactaacgaaaaaactaacgacacgattaaataaactttacgccgcacgcttacaacgttccccgtctatcgccgttaatacgacccatttcgaatcgacctccgacgcaacctctaaccgtatacaaaataacgacgtttttattacccgctcacaccacgactccgtctctanaaaacaacgaacaatcaccgaacaaacgctaaaatcgaataaattacgctacgtaatcgcaacctccaatcttaacctaaaaattaatataaacgcgtaactctataaattcaaatacaaacgccgctttctataccacgtaaataccaccgcattaatcgcgccgaacatcaaattaacgatatatctaaaaaactatttttcccccgtacccgacgtaatttaatcgattccgcaatcattataaaatatatattcgcaaacaaactaaaaaacctaacaccaccgcataatcctctcgacgtccttacgcaacaaaccgttaccgccgcgacgataaatacattacaaataaacgaataatactcccgcgtacgccgtaccgcaccgtaaaaaaatctaccaaaacgtatttttaacgccacgctaaatatactttccgaacgctatccctctaacgatttttctacttttcgccccaaactaatctaaaacaaaaaaaccgaaatattaaccgcccgacctaacgctcaattattaacgattaccaacgacgacaccattccgaatcgtaacatatataacgtattattccccgaaaataaaaaaaaaaccgattcgcgacgaataaataaactaaataaaaaaataatatataaatcgcgaataaacgacattatcactctcgacgctacctcataacgaatccaacaaatcacccgcgatcaaataattataactcctactccgaatcgttctacccgactccccttctaacgtaataaaaatcacgaacgtccgactaaatatacgcaaattacgaaaaaatttccgaaaatctaccgtacttaaaacataatccaacgtccgcgcgaaa

SEQ ID NO: 22879 - DNA, 1109 bp, Artificial Sequence
  chemically treated genomic DNA (Homo sapiens) CpG-island No: 22879
  unsure (232)
gtatttttgatgaagtgttgcgttatcgttcgattattgtttttattaattcgcgggggttggcggaaaaattgacggtacgattaaatgagttttacgtcgtacgtttatagcgtttttcgtttatcgtcgttgatgcggtttatttcgagtcgattttcggcgtaatttttaatcgtgtataaagtagcgacgtttttattgttcgtttatattacggtttcgtttttanagaataacgagtaattatcgaataggcgttgaaatcgggtgaattacgttgcgtggtcgtaatttttagttttgatttggggattgatatgggcgcgtgattttgtgaatttaggtgtaaacgtcgttttttgtgttacgtgggtattatcgtattggtcgcgtcggatattaggttggcggtgtatttaaagggttgtttttttttcgtattcggcgtgatttagtcgatttcgtagttattgtagagtgtatgttcgtaggtaggttggaaaatttgatattatcgtataattttttcgacgtttttgcgtagtaaatcgttgtcgtcgcggcgatggatgtattataggtagacgaatggtattttcgcgtacgtcgtgtcgtatcgtggaaagatttgttaagacgtgtttttgacgttacgttggatatgtttttcgggcgttatttttttggcgatttttttgtttttcgttttaaattggtttggaatagggagatcgggatattgatcgttcgatttggcgtttaattgttggcggttattagcggcggtattatttcggatcgtggtatgtatagcgtgttatttttcgaaggtgaagaaaaggtcggttcgcggcgggtgggtgaattggatgaggagatggtatatgagtcgcgggtgaacgatattattattttcggcgttattttatggcggatttagtaaattattcgcgattaggtgattgtgatttttgtttcgggtcgttttgttcggttttttttttggcgtggtgaaggttacggacgttcggttgaatgtgcgtaggttacgaggagattttcgggaatttgtcgtgtttaagatatggtttaacgttcgcgcggaa

SEQ ID NO: 22880 - DNA, 1109 bp, Artificial Sequence
  chemically treated genomic DNA (Homo sapiens) CpG-island No: 22880
  unsure (878)
ttccgcgcgaacgttaaaccatatcttaaacacgacaaattcccgaaaatctcctcgtaacctacgcacattcaaccgaacgtccgtaaccttcaccacgccaaaaaaaaaaccgaacaaaacgacccgaaacaaaaatcacaatcacctaatcgcgaataatttactaaatccgccataaaataacgccgaaaataataatatcgttcacccgcgactcatataccatctcctcatccaattcacccacccgccgcgaaccgaccttttcttcaccttcgaaaaataacacgctatacataccacgatccgaaataataccgccgctaataaccgccaacaattaaacgccaaatcgaacgatcaatatcccgatctccctattccaaaccaatttaaaacgaaaaacaaaaaaatcgccaaaaaaataacgcccgaaaaacatatccaacgtaacgtcaaaaacacgtcttaacaaatctttccacgatacgacacgacgtacgcgaaaataccattcgtctacctataatacatccatcgccgcgacgacaacgatttactacgcaaaaacgtcgaaaaaattatacgataatatcaaattttccaacctacctacgaacatacactctacaataactacgaaatcgactaaatcacgccgaatacgaaaaaaaaacaaccctttaaatacaccgccaacctaatatccgacgcgaccaatacgataatacccacgtaacacaaaaaacgacgtttacacctaaattcacaaaatcacgcgcccatatcaatccccaaatcaaaactaaaaattacgaccacgcaacgtaattcacccgatttcaacgcctattcgataattactcgttattctntaaaaacgaaaccgtaatataaacgaacaataaaaacgtcgctactttatacacgattaaaaattacgccgaaaatcgactcgaaataaaccgcatcaacgacgataaacgaaaaacgctataaacgtacgacgtaaaactcatttaatcgtaccgtcaatttttccgccaacccccgcgaattaataaaaacaataatcgaacgataacgcaacacttcatcaaaaatac

SEQ ID NO: 22881 - DNA, 622 bp, Artificial Sequence
  chemically treated genomic DNA (Homo sapiens) CpG-island No: 22881
  unsure (268, 270, 297, 380, 445, 502)
taggattcggggttgattttttattcgtttttgttttatatggggtacgtgggtttttcggtggcgtttgtttttgttattgtttttttgttgagcgggcgtttggatagtatttatgcgcgttttattcgttcgtggacgttggtagcgtggatttttttgacgttcggtatcgtgttcggtttcgtatgggtttattacgaattcggttggggtggttggtggttttgggattcggtagaaaacgtttcgtttatgtcgtgttggngngggaattgcgttgatgtatttattggncgttattgaataacgcgttagttttaaagcgtggatattattgttggtaattagtgttttttcgttgtgtttggtggggattnttttcgtgcgtttcggcgtgttggtattcgtatacgtcgttgcgtttgattcggcgcgcggtatngttattttgggttttatggtgtcggggaatggacggttcgttgttgttgtttgtcgngtcgtggatataaagtttcgttacgttttaaattatttcgttgtgggtttcgggaaatttttgttcggtaatcgaaatatgttttggttgggtttttggtaaattttggtggtgttgttg

SEQ ID NO: 22882 - DNA, 622 bp, Artificial Sequence
  chemically treated genomic DNA (Homo sapiens) CpG-island No: 22882
  unsure (121, 178, 243, 326, 353, 355)
caacaacaccaccaaaatttaccaaaaacccaaccaaaacatatttcgattaccgaacaaaaatttcccgaaacccacaacgaaataatttaaaacgtaacgaaactttatatccacgacncgacaaacaacaacaacgaaccgtccattccccgacaccataaaacccaaaataacnataccgcgcgccgaatcaaacgcaacgacgtatacgaataccaacacgccgaaacgcacgaaaanaatccccaccaaacacaacgaaaaaacactaattaccaacaataatatccacgctttaaaactaacgcgttattcaataacgnccaataaatacatcaacgcaattcccncnccaacacgacataaacgaaacgttttctaccgaatcccaaaaccaccaaccaccccaaccgaattcgtaataaacccatacgaaaccgaacacgataccgaacgtcaaaaaaatccacgctaccaacgtccacgaacgaataaaacgcgcataaatactatccaaacgcccgctcaacaaaaaaacaataacaaaaacaaacgccaccgaaaaacccacgtaccccatataaaacaaaaacgaataaaaaatcaaccccgaatccta

SEQ ID NO: 22883 - DNA, 622 bp, Artificial Sequence
  chemically treated genomic DNA (Homo sapiens) CpG-island No: 22883
  unsure (121, 178, 243, 326, 353, 355)
tagtaatattattaggatttgttagggatttagttaaaatatgtttcggttatcgagtaaagatttttcgggatttatagcggaatggtttaaggcgtaacggaattttgtgtttacggtncggtaaatagtagtagcgaatcgtttatttttcggtattataaagtttaggataatnatatcgcgcgtcggattagacgtaacggcgtgtacggatattagtacgtcggaacgtacgagganagtttttattagatataacgagaaggtattgattgttagtagtaatgtttacgttttgaagttggcgcgttgtttagtgacgnttagtgagtgtattagcgtagtttttntnttagtacggtataaacgaggcgttttttatcggattttagaattattagttattttagtcgagttcgtaataggtttatgcggaatcgagtacgatgtcgagcgttaggaagatttacgttgttagcgtttacggacgagtaaaacgcgtataagtgttgtttagacgttcgtttagtaaagaagtaatggtaaaagtaaacgttatcgagaaatttacgtattttatataaagtagaggcggatggaagattagtttcggattttg

SEQ ID NO: 22884 - DNA, 622 bp, Artificial Sequence
  chemically treated genomic DNA (Homo sapiens) CpG-island No: 22884
  unsure (268, 270, 297, 380, 445, 502)
caaaatccgaaactaatcttccatccgcctctactttatataaaatacgtaaatttctcgataacgtttacttttaccattacttctttactaaacgaacgtctaaacaacacttatacgcgttttactcgtccgtaaacgctaacaacgtaaatcttcctaacgctcgacatcgtactcgattccgcataaacctattacgaactcgactaaaataactaataattctaaaatccgataaaaaacgcctcgtttataccgtactaananaaaaactacgctaatacactcactaancgtcactaaacaacgcgccaacttcaaaacgtaaacattactactaacaatcaataccttctcgttatatctaataaaaactntcctcgtacgttccgacgtactaatatccgtacacgccgttacgtctaatccgacgcgcgatatnattatcctaaactttataataccgaaaaataaacgattcgctactactatttaccgnaccgtaaacacaaaattccgttacgccttaaaccattccgctataaatcccgaaaaatctttactcgataaccgaaacatattttaactaaatccctaacaaatcctaataatattacta

SEQ ID NO: 22885 - DNA, 526 bp, Artificial Sequence
  chemically treated genomic DNA (Homo sapiens) CpG-island No: 22885
agtcgtcgttttaattacggcgtataatcgtttgtgtagtcggtttttgatggtaaaattattttttattggtatcgtatgattaatcgtttgatgtggatttggcgcggtattgatttacgcgaaattttcgacgtttaggtacgtattgtgatgagcgatgtcgaacgtatcgacgatgatttatacgatacggtgattggttattgtggcggtaattggatttatgagtgggttattaggcgatggtgtggtataaaaagtttgtgcggaagacgattcgtaatttagtggtcgttattggttgtatgcggttacgttgtataatattggcgtttatttttatttgaaatgagatgattttgtcgagtaagcgtaggtttttgtttaaacgcgtttatgaagaggtcgtttagcgtttaacggggacgatgcggtaaattgagtttatcgtatacggcgttcgttattaacggttttttgtatattcgaaacgatttggtttgttcgaacgtattcggaagga

SEQ ID NO: 22886 - DNA, 526 bp, Artificial Sequence
  chemically treated genomic DNA (Homo sapiens) CpG-island No: 22886
tccttccgaatacgttcgaacaaaccaaatcgtttcgaatatacaaaaaaccgttaataacgaacgccgtatacgataaactcaatttaccgcatcgtccccgttaaacgctaaacgacctcttcataaacgcgtttaaacaaaaacctacgcttactcgacaaaatcatctcatttcaaataaaaataaacgccaatattatacaacgtaaccgcatacaaccaataacgaccactaaattacgaatcgtcttccgcacaaactttttataccacaccatcgcctaataacccactcataaatccaattaccgccacaataaccaatcaccgtatcgtataaatcatcgtcgatacgttcgacatcgctcatcacaatacgtacctaaacgtcgaaaatttcgcgtaaatcaataccgcgccaaatccacatcaaacgattaatcatacgataccaataaaaaataattttaccatcaaaaaccgactacacaaacgattatacgccgtaattaaaacgacgact

SEQ ID NO: 22887 - DNA, 526 bp, Artificial Sequence
  chemically treated genomic DNA (Homo sapiens) CpG-island No: 22887
ttttttcgaatacgttcggataggttaaatcgtttcggatatgtaaaaagtcgttgatggcgaacgtcgtgtacggtaaatttaatttgtcgtatcgttttcgttagacgttgagcggtttttttataggcgcgtttgaataaaagtttgcgtttgttcggtaaggttattttattttagatgagaataggcgttaatgttgtataacgtagtcgtatgtagttagtgacgattattgagttgcggatcgtttttcgtataggttttttgtgttatattatcgtttggtggtttatttataaatttagttgtcgttatagtagttaattatcgtatcgtataaattatcgtcggtacgttcggtatcgtttattataatacgtgtttggacgtcgaggatttcgcgtgggttaatgtcgcgttagatttatattagacggttaattatgcgatattagtgagggatggttttattattaagggtcgattgtataggcggttgtgcgtcgtgattaaagcggcgatt

SEQ ID NO: 22888 - DNA, 526 bp, Artificial Sequence
  chemically treated genomic DNA (Homo sapiens) CpG-island No: 22888
aatcgccgctttaatcacgacgcacaaccgcctatacaatcgacccttaataataaaaccatccctcactaatatcgcataattaaccgtctaatataaatctaacgcgacattaacccacgcgaaatcctcgacgtccaaacacgtattataataaacgataccgaacgtaccgacgataatttatacgatacgataattaactactataacgacaactaaatttataaataaaccaccaaacgataatataacacaaaaaacctatacgaaaaacgatccgcaactcaataatcgtcactaactacatacgactacgttatacaacattaacgcctattctcatctaaaataaaataaccttaccgaacaaacgcaaacttttattcaaacgcgcctataaaaaaaccgctcaacgtctaacgaaaacgatacgacaaattaaatttaccgtacacgacgttcgccatcaacgactttttacatatccgaaacgatttaacctatccgaacgtattcgaaaaaa

SEQ ID NO: 22889 - DNA, 1344 bp, Artificial Sequence
  chemically treated genomic DNA (Homo sapiens) CpG-island No: 22889
  unsure (538)
tttttgaatcgatttcgatgattttcgttagtattggatgttcgtgttggcgtatagttaatcggttgaattgtttgtacgtttgttcgcgttaaatattatcggcgattatgatgggattcgcgtcgttgaaattggtttggtatagatttaggcgcggatgggcggtatcggcgaacgtttttttgtcggcgacgttacgttgattcgcgtcgtcgtgcgtttgattgacggtacgttcggttatagttgggtgtaggggcgtgataaatagtacgtcgaacgttgcgcgttgattgacgcgttgatgtagtaatttcgttatttttaaaatttattagaaatttttattgtttcgttggacgttgatcgtatggtacgtattgtcgtacgttaggtcgaagtgaacgttagtcgggtcgatttttttacgatggttcgcggagataacgtatgattttggaaatcgtttttatgtttttcgtgtaggatgtttagtatagttttcgtcgtttgttaaaggttatgagcgagtcgngcgtgattgtcgttttgtattagtttaaacgcggttggtaatcgttgaatatcgttattattagcgtgttgttgacgttggtcgataacgatacgtcggtgtggttttttattttattaaataacgatatcgttaattagagttttgcgtttttatattaacgcgtcgttggttagttagtcggaataggcgattttcgcggtgacggatgaggcgatttttagcgaatagtttaacgttttttttatcggtatcgtcgttgcgtcggaagcgggtgcgacgttgattttataggtcgttagtttgagcggcggacgtatgttgcgttttattggtgcgggtattgtcgaagaacgaatgatcgtttcgtagttgtcggagtgtattttgtacgaatttatcgagcgttcgtattcgttttcgttcggtatcgatttgattttgatttgtggcgagcgtttgttggttatttcgcgaattatttatgtggaggtgtgttgatgtacgttgtcgtgaaagggggcgagaaggcgatcgacgtcgtttacgttttgtaagagagtcgacgtcgaggcgatatcgatttgttcgaattgagcgtcgtttagattgaatagtagtttaatttcgcggtagatcgcgtgatgatcgaaggcggtattgtcgatcgcgaattggcggcgttggcgttgaaataggttagcggcgataacgttgaagcgatttttttgttgcgcgtttatcgtattacgttggcgaagttttttttttcgtggattgaaaaataggggttaagtatcgggata

SEQ ID NO: 22890 - DNA, 1344 bp, Artificial Sequence
  chemically treated genomic DNA (Homo sapiens) CpG-island No: 22890
  unsure (807)
tatcccgatacttaacccctatttttcaatccacgaaaaaaaaaacttcgccaacgtaatacgataaacgcgcaacaaaaaaatcgcttcaacgttatcgccgctaacctatttcaacgccaacgccgccaattcgcgatcgacaataccgccttcgatcatcacgcgatctaccgcgaaattaaactactattcaatctaaacgacgctcaattcgaacaaatcgatatcgcctcgacgtcgactctcttacaaaacgtaaacgacgtcgatcgccttctcgccccctttcacgacaacgtacatcaacacacctccacataaataattcgcgaaataaccaacaaacgctcgccacaaatcaaaatcaaatcgataccgaacgaaaacgaatacgaacgctcgataaattcgtacaaaatacactccgacaactacgaaacgatcattcgttcttcgacaatacccgcaccaataaaacgcaacatacgtccgccgctcaaactaacgacctataaaatcaacgtcgcacccgcttccgacgcaacgacgataccgataaaaaaaacgttaaactattcgctaaaaatcgcctcatccgtcaccgcgaaaatcgcctattccgactaactaaccaacgacgcgttaatataaaaacgcaaaactctaattaacgatatcgttatttaataaaataaaaaaccacaccgacgtatcgttatcgaccaacgtcaacaacacgctaataataacgatattcaacgattaccaaccgcgtttaaactaatacaaaacgacaatcacgcncgactcgctcataacctttaacaaacgacgaaaactatactaaacatcctacacgaaaaacataaaaacgatttccaaaatcatacgttatctccgcgaaccatcgtaaaaaaatcgacccgactaacgttcacttcgacctaacgtacgacaatacgtaccatacgatcaacgtccaacgaaacaataaaaatttctaataaattttaaaaataacgaaattactacatcaacgcgtcaatcaacgcgcaacgttcgacgtactatttatcacgcccctacacccaactataaccgaacgtaccgtcaatcaaacgcacgacgacgcgaatcaacgtaacgtcgccgacaaaaaaacgttcgccgataccgcccatccgcgcctaaatctataccaaaccaatttcaacgacgcgaatcccatcataatcgccgataatatttaacgcgaacaaacgtacaaacaattcaaccgattaactatacgccaacacgaacatccaatactaacgaaaatcatcgaaatcgattcaaaaa

SEQ ID NO: 22891 - DNA, 1344 bp, Artificial Sequence
  chemically treated genomic DNA (Homo sapiens) CpG-island No: 22891
  unsure (807)
tatttcgatatttagtttttgttttttaatttacggaaaaaagagtttcgttaacgtggtgcggtaggcgcgtagtaggaaaatcgttttaacgttatcgtcgttggtttgttttagcgttagcgtcgttagttcgcggtcggtaatgtcgttttcggttattacgcgatttatcgcgaggttaagttgttgtttaatttgggcgacgtttagttcgggtaaatcggtatcgtttcggcgtcggtttttttgtagggcgtgggcggcgtcgatcgttttttcgtttttttttacggtaacgtatattagtatatttttatatgagtggttcgcggaatagttagtaggcgttcgttataggttaggattaggtcgatgtcgagcgggaacggatgcgggcgttcggtgagttcgtgtagaatgtatttcggtagttgcggagcgattattcgtttttcggtaatattcgtattagtaaggcgtaatatgcgttcgtcgtttaggttggcgatttgtaaaattagcgtcgtattcgttttcggcgtaacggcggtgtcggtggaaagggcgttgagttgttcgttggaaatcgttttattcgttatcgcgaaggtcgtttgtttcggttggttgattagcggcgcgttggtatgaaaacgtagggttttggttgacgatatcgttatttaatggggtagaaagttatatcggcgtgtcgttatcggttagcgttagtagtacgttggtggtggcgatatttagcggttgttagtcgcgtttgagttgatgtagggcgataattacgtncggttcgtttatggtttttaataggcgacgaaaattgtgttgggtattttgtacgggaagtataaaagcggtttttagggttatgcgttgttttcgcgaattatcgtaaagaagtcgattcggttggcgtttatttcggtttggcgtgcggtaatgcgtgttatacggttagcgtttagcggggtaataagggtttttgataagttttgaaagtggcgagattgttgtattagcgcgttaattagcgcgtagcgttcggcgtgttgtttattacgtttttgtatttagttgtagtcgagcgtgtcgttagttaggcgtacggcggcgcgggttagcgtggcgtcgtcggtaaaaaaacgttcgtcggtgtcgtttattcgcgtttgaatttgtattaggttagttttagcggcgcggattttattatagtcgtcggtaatgtttagcgcgaataggcgtgtaaatagtttagtcggttggttgtgcgttagtacggatatttagtgttggcggggattatcggggtcgatttaaggg

SEQ ID NO: 22892 - DNA, 1344 bp, Artificial Sequence
  chemically treated genomic DNA (Homo sapiens) CpG-island No: 22892
  unsure (538)
cccttaaatcgaccccgataatccccgccaacactaaatatccgtactaacgcacaaccaaccgactaaactatttacacgcctattcgcgctaaacattaccgacgactataataaaatccgcgccgctaaaactaacctaatacaaattcaaacgcgaataaacgacaccgacgaacgtttttttaccgacgacgccacgctaacccgcgccgccgtacgcctaactaacgacacgctcgactacaactaaatacaaaaacgtaataaacaacacgccgaacgctacgcgctaattaacgcgctaatacaacaatctcgccactttcaaaacttatcaaaaacccttattaccccgctaaacgctaaccgtataacacgcattaccgcacgccaaaccgaaataaacgccaaccgaatcgacttctttacgataattcgcgaaaacaacgcataaccctaaaaaccgcttttatacttcccgtacaaaatacccaacacaattttcgtcgcctattaaaaaccataaacgaaccgnacgtaattatcgccctacatcaactcaaacgcgactaacaaccgctaaatatcgccaccaccaacgtactactaacgctaaccgataacgacacgccgatataactttctaccccattaaataacgatatcgtcaaccaaaaccctacgttttcataccaacgcgccgctaatcaaccaaccgaaacaaacgaccttcgcgataacgaataaaacgatttccaacgaacaactcaacgccctttccaccgacaccgccgttacgccgaaaacgaatacgacgctaattttacaaatcgccaacctaaacgacgaacgcatattacgccttactaatacgaatattaccgaaaaacgaataatcgctccgcaactaccgaaatacattctacacgaactcaccgaacgcccgcatccgttcccgctcgacatcgacctaatcctaacctataacgaacgcctactaactattccgcgaaccactcatataaaaatatactaatatacgttaccgtaaaaaaaaacgaaaaaacgatcgacgccgcccacgccctacaaaaaaaccgacgccgaaacgataccgatttacccgaactaaacgtcgcccaaattaaacaacaacttaacctcgcgataaatcgcgtaataaccgaaaacgacattaccgaccgcgaactaacgacgctaacgctaaaacaaaccaacgacgataacgttaaaacgattttcctactacgcgcctaccgcaccacgttaacgaaactcttttttccgtaaattaaaaaacaaaaactaaatatcgaaata

SEQ ID NO: 22893 - DNA, 672 bp, Artificial Sequence
  chemically treated genomic DNA (Homo sapiens) CpG-island No: 22893
cgtacgggaatcgtagttttgtatttaatcgttttgcgtaaagataaattcgtcgaggtgttcgttaaagtattttattatgttattacgttcggtttcgttatgtattagtatatttagttttaaacgtttttgtttaataatggtttgtttgatatgtttcgtaatgttcgtgcggtagttgttggcgtcgagattgttttttttgaaatttagacgtagggtacgaattttcgtggtttgcgggaaggaattaatcgtggtggtcggttacgttggtagtttaaaacgcgtacgttgggttttagtacgtattttatagatattcgtacgttggttgttttgggcggtgatcgtcgttagacgtttttttatcgtcggattatgtacgcgggtagagtgacgacgtgtttgaatcggggcgttttattttgttagagttgtcgtgttattattgtttagcgtatcgcgagtagtgttagtttatggtatttttgtagggcgaaggtaaattagttttttatttttgtattaagacgcgtttttacgtttaggtcgatggggttgtgtagtaacgagtaggaagatgttatttataaattacgtttgtcgataatgtttttaatttgcgtatatttttcggtaagatcggcgcgttagacgttacgatta

SEQ ID NO: 22894 - DNA, 672 bp, Artificial Sequence
  chemically treated genomic DNA (Homo sapiens) CpG-island No: 22894
taatcgtaacgtctaacgcgccgatcttaccgaaaaatatacgcaaattaaaaacattatcgacaaacgtaatttataaataacatcttcctactcgttactacacaaccccatcgacctaaacgtaaaaacgcgtcttaatacaaaaataaaaaactaatttaccttcgccctacaaaaataccataaactaacactactcgcgatacgctaaacaataataacacgacaactctaacaaaataaaacgccccgattcaaacacgtcgtcactctacccgcgtacataatccgacgataaaaaaacgtctaacgacgatcaccgcccaaaacaaccaacgtacgaatatctataaaatacgtactaaaacccaacgtacgcgttttaaactaccaacgtaaccgaccaccacgattaattccttcccgcaaaccacgaaaattcgtaccctacgtctaaatttcaaaaaaaacaatctcgacgccaacaactaccgcacgaacattacgaaacatatcaaacaaaccattattaaacaaaaacgtttaaaactaaatatactaatacataacgaaaccgaacgtaataacataataaaatactttaacgaacacctcgacgaatttatctttacgcaaaacgattaaatacaaaactacgattcccgtacg

SEQ ID NO: 22895 - DNA, 672 bp, Artificial Sequence
  chemically treated genomic DNA (Homo sapiens) CpG-island No: 22895
tggtcgtaacgtttggcgcgtcgattttatcgagaaatatgcgtaaattaaggatattgtcggtaaacgtgatttgtgggtggtatttttttgttcgttgttgtatagttttatcgatttgagcgtggaaacgcgttttgatgtagaagtgaaaagttggtttgttttcgttttataaaaatgttatgaattggtattgttcgcgatgcgttgaatagtggtgatacggtagttttggtagagtggagcgtttcgatttaggtacgtcgttattttattcgcgtatataattcggcggtagaaaagcgtttggcggcgattatcgtttaggatagttagcgtgcgaatgtttatgaagtgcgtgttgaagtttagcgtgcgcgttttaaattgttagcgtggtcgattattacgattggttttttttcgtaaattacggaaattcgtattttgcgtttggattttaaaaagggtaatttcgacgttaataattatcgtacgggtattgcggaatatattaagtaggttattgttgagtaggaacgtttgggattggatgtgttggtatatggcgaggtcgagcgtaatgatatggtggaatattttggcgagtatttcgacggatttgtttttacgtaaaacggttgggtatagagttacggttttcgtgcg

SEQ ID NO: 22896 - DNA, 672 bp, Artificial Sequence
  chemically treated genomic DNA (Homo sapiens) CpG-island No: 22896
cgcacgaaaaccgtaactctatacccaaccgttttacgtaaaaacaaatccgtcgaaatactcgccaaaatattccaccatatcattacgctcgacctcgccatataccaacacatccaatcccaaacgttcctactcaacaataacctacttaatatattccgcaatacccgtacgataattattaacgtcgaaattaccctttttaaaatccaaacgcaaaatacgaatttccgtaatttacgaaaaaaaaccaatcgtaataatcgaccacgctaacaatttaaaacgcgcacgctaaacttcaacacgcacttcataaacattcgcacgctaactatcctaaacgataatcgccgccaaacgcttttctaccgccgaattatatacgcgaataaaataacgacgtacctaaatcgaaacgctccactctaccaaaactaccgtatcaccactattcaacgcatcgcgaacaataccaattcataacatttttataaaacgaaaacaaaccaacttttcacttctacatcaaaacgcgtttccacgctcaaatcgataaaactatacaacaacgaacaaaaaaataccacccacaaatcacgtttaccgacaatatccttaatttacgcatatttctcgataaaatcgacgcgccaaacgttacgacca

SEQ ID NO: 22897 - DNA, 595 bp, Artificial Sequence
  chemically treated genomic DNA (Homo sapiens) CpG-island No: 22897
tgtcgtcgtaggttcgttagtcggcgtacgtttacgattaatacggaatagggtgtcgatatttatcgaattatttttgttttgatgacgcgtcggaacgttatttagtagtagattggtggttagtatatgatcgtattaggtaaaatcgtttatcggtagtaggtcgatattcgtttgtttttgttgattttagtgacgagtacgtaatttacgttttatcgttagtagttttttacgcgtggagtttttcgtttaataattattttgcgttttttttagttcgcgacgtaggttaacgcgagggaaatcgagggtgtgatttaaataatgatatggtttcgttttagtaaaagttggtggtggtgagtaataagcgggaaaaatcgattaacgatcgtcgttcgcgttataggaagtgatttcggtaggtattagtatacgttatgaggtaagttttaaatcgtaaagcgaggaatggagtagacgtttcgtttcgacgtttagtagtattacgttttgatagtgggcgataaaggtacgttgagttataaaggaacgcgttttgttagttttgtaggcgaataataaggtt

SEQ ID NO: 22898 - DNA, 595 bp, Artificial Sequence
  chemically treated genomic DNA (Homo sapiens) CpG-island No: 22898
aaccttattattcgcctacaaaactaacaaaacgcgttcctttataactcaacgtacctttatcgcccactatcaaaacgtaatactactaaacgtcgaaacgaaacgtctactccattcctcgctttacgatttaaaacttacctcataacgtatactaatacctaccgaaatcacttcctataacgcgaacgacgatcgttaatcgatttttcccgcttattactcaccaccaccaacttttactaaaacgaaaccatatcattatttaaatcacaccctcgatttccctcgcgttaacctacgtcgcgaactaaaaaaaacgcaaaataattattaaacgaaaaactccacgcgtaaaaaactactaacgataaaacgtaaattacgtactcgtcactaaaatcaacaaaaacaaacgaatatcgacctactaccgataaacgattttacctaatacgatcatatactaaccaccaatctactactaaataacgttccgacgcgtcatcaaaacaaaaataattcgataaatatcgacaccctattccgtattaatcgtaaacgtacgccgactaacgaacctacgacgaca

SEQ ID NO: 22899 - DNA, 595 bp, Artificial Sequence
  chemically treated genomic DNA (Homo sapiens) CpG-island No: 22899
aattttattgttcgtttataaagttgataaagcgcgtttttttatagtttagcgtatttttatcgtttattgttagggcgtggtattgttgggcgtcgaggcgaaacgtttgttttatttttcgttttgcggtttgaagtttgttttatagcgtatattggtgtttgtcggagttattttttgtggcgcgaacggcgatcgttaatcggtttttttcgtttgttgtttattattattagtttttgttggagcggagttatattattatttgaattatattttcggtttttttcgcgttggtttgcgtcgcgagttgaaaaaagcgtaagatagttattgggcggggaattttacgcgtgaagaattgttggcggtagggcgtgaattgcgtgttcgttattgggattaataaaagtaagcgggtatcgatttgttgtcggtgggcgattttgtttggtacgattatgtattgattattagtttgttgttgggtaacgtttcggcgcgttattagaataaagatggttcggtagatatcgatattttgtttcgtattggtcgtggacgtgcgtcgattggcgaatttgcggcggta

SEQ ID NO: 22900 - DNA, 595 bp, Artificial Sequence
  chemically treated genomic DNA (Homo sapiens) CpG-island No: 22900
taccgccgcaaattcgccaatcgacgcacgtccacgaccaatacgaaacaaaatatcgatatctaccgaaccatctttattctaataacgcgccgaaacgttacccaacaacaaactaataatcaatacataatcgtaccaaacaaaatcgcccaccgacaacaaatcgatacccgcttacttttattaatcccaataacgaacacgcaattcacgccctaccgccaacaattcttcacgcgtaaaattccccgcccaataactatcttacgcttttttcaactcgcgacgcaaaccaacgcgaaaaaaaccgaaaatataattcaaataataatataactccgctccaacaaaaactaataataataaacaacaaacgaaaaaaaccgattaacgatcgccgttcgcgccacaaaaaataactccgacaaacaccaatatacgctataaaacaaacttcaaaccgcaaaacgaaaaataaaacaaacgtttcgcctcgacgcccaacaataccacgccctaacaataaacgataaaaatacgctaaactataaaaaaacgcgctttatcaactttataaacgaacaataaaatt

SEQ ID NO: 22901 - DNA, 785 bp, Artificial Sequence
  chemically treated genomic DNA (Homo sapiens) CpG-island No: 22901
  unsure (713, 749..750, 767)
cggtacgttataatttcgcgacgtattgcgttaaagtgcgcggtgagttgcggatcgtcgtatattatacgcgtacgtattagcgtttgatgtttttacgtttaggtttcgtttttttgataatcggtaaatgtttttgcggatgttattagtattttcgtcgtttcggacggacgtagtcgagtatttattttatataaaatgtcggaagaggtacgcgtattgaatagatgtataatgcgttgcgttagacgtagataaaattgtcgttcgtcgatttttcgtttatcgttagttatcgtatttattgggtaattatggaggaagataaggttaagatcggaattgtagtttaatttttagtcgtttagtttgtcgtagtcgattatcgtaaaattacgtttttcgcgttcgtttaggtgattcggtttatcgtagcgggtaattatttgaatttacgtttgttgaacgacggtatttattatggttttcgttagttaggttaagtgatcgtttatttttattatcggtagcgtatcggcgatattcgttgcggcgatgcgtaatagttgcgtttgtttgaattgacgtagcgttttaagttgttgtttttcgttatttttcggtacgcgtacgaaatatttggcgtaatttatcgcggtaggtatcggtcgtcgtcgggttggtaaaggggtgtttggtatcgagtaaantttaatttagtaataatgggataacgcgttacgtgnngttggtaatttaatcgngcgtaagcgggtattata

SEQ ID NO: 22902 - DNA, 785 bp, Artificial Sequence
  chemically treated genomic DNA (Homo sapiens) CpG-island No: 22902
  unsure (19, 36..37, 73)
tataatacccgcttacgcncgattaaattaccaacnncacgtaacgcgttatcccattattactaaattaaantttactcgataccaaacacccctttaccaacccgacgacgaccgatacctaccgcgataaattacgccaaatatttcgtacgcgtaccgaaaaataacgaaaaacaacaacttaaaacgctacgtcaattcaaacaaacgcaactattacgcatcgccgcaacgaatatcgccgatacgctaccgataataaaaataaacgatcacttaacctaactaacgaaaaccataataaataccgtcgttcaacaaacgtaaattcaaataattacccgctacgataaaccgaatcacctaaacgaacgcgaaaaacgtaattttacgataatcgactacgacaaactaaacgactaaaaattaaactacaattccgatcttaaccttatcttcctccataattacccaataaatacgataactaacgataaacgaaaaatcgacgaacgacaattttatctacgtctaacgcaacgcattatacatctattcaatacgcgtacctcttccgacattttatataaaataaatactcgactacgtccgtccgaaacgacgaaaatactaataacatccgcaaaaacatttaccgattatcaaaaaaacgaaacctaaacgtaaaaacatcaaacgctaatacgtacgcgtataatatacgacgatccgcaactcaccgcgcactttaacgcaatacgtcgcgaaattataacgtaccg

SEQ ID NO: 22903 - DNA, 785 bp, Artificial Sequence
  chemically treated genomic DNA (Homo sapiens) CpG-island No: 22903
  unsure (19, 36..37, 73)
tgtggtgttcgtttacgtncgattgaattgttagtnntacgtggcgcgttattttattattgttggattgaantttgttcgatgttaaatatttttttattagttcgacggcgatcgatgtttatcgcgatgagttgcgttagatatttcgtgcgcgtgtcggaagatgacgaagagtaatagtttgaggcgttgcgttagtttaaataggcgtagttgttacgtatcgtcgtagcggatatcgtcggtacgttatcggtgatgaaagtgagcgattatttaatttggttggcggaagttatgatagatgtcgtcgtttagtaggcgtgggtttaaatggttgttcgttacggtaagtcgaattatttgaacgaacgcgaagggcgtggttttgcggtggtcggttacggtaagttgggcggttgggagttaggttatagtttcgattttgattttatttttttttatgattgtttaatggatgcgatgattgacggtgagcgggaaatcgacgggcggtagttttatttgcgtttggcgtaacgtattatgtatttgtttagtacgcgtatttttttcggtattttgtatgaagtggatgttcgattgcgttcgttcggggcggcgggaatgttggtgatattcgtagaagtatttgtcgattattagaaaaacgaggtttggacgtgggaatattaggcgttggtgcgtgcgcgtgtagtgtacggcgattcgtagtttatcgcgtattttgacgtagtgcgtcgcgagattatgacgtgtcg

SEQ ID NO: 22904 - DNA, 785 bp, Artificial Sequence
  chemically treated genomic DNA (Homo sapiens) CpG-island No: 22904
  unsure (713, 749..750, 767)
cgacacgtcataatctcgcgacgcactacgtcaaaatacgcgataaactacgaatcgccgtacactacacgcgcacgcaccaacgcctaatattcccacgtccaaacctcgtttttctaataatcgacaaatacttctacgaatatcaccaacattcccgccgccccgaacgaacgcaatcgaacatccacttcatacaaaataccgaaaaaaatacgcgtactaaacaaatacataatacgttacgccaaacgcaaataaaactaccgcccgtcgatttcccgctcaccgtcaatcatcgcatccattaaacaatcataaaaaaaaataaaatcaaaatcgaaactataacctaactcccaaccgcccaacttaccgtaaccgaccaccgcaaaaccacgcccttcgcgttcgttcaaataattcgacttaccgtaacgaacaaccatttaaacccacgcctactaaacgacgacatctatcataacttccgccaaccaaattaaataatcgctcactttcatcaccgataacgtaccgacgatatccgctacgacgatacgtaacaactacgcctatttaaactaacgcaacgcctcaaactattactcttcgtcatcttccgacacgcgcacgaaatatctaacgcaactcatcgcgataaacatcgatcgccgtcgaactaataaaaaaatatttaacatcgaacaaanttcaatccaacaataataaaataacgcgccacgtannactaacaattcaatcgnacgtaaacgaacaccaca

SEQ ID NO: 22905 - DNA, 805 bp, Artificial Sequence
  chemically treated genomic DNA (Homo sapiens) CpG-island No: 22905
cgtttcggtagaaaagagttgttcgagcgtatttttggttttttttagcggttagttaaagtgggtagttattttttttgtcgttattttttgacgtattgatgttaatagcgttaataattcgttagtagatttcgcgacgataattggcgcgtcgggtttcgttacgggttgtttcggttggcggttaaagttagtaattagttattgggtgttatcgtttggtcgatcgatttttttgcggttgatgatacgttcggtacgtatcgcggtagtataatttgcgtttagcgtcgtacgatacgtcgttagatcgttttttattattagcgttaagcgattagggttaagtatttcgtgattgagtagacgaacgttagttgttttgagtatggtattcgttgtatttatcgcggcgattatgtcgtttatttttagtaattttagtgtattgattatcggtaattttcgttacgtacgttggattggattacgcgcgatttttagtattgtatcggtaaaggcgttataggttgttttatacgttgtttggttatcggttaaaaatgttgtcgagtagttggttttagacggtggcgggatataggtcgttagttgtacgtcggtagattttagggttgtattaatgttataggtcgtttttagcggcggtgttattagatacgttatcggatttttaagcgtgatttcggcggttgatgagagataagatcggtaagcgaaattatatgtgttagaatgtcgtattttgcgcgttattaagttattggtaagttgcgttatt

SEQ ID NO: 22906 - DNA, 805 bp, Artificial Sequence
  chemically treated genomic DNA (Homo sapiens) CpG-island No: 22906
aataacgcaacttaccaataacttaataacgcgcaaaatacgacattctaacacatataatttcgcttaccgatcttatctctcatcaaccgccgaaatcacgcttaaaaatccgataacgtatctaataacaccgccgctaaaaacgacctataacattaatacaaccctaaaatctaccgacgtacaactaacgacctatatcccgccaccgtctaaaaccaactactcgacaacatttttaaccgataaccaaacaacgtataaaacaacctataacgcctttaccgatacaatactaaaaatcgcgcgtaatccaatccaacgtacgtaacgaaaattaccgataatcaatacactaaaattactaaaaataaacgacataatcgccgcgataaatacaacgaataccatactcaaaacaactaacgttcgtctactcaatcacgaaatacttaaccctaatcgcttaacgctaataataaaaaacgatctaacgacgtatcgtacgacgctaaacgcaaattatactaccgcgatacgtaccgaacgtatcatcaaccgcaaaaaaatcgatcgaccaaacgataacacccaataactaattactaactttaaccgccaaccgaaacaacccgtaacgaaacccgacgcgccaattatcgtcgcgaaatctactaacgaattattaacgctattaacatcaatacgtcaaaaaataacgacaaaaaaaataactacccactttaactaaccgctaaaaaaaaccaaaaatacgctcgaacaactcttttctaccgaaacg

SEQ ID NO: 22907 - DNA, 805 bp, Artificial Sequence
  chemically treated genomic DNA (Homo sapiens) CpG-island No: 22907
aatggcgtagtttattagtggtttaatgacgcgtaagatacggtattttggtatatgtagtttcgtttatcggttttattttttattaatcgtcgggattacgtttgagaattcgatggcgtatttggtggtatcgtcgttggaagcgatttatggtattgatgtagttttgaagtttgtcgacgtatagttggcgatttatgtttcgttatcgtttgaaattaattattcggtagtatttttaatcggtagttaggtagcgtgtaaagtagtttgtaacgtttttatcgatgtagtgttggaaatcgcgcgtaatttaatttagcgtgcgtaacggaggttgtcgatgattaatgtattgggattgttggaagtggacggtatggtcgtcgcgatagatgtagcggatgttatgtttaaagtagttaacgttcgtttgtttagttacgaagtgtttgattttggtcgtttaacgttggtggtggaaggcgatttggcggcgtgtcgtgcggcgttggacgtaggttgtgttgtcgcgatgcgtatcgggcgtgttattagtcgtaaggagatcggtcggttagacgatgatatttagtggttggttattggttttaatcgttagtcgaagtaattcgtaacggaattcgacgcgttagttatcgtcgcggaatttgttgacgagttgttggcgttgttaatattagtacgttagggaatgacggtaggagaagtggttgtttattttggttggtcgttggaaaaagttagaaatgcgttcgaatagtttttttttgtcgggacg

SEQ ID NO: 22908 - DNA, 805 bp, Artificial Sequence
  chemically treated genomic DNA (Homo sapiens) CpG-island No: 22908
cgtcccgacaaaaaaaaactattcgaacgcatttctaactttttccaacgaccaaccaaaataaacaaccacttctcctaccgtcattccctaacgtactaatattaacaacgccaacaactcgtcaacaaattccgcgacgataactaacgcgtcgaattccgttacgaattacttcgactaacgattaaaaccaataaccaaccactaaatatcatcgtctaaccgaccgatctccttacgactaataacacgcccgatacgcatcgcgacaacacaacctacgtccaacgccgcacgacacgccgccaaatcgccttccaccaccaacgttaaacgaccaaaatcaaacacttcgtaactaaacaaacgaacgttaactactttaaacataacatccgctacatctatcgcgacgaccataccgtccacttccaacaatcccaatacattaatcatcgacaacctccgttacgcacgctaaattaaattacgcgcgatttccaacactacatcgataaaaacgttacaaactactttacacgctacctaactaccgattaaaaatactaccgaataattaatttcaaacgataacgaaacataaatcgccaactatacgtcgacaaacttcaaaactacatcaataccataaatcgcttccaacgacgataccaccaaatacgccatcgaattctcaaacgtaatcccgacgattaataaaaaataaaaccgataaacgaaactacatataccaaaataccgtatcttacgcgtcattaaaccactaataaactacgccatt

SEQ ID NO: 22909 - DNA, 713 bp, Artificial Sequence
  chemically treated genomic DNA (Homo sapiens) CpG-island No: 22909
  unsure (670..)
tcgttggcgagttggcgtatataacgatcgttagttgttgtaattttgttatattttagaagtggtcgatagtgcgttgaaaattttcgacgaagcgggattatttggcgaattgcgtttgcgttaggggttggcgttggtggcgatggtcggtgtaggcgttattcgtaattcgttgtattgttatcgtttttggtagtaattgaaaggttagtcggtcgaatttatttggtagttcgatgacggtattagtttggtggtagtattgcgtatcggttcgatcgaaagtttgatttaggggttgtattagttcgtttttcgcgtagaaaaacgtatcggtttggtattgttcggtaagggtaatatcggttttcgttggttggaattgttcgttcgtgagtagagtacgttttcggtacgtatcggttttgagtttgtgttggtaggtgtggtggatagtcgtcgtagtttgttgagttatgacgggttggacgttagtcgcgcgttagttttttttaacgatgaagcggttgagtaggatgaagagtcgttgtttttgtggatgcgcgtttattcgtatgatgatttagtggtgttggacgttatagttagttagtagtttgttgattagtattttgatttcgttagtacggttttttacgtattagtnngtataaattggcggagtagcgatacgaataaatatcgttaga

SEQ ID NO: 22910 - DNA, 713 bp, Artificial Sequence
  chemically treated genomic DNA (Homo sapiens) CpG-island No: 22910
  unsure (43..)
tctaacgatatttattcgtatcgctactccgccaatttatacnnactaatacgtaaaaaaccgtactaacgaaatcaaaatactaatcaacaaactactaactaactataacgtccaacaccactaaatcatcatacgaataaacgcgcatccacaaaaacaacgactcttcatcctactcaaccgcttcatcgttaaaaaaaactaacgcgcgactaacgtccaacccgtcataactcaacaaactacgacgactatccaccacacctaccaacacaaactcaaaaccgatacgtaccgaaaacgtactctactcacgaacgaacaattccaaccaacgaaaaccgatattacccttaccgaacaataccaaaccgatacgtttttctacgcgaaaaacgaactaatacaacccctaaatcaaactttcgatcgaaccgatacgcaatactaccaccaaactaataccgtcatcgaactaccaaataaattcgaccgactaacctttcaattactaccaaaaacgataacaatacaacgaattacgaataacgcctacaccgaccatcgccaccaacgccaacccctaacgcaaacgcaattcgccaaataatcccgcttcgtcgaaaattttcaacgcactatcgaccacttctaaaatataacaaaattacaacaactaacgatcgttatatacgccaactcgccaacga

SEQ ID NO: 22911 - DNA, 713 bp, Artificial Sequence
  chemically treated genomic DNA (Homo sapiens) CpG-island No: 22911
  unsure (43..)
tttggcgatatttattcgtgtcgttgtttcgttagtttgtgtnngttgatacgtgggaaatcgtgttggcgaaattaagatattgattagtaagttgttggttggttgtaacgtttagtattattaaattattatacggatgggcgcgtatttataggaataacgattttttattttgtttaatcgttttatcgttgaagaaggttaacgcgcggttggcgtttagttcgttatagtttaataggttgcggcggttgtttattatatttgttagtataaatttaaagtcggtacgtgtcgaaagcgtgttttgtttacgggcgaatagttttagttaacgggaatcgatattgtttttatcgaataatattaggtcgatgcgtttttttgcgcggaagacggattgatgtagtttttgaattaggttttcggtcgggtcggtgcgtagtattgttattaggttgatgtcgttatcggattgttaggtaaattcgatcggttggttttttagttgttgttagaagcggtggtaatgtagcgggttacgggtgacgtttgtatcgattatcgttattagcgttagtttttgacgtaggcgtagttcgttaggtaatttcgtttcgtcgaggatttttagcgtattgtcggttatttttgaggtgtagtaaaattgtagtaattggcgatcgttatgtacgttaattcgttagcgg

SEQ ID NO: 22912 - DNA, 713 bp, Artificial Sequence
  chemically treated genomic DNA (Homo sapiens) CpG-island No: 22912
  unsure (670..)
ccgctaacgaattaacgtacataacgatcgccaattactacaattttactacacctcaaaaataaccgacaatacgctaaaaatcctcgacgaaacgaaattacctaacgaactacgcctacgtcaaaaactaacgctaataacgataatcgatacaaacgtcacccgtaacccgctacattaccaccgcttctaacaacaactaaaaaaccaaccgatcgaatttacctaacaatccgataacgacatcaacctaataacaatactacgcaccgacccgaccgaaaacctaattcaaaaactacatcaatccgtcttccgcgcaaaaaaacgcatcgacctaatattattcgataaaaacaatatcgattcccgttaactaaaactattcgcccgtaaacaaaacacgctttcgacacgtaccgactttaaatttatactaacaaatataataaacaaccgccgcaacctattaaactataacgaactaaacgccaaccgcgcgttaaccttcttcaacgataaaacgattaaacaaaataaaaaatcgttattcctataaatacgcgcccatccgtataataatttaataatactaaacgttacaaccaaccaacaacttactaatcaatatcttaatttcgccaacacgatttcccacgtatcaacnnacacaaactaacgaaacaacgacacgaataaatatcgccaaa

SEQ ID NO: 22913 - DNA, 534 bp, Artificial Sequence
  chemically treated genomic DNA (Homo sapiens) CpG-island No: 22913
cgatttgtacgcggtagatggcgatgagtataaatttttttgcgttgcgaaaggcggcggttttgttaataaaacgtatttttattaggaaattaaagttttgttgattttcggtaaattgaaaaattttttcgtcgagaaaatgcgtattttcggtattgtagtttgttcgtcgtattatatcgcgtttgtgattggcggtacgtttgcggaaattaatttgaaaatcgttaagttagtaagcgtttattattacgatgaattgtcgacggaagggatcgaatatggttaggcgtttcgcgatgtttagttggaataggaattgttggaagaggtttagaaattcggttttggcgcgtagtttggcggtaaatatttcgcgtacgatattcgcgttattcgtttgttacgttacggcgtattttgttcggtcggtatgggcgttttttgtttcgttgatcgtaatattaaagcgaaaattaatcgcgaaggtatttggatcgaaaaattggaatataatttaggttagtatat

SEQ ID NO: 22914 - DNA, 534 bp, Artificial Sequence
  chemically treated genomic DNA (Homo sapiens) CpG-island No: 22914
atatactaacctaaattatattccaatttttcgatccaaataccttcgcgattaattttcgctttaatattacgatcaacgaaacaaaaaacgcccataccgaccgaacaaaatacgccgtaacgtaacaaacgaataacgcgaatatcgtacgcgaaatatttaccgccaaactacgcgccaaaaccgaatttctaaacctcttccaacaattcctattccaactaaacatcgcgaaacgcctaaccatattcgatcccttccgtcgacaattcatcgtaataataaacgcttactaacttaacgattttcaaattaatttccgcaaacgtaccgccaatcacaaacgcgatataatacgacgaacaaactacaataccgaaaatacgcattttctcgacgaaaaaatttttcaatttaccgaaaatcaacaaaactttaatttcctaataaaaatacgttttattaacaaaaccgccgcctttcgcaacgcaaaaaaatttatactcatcgccatctaccgcgtacaaatcg

SEQ ID NO: 22915 - DNA, 534 bp, Artificial Sequence
  chemically treated genomic DNA (Homo sapiens) CpG-island No: 22915
atgtattggtttgggttgtgttttagtttttcgatttagatattttcgcggttgattttcgttttaatgttacggttagcggagtaggagacgtttatgtcgatcgggtaggatgcgtcgtgacgtggtagacggataacgcgaatgtcgtgcgcgaagtatttatcgttaaattgcgcgttaagatcgagtttttgggttttttttagtagtttttgttttagttggatatcgcggaacgtttgattatgttcgatttttttcgtcggtagtttatcgtaatagtgagcgtttgttaatttgacggtttttaggttggttttcgtagacgtatcgttaattataaacgcgatatggtacggcgggtaggttgtagtatcgagggtacgtattttttcgacgaggaagttttttagtttgtcgggagttagtagggttttggttttttggtagagatacgttttgttggtagagtcgtcgtttttcgtaacgtaaaggaatttgtatttatcgttatttatcgcgtataggtcg

SEQ ID NO: 22916 - DNA, 534 bp, Artificial Sequence
  chemically treated genomic DNA (Homo sapiens) CpG-island No: 22916
cgacctatacgcgataaataacgataaatacaaattcctttacgttacgaaaaacgacgactctaccaacaaaacgtatctctaccaaaaaaccaaaaccctactaactcccgacaaactaaaaaacttcctcgtcgaaaaaatacgtaccctcgatactacaacctacccgccgtaccatatcgcgtttataattaacgatacgtctacgaaaaccaacctaaaaaccgtcaaattaacaaacgctcactattacgataaactaccgacgaaaaaaatcgaacataatcaaacgttccgcgatatccaactaaaacaaaaactactaaaaaaaacccaaaaactcgatcttaacgcgcaatttaacgataaatacttcgcgcacgacattcgcgttatccgtctaccacgtcacgacgcatcctacccgatcgacataaacgtctcctactccgctaaccgtaacattaaaacgaaaatcaaccgcgaaaatatctaaatcgaaaaactaaaacacaacccaaaccaatacat

SEQ ID NO: 22917 - DNA, 522 bp, Artificial Sequence
  chemically treated genomic DNA (Homo sapiens) CpG-island No: 22917
  unsure (300)
ttagtcgaggcggtatttagcgtttagcgcgtattcggcgtaaaatttatcgcgggcgggattaatttgttggatttgatgaagttggaaattgaaacgtttatttattttatcgatgtgaacggtttcgggttcgataagattgaagtgatcgacgcgggtgggttgcgtatcggcgtattggtacggaatatcgatttggcggtttacgagcgcgtgcgtcgtgattacgcggtattttttcgcgttttgttcgttggcgcgtttggttagttacgtaattaggtaatttacgtagtnaatttgttttagcgtacgcgttgttttttatttttacgatattaattagttttgtaataaagcgttgttcgggagcggttgcgcggcgtttgaaggttttagcgttagtacgcggtggtaagcgtaacgacgttgtattgtatttattttttattattaataattagttggttagcgattttagatagggagtttagaacggttagtttggtagatatttta

SEQ ID NO: 22918 - DNA, 522 bp, Artificial Sequence
  chemically treated genomic DNA (Homo sapiens) CpG-island No: 22918
  unsure (223)
taaaatatctaccaaactaaccgttctaaactccctatctaaaatcgctaaccaactaattattaataataaaaaataaatacaatacaacgtcgttacgcttaccaccgcgtactaacgctaaaaccttcaaacgccgcgcaaccgctcccgaacaacgctttattacaaaactaattaatatcgtaaaaataaaaaacaacgcgtacgctaaaacaaattnactacgtaaattacctaattacgtaactaaccaaacgcgccaacgaacaaaacgcgaaaaaataccgcgtaatcacgacgcacgcgctcgtaaaccgccaaatcgatattccgtaccaatacgccgatacgcaacccacccgcgtcgatcacttcaatcttatcgaacccgaaaccgttcacatcgataaaataaataaacgtttcaatttccaacttcatcaaatccaacaaattaatcccgcccgcgataaattttacgccgaatacgcgctaaacgctaaataccgcctcgactaa

SEQ ID NO: 22919 - DNA, 522 bp, Artificial Sequence
  chemically treated genomic DNA (Homo sapiens) CpG-island No: 22919
  unsure (223)
taaagtatttattaaattgatcgttttggattttttgtttaaaatcgttgattagttgattgttggtggtgggaagtgggtgtaatgtagcgtcgttacgtttattatcgcgtgttgacgttaaagtttttaagcgtcgcgtagtcgttttcgggtagcgttttattgtagggttgattggtgtcgtaaaaatagggggtagcgcgtgcgttggagtagattnattgcgtgggttgtttgattacgtaattgattagacgcgttagcgagtagggcgcgggagagtatcgcgtaattacgacgtacgcgttcgtgagtcgttaggtcggtgtttcgtattagtgcgtcgatgcgtagtttattcgcgtcggttattttaattttatcgagttcgaggtcgtttatatcgataaggtgggtgggcgttttaatttttagttttattaggtttagtagattggtttcgttcgcgataaattttgcgtcgggtacgcgttgagcgttaagtgtcgtttcggttgg

SEQ ID NO: 22920 - DNA, 522 bp, Artificial Sequence
  chemically treated genomic DNA (Homo sapiens) CpG-island No: 22920
  unsure (300)
ccaaccgaaacgacacttaacgctcaacgcgtacccgacgcaaaatttatcgcgaacgaaaccaatctactaaacctaataaaactaaaaattaaaacgcccacccaccttatcgatataaacgacctcgaactcgataaaattaaaataaccgacgcgaataaactacgcatcgacgcactaatacgaaacaccgacctaacgactcacgaacgcgtacgtcgtaattacgcgatactctcccgcgccctactcgctaacgcgtctaatcaattacgtaatcaaacaacccacgcaatnaatctactccaacgcacgcgctaccccctatttttacgacaccaatcaaccctacaataaaacgctacccgaaaacgactacgcgacgcttaaaaactttaacgtcaacacgcgataataaacgtaacgacgctacattacacccacttcccaccaccaacaatcaactaatcaacgattttaaacaaaaaatccaaaacgatcaatttaataaatacttta

SEQ ID NO: 22921 - DNA, 1063 bp, Artificial Sequence
  chemically treated genomic DNA (Homo sapiens) CpG-island No: 22921
attcgttatattttggttcgttatgaatagggcgcgggttttatcgtttagggaatggcgcgtatcgacggtaaatcggcggtttgtatggtttgtagcggatcgggtgcgattaatttggtgatcgttattgtcgatgcgcggttggattttatttcgttgatttgtattattggttaggttttcgtttcgatgatcggtatcgacgttttttaggaagtggatatttacggtatttttatttttattattaaatataattatttggttagatatatcgaagaattttcgtaggttatgagcgatgtttttcgtattgcgtaattaggtcgtttaggttcggtgtggatagatatttttaaggatgtgtaaacggtagtttttgagattgaaatatagttcgttatggtagaaaaagtcgtcgttttcgtttttagcgaagaaagtattcgtgacgtagcggcgatgattaacgttgttaaacgttcggtgttttatttgggcggcggtgtgattaatgcgttcgtacgggtgcgtgaattggcggagaaagcgtaattgtttattattatgattttaatggcgttgggtatgttgttaaaagcgtattcgttgtcgttgggtatgttggggattacggttcgtagtattaattatattttgtaggaggcggatttgttgatagtgtttgaattggcgggcgtttagattgtcgatattgacgttaatgttagtaagttcgtatcggttattcgttatatcgcgttttagacggtaattattggttgtgatcgtaatttggcggatagcgtcgttttttcgtatagcgtcgatgatatcggtaaagtcgcggcgtaaagacggttttttttttgttaggcgtattttttcggtgtttagtttggcgaaggcgcgcgtaattcggcgaattttatcgacggtaagaaagtttttattggtgacgtcgttcggtttgtagttattcggtaggtagtaggtgtaacgaaagttatatatatcggtaatcgataggcgtaagtagtaaaatttacgcgtaaatgta

SEQ ID NO: 22922 - DNA, 1063 bp, Artificial Sequence
  chemically treated genomic DNA (Homo sapiens) CpG-island No: 22922
tacatttacgcgtaaattttactacttacgcctatcgattaccgatatatataactttcgttacacctactacctaccgaataactacaaaccgaacgacgtcaccaataaaaactttcttaccgtcgataaaattcgccgaattacgcgcgccttcgccaaactaaacaccgaaaaaatacgcctaacaaaaaaaaaaccgtctttacgccgcgactttaccgatatcatcgacgctatacgaaaaaacgacgctatccgccaaattacgatcacaaccaataattaccgtctaaaacgcgatataacgaataaccgatacgaacttactaacattaacgtcaatatcgacaatctaaacgcccgccaattcaaacactatcaacaaatccgcctcctacaaaatataattaatactacgaaccgtaatccccaacatacccaacgacaacgaatacgcttttaacaacatacccaacgccattaaaatcataataataaacaattacgctttctccgccaattcacgcacccgtacgaacgcattaatcacaccgccgcccaaataaaacaccgaacgtttaacaacgttaatcatcgccgctacgtcacgaatactttcttcgctaaaaacgaaaacgacgactttttctaccataacgaactatatttcaatctcaaaaactaccgtttacacatccttaaaaatatctatccacaccgaacctaaacgacctaattacgcaatacgaaaaacatcgctcataacctacgaaaattcttcgatatatctaaccaaataattatatttaataataaaaataaaaataccgtaaatatccacttcctaaaaaacgtcgataccgatcatcgaaacgaaaacctaaccaataatacaaatcaacgaaataaaatccaaccgcgcatcgacaataacgatcaccaaattaatcgcacccgatccgctacaaaccatacaaaccgccgatttaccgtcgatacgcgccattccctaaacgataaaacccgcgccctattcataacgaaccaaaatataacgaat

SEQ ID NO: 22923 - DNA, 1063 bp, Artificial Sequence
  chemically treated genomic DNA (Homo sapiens) CpG-island No: 22923
tgtatttgcgcgtaagttttattatttgcgtttgtcgattatcgatgtgtgtaattttcgttgtatttattgtttgtcggatggttataaatcgagcggcgttattaataaaggtttttttatcgtcgatgaaattcgtcgggttacgcgcgttttcgttagattgggtatcgaaaaagtgcgtttgataggaggagagtcgtttttacgtcgcgattttatcgatattatcgacgttgtgcgggaaaacgacgttattcgttagattgcggttataattaatggttatcgtttggaacgcgatgtggcgagtggtcgatgcgggtttattggtattaacgttagtgtcgatagtttggacgttcgttagtttaagtattattaataaattcgttttttgtaaaatatagttggtgttgcgagtcgtgatttttagtatatttagcgataacggatgcgtttttggtaatatgtttagcgttattaaagttatggtggtaggtagttgcgtttttttcgttagtttacgtattcgtgcgggcgtattgattatatcgtcgtttagataaagtatcgggcgtttggtagcgttaattatcgtcgttgcgttacgaatgtttttttcgttaaaggcgggggcggcggttttttttgttatagcgggttgtgttttaattttaaaaattgtcgtttgtatatttttaggaatgtttatttatatcgggtttgggcggtttgattgcgtaatgcggaaggtatcgtttatgatttgcgggagtttttcgatatgtttgattagatagttgtgtttggtgatggggatagagatgtcgtaggtgtttattttttggaaggcgtcggtgtcgattatcgaggcgggaatttgattagtgatgtaaattagcgggatggagtttagtcgcgtatcggtaatggcggttattaggttagtcgtattcggttcgttataggttatatagatcgtcggtttatcgtcggtgcgcgttattttttgagcgataaagttcgcgttttgtttatgacgggttagaatatggcggat

SEQ ID NO: 22924 - DNA, 1063 bp, Artificial Sequence
  chemically treated genomic DNA (Homo sapiens) CpG-island No: 22924
atccgccatattctaacccgtcataaacaaaacgcgaactttatcgctcaaaaaataacgcgcaccgacgataaaccgacgatctatataacctataacgaaccgaatacgactaacctaataaccgccattaccgatacgcgactaaactccatcccgctaatttacatcactaatcaaattcccgcctcgataatcgacaccgacgccttccaaaaaataaacacctacgacatctctatccccatcaccaaacacaactatctaatcaaacatatcgaaaaactcccgcaaatcataaacgataccttccgcattacgcaatcaaaccgcccaaacccgatataaataaacattcctaaaaatatacaaacgacaatttttaaaattaaaacacaacccgctataacaaaaaaaaccgccgcccccgcctttaacgaaaaaaacattcgtaacgcaacgacgataattaacgctaccaaacgcccgatactttatctaaacgacgatataatcaatacgcccgcacgaatacgtaaactaacgaaaaaaacgcaactacctaccaccataactttaataacgctaaacatattaccaaaaacgcatccgttatcgctaaatatactaaaaatcacgactcgcaacaccaactatattttacaaaaaacgaatttattaataatacttaaactaacgaacgtccaaactatcgacactaacgttaataccaataaacccgcatcgaccactcgccacatcgcgttccaaacgataaccattaattataaccgcaatctaacgaataacgtcgttttcccgcacaacgtcgataatatcgataaaatcgcgacgtaaaaacgactctcctcctatcaaacgcactttttcgatacccaatctaacgaaaacgcgcgtaacccgacgaatttcatcgacgataaaaaaacctttattaataacgccgctcgatttataaccatccgacaaacaataaatacaacgaaaattacacacatcgataatcgacaaacgcaaataataaaacttacgcgcaaataca

SEQ ID NO: 22925 - DNA, 509 bp, Artificial Sequence
  chemically treated genomic DNA (Homo sapiens) CpG-island No: 22925
gtttcggcgtaaataattttgtataacgcgttataaagggcgtattgcggtggtattagtagtatcgggttttttttcgtcgtttttatttgtttttttatttgtggtatcgtattttggaattggttgagtatattcgggtcgatcggtacgttgtcgagtattattttttcgttttgttgcgtttgatttattacgttggttagtagattttttagtttattatttagcgtatatatcgttagtttttgtttgcgaacgaacggatgggtaatgttgcgtcgtaatgttaggcgtatatcggtcgttagtagaatatgatttttcgttatcgtgttattggcgattagtacggtggcgatggtgacgatatcgcgtagggaaacgttttcggttagtagcgttcggtatatttttagtaattggttgtaattgagcgtcgcgtttaaatttttcgttagacgcggtgtcgtcgacgataaacggttatgtaattgcgtaatattatt

SEQ ID NO: 22926 - DNA, 509 bp, Artificial Sequence
  chemically treated genomic DNA (Homo sapiens) CpG-island No: 22926
aataatattacgcaattacataaccgtttatcgtcgacgacaccgcgtctaacgaaaaatttaaacgcgacgctcaattacaaccaattactaaaaatataccgaacgctactaaccgaaaacgtttccctacgcgatatcgtcaccatcgccaccgtactaatcgccaataacacgataacgaaaaatcatattctactaacgaccgatatacgcctaacattacgacgcaacattacccatccgttcgttcgcaaacaaaaactaacgatatatacgctaaataataaactaaaaaatctactaaccaacgtaataaatcaaacgcaacaaaacgaaaaaataatactcgacaacgtaccgatcgacccgaatatactcaaccaattccaaaatacgataccacaaataaaaaaacaaataaaaacgacgaaaaaaaacccgatactactaataccaccgcaatacgccctttataacgcgttatacaaaattatttacgccgaaac

SEQ ID NO: 22927 - DNA, 509 bp, Artificial Sequence
  chemically treated genomic DNA (Homo sapiens) CpG-island No: 22927
gatgatattacgtagttgtataatcgtttatcgtcgacggtatcgcgtttggcggaagatttgagcgcgacgtttaattatagttagttgttgaaagtgtatcgggcgttgttgatcgaaggcgtttttttgcgcgatatcgttattatcgttatcgtgttggtcgttagtagtacggtgacgaaagattatattttgttggcggtcgatgtgcgtttggtattgcggcgtagtattatttattcgttcgttcgtaagtaggagttgacggtgtatacgttgaataatgagttggaaaatttgttgattaacgtggtgaattaggcgtaatagggcgggaaagtgatgttcgatagcgtgtcggtcgattcgaatatgtttaattagttttagagtacgatgttataggtgaaagagtagatgaaagcggcggggaaagattcggtgttgttggtgttatcgtagtgcgttttttgtggcgcgttatgtaaggttgtttgcgtcggggt

SEQ ID NO: 22928 - DNA, 509 bp, Artificial Sequence
  chemically treated genomic DNA (Homo sapiens) CpG-island No: 22928
accccgacgcaaacaaccttacataacgcgccacaaaaaacgcactacgataacaccaacaacaccgaatctttccccgccgctttcatctactctttcacctataacatcgtactctaaaactaattaaacatattcgaatcgaccgacacgctatcgaacatcactttcccgccctattacgcctaattcaccacgttaatcaacaaattttccaactcattattcaacgtatacaccgtcaactcctacttacgaacgaacgaataaataatactacgccgcaataccaaacgcacatcgaccgccaacaaaatataatctttcgtcaccgtactactaacgaccaacacgataacgataataacgatatcgcgcaaaaaaacgccttcgatcaacaacgcccgatacactttcaacaactaactataattaaacgtcgcgctcaaatcttccgccaaacgcgataccgtcgacgataaacgattatacaactacgtaatatcatc

SEQ ID NO: 22929 - DNA, 588 bp, Artificial Sequence
  chemically treated genomic DNA (Homo sapiens) CpG-island No: 22929
tattgttgcggtttttgttagcgcggtattatgcgcgttaatggcggcggtaatcgttgagcgatgtatattttataaattaagatttagttcggtaaataaatttattgtggttttcgtatagtacggttcgtttatatttagtgttggcgtatttattgaataagggtttaaaaagtcgttcgtcgagatacgttggcggttgagtatttttaacgttgcgatttgtaattgtgaatcggtatttaataaatcggtttgggattgcgtttttttttttcgtagtttcgtttcggcgagggtgtgtgaattatttagcgttcgttggattagcgtatttagttgcgggttattgagttgtttttattattgcgtttgcggttagtcggagttggtaagatgaatatcgtcggttagtttgatttgtttcggtttgagttgttgatgaggtgtagaatttttacgtattagggtatagtcggaaattagcgtcgtgttgtcgagaatgttgtataatagtagacgtgaaagttgacgattgattattgcgtggttttttattatggtttttaattcgtgttattagat

SEQ ID NO: 22930 - DNA, 588 bp, Artificial Sequence
  chemically treated genomic DNA (Homo sapiens) CpG-island No: 22930
atctaataacacgaattaaaaaccataataaaaaaccacgcaataatcaatcgtcaactttcacgtctactattatacaacattctcgacaacacgacgctaatttccgactataccctaatacgtaaaaattctacacctcatcaacaactcaaaccgaaacaaatcaaactaaccgacgatattcatcttaccaactccgactaaccgcaaacgcaataataaaaacaactcaataacccgcaactaaatacgctaatccaacgaacgctaaataattcacacaccctcgccgaaacgaaactacgaaaaaaaaaaacgcaatcccaaaccgatttattaaataccgattcacaattacaaatcgcaacgttaaaaatactcaaccgccaacgtatctcgacgaacgactttttaaacccttattcaataaatacgccaacactaaatataaacgaaccgtactatacgaaaaccacaataaatttatttaccgaactaaatcttaatttataaaatatacatcgctcaacgattaccgccgccattaacgcgcataataccgcgctaacaaaaaccgcaacaata

SEQ ID NO: 22931 - DNA, 588 bp, Artificial Sequence
  chemically treated genomic DNA (Homo sapiens) CpG-island No: 22931
gtttagtaatacgaattaggggttatgatggagagttacgtaatgattaatcgttaatttttacgtttgttgttgtgtagtattttcggtagtacgacgttgattttcggttgtgttttggtacgtaaggattttgtattttattaatagtttaaatcggaataaattaaattggtcgacgatatttattttgttagtttcggttggtcgtaggcgtagtggtggaaataatttaatgattcgtagttggatgcgttgatttaacggacgttaagtggtttatatattttcgtcgaagcgaaattgcgggaagaaaaagcgtagttttaggtcgatttgttagatgtcggtttataattataggtcgtagcgttagggatgtttaatcgttaacgtgtttcggcgaacggttttttaagtttttatttaatggatgcgttagtattgggtatggacgggtcgtattatacggaagttatagtaggtttgtttgtcggattggattttgatttgtggggtgtgtatcgtttagcggttgtcgtcgttattggcgcgtataatgtcgcgttggtagaaatcgtagtagta

SEQ ID NO: 22932 - DNA, 588 bp, Artificial Sequence
  chemically treated genomic DNA (Homo sapiens) CpG-island No: 22932
tactactacgatttctaccaacgcgacattatacgcgccaataacgacgacaaccgctaaacgatacacaccccacaaatcaaaatccaatccgacaaacaaacctactataacttccgtataatacgacccgtccatacccaatactaacgcatccattaaataaaaacttaaaaaaccgttcgccgaaacacgttaacgattaaacatccctaacgctacgacctataattataaaccgacatctaacaaatcgacctaaaactacgctttttcttcccgcaatttcgcttcgacgaaaatatataaaccacttaacgtccgttaaatcaacgcatccaactacgaatcattaaattatttccaccactacgcctacgaccaaccgaaactaacaaaataaatatcgtcgaccaatttaatttattccgatttaaactattaataaaatacaaaatccttacgtaccaaaacacaaccgaaaatcaacgtcgtactaccgaaaatactacacaacaacaaacgtaaaaattaacgattaatcattacgtaactctccatcataacccctaattcgtattactaaac

SEQ ID NO: 22933 - DNA, 955 bp, Artificial Sequence
  chemically treated genomic DNA (Homo sapiens) CpG-island No: 22933
ttttcgttggtcggtacgtttggcgttgattattatcgttttgttggcgttgattgcgtttattagttagtggtggttgtcgtatgatttataggcgattgatttgtcgtcgcgtttgttttcgtcggatgcgtagtattggttgggtatcgattatttaggtcgcgatattttttcgcggttgatggtagcgattcgcgtgtcgttcggttcggtaatggtttgtttgttgttggtgttgatattagggttggttattggcggtagcgtcgggttgattggcgggcgcgttgattaggttattatgcgcgtcgtcgatatgtttatgattttttcgatttcgattttgtcgttttttatggttggcgtgttcggtatcgggttgattaacgtaattatcgttatcgttttgtcgtattgggcgtggtatgtacgtatggtgcgtagtttggtgattttattacgttaacgcgagtttgtgttggcgttacggtttttcggtgcgggttatgtgcgggtgtttgtcgattatttggtaggcgcggtgattttttcgttgttggtgttggtaacgttggatatcggttatatgatgttgtacgtcgcggggatgtttttttttggtttcggtgtgatcgcgtcgatcgtcgaatggggcgtgatgattaacgacgcgcgttagtatatttggatttagtcgttgtaaatgttttggtcggggttggcgttgtttattagcgtgatggtttttaatttggtgggtgacgtattgcgcgattatttggatttttatttggtgacggagtacgtatattatttattattaagttgtggaacgacgattataagcgttttcgcgaattttgttcgatagtttgaaaaaattttagtttgattatatcgatttttatttaatgtattggttcgttttcgttggagattattatgtcgaagt

SEQ ID NO: 22934 - DNA, 955 bp, Artificial Sequence
  chemically treated genomic DNA (Homo sapiens) CpG-island No: 22934
acttcgacataataatctccaacgaaaacgaaccaatacattaaataaaaatcgatataatcaaactaaaattttttcaaactatcgaacaaaattcgcgaaaacgcttataatcgtcgttccacaacttaataataaataatatacgtactccgtcaccaaataaaaatccaaataatcgcgcaatacgtcacccaccaaattaaaaaccatcacgctaataaacaacgccaaccccgaccaaaacatttacaacgactaaatccaaatatactaacgcgcgtcgttaatcatcacgccccattcgacgatcgacgcgatcacaccgaaaccaaaaaaaaacatccccgcgacgtacaacatcatataaccgatatccaacgttaccaacaccaacaacgaaaaaatcaccgcgcctaccaaataatcgacaaacacccgcacataacccgcaccgaaaaaccgtaacgccaacacaaactcgcgttaacgtaataaaatcaccaaactacgcaccatacgtacataccacgcccaatacgacaaaacgataacgataattacgttaatcaacccgataccgaacacgccaaccataaaaaacgacaaaatcgaaatcgaaaaaatcataaacatatcgacgacgcgcataataacctaatcaacgcgcccgccaatcaacccgacgctaccgccaataaccaaccctaatatcaacaccaacaacaaacaaaccattaccgaaccgaacgacacgcgaatcgctaccatcaaccgcgaaaaaatatcgcgacctaaataatcgatacccaaccaatactacgcatccgacgaaaacaaacgcgacgacaaatcaatcgcctataaatcatacgacaaccaccactaactaataaacgcaatcaacgccaacaaaacgataataatcaacgccaaacgtaccgaccaacgaaaa

SEQ ID NO: 22935 - DNA, 955 bp, Artificial Sequence
  chemically treated genomic DNA (Homo sapiens) CpG-island No: 22935
gtttcgatataatggtttttagcgggaacgggttagtgtattaagtagaggtcgatataattaagttggagtttttttaggttgtcgagtagggttcgcgggggcgtttgtggtcgtcgttttatagtttagtggtgaatagtgtgcgtgtttcgttattagatgagggtttagatgatcgcgtagtgcgttatttattaggttaaaggttattacgttgataaatagcgttagtttcggttagaatatttgtagcggttgggtttagatatattggcgcgcgtcgttaattattacgttttattcggcggtcggcgcggttatatcgaggttaaggaaagatattttcgcgacgtgtagtattatatggtcgatatttagcgttgttagtattagtagcgaagggattatcgcgtttgttagatgatcgataaatattcgtatatggttcgtatcggaaagtcgtgacgttagtataaattcgcgttggcgtagtgaaattattaggttgcgtattatgcgtgtatattacgtttagtgcgatagggcgatggcgataattacgttggttagttcggtgtcgagtacgttaattataaagaacgatagaatcgaggtcgggaaggttataaatatatcggcgacgcgtatggtggtttgattaacgcgttcgttaattaattcggcgttgtcgttaataattagttttaatgttagtattagtagtaggtaggttattatcgaatcgagcgatacgcgggtcgttgttattagtcgcgagaaaatatcgcgatttaagtgatcggtgtttagttagtgttgcgtattcggcgaaagtaggcgcgacggtaaattaatcgtttgtgggttatacggtagttattattggttggtgagcgtaattagcgttagtagggcgataatgattagcgttaggcgtatcgattagcgggaa

SEQ ID NO: 22936 - DNA, 955 bp, Artificial Sequence
  chemically treated genomic DNA (Homo sapiens) CpG-island No: 22936
ttcccgctaatcgatacgcctaacgctaatcattatcgccctactaacgctaattacgctcaccaaccaataataactaccgtataacccacaaacgattaatttaccgtcgcgcctactttcgccgaatacgcaacactaactaaacaccgatcacttaaatcgcgatattttctcgcgactaataacaacgacccgcgtatcgctcgattcgataataacctacctactactaatactaacattaaaactaattattaacgacaacgccgaattaattaacgaacgcgttaatcaaaccaccatacgcgtcgccgatatatttataaccttcccgacctcgattctatcgttctttataattaacgtactcgacaccgaactaaccaacgtaattatcgccatcgccctatcgcactaaacgtaatatacacgcataatacgcaacctaataatttcactacgccaacgcgaatttatactaacgtcacgactttccgatacgaaccatatacgaatatttatcgatcatctaacaaacgcgataatcccttcgctactaatactaacaacgctaaatatcgaccatataatactacacgtcgcgaaaatatctttccttaacctcgatataaccgcgccgaccgccgaataaaacgtaataattaacgacgcgcgccaatatatctaaacccaaccgctacaaatattctaaccgaaactaacgctatttatcaacgtaataacctttaacctaataaataacgcactacgcgatcatctaaaccctcatctaataacgaaacacgcacactattcaccactaaactataaaacgacgaccacaaacgcccccgcgaaccctactcgacaacctaaaaaaactccaacttaattatatcgacctctacttaatacactaacccgttcccgctaaaaaccattatatcgaaac

SEQ ID NO: 22937 - DNA, 509 bp, Artificial Sequence
  chemically treated genomic DNA (Homo sapiens) CpG-island No: 22937
tcggggcgtgcgttatgtgattgagatgattaatcgtgatatggggcgtaatgcgtaatttatgtttgatgtaatgcgcgagacggggattaacgtggtggtttgtatcggttattattaggacgcgtttttttcggaatatgtggcgattcgtagcgtgtaggaattggcgtaggagatggtcgatgaaattgaatagggtatcgatggtacggagttgaaatttgggattatcgcggagatcggtattagcgaaggaaagattacgtcgttggaagagaaggtatttattgtcgttgcgttggcgtataattagatcggacgttcgatttttacgtatacgtcgtttagtacgatggggttggagtaattggcgttgttataagtttacggggttgatttttcgcgcgttatcgttggttattgcgatttgaaagataatttcgataatattttgaagatgatcgatttcggcgcgtacgtgtagttcgatattatcggtaagaata

SEQ ID NO: 22938 - DNA, 509 bp, Artificial Sequence
  chemically treated genomic DNA (Homo sapiens) CpG-island No: 22938
tattcttaccgataatatcgaactacacgtacgcgccgaaatcgatcatcttcaaaatattatcgaaattatctttcaaatcgcaataaccaacgataacgcgcgaaaaatcaaccccgtaaacttataacaacgccaattactccaaccccatcgtactaaacgacgtatacgtaaaaatcgaacgtccgatctaattatacgccaacgcaacgacaataaataccttctcttccaacgacgtaatctttccttcgctaataccgatctccgcgataatcccaaatttcaactccgtaccatcgataccctattcaatttcatcgaccatctcctacgccaattcctacacgctacgaatcgccacatattccgaaaaaaacgcgtcctaataataaccgatacaaaccaccacgttaatccccgtctcgcgcattacatcaaacataaattacgcattacgccccatatcacgattaatcatctcaatcacataacgcacgccccga

SEQ ID NO: 22939 - DNA, 509 bp, Artificial Sequence
  chemically treated genomic DNA (Homo sapiens) CpG-island No: 22939
tgtttttgtcgatggtgtcgaattgtacgtacgcgtcgagatcgattatttttaaaatgttgtcgaggttgttttttagatcgtagtgattaacggtgacgcgcgaaagattaatttcgtgggtttgtagtaacgttagttgttttagttttatcgtgttgaacgacgtatgcgtggagatcgggcgttcggtttggttatgcgttagcgtagcggtaataaatatttttttttttagcggcgtaatttttttttcgttggtgtcgattttcgcgatgattttaggttttagtttcgtgttatcgatattttgtttaattttatcgattattttttgcgttagtttttgtacgttgcgggtcgttatatgtttcgggaaaaacgcgttttggtaataatcggtataggttattacgttgattttcgtttcgcgtattatattaagtataaattgcgtattgcgttttatgttacggttggttattttaattatatgacgtacgtttcgg

SEQ ID NO: 22940 - DNA, 509 bp, Artificial Sequence
  chemically treated genomic DNA (Homo sapiens) CpG-island No: 22940
ccgaaacgtacgtcatataattaaaataaccaaccgtaacataaaacgcaatacgcaatttatacttaatataatacgcgaaacgaaaatcaacgtaataacctataccgattattaccaaaacgcgtttttcccgaaacatataacgacccgcaacgtacaaaaactaacgcaaaaaataatcgataaaattaaacaaaatatcgataacacgaaactaaaacctaaaatcatcgcgaaaatcgacaccaacgaaaaaaaaattacgccgctaaaaaaaaaaatatttattaccgctacgctaacgcataaccaaaccgaacgcccgatctccacgcatacgtcgttcaacacgataaaactaaaacaactaacgttactacaaacccacgaaattaatctttcgcgcgtcaccgttaatcactacgatctaaaaaacaacctcgacaacattttaaaaataatcgatctcgacgcgtacgtacaattcgacaccatcgacaaaaaca

SEQ ID NO: 22941 - DNA, 1112 bp, Artificial Sequence
  chemically treated genomic DNA (Homo sapiens) CpG-island No: 22941
gatggcgaattttgggcgtaaagtatgttcgtttggttagtgttgatttcgttgatttatcgttagtaattttttttcgttcgtgtatgtgttgatcgacgttatcgatattacgtattgcgttacgaattgtcgtgtaatgcggatttttggttcgtagtatagtaagagttattatttttggtgaattttattttttttttagcgatcgtgtcgatcgattagtggttttcgggtagagttttagtgggtttttcgcgttgtattcggattttatttgtttgaacgttttggcggtgtattagttagttaggatcgtattggtgtcgatttgtaaaaagtttagtcggattggagtattgttttgttgcgttattttaattcggttggcgcgtattcgtcgggcgatatgggcgaagattcgtaaggtatttcgaataatttgatgttatatatcgtttaggttgttgtaggtcgtcgcgattcgttggcgatttttggtaacgattattcgatcgaagatggtattggcgtacgcgattatatttacgtaatggatttggcggacggttacgtcgtggcgatggaaaaattggcgaataagttaggcgtatatatttataatttcggcgttggcgtaggtaatagcgtgttggacgtggttaatgtttttagtaaagtttgcggtaaatcggttaattattattttgtatcgcgtcgcgagggcgatttttcggtttattgggcggacgttagtaaagtcgatcgtgaattgaattggcgcgtaacgcgtatattcgatgaaatggcgtaggatatttggtattggtagttacgttatttatagggatatttcgattaaggaacgattatgacgtaatttaatttcgttgattatttatatcgtcgttataattcgtttatcgggtaatggattttggttttatcgtatcgcgttaagcgtttttggtagggggcgtaggaaacgttagttaaataggtgttatttgcgtacgatttagattgttttttttgcgtaggtaatgtgcgggtgataggcgataaaaatttcgattatatcgggatttacgtttttattaatgattttgcgg

SEQ ID NO: 22942 - DNA, 1112 bp, Artificial Sequence
  chemically treated genomic DNA (Homo sapiens) CpG-island No: 22942
ccgcaaaatcattaataaaaacgtaaatcccgatataatcgaaatttttatcgcctatcacccgcacattacctacgcaaaaaaaacaatctaaatcgtacgcaaataacacctatttaactaacgtttcctacgccccctaccaaaaacgcttaacgcgatacgataaaaccaaaatccattacccgataaacgaattataacgacgatataaataatcaacgaaattaaattacgtcataatcgttccttaatcgaaatatccctataaataacgtaactaccaataccaaatatcctacgccatttcatcgaatatacgcgttacgcgccaattcaattcacgatcgactttactaacgtccgcccaataaaccgaaaaatcgccctcgcgacgcgatacaaaataataattaaccgatttaccgcaaactttactaaaaacattaaccacgtccaacacgctattacctacgccaacgccgaaattataaatatatacgcctaacttattcgccaatttttccatcgccacgacgtaaccgtccgccaaatccattacgtaaatataatcgcgtacgccaataccatcttcgatcgaataatcgttaccaaaaatcgccaacgaatcgcgacgacctacaacaacctaaacgatatataacatcaaattattcgaaataccttacgaatcttcgcccatatcgcccgacgaatacgcgccaaccgaattaaaataacgcaacaaaacaatactccaatccgactaaactttttacaaatcgacaccaatacgatcctaactaactaatacaccgccaaaacgttcaaacaaataaaatccgaatacaacgcgaaaaacccactaaaactctacccgaaaaccactaatcgatcgacacgatcgctaaaaaaaaaataaaattcaccaaaaataataactcttactatactacgaaccaaaaatccgcattacacgacaattcgtaacgcaatacgtaatatcgataacgtcgatcaacacatacacgaacgaaaaaaaattactaacgataaatcaacgaaatcaacactaaccaaacgaacatactttacgcccaaaattcgccatc

SEQ ID NO: 22943 - DNA, 1112 bp, Artificial Sequence
  chemically treated genomic DNA (Homo sapiens) CpG-island No: 22943
tcgtaaagttattagtgaaaacgtaagtttcggtgtaatcggggtttttatcgtttgttattcgtatattatttgcgtagaggaagtaatttggatcgtgcgtaggtaatatttgtttggttggcgttttttgcgttttttgttaggggcgtttagcgcggtgcggtgaaattagaatttattgttcggtgagcgggttgtagcggcgatgtggatgattaacgggattaaattgcgttatggtcgttttttaatcgggatatttttgtggatggcgtgattgttagtgttaggtgttttgcgttattttatcgagtgtgcgcgttacgcgttagtttagtttacggtcggttttgttggcgttcgtttagtaggtcggaaggtcgttttcgcgacgcggtgtaaaatgataattaatcggtttgtcgtaggttttgttgaaggtattaattacgtttagtacgttgttgtttacgttagcgtcgaggttgtagatgtgtacgtttggtttgttcgttagtttttttatcgttacgacgtgatcgttcgttagatttattacgtggatgtaatcgcgtacgttagtattattttcggtcggataatcgttattaaaaatcgttagcgagtcgcgacggtttatagtaatttgggcgatgtatggtattaggttattcggaatgttttgcggattttcgtttatatcgttcgacggatgcgcgttaatcgggttgaagtagcgtagtagggtaatgttttagttcggttgggttttttgtagatcggtattagtacgattttgattggttaatatatcgttaaagcgtttaggtaagtgaagttcggatatagcgcggaaagtttattaaaattttgttcgggaattattggtcgatcggtacgatcgttaaaaggggaataaggtttattaagggtaataatttttgttgtattgcgagttagaaattcgtattatacggtagttcgtggcgtagtgcgtggtgtcgatagcgtcgattaatatatatacgagcgggaggaagttgttgacgatgggttagcgaagttagtattggttagacgggtatattttgcgtttaaaattcgttatt

SEQ ID NO: 22944 - DNA, 1112 bp, Artificial Sequence
  chemically treated genomic DNA (Homo sapiens) CpG-island No: 22944
aataacgaattttaaacgcaaaatatacccgtctaaccaatactaacttcgctaacccatcgtcaacaacttcctcccgctcgtatatatattaatcgacgctatcgacaccacgcactacgccacgaactaccgtataatacgaatttctaactcgcaatacaacaaaaattattacccttaataaaccttattccccttttaacgatcgtaccgatcgaccaataattcccgaacaaaattttaataaactttccgcgctatatccgaacttcacttacctaaacgctttaacgatatattaaccaatcaaaatcgtactaataccgatctacaaaaaacccaaccgaactaaaacattaccctactacgctacttcaacccgattaacgcgcatccgtcgaacgatataaacgaaaatccgcaaaacattccgaataacctaataccatacatcgcccaaattactataaaccgtcgcgactcgctaacgatttttaataacgattatccgaccgaaaataatactaacgtacgcgattacatccacgtaataaatctaacgaacgatcacgtcgtaacgataaaaaaactaacgaacaaaccaaacgtacacatctacaacctcgacgctaacgtaaacaacaacgtactaaacgtaattaataccttcaacaaaacctacgacaaaccgattaattatcattttacaccgcgtcgcgaaaacgaccttccgacctactaaacgaacgccaacaaaaccgaccgtaaactaaactaacgcgtaacgcgcacactcgataaaataacgcaaaacacctaacactaacaatcacgccatccacaaaaatatcccgattaaaaaacgaccataacgcaatttaatcccgttaatcatccacatcgccgctacaacccgctcaccgaacaataaattctaatttcaccgcaccgcgctaaacgcccctaacaaaaaacgcaaaaaacgccaaccaaacaaatattacctacgcacgatccaaattacttcctctacgcaaataatatacgaataacaaacgataaaaaccccgattacaccgaaacttacgttttcactaataactttacga

SEQ ID NO: 22945 - DNA, 507 bp, Artificial Sequence
  chemically treated genomic DNA (Homo sapiens) CpG-island No: 22945
tgggatgcgaggtgatagtttttagttttaattcggcgaaagagtaggaagtgttggcgatgggtgtcgataaagtggtgaatagtcgcgattcgtaggtattgaaagtattggcggggtagtttgattttattattaatatcgttaacgttagtttcgattggtagttttattttgaggcgttgatttatggcggtaatttttatacggtcggtgcggtttttacgtcgttgtttgtttcggtttttacgttaattgcgggcgatcgtagcgtttttggttttgttatcggtacgttttatgagttgcgtaagttgatgcgttttgtcgttcgtagtaaggttgcgtcgattatcgaattgttttcgatgtcgaaaattaacgacgttatttagtatgtgcgcgacggtaaggcgcgttatcgcgtggtgttgaaagtcgatttttgaaaattattcgtagcgttgatttgaggcgttgttttttttcgtatatattttgttttgt

SEQ ID NO: 22946 - DNA, 507 bp, Artificial Sequence
  chemically treated genomic DNA (Homo sapiens) CpG-island No: 22946
acaaaacaaaatatatacgaaaaaaaacaacgcctcaaatcaacgctacgaataattttcaaaaatcgactttcaacaccacgcgataacgcgccttaccgtcgcgcacatactaaataacgtcgttaattttcgacatcgaaaacaattcgataatcgacgcaaccttactacgaacgacaaaacgcatcaacttacgcaactcataaaacgtaccgataacaaaaccaaaaacgctacgatcgcccgcaattaacgtaaaaaccgaaacaaacaacgacgtaaaaaccgcaccgaccgtataaaaattaccgccataaatcaacgcctcaaaataaaactaccaatcgaaactaacgttaacgatattaataataaaatcaaactaccccgccaatactttcaatacctacgaatcgcgactattcaccactttatcgacacccatcgccaacacttcctactctttcgccgaattaaaactaaaaactatcacctcgcatccca

SEQ ID NO: 22947 - DNA, 507 bp, Artificial Sequence
  chemically treated genomic DNA (Homo sapiens) CpG-island No: 22947
ataaaatagaatatgtgcgaaagagggtagcgttttagattagcgttgcgaatgatttttaaaaatcggtttttaatattacgcggtaacgcgttttatcgtcgcgtatatgttggatggcgtcgttaattttcgatatcgggaatagttcggtggtcggcgtaattttgttgcgggcggtaaaacgtattagtttacgtagtttataaggcgtgtcggtagtagaattagagacgttgcgatcgttcgtaattaacgtaaaggtcggaatagatagcggcgtgagaatcgtatcgatcgtatggaaattatcgttataggttagcgttttaaaatagggttgttagtcgaggttgacgttgacggtgttgataatgagattaaattgtttcgttagtgtttttagtgtttgcggatcgcggttatttattattttatcggtatttatcgttagtattttttgttttttcgtcggattagaattaaaggttgttatttcgtatttta

SEQ ID NO: 22948 - DNA, 507 bp, Artificial Sequence
  chemically treated genomic DNA (Homo sapiens) CpG-island No: 22948
taaaatacgaaataacaacctttaattctaatccgacgaaaaaacaaaaaatactaacgataaataccgataaaataataaataaccgcgatccgcaaacactaaaaacactaacgaaacaatttaatctcattatcaacaccgtcaacgtcaacctcgactaacaaccctattttaaaacgctaacctataacgataatttccatacgatcgatacgattctcacgccgctatctattccgacctttacgttaattacgaacgatcgcaacgtctctaattctactaccgacacgccttataaactacgtaaactaatacgttttaccgcccgcaacaaaattacgccgaccaccgaactattcccgatatcgaaaattaacgacgccatccaacatatacgcgacgataaaacgcgttaccgcgtaatattaaaaaccgatttttaaaaatcattcgcaacgctaatctaaaacgctaccctctttcgcacatattctattttat

SEQ ID NO: 22949 - DNA, 824 bp, Artificial Sequence
  chemically treated genomic DNA (Homo sapiens) CpG-island No: 22949
  unsure (817)
cgcgggaacgggtgttaggagaattcgtatttttagaggattttattataaattgagtggtataatttgcgtattgatcgtaagggtaacgttaaaagcgtttttgcgttgattggtatcgatacgttggcgggcgataattgttagttattgattttcggggtcgacgaataggaagcgtattagcgtttaagttaatggttgcgcgatgaatttttttattgcgatgcgtcgttggcggaagttaaatttgacgaattggaattattgtcggttttattgattaatttgaattcgtaaattattcgcgttcgtatcgtgtgtagcggtagtgtaggcggtattttgacgtcgattttttttttagattttaatgcgttgggtaattttttcgtagttaaaggcgttgacgtcgagtaattcgtattggaaaacggtttgacgttggtattgaaaaatattgagtttcgtttgttggatagcgacggtgttattagcgcgattttggaagtttatcgatttttggttggcgatatttttttgcgcgaatatttattggtaggcgttacgtcggattaagttgcgtcgaagtaattgttgttagcgcgaattatttttgcgaagagttttttcgttttagtagtagttatttgtaagaacgtgttttggacgtacgcgacgtttgtttttagttattttagtaaatttacggtgagtacgtttttcggtatcgggtaaattgacgtagttcgtatttgtatggttgatgaattgatttttagttagtttttcgaaattggataaaattattttaaangattggt

SEQ ID NO: 22950 - DNA, 824 bp, Artificial Sequence
  chemically treated genomic DNA (Homo sapiens) CpG-island No: 22950
  unsure (8)
accaatcntttaaaataattttatccaatttcgaaaaactaactaaaaatcaattcatcaaccatacaaatacgaactacgtcaatttacccgataccgaaaaacgtactcaccgtaaatttactaaaataactaaaaacaaacgtcgcgtacgtccaaaacacgttcttacaaataactactactaaaacgaaaaaactcttcgcaaaaataattcgcgctaacaacaattacttcgacgcaacttaatccgacgtaacgcctaccaataaatattcgcgcaaaaaaatatcgccaaccaaaaatcgataaacttccaaaatcgcgctaataacaccgtcgctatccaacaaacgaaactcaatatttttcaataccaacgtcaaaccgttttccaatacgaattactcgacgtcaacgcctttaactacgaaaaaattacccaacgcattaaaatctaaaaaaaaaatcgacgtcaaaataccgcctacactaccgctacacacgatacgaacgcgaataatttacgaattcaaattaatcaataaaaccgacaataattccaattcgtcaaatttaacttccgccaacgacgcatcgcaataaaaaaattcatcgcgcaaccattaacttaaacgctaatacgcttcctattcgtcgaccccgaaaatcaataactaacaattatcgcccgccaacgtatcgataccaatcaacgcaaaaacgcttttaacgttacccttacgatcaatacgcaaattataccactcaatttataataaaatcctctaaaaatacgaattctcctaacacccgttcccgcg

SEQ ID NO: 22951 - DNA, 824 bp, Artificial Sequence
  chemically treated genomic DNA (Homo sapiens) CpG-island No: 22951
  unsure (8)
attaattntttgaggtgattttatttagtttcgaggaattggttgggggttagtttattagttatataaatgcgggttgcgttagtttgttcggtgtcgggaagcgtgtttatcgtagatttgttggagtaattggaagtagacgtcgcgtacgtttagggtacgtttttgtaggtagttgttgttggaacgggaaaatttttcgtaaaagtgattcgcgttggtaataattgtttcggcgtagtttaattcggcgtgacgtttattagtaaatgttcgcgtagggaagtatcgttagttagggatcggtgagtttttagaatcgcgttggtagtatcgtcgttatttagtagacgaaatttaatgttttttagtattagcgttaggtcgttttttagtgcggattgttcggcgttaacgtttttggttgcgggaagattatttagcgtattgagatttaaagaagagatcggcgttagaatgtcgtttgtattatcgttgtatacggtgcgggcgcggataatttgcggatttagattggttagtgaaatcggtagtggttttagttcgttagatttaattttcgttagcggcgtatcgtagtgggggaatttatcgcgtagttattggtttaaacgttggtgcgttttttgttcgtcggtttcggaaattagtaattggtagttatcgttcgttagcgtatcggtgttaattagcgtaagggcgtttttggcgttgtttttgcggttagtgcgtaggttatgttatttaatttgtgatgggattttttagagatacgagtttttttggtattcgttttcgcg

SEQ ID NO: 22952 - DNA, 824 bp, Artificial Sequence
  chemically treated genomic DNA (Homo sapiens) CpG-island No: 22952
  unsure (817)
cgcgaaaacgaataccaaaaaaactcgtatctctaaaaaatcccatcacaaattaaataacataacctacgcactaaccgcaaaaacaacgccaaaaacgcccttacgctaattaacaccgatacgctaacgaacgataactaccaattactaatttccgaaaccgacgaacaaaaaacgcaccaacgtttaaaccaataactacgcgataaattcccccactacgatacgccgctaacgaaaattaaatctaacgaactaaaaccactaccgatttcactaaccaatctaaatccgcaaattatccgcgcccgcaccgtatacaacgataatacaaacgacattctaacgccgatctcttctttaaatctcaatacgctaaataatcttcccgcaaccaaaaacgttaacgccgaacaatccgcactaaaaaacgacctaacgctaatactaaaaaacattaaatttcgtctactaaataacgacgatactaccaacgcgattctaaaaactcaccgatccctaactaacgatacttccctacgcgaacatttactaataaacgtcacgccgaattaaactacgccgaaacaattattaccaacgcgaatcacttttacgaaaaattttcccgttccaacaacaactacctacaaaaacgtaccctaaacgtacgcgacgtctacttccaattactccaacaaatctacgataaacacgcttcccgacaccgaacaaactaacgcaacccgcatttatataactaataaactaacccccaaccaattcctcgaaactaaataaaatcacctcaaanaattaat

SEQ ID NO: 22953 - DNA, 529 bp, Artificial Sequence
  chemically treated genomic DNA (Homo sapiens) CpG-island No: 22953
gaatagacggtttggaatagtttttagatttgttagtttcgttttgatagtattaagcgttgcgtttacggatatggagagcgtagttatgttagcgtattcgtaatattgtgacgtttcggtaacggtagtagaatatcgacgttatcggttggggtttgtagggtaaatttcgtatcgtgcgaggttatatggatattggtggcggtgaaatcgttgttggcggtattgggtgagaaacgttatattttgcgtgagttaattacgttttgttagtttagttagtcgttgttgtcggcgtttataatggcgatatcgtttttcggtagtcgttaaagattttatttttcgttttcgcgatattcgtaagcgagtaaaaattttttagatgcgcgttgttagggttgttgattagcgtatttttcgggcgagttagatttatagtttaggttattttcgttatgatggtcgcgttaagtttaataattgcgtaatcgtattcgggcgttaacgtaatagcgttatcggt

SEQ ID NO: 22954 - DNA, 529 bp, Artificial Sequence
  chemically treated genomic DNA (Homo sapiens) CpG-island No: 22954
accgataacgctattacgttaacgcccgaatacgattacgcaattattaaacttaacgcgaccatcataacgaaaataacctaaactataaatctaactcgcccgaaaaatacgctaatcaacaaccctaacaacgcgcatctaaaaaatttttactcgcttacgaatatcgcgaaaacgaaaaataaaatctttaacgactaccgaaaaacgatatcgccattataaacgccgacaacaacgactaactaaactaacaaaacgtaattaactcacgcaaaatataacgtttctcacccaataccgccaacaacgatttcaccgccaccaatatccatataacctcgcacgatacgaaatttaccctacaaaccccaaccgataacgtcgatattctactaccgttaccgaaacgtcacaatattacgaatacgctaacataactacgctctccatatccgtaaacgcaacgcttaatactatcaaaacgaaactaacaaatctaaaaactattccaaaccgtctattc

SEQ ID NO: 22955 - DNA, 529 bp, Artificial Sequence
  chemically treated genomic DNA (Homo sapiens) CpG-island No: 22955
atcgatgacgttgttgcgttaacgttcgaatacgattacgtagttattgaatttggcgcgattattatggcgaaaatagtttggattgtgagtttgattcgttcgggaaatgcgttggttaataattttggtagcgcgtatttggaaggtttttgttcgtttgcgggtgtcgcgaaagcgaaaggtgaaatttttagcggttgtcggaaaacggtatcgttattatgaacgtcgataataacgattggttgaattggtagagcgtaattagtttacgtaaagtgtggcgttttttatttaatgtcgttaatagcgattttatcgttattaatatttatgtgatttcgtacggtacggaatttattttataaattttaatcggtagcgtcgatgttttgttgtcgttgtcggggcgttataatattgcgaatgcgttggtatgattgcgttttttatgttcgtgggcgtaacgtttgatgttattaaagcggggttggtaaatttgaaagttgttttaggtcgtttgttt

SEQ ID NO: 22956 - DNA, 529 bp, Artificial Sequence
  chemically treated genomic DNA (Homo sapiens) CpG-island No: 22956
aaacaaacgacctaaaacaactttcaaatttaccaaccccgctttaataacatcaaacgttacgcccacgaacataaaaaacgcaatcataccaacgcattcgcaatattataacgccccgacaacgacaacaaaacatcgacgctaccgattaaaatttataaaataaattccgtaccgtacgaaatcacataaatattaataacgataaaatcgctattaacgacattaaataaaaaacgccacactttacgtaaactaattacgctctaccaattcaaccaatcgttattatcgacgttcataataacgataccgttttccgacaaccgctaaaaatttcacctttcgctttcgcgacacccgcaaacgaacaaaaaccttccaaatacgcgctaccaaaattattaaccaacgcatttcccgaacgaatcaaactcacaatccaaactattttcgccataataatcgcgccaaattcaataactacgtaatcgtattcgaacgttaacgcaacaacgtcatcgat

SEQ ID NO: 22957 - DNA, 657 bp, Artificial Sequence
  chemically treated genomic DNA (Homo sapiens) CpG-island No: 22957
gttcgcgcgttagtatcgtatagcgtttcgtttgaaaaaaacgttaggacgttttgatttttagcgcggcgtgttgtaacgtaacgtcgatggcgaattggaagtgacgattatcggatattagggtttatatatatttagtttttttagtttcggtaattgttttatcgtgttggaacgcgatcgcggtaatgtggaagtgggcgaatgggtggaagtagaatcgtttaacgcgttgttcggaggtttgtaatggcggaatttagcgattaggagatgttgcgttataatcggtaaattattttgcgcggttttgattttgacggttaggaggcgttgaaagattttcgcgtgttgatagtgggtttgggcggtttcggttgtgtagtttcgtagtatttggtaagcgtcggtgtcggtaatttgacgttgttcgatttcgatacggtttcgttttcgaatttgtaacgttagatattgtatagtgatgttacggtcgggtaatcgaaggtggaattcgttcgtgacgttttgacgcggattatttatatatcgcgattacgttagttaatgtattgttggatgacgtagaatttgtagtattgattgttgaatacgatttggtgttcgattgtacggataacgttgcggtacgta

SEQ ID NO: 22958 - DNA, 657 bp, Artificial Sequence
  chemically treated genomic DNA (Homo sapiens) CpG-island No: 22958
tacgtaccgcaacgttatccgtacaatcgaacaccaaatcgtattcaacaatcaatactacaaattctacgtcatccaacaatacattaactaacgtaatcgcgatatataaataatccgcgtcaaaacgtcacgaacgaattccaccttcgattacccgaccgtaacatcactatacaatatctaacgttacaaattcgaaaacgaaaccgtatcgaaatcgaacaacgtcaaattaccgacaccgacgcttaccaaatactacgaaactacacaaccgaaaccgcccaaacccactatcaacacgcgaaaatctttcaacgcctcctaaccgtcaaaatcaaaaccgcgcaaaataatttaccgattataacgcaacatctcctaatcgctaaattccgccattacaaacctccgaacaacgcgttaaacgattctacttccacccattcgcccacttccacattaccgcgatcgcgttccaacacgataaaacaattaccgaaactaaaaaaactaaatatatataaaccctaatatccgataatcgtcacttccaattcgccatcgacgttacgttacaacacgccgcgctaaaaatcaaaacgtcctaacgtttttttcaaacgaaacgctatacgatactaacgcgcgaac

SEQ ID NO: 22959 - DNA, 657 bp, Artificial Sequence
  chemically treated genomic DNA (Homo sapiens) CpG-island No: 22959
tacgtatcgtaacgttattcgtatagtcgagtattagatcgtgtttagtaattaatgttgtaagttttgcgttatttagtagtgtattgattggcgtaatcgcgatatgtgggtgattcgcgttagggcgttacgggcggattttattttcggttgttcgatcgtggtattattgtgtagtgtttggcgttgtagattcgagagcgaaatcgtgtcgaagtcgagtagcgttaggttatcgatatcggcgtttgttagatattgcgaggttgtatagtcgaggtcgtttaggtttattattagtacgcgagaattttttagcgttttttggtcgttaaaattaaagtcgcgtagaatgatttgtcggttgtagcgtagtattttttgatcgttgagtttcgttattataggttttcgaataacgcgttaaacggttttatttttatttattcgtttatttttatattgtcgcgatcgcgttttagtacgataaagtagttgtcgaggttaaaggagttaaatatatgtgaattttgatgttcggtggtcgttatttttagttcgttatcggcgttgcgttgtagtacgtcgcgttggaaattaagacgttttggcgttttttttaggcgggacgttgtgcgatattggcgcgcgggt

SEQ ID NO: 22960 - DNA, 657 bp, Artificial Sequence
  chemically treated genomic DNA (Homo sapiens) CpG-island No: 22960
acccgcgcgccaatatcgcacaacgtcccgcctaaaaaaaacgccaaaacgtcttaatttccaacgcgacgtactacaacgcaacgccgataacgaactaaaaataacgaccaccgaacatcaaaattcacatatatttaactcctttaacctcgacaactactttatcgtactaaaacgcgatcgcgacaatataaaaataaacgaataaataaaaataaaaccgtttaacgcgttattcgaaaacctataataacgaaactcaacgatcaaaaaatactacgctacaaccgacaaatcattctacgcgactttaattttaacgaccaaaaaacgctaaaaaattctcgcgtactaataataaacctaaacgacctcgactatacaacctcgcaatatctaacaaacgccgatatcgataacctaacgctactcgacttcgacacgatttcgctctcgaatctacaacgccaaacactacacaataataccacgatcgaacaaccgaaaataaaatccgcccgtaacgccctaacgcgaatcacccacatatcgcgattacgccaatcaatacactactaaataacgcaaaacttacaacattaattactaaacacgatctaatactcgactatacgaataacgttacgatacgta

SEQ ID NO: 22961 - DNA, 830 bp, Artificial Sequence
  chemically treated genomic DNA (Homo sapiens) CpG-island No: 22961
aaagtggagtaattgtcgaataagttcgtttgttagcgtaaatttgttaacgtcgcggcgagtggcgttataattacgtattggtgtttaaagatcgttcggattatcgttttattttcggtgaaaaaggtgaagtgttggatatcgtcgtcgagtttcgtcgtattgttaatcgtatcgtcgaagaagcgatgattgtcgttaatatttgtgcggttcgcgtattgcgcgataagttcggttttggtatttataacgtgtatatgggttttgattcggcgaatgtcgacgcgttggtagcgttgttgaaaacgtacggtttgtatgtcgatgtcgaagaagtgtttacgttggacggtttttgtaaattgcgtcgtgaattggacgcgtaattaattggttttttcgatagtcgtattcgtcgtttttagttatttgttgaaattagtattgaattcggtttttattttggtttcggtttggaagtatacgttatttggatttcgtcgattcgtaaatatggcgatatgattaattatcgtttgttgaaagcggttattaaaggcgaaattgcgacgcgtttataggatgaaattattgtttaaatggtcgagcgtcgtcgttttaatcggatggtagaacgtgatgttggtgattggttatacgtacgttttttgaaagataaagtcgggatcgatattcgtttcgtagcggaaattgtcgatattagtcgtggcggtatgcgtgttcgtttggttgataacgagtttgtttagcgagataaagtcgacggtcggttagtgattggagttgtttaaaattataattat

SEQ ID NO: 22962 - DNA, 830 bp, Artificial Sequence
  chemically treated genomic DNA (Homo sapiens) CpG-island No: 22962
ataattataattttaaacaactccaatcactaaccgaccgtcgactttatctcgctaaacaaactcgttatcaaccaaacgaacacgcataccgccacgactaatatcgacaatttccgctacgaaacgaatatcgatcccgactttatctttcaaaaaacgtacgtataaccaatcaccaacatcacgttctaccatccgattaaaacgacgacgctcgaccatttaaacaataatttcatcctataaacgcgtcgcaatttcgcctttaataaccgctttcaacaaacgataattaatcatatcgccatatttacgaatcgacgaaatccaaataacgtatacttccaaaccgaaaccaaaataaaaaccgaattcaatactaatttcaacaaataactaaaaacgacgaatacgactatcgaaaaaaccaattaattacgcgtccaattcacgacgcaatttacaaaaaccgtccaacgtaaacacttcttcgacatcgacatacaaaccgtacgttttcaacaacgctaccaacgcgtcgacattcgccgaatcaaaacccatatacacgttataaataccaaaaccgaacttatcgcgcaatacgcgaaccgcacaaatattaacgacaatcatcgcttcttcgacgatacgattaacaatacgacgaaactcgacgacgatatccaacacttcacctttttcaccgaaaataaaacgataatccgaacgatctttaaacaccaatacgtaattataacgccactcgccgcgacgttaacaaatttacgctaacaaacgaacttattcgacaattactccacttt

SEQ ID NO: 22963 - DNA, 830 bp, Artificial Sequence
  chemically treated genomic DNA (Homo sapiens) CpG-island No: 22963
gtgattatgattttgaataattttagttattggtcgatcgtcggttttatttcgttaaataggttcgttattaattaaacgaatacgtatgtcgttacggttgatatcgataattttcgttgcgaaacgggtgtcggtttcggttttgttttttaggaagcgtgcgtataattagttattaatattacgttttgttattcggttgagacggcgacgttcggttatttggatagtgattttattttgtgggcgcgtcgtagtttcgtttttgataatcgtttttagtagacggtggttgattatgtcgttatatttacggatcggcgaagtttaggtggcgtatgtttttagatcgaggttaaagtgaggatcgggtttagtgttaattttagtaaatgattggaagcgacgaatgcggttgtcgaggaaattagttggttgcgcgtttagtttacgacgtagtttgtagaaatcgtttagcgtgagtattttttcggtatcgatatgtagatcgtgcgtttttagtaacgttgttagcgcgtcggtattcgtcggattaaagtttatatgtacgttatagatgttaaaatcgagtttatcgcgtagtacgcgggtcgtataaatgttagcggtaattatcgttttttcgacgatacggttggtaatgcgacgaggttcggcgacgatatttagtattttattttttttatcgagaataaagcggtaattcgggcgatttttaaatattagtgcgtggttatgacgttattcgtcgcggcgttggtaaatttgcgttagtaaacggatttgttcggtaattgttttatttt

SEQ ID NO: 22964 - DNA, 830 bp, Artificial Sequence
  chemically treated genomic DNA (Homo sapiens) CpG-island No: 22964
aaaataaaacaattaccgaacaaatccgtttactaacgcaaatttaccaacgccgcgacgaataacgtcataaccacgcactaatatttaaaaatcgcccgaattaccgctttattctcgataaaaaaaataaaatactaaatatcgtcgccgaacctcgtcgcattaccaaccgtatcgtcgaaaaaacgataattaccgctaacatttatacgacccgcgtactacgcgataaactcgattttaacatctataacgtacatataaactttaatccgacgaataccgacgcgctaacaacgttactaaaaacgcacgatctacatatcgataccgaaaaaatactcacgctaaacgatttctacaaactacgtcgtaaactaaacgcgcaaccaactaatttcctcgacaaccgcattcgtcgcttccaatcatttactaaaattaacactaaacccgatcctcactttaacctcgatctaaaaacatacgccacctaaacttcgccgatccgtaaatataacgacataatcaaccaccgtctactaaaaacgattatcaaaaacgaaactacgacgcgcccacaaaataaaatcactatccaaataaccgaacgtcgccgtctcaaccgaataacaaaacgtaatattaataactaattatacgcacgcttcctaaaaaacaaaaccgaaaccgacacccgtttcgcaacgaaaattatcgatatcaaccgtaacgacatacgtattcgtttaattaataacgaacctatttaacgaaataaaaccgacgatcgaccaataactaaaattattcaaaatcataatcac

SEQ ID NO: 22965 - DNA, 1145 bp, Artificial Sequence
  chemically treated genomic DNA (Homo sapiens) CpG-island No: 22965
ggtcgggataacggtattcgtttgtttgtcgtgtggttgacgtacgattcggaatattcggagaatttatttgtcgcgtcgttggtgcgttatggttggacgttacgcggcgaattggcggtggtgtatgatcgtagtggtaaataggtgcgtacgtttatttacgatgataaatatcggggtcggatggtggcgtatcgttatacgggtcggtcggaaattcgttatcgttacgatagcgacgggcgggtgatagaatagttaaattcggtaggtttaagttatacgtattagtatgagaaagatcgtattattattatcgatagtttggatcgtcgtgaagtgttgtatacgtagggcgaagtcgggttgaagcgggtggtgaaaaaggaatacgcggacggtagcgttacgtagagttagtttgacgtcgtgggtaggtttagggtatagacggatgtcgtaggtaggataatagagtatagttcggatgtggtgacgggttttattacgcgtataattacgtcggatggtagggtatcggcgttttattataattattataattagttaacgttagttatcgggtttgacgggttggaattgcgtcgggaatatgatgaattgggtcgtttgatttaggaaattgtttttgacggcgatattattcgttatcgttatgataatttatatagtgatttattttgcgtaacggaagatgttatcggtagtcggaaaattatgacgtggagtcgttacggttagttgttgagttttatcgattgtttcggttatgtaattcgttatgattatgatcgtttcgggtagatgacggcggtgtatcgcgaggaagggttgagttagtatcgcgtatacgatagtcgtggatagttaattgtcgtgaaagatacgtagggttatgaaacgcggtatgaatataatatcgtcggtgatttgatcgtcgttattgtttcggacggtagtagaaacgggatatagtacgatgcgtggggaaaggtcgttcgtattacgtagggcgggtgacgcgtagtatggaatacgatgttgtcggacgggttattcgtttgattagtgaaaacggtagagtttgttagcgaaattattttggtaattgtttttatcgt

SEQ ID NO: 22966 - DNA, 1145 bp, Artificial Sequence
  chemically treated genomic DNA (Homo sapiens) CpG-island No: 22966
acgataaaaacaattaccaaaataatttcgctaacaaactctaccgttttcactaatcaaacgaataacccgtccgacaacatcgtattccatactacgcgtcacccgccctacgtaatacgaacgacctttccccacgcatcgtactatatcccgtttctactaccgtccgaaacaataacgacgatcaaatcaccgacgatattatattcataccgcgtttcataaccctacgtatctttcacgacaattaactatccacgactatcgtatacgcgatactaactcaacccttcctcgcgatacaccgccgtcatctacccgaaacgatcataatcataacgaattacataaccgaaacaatcgataaaactcaacaactaaccgtaacgactccacgtcataattttccgactaccgataacatcttccgttacgcaaaataaatcactatataaattatcataacgataacgaataatatcgccgtcaaaaacaatttcctaaatcaaacgacccaattcatcatattcccgacgcaattccaacccgtcaaacccgataactaacgttaactaattataataattataataaaacgccgataccctaccatccgacgtaattatacgcgtaataaaacccgtcaccacatccgaactatactctattatcctacctacgacatccgtctataccctaaacctacccacgacgtcaaactaactctacgtaacgctaccgtccgcgtattcctttttcaccacccgcttcaacccgacttcgccctacgtatacaacacttcacgacgatccaaactatcgataataataatacgatctttctcatactaatacgtataacttaaacctaccgaatttaactattctatcacccgcccgtcgctatcgtaacgataacgaatttccgaccgacccgtataacgatacgccaccatccgaccccgatatttatcatcgtaaataaacgtacgcacctatttaccactacgatcatacaccaccgccaattcgccgcgtaacgtccaaccataacgcaccaacgacgcgacaaataaattctccgaatattccgaatcgtacgtcaaccacacgacaaacaaacgaataccgttatcccgacc

SEQ ID NO: 22967 - DNA, 1145 bp, Artificial Sequence
  chemically treated genomic DNA (Homo sapiens) CpG-island No: 22967
acgatggaaataattattagaatgatttcgttggtaaattttgtcgtttttattggttaggcggatgattcgttcggtagtatcgtattttatattgcgcgttattcgttttgcgtggtacggacggtttttttttacgtatcgtattgtgtttcgtttttgttgtcgttcggggtaatgacggcggttaggttatcggcgatgttgtatttatatcgcgttttatggttttgcgtgttttttacggtaattaattgtttacggttgtcgtatgcgcggtattgatttagttttttttcgcggtgtatcgtcgttatttgttcgaagcggttatggttataacgggttatataatcggaatagtcggtgaagtttagtaattgatcgtaacggttttacgttatggtttttcggttgtcggtggtatttttcgttgcgtagggtaagttattgtgtggattattataacggtagcgggtgatatcgtcgttaggggtagttttttgaattagacggtttaatttattatattttcggcgtaattttagttcgttaggttcggtggttgacgttaattggttgtggtggttatagtaaaacgtcgatgttttgttattcggcgtggttatgcgcgtgatgaggttcgttattatattcgggttgtattttgttgttttgtttgcggtattcgtttgtgttttgagtttgtttacggcgttaaattgattttgcgtgacgttgtcgttcgcgtgttttttttttattattcgttttagttcggtttcgttttgcgtgtgtagtattttacggcggtttaggttgtcggtgatggtgatgcggttttttttatattgatacgtgtagtttaagtttgtcgggtttagttgttttgttattcgttcgtcgttgtcgtaacggtaacggattttcggtcggttcgtgtgacggtgcgttattattcggtttcggtatttattatcgtaagtaaacgtgcgtatttgtttgttattacggttatatattatcgttagttcgtcgcgtggcgtttagttatagcgtattagcggcgcggtaggtaaatttttcgggtatttcgggtcgtgcgttagttatacggtagatagacggatgtcgttgtttcggtt

SEQ ID NO: 22968 - DNA, 1145 bp, Artificial Sequence
  chemically treated genomic DNA (Homo sapiens) CpG-island No: 22968
aaccgaaacaacgacatccgtctatctaccgtataactaacgcacgacccgaaatacccgaaaaatttacctaccgcgccgctaatacgctataactaaacgccacgcgacgaactaacgataatatataaccgtaataacaaacaaatacgcacgtttacttacgataataaataccgaaaccgaataataacgcaccgtcacacgaaccgaccgaaaatccgttaccgttacgacaacgacgaacgaataacaaaacaactaaacccgacaaacttaaactacacgtatcaatataaaaaaaaccgcatcaccatcaccgacaacctaaaccgccgtaaaatactacacacgcaaaacgaaaccgaactaaaacgaataataaaaaaaaaacacgcgaacgacaacgtcacgcaaaatcaatttaacgccgtaaacaaactcaaaacacaaacgaataccgcaaacaaaacaacaaaatacaacccgaatataataacgaacctcatcacgcgcataaccacgccgaataacaaaacatcgacgttttactataaccaccacaaccaattaacgtcaaccaccgaacctaacgaactaaaattacgccgaaaatataataaattaaaccgtctaattcaaaaaactacccctaacgacgatatcacccgctaccgttataataatccacacaataacttaccctacgcaacgaaaaataccaccgacaaccgaaaaaccataacgtaaaaccgttacgatcaattactaaacttcaccgactattccgattatataacccgttataaccataaccgcttcgaacaaataacgacgatacaccgcgaaaaaaaactaaatcaataccgcgcatacgacaaccgtaaacaattaattaccgtaaaaaacacgcaaaaccataaaacgcgatataaatacaacatcgccgataacctaaccgccgtcattaccccgaacgacaacaaaaacgaaacacaatacgatacgtaaaaaaaaaccgtccgtaccacgcaaaacgaataacgcgcaatataaaatacgatactaccgaacgaatcatccgcctaaccaataaaaacgacaaaatttaccaacgaaatcattctaataattatttccatcgt

SEQ ID NO: 22969 - DNA, 687 bp, Artificial Sequence
  chemically treated genomic DNA (Homo sapiens) CpG-island No: 22969
  unsure (252)
acgcgcggattgatggttttggttgatattttacgcgttatttgggttttgtcgaggttgttatataaacggaagttgaattcgtcgtttagcggatcggttaggttaaagttagtgcgtttggtggtatttttttttttatgttttggcgtattgaaatatgcgttttaggagtcgtgttattcgtcgttgttttttttggtaatgatgttaattacgtcgttcgtcgcgtcgttgttataacgcgtattngtcggattacgtagaattttaatacgtttaattattttaggtggtatttaggaagtattattacgggtatcgcgttcgttacgttagttttgacgtatcgagttacggttgtttatcggtttgtcgttaattaaaattagcgtgtttttcggatttatatcgcgaatattaatttgtcggttatttttacgttgattattggtggagttatcggttaggttaacgtttggtatggtacggatgattttcgatatatcgcgggtaatcgggtttttgcggattttatttgcggtgatggtcgaaacgttaggcgtttgtaagttttgttcggcggcggtaacgataatagtatcgttatgtgaaataggagtatcggtcggtttttgtgtttgcgttattttataaatttttagattgattaataaggttagggaa

SEQ ID NO: 22970 - DNA, 687 bp, Artificial Sequence
  chemically treated genomic DNA (Homo sapiens) CpG-island No: 22970
  unsure (436)
ttccctaaccttattaatcaatctaaaaatttataaaataacgcaaacacaaaaaccgaccgatactcctatttcacataacgatactattatcgttaccgccgccgaacaaaacttacaaacgcctaacgtttcgaccatcaccgcaaataaaatccgcaaaaacccgattacccgcgatatatcgaaaatcatccgtaccataccaaacgttaacctaaccgataactccaccaataatcaacgtaaaaataaccgacaaattaatattcgcgatataaatccgaaaaacacgctaattttaattaacgacaaaccgataaacaaccgtaactcgatacgtcaaaactaacgtaacgaacgcgatacccgtaataatacttcctaaataccacctaaaataattaaacgtattaaaattctacgtaatccgacnaatacgcgttataacaacgacgcgacgaacgacgtaattaacatcattaccaaaaaaaacaacgacgaataacacgactcctaaaacgcatatttcaatacgccaaaacataaaaaaaaaaataccaccaaacgcactaactttaacctaaccgatccgctaaacgacgaattcaacttccgtttatataacaacctcgacaaaacccaaataacgcgtaaaatatcaaccaaaaccatcaatccgcgcgt

SEQ ID NO: 22971 - DNA, 687 bp, Artificial Sequence
  chemically treated genomic DNA (Homo sapiens) CpG-island No: 22971
  unsure (436)
ttttttggttttgttggttaatttggggatttatggggtagcgtaggtataagagtcgatcgatatttttgttttatatgacgatattattgtcgttatcgtcgtcgagtagaatttataggcgtttggcgtttcgattattatcgtagatgaaattcgtaaaaattcggttgttcgcgatgtgtcgaagattattcgtattatgttaggcgttaatttgatcggtaattttattagtggttagcgtgggaataatcgatagattgatattcgcggtatgggttcggaaaatacgttgattttgattgacggtaagtcggtaagtagtcgtaattcggtgcgttagggttggcgtggcgagcgcgatattcgtggtgatattttttgggtgttatttgaaatgattgaacgtattgaagttttgcgtggttcggtnagtgcgcgttatggtaacggcgcggcgggcggcgtggttaatattattattaaaaaaggtagcggcgagtggtacggtttttgggacgtatattttaatgcgttagaatataaagaggaaggtgttattaaacgtattaattttagtttgatcggttcgttgggcgacgaatttagttttcgtttgtatggtaatttcgataaaatttaggtgacgcgtgggatattaattagggttattagttcgcgcgt

SEQ ID NO: 22972 - DNA, 687 bp, Artificial Sequence
  chemically treated genomic DNA (Homo sapiens) CpG-island No: 22972
  unsure (252)
acgcgcgaactaataaccctaattaatatcccacgcgtcacctaaattttatcgaaattaccatacaaacgaaaactaaattcgtcgcccaacgaaccgatcaaactaaaattaatacgtttaataacaccttcctctttatattctaacgcattaaaatatacgtcccaaaaaccgtaccactcgccgctaccttttttaataataatattaaccacgccgcccgccgcgccgttaccataacgcgcactnaccgaaccacgcaaaacttcaatacgttcaatcatttcaaataacacccaaaaaatatcaccacgaatatcgcgctcgccacgccaaccctaacgcaccgaattacgactacttaccgacttaccgtcaatcaaaatcaacgtattttccgaacccataccgcgaatatcaatctatcgattattcccacgctaaccactaataaaattaccgatcaaattaacgcctaacataatacgaataatcttcgacacatcgcgaacaaccgaatttttacgaatttcatctacgataataatcgaaacgccaaacgcctataaattctactcgacgacgataacgacaataatatcgtcatataaaacaaaaatatcgatcgactcttatacctacgctaccccataaatccccaaattaaccaacaaaaccaaaaaa

SEQ ID NO: 22973 - DNA, 634 bp, Artificial Sequence
  chemically treated genomic DNA (Homo sapiens) CpG-island No: 22973
atcgtgattaatcgttttatgtaatagtacgttcggttaatttgcgttaagtattatcggtatggtgttcgttggtgtagtaacggtagaaagattgattagcgttatacgtattgttttttttgtttatgtattcgtacggatttcgtcgtcgagatcggtaaggaagaatttataattaaaacgatcgtcgtcgttattggtatcgcgttcgcgtttgttatttttttcgacgagaacgtttacggaaagacgtattagcggacggatattcgtcgttagcgtgtcgtcggtggtcgtaattaaaattaatttatagatattattgaggttggtagttattttttgtacgcgtttgttcgtttcgcggtaattttatcgacgcgacgtaggatatttagtttttttttacggtttatgttttgtagcggatttatcgaggtatataacgggttatgttttatcgcgtttagcgtttgtattttattattattattattacggacgatggtgcgcgtcgtttgcgtattttgttttagcgttagtaggttgatttggttagcgtaagtaaattcggtttttttatcgttgattgtacgtatattaacgttttgatcgatgttgtaagaattat

SEQ ID NO: 22974 - DNA, 634 bp, Artificial Sequence
  chemically treated genomic DNA (Homo sapiens) CpG-island No: 22974
ataattcttacaacatcgatcaaaacgttaatatacgtacaatcaacgataaaaaaaccgaatttacttacgctaaccaaatcaacctactaacgctaaaacaaaatacgcaaacgacgcgcaccatcgtccgtaataataataataataaaatacaaacgctaaacgcgataaaacataacccgttatatacctcgataaatccgctacaaaacataaaccgtaaaaaaaaactaaatatcctacgtcgcgtcgataaaattaccgcgaaacgaacaaacgcgtacaaaaaataactaccaacctcaataatatctataaattaattttaattacgaccaccgacgacacgctaacgacgaatatccgtccgctaatacgtctttccgtaaacgttctcgtcgaaaaaaataacaaacgcgaacgcgataccaataacgacgacgatcgttttaattataaattcttccttaccgatctcgacgacgaaatccgtacgaatacataaacaaaaaaaacaatacgtataacgctaatcaatctttctaccgttactacaccaacgaacaccataccgataatacttaacgcaaattaaccgaacgtactattacataaaacgattaatcacgat

SEQ ID NO: 22975 - DNA, 634 bp, Artificial Sequence
  chemically treated genomic DNA (Homo sapiens) CpG-island No: 22975
atggtttttataatatcgattagggcgttggtgtgcgtgtaattagcggtgaaaaaatcggatttgtttacgttgattaaattagtttgttggcgttggaatagagtgcgtaagcggcgcgtattatcgttcgtgatagtggtgatggtaaagtatagacgttgggcgcggtagagtatagttcgttgtatatttcggtagattcgttgtaaagtatgagtcgtgaagagaagttggatattttgcgtcgcgtcgataaggttgtcgcgaagcggataagcgcgtataggaagtgattgttagttttagtggtgtttatgaattaattttggttgcggttatcgacggtacgttagcggcggatgttcgttcgttggtgcgttttttcgtgagcgttttcgtcgaagaagatggtaaacgcgaacgcggtgttagtggcggcggcggtcgttttggttatgaatttttttttgtcgatttcgacggcgaagttcgtgcggatgtatgggtaaaagaagtagtgcgtatggcgttggttaatttttttgtcgttgttgtattagcgggtattatgtcggtagtatttggcgtaggttggtcgggcgtgttgttgtatgaagcggttggttacggt

SEQ ID NO: 22976 - DNA, 634 bp, Artificial Sequence
  chemically treated genomic DNA (Homo sapiens) CpG-island No: 22976
accgtaaccaaccgcttcatacaacaacacgcccgaccaacctacgccaaatactaccgacataatacccgctaatacaacaacgacaaaaaaattaaccaacgccatacgcactacttcttttacccatacatccgcacgaacttcgccgtcgaaatcgacaaaaaaaaattcataaccaaaacgaccgccgccgccactaacaccgcgttcgcgtttaccatcttcttcgacgaaaacgctcacgaaaaaacgcaccaacgaacgaacatccgccgctaacgtaccgtcgataaccgcaaccaaaattaattcataaacaccactaaaactaacaatcacttcctatacgcgcttatccgcttcgcgacaaccttatcgacgcgacgcaaaatatccaacttctcttcacgactcatactttacaacgaatctaccgaaatatacaacgaactatactctaccgcgcccaacgtctatactttaccatcaccactatcacgaacgataatacgcgccgcttacgcactctattccaacgccaacaaactaatttaatcaacgtaaacaaatccgattttttcaccgctaattacacgcacaccaacgccctaatcgatattataaaaaccat

SEQ ID NO: 22977 - DNA, 520 bp, Artificial Sequence
  chemically treated genomic DNA (Homo sapiens) CpG-island No: 22977
tgtcgtcgcgatttttgtattcgaattcgatttgtaattgatgattatcgtcgcgggtaatgtttcggttgagaaaattattcgtaatgttttgtaattgttgtatttttggaatgcggagatttcgttcgtttaaggggtcgttgtgttattggtacgcgtatcgcgtgatgcggtatttgtgtacggcgaatcgggaatggttggttacgattttgttgagtataatcgaaagtcgttcgggatatcggcgtttttggcgattcgggatgttttgatgcgtgtattagagtttgttattttggtggttatcgggttcgttaattaatattgcgttgttatttttataatgttcggaatgtaagtcgtatattcgtcgtttggtgattatgggtggttttgtcggacgcggtaattgtacgttaaacgtcgagtttaatattgttgtcgatttagaagttgttgtttgtgtttttcgtagtggtattgaaatcgttatgtgcggtttggatgttattaa

SEQ ID NO: 22978 - DNA, 520 bp, Artificial Sequence
  chemically treated genomic DNA (Homo sapiens) CpG-island No: 22978
ttaataacatccaaaccgcacataacgatttcaataccactacgaaaaacacaaacaacaacttctaaatcgacaacaatattaaactcgacgtttaacgtacaattaccgcgtccgacaaaaccacccataatcaccaaacgacgaatatacgacttacattccgaacattataaaaataacaacgcaatattaattaacgaacccgataaccaccaaaataacaaactctaatacacgcatcaaaacatcccgaatcgccaaaaacgccgatatcccgaacgactttcgattatactcaacaaaatcgtaaccaaccattcccgattcgccgtacacaaataccgcatcacgcgatacgcgtaccaataacacaacgaccccttaaacgaacgaaatctccgcattccaaaaatacaacaattacaaaacattacgaataattttctcaaccgaaacattacccgcgacgataatcatcaattacaaatcgaattcgaatacaaaaatcgcgacgaca

SEQ ID NO: 22979 - DNA, 520 bp, Artificial Sequence
  chemically treated genomic DNA (Homo sapiens) CpG-island No: 22979
ttggtgatatttaaatcgtatatgacgattttaatattattgcggaagatataggtagtagtttttggatcggtagtaatattaaattcggcgtttggcgtatagttgtcgcgttcggtagaattatttatgattattagacggcgaatatacggtttgtatttcgggtattgtgaaagtaatagcgtaatattggttaacgggttcgatggttattagggtaataggttttggtgtacgtattagggtatttcgaatcgttagaaacgtcggtatttcgagcggttttcggttgtgtttaataaagtcgtagttagttattttcgattcgtcgtgtatagatgtcgtattacgcggtgcgcgtattagtggtatagcggttttttgggcgagcggaattttcgtattttagaaatgtagtagttgtagggtattgcgggtagtttttttaatcgagatattattcgcgacggtggttattagttgtaggtcgagttcgggtgtaaaaatcgcggcggta

SEQ ID NO: 22980 - DNA, 520 bp, Artificial Sequence
  chemically treated genomic DNA (Homo sapiens) CpG-island No: 22980
taccgccgcgatttttacacccgaactcgacctacaactaataaccaccgtcgcgaataatatctcgattaaaaaaactacccgcaataccctacaactactacatttctaaaatacgaaaattccgctcgcccaaaaaaccgctataccactaatacgcgcaccgcgtaatacgacatctatacacgacgaatcgaaaataactaactacgactttattaaacacaaccgaaaaccgctcgaaataccgacgtttctaacgattcgaaataccctaatacgtacaccaaaacctattaccctaataaccatcgaacccgttaaccaatattacgctattactttcacaatacccgaaatacaaaccgtatattcgccgtctaataatcataaataattctaccgaacgcgacaactatacgccaaacgccgaatttaatattactaccgatccaaaaactactacctatatcttccgcaataatattaaaatcgtcatatacgatttaaatatcaccaa

SEQ ID NO: 22981 - DNA, 554 bp, Artificial Sequence
  chemically treated genomic DNA (Homo sapiens) CpG-island No: 22981
aattattcgttgtggtatacgttgtggatcgttacggtttgtatgtggtggatgaagttaatattgaaatttacggtatggtgttaatgaatcgtttgatcgatgattcgcgttggttatcggcgatgagcgaacgcggaacgcgaatggtgtagcgcgatcgtaattattcgagtgtgattatttggtcgttggggaatgaattaggttacggcgttaattacgacgcgttgtatcgttggattaaatttgtcgatttttttcgttcggtgtagtatgaaggcggcggatatatttacggttatcgatattatttgttcgatgtacgcgcgcgtagattaagattagtttttttcggttgtgcgaaagtggtttattaaaaaatggttttcgttatttggagatacgcgttcgttgattttttgcgaatacgtttacgcgatgggtaatagttttggcggtttcgttaaatattggtaggcgttttatttttattttcgtttatagggcggtttcgtttgggattgggtggattagtcgttgattaaatatga

SEQ ID NO: 22982 - DNA, 554 bp, Artificial Sequence
  chemically treated genomic DNA (Homo sapiens) CpG-island No: 22982
tcatatttaatcaacgactaatccacccaatcccaaacgaaaccgccctataaacgaaaataaaaataaaacgcctaccaatatttaacgaaaccgccaaaactattacccatcgcgtaaacgtattcgcaaaaaatcaacgaacgcgtatctccaaataacgaaaaccattttttaataaaccactttcgcacaaccgaaaaaaactaatcttaatctacgcgcgcgtacatcgaacaaataatatcgataaccgtaaatatatccgccgccttcatactacaccgaacgaaaaaaatcgacaaatttaatccaacgatacaacgcgtcgtaattaacgccgtaacctaattcattccccaacgaccaaataatcacactcgaataattacgatcgcgctacaccattcgcgttccgcgttcgctcatcgccgataaccaacgcgaatcatcgatcaaacgattcattaacaccataccgtaaatttcaatattaacttcatccaccacatacaaaccgtaacgatccacaacgtataccacaacgaataatt

SEQ ID NO: 22983 - DNA, 554 bp, Artificial Sequence
  chemically treated genomic DNA (Homo sapiens) CpG-island No: 22983
ttatatttaattagcgattgatttatttagttttagacgaagtcgttttgtaaacggagatgaggatgaaacgtttgttagtatttagcgaaatcgttaagattgttatttatcgcgtgggcgtattcgtaaaggattagcgggcgcgtatttttaggtagcgaaagttattttttgatggattattttcgtatagtcgggaagggttggttttaatttacgcgcgcgtatatcgggtaaataatatcggtggtcgtggatgtgttcgtcgtttttatattgtatcgggcgggaaggatcgatagatttgatttagcgatatagcgcgtcgtgattagcgtcgtggtttgatttattttttagcgattagatgattatattcgggtgattacgatcgcgttgtattattcgcgtttcgcgttcgtttatcgtcgatagttagcgcggattatcggttagacgatttattggtattatgtcgtgggttttaatattggttttatttattatatataggtcgtagcggtttatagcgtgtattatagcggatggtt

SEQ ID NO: 22984 - DNA, 554 bp, Artificial Sequence
  chemically treated genomic DNA (Homo sapiens) CpG-island No: 22984
aaccatccgctataatacacgctataaaccgctacgacctatatataataaataaaaccaatattaaaacccacgacataataccaataaatcgtctaaccgataatccgcgctaactatcgacgataaacgaacgcgaaacgcgaataatacaacgcgatcgtaatcacccgaatataatcatctaatcgctaaaaaataaatcaaaccacgacgctaatcacgacgcgctatatcgctaaatcaaatctatcgatccttcccgcccgatacaatataaaaacgacgaacacatccacgaccaccgatattatttacccgatatacgcgcgcgtaaattaaaaccaacccttcccgactatacgaaaataatccatcaaaaaataactttcgctacctaaaaatacgcgcccgctaatcctttacgaatacgcccacgcgataaataacaatcttaacgatttcgctaaatactaacaaacgtttcatcctcatctccgtttacaaaacgacttcgtctaaaactaaataaatcaatcgctaattaaatataa

SEQ ID NO: 22985 - DNA, 847 bp, Artificial Sequence
  chemically treated genomic DNA (Homo sapiens) CpG-island No: 22985
tcggtgtgtgtcgtgtcggttcgtttgtagtggggattaagggtgatggtagagcggatgattaagtgttgtcgcgtgatgttagtagttcggtagtagcgttattgtaataatttcgtacggatgatgagcggatttatcggtattattacgatagttagtatcggttggtcgattatacgcggatataatatgaagagtcgttggtcgaaagtcgttatttttacgattcgttgggtcgtagggtggtaaaacgggtgtggcggcgtgaacgggatttgacgggttggatgtcgttgttacggaaatcgtaagtgatttggtacggttgggacggcgatcggttgattacgatatagaacgataggagtcgtatttagacgatttattagtcggggagttttacgttatttattagggtcgaaattgttatcggtgagttggcgaaaacgtagcgtcgtagtttggcggatgttttttagtagttcggcggcgaagacggtggtagtgtggtgttttcgtcggtgttggtgtagatgttcgatcggttggaaagtgaaattttggttgatcgggtgagtgaggaaagtcgtcgttggttggtatcgtgcggtttgatcgtggagtagatgtaaaattagatggattcggtatatacgtcggcgcgaaaaatttatttgtattattgcgattatcgcggtttgtcgttggtttttattagtacggaagggataatagcgtggtattagaatacgatgaatggggtaatttgttgaatgaagagaattcgtattagttgtagtagtttattcgtttgtcggggtagtagtatgatgaggagttcggt

SEQ ID NO: 22986 - DNA, 847 bp, Artificial Sequence
  chemically treated genomic DNA (Homo sapiens) CpG-island No: 22986
accgaactcctcatcatactactaccccgacaaacgaataaactactacaactaatacgaattctcttcattcaacaaattaccccattcatcgtattctaataccacgctattatcccttccgtactaataaaaaccaacgacaaaccgcgataatcgcaataatacaaataaatttttcgcgccgacgtatataccgaatccatctaattttacatctactccacgatcaaaccgcacgataccaaccaacgacgactttcctcactcacccgatcaaccaaaatttcactttccaaccgatcgaacatctacaccaacaccgacgaaaacaccacactaccaccgtcttcgccgccgaactactaaaaaacatccgccaaactacgacgctacgttttcgccaactcaccgataacaatttcgaccctaataaataacgtaaaactccccgactaataaatcgtctaaatacgactcctatcgttctatatcgtaatcaaccgatcgccgtcccaaccgtaccaaatcacttacgatttccgtaacaacgacatccaacccgtcaaatcccgttcacgccgccacacccgttttaccaccctacgacccaacgaatcgtaaaaataacgactttcgaccaacgactcttcatattatatccgcgtataatcgaccaaccgatactaactatcgtaataataccgataaatccgctcatcatccgtacgaaattattacaataacgctactaccgaactactaacatcacgcgacaacacttaatcatccgctctaccatcacccttaatccccactacaaacgaaccgacacgacacacaccga

SEQ ID NO: 22987 - DNA, 847 bp, Artificial Sequence
  chemically treated genomic DNA (Homo sapiens) CpG-island No: 22987
gtcggattttttattatattgttgtttcggtaggcggataagttgttgtagttgatgcgggttttttttatttagtaggttattttatttatcgtattttggtattacgttgttgtttttttcgtgttgataagggttagcggtaggtcgcgatggtcgtagtggtataggtggatttttcgcgtcggcgtgtatatcgggtttatttggttttgtatttgttttacggttaggtcgtacgatgttagttagcggcggttttttttatttattcggttagttaggattttattttttagtcggtcgagtatttgtattagtatcggcgggaatattatattgttatcgttttcgtcgtcggattgttgaagggtattcgttaggttgcggcgttgcgttttcgttagtttatcggtggtagtttcgattttgatgagtggcgtgaagtttttcggttgataaatcgtttggatgcggtttttgtcgttttgtatcgtggttagtcggtcgtcgttttagtcgtattaggttatttgcggttttcgtgatagcgatatttagttcgttaggtttcgtttacgtcgttatattcgttttgttattttgcggtttagcgggtcgtaaagatagcgattttcgattagcggttttttatattgtgttcgcgtgtagtcgattagtcggtgttgattgtcgtaatggtatcggtgagttcgtttattattcgtgcggaattgttgtagtagcgttattatcgggttgttggtattacgcggtaatatttaattattcgttttgttattatttttagtttttattgtaggcgaatcgatacggtatatatcgg

SEQ ID NO: 22988 - DNA, 847 bp, Artificial Sequence
  chemically treated genomic DNA (Homo sapiens) CpG-island No: 22988
ccgatatataccgtatcgattcgcctacaataaaaactaaaaataataacaaaacgaataattaaatattaccgcgtaataccaacaacccgataataacgctactacaacaattccgcacgaataataaacgaactcaccgataccattacgacaatcaacaccgactaatcgactacacgcgaacacaatataaaaaaccgctaatcgaaaatcgctatctttacgacccgctaaaccgcaaaataacaaaacgaatataacgacgtaaacgaaacctaacgaactaaatatcgctatcacgaaaaccgcaaataacctaatacgactaaaacgacgaccgactaaccacgatacaaaacgacaaaaaccgcatccaaacgatttatcaaccgaaaaacttcacgccactcatcaaaatcgaaactaccaccgataaactaacgaaaacgcaacgccgcaacctaacgaatacccttcaacaatccgacgacgaaaacgataacaatataatattcccgccgatactaatacaaatactcgaccgactaaaaaataaaatcctaactaaccgaataaataaaaaaaaccgccgctaactaacatcgtacgacctaaccgtaaaacaaatacaaaaccaaataaacccgatatacacgccgacgcgaaaaatccacctataccactacgaccatcgcgacctaccgctaacccttatcaacacgaaaaaaacaacaacgtaataccaaaatacgataaataaaataacctactaaataaaaaaaacccgcatcaactacaacaacttatccgcctaccgaaacaacaatataataaaaaatccgac

SEQ ID NO: 22989 - DNA, 537 bp, Artificial Sequence
  chemically treated genomic DNA (Homo sapiens) CpG-island No: 22989
gacgggcgatcggtttgttcgtcgcgattaatatgatcgttattaattggcgcgaaatgggttatgcggtgatagtttaatgcggtagatattttatttgtcgattcgtatttttggacgtttttcggtgtagttcgtgtggcgtaaatgtgcgacgattgggggttgatttggggttgttattttaataattatttcgatatttttttggcgatgtttatttatgtgggcgcggcggtatcgggtaattttatcgttatcgatacgtattggatttggtaggagggcgattgtcgtttgatttaaaattcgttggagattaaaaagggaaaaattgtcgtttttgatgcgttcggtttgggcgtggaattggattgggaataggtataaaaggtatatgaggtttataaacgtttgtttggcggtgcgcgtaacgacgtaggttcgatgtagtatttgattttcggttggatttttgatcgtaaacgtttcgttttcggtcgttattgattttgaaaaaggttttaaatatgagtt

SEQ ID NO: 22990 - DNA, 537 bp, Artificial Sequence
  chemically treated genomic DNA (Homo sapiens) CpG-island No: 22990
aactcatatttaaaacctttttcaaaatcaataacgaccgaaaacgaaacgtttacgatcaaaaatccaaccgaaaatcaaatactacatcgaacctacgtcgttacgcgcaccgccaaacaaacgtttataaacctcatataccttttatacctattcccaatccaattccacgcccaaaccgaacgcatcaaaaacgacaatttttccctttttaatctccaacgaattttaaatcaaacgacaatcgccctcctaccaaatccaatacgtatcgataacgataaaattacccgataccgccgcgcccacataaataaacatcgccaaaaaaatatcgaaataattattaaaataacaaccccaaatcaacccccaatcgtcgcacatttacgccacacgaactacaccgaaaaacgtccaaaaatacgaatcgacaaataaaatatctaccgcattaaactatcaccgcataacccatttcgcgccaattaataacgatcatattaatcgcgacgaacaaaccgatcgcccgtc

SEQ ID NO: 22991 - DNA, 537 bp, Artificial Sequence
  chemically treated genomic DNA (Homo sapiens) CpG-island No: 22991
gatttatatttaaggttttttttagaattaatgacggtcgaaaacgggacgtttacggttaaaggtttagtcggggattaggtattgtatcggatttgcgtcgttacgcgtatcgttaggtagacgtttataggttttatgtgttttttgtatttgtttttagtttagttttacgtttagatcgggcgtattaggaacggtaatttttttttttttaatttttagcggattttgggttaggcgataatcgtttttttgttaaatttagtgcgtatcgatagcggtaggattattcggtgtcgtcgcgtttatatgggtaaatatcgttagagagatatcgaaatggttattagaatggtagttttaggttagtttttagtcgtcgtatatttgcgttatacggattgtatcggaaagcgtttagaagtgcggatcggtaagtggaatatttatcgtattgggttattatcgtatgatttatttcgcgttagttggtggcgattatgttagtcgcgacgggtaagtcggtcgttcgtt

SEQ ID NO: 22992 - DNA, 537 bp, Artificial Sequence
  chemically treated genomic DNA (Homo sapiens) CpG-island No: 22992
aacgaacgaccgacttacccgtcgcgactaacataatcgccaccaactaacgcgaaataaatcatacgataataacccaatacgataaatattccacttaccgatccgcacttctaaacgctttccgatacaatccgtataacgcaaatatacgacgactaaaaactaacctaaaactaccattctaataaccatttcgatatctctctaacgatatttacccatataaacgcgacgacaccgaataatcctaccgctatcgatacgcactaaatttaacaaaaaaacgattatcgcctaacccaaaatccgctaaaaattaaaaaaaaaaaaattaccgttcctaatacgcccgatctaaacgtaaaactaaactaaaaacaaatacaaaaaacacataaaacctataaacgtctacctaacgatacgcgtaacgacgcaaatccgatacaatacctaatccccgactaaacctttaaccgtaaacgtcccgttttcgaccgtcattaattctaaaaaaaaccttaaatataaatc

SEQ ID NO: 22993 - DNA, 676 bp, Artificial Sequence
  chemically treated genomic DNA (Homo sapiens) CpG-island No: 22993
  unsure (568)
gttagcgtcgatattgtttgtttgtaggaagtgatgggcgcgtacgaagtttattcgttgtatgtggaaaattggttcgatatttcgtattacgagtttttcgtcgatattatgtggagcgattttgtttacggtcgtaatgtcgtatattcggaaggtattacggtaacgtcgtattgtcgcgttattttattgaatattatgagaatcgcgatgtttcggtcgatggtgcggaaaagcgcggcgtgttttattgtcgtattgtgtcgtcgatgatcggaaaagcgatttatgtgatgtgcgtatatttgggtttgcgtgaggcgtatcgttaggcgtagtttgcgatgttcgtcgaatgggtgaatgagttatcggacggcgaatcggtattggtggcgggtgattttaatgattggcggtaaaaagttaattattcgttaaaagtgtaggtcggattggatgagatttttattcgcgtttacggacgttcggcgcgtacgttttcggtgtaattttttttattacgattggataggatttacgttaaaaatgttagcgttaggtngttaatcgcgttgtcgttgcggatatggcgatatttttttgattatgtttttttaagtgcggagatttatttatgaaatgtagttggcgcgaaggtaataagatttag

SEQ ID NO: 22994 - DNA, 676 bp, Artificial Sequence
  chemically treated genomic DNA (Homo sapiens) CpG-island No: 22994
  unsure (109)
ctaaatcttattaccttcgcgccaactacatttcataaataaatctccgcacttaaaaaaacataatcaaaaaaatatcgccatatccgcaacgacaacgcgattaacnacctaacgctaacatttttaacgtaaatcctatccaatcgtaataaaaaaaattacaccgaaaacgtacgcgccgaacgtccgtaaacgcgaataaaaatctcatccaatccgacctacacttttaacgaataattaactttttaccgccaatcattaaaatcacccgccaccaataccgattcgccgtccgataactcattcacccattcgacgaacatcgcaaactacgcctaacgatacgcctcacgcaaacccaaatatacgcacatcacataaatcgcttttccgatcatcgacgacacaatacgacaataaaacacgccgcgcttttccgcaccatcgaccgaaacatcgcgattctcataatattcaataaaataacgcgacaatacgacgttaccgtaataccttccgaatatacgacattacgaccgtaaacaaaatcgctccacataatatcgacgaaaaactcgtaatacgaaatatcgaaccaattttccacatacaacgaataaacttcgtacgcgcccatcacttcctacaaacaaacaatatcgacgctaac

SEQ ID NO: 22995 - DNA, 676 bp, Artificial Sequence
  chemically treated genomic DNA (Homo sapiens) CpG-island No: 22995
  unsure (109)
ttggattttattgttttcgcgttagttatattttataaatgaattttcgtatttaaaggggtatgattagaaaggtgtcgttatgttcgtagcggtaacgcggttggtngtttggcgttggtatttttgacgtagattttgtttagtcgtagtagaggaaattgtatcggaaacgtgcgcgtcgggcgttcgtgggcgcgggtaaaaattttatttagttcggtttgtatttttaacggatgattagttttttgtcgttagttattgaaattattcgttattaatatcggttcgtcgttcggtagtttatttatttattcggcgagtatcgtaagttgcgtttgacggtgcgttttacgtaggtttagatgtacgtatattatatgaatcgttttttcggttatcggcggtataatgcggtagtagagtacgtcgcgttttttcgtattatcgatcgaaatatcgcgatttttataatgtttaatgggataacgcgatagtacggcgttgtcgtgatgtttttcgggtatacggtattgcgatcgtaggtaaaatcgttttatatagtgtcggcgagaaattcgtagtgcgaggtatcgggttagttttttatatgtagcggatgaatttcgtgcgcgtttattattttttgtaggtaaataatatcggcgttgat

SEQ ID NO: 22996 - DNA, 676 bp, Artificial Sequence
  chemically treated genomic DNA (Homo sapiens) CpG-island No: 22996
  unsure (568)
atcaacgccgatattatttacctacaaaaaataataaacgcgcacgaaattcatccgctacatataaaaaactaacccgatacctcgcactacgaatttctcgccgacactatataaaacgattttacctacgatcgcaataccgtatacccgaaaaacatcacgacaacgccgtactatcgcgttatcccattaaacattataaaaatcgcgatatttcgatcgataatacgaaaaaacgcgacgtactctactaccgcattataccgccgataaccgaaaaaacgattcatataatatacgtacatctaaacctacgtaaaacgcaccgtcaaacgcaacttacgatactcgccgaataaataaataaactaccgaacgacgaaccgatattaataacgaataatttcaataactaacgacaaaaaactaatcatccgttaaaaatacaaaccgaactaaataaaatttttacccgcgcccacgaacgcccgacgcgcacgtttccgatacaatttcctctactacgactaaacaaaatctacgtcaaaaataccaacgccaaacnaccaaccgcgttaccgctacgaacataacgacacctttctaatcatacccctttaaatacgaaaattcatttataaaatataactaacgcgaaaacaataaaatccaa

SEQ ID NO: 22997 - DNA, 500 bp, Artificial Sequence
  chemically treated genomic DNA (Homo sapiens) CpG-island No: 22997
gtagtagcgtaacgcggggttaaagcggaagttttgttggatggttacggttcgtcggattttagcgatgagtttgttaatgaattgacggtagttggcgtagtgtttcgttattacgattttcgttttcgtttttttggtatgcgtattaatgtgtttcgtcggatgtatcgtaaaattgtggtgatcgacgcgcgtatagtttttattggcgggttgaattatttcgtcgagtatatgtttagttacggtttagaggttaaataggattacgcggtacgttttgaagggtcgattgtcgaagatattttttagtttgagttggaaaatttgtttggatagagcgcggtacgacgttggtggcgacgttattataaagcggaagagaatcgttagtcgggagaagcgtaggtattgttggtttggcgcgataacgaagaatatcgcgatgatattgaacgttattatttgaaaatgtttatttaggcgcggcgggaagt

SEQ ID NO: 22998 - DNA, 500 bp, Artificial Sequence
  chemically treated genomic DNA (Homo sapiens) CpG-island No: 22998
acttcccgccgcgcctaaataaacattttcaaataataacgttcaatatcatcgcgatattcttcgttatcgcgccaaaccaacaatacctacgcttctcccgactaacgattctcttccgctttataataacgtcgccaccaacgtcgtaccgcgctctatccaaacaaattttccaactcaaactaaaaaatatcttcgacaatcgacccttcaaaacgtaccgcgtaatcctatttaacctctaaaccgtaactaaacatatactcgacgaaataattcaacccgccaataaaaactatacgcgcgtcgatcaccacaattttacgatacatccgacgaaacacattaatacgcataccaaaaaaacgaaaacgaaaatcgtaataacgaaacactacgccaactaccgtcaattcattaacaaactcatcgctaaaatccgacgaaccgtaaccatccaacaaaacttccgctttaaccccgcgttacgctactac

SEQ ID NO: 22999 - DNA, 500 bp, Artificial Sequence
  chemically treated genomic DNA (Homo sapiens) CpG-island No: 22999
atttttcgtcgcgtttgagtgagtatttttaaataatggcgtttaatattatcgcgatgtttttcgttatcgcgttagattagtaatatttgcgtttttttcggttggcggttttttttcgttttgtgatgacgtcgttattagcgtcgtgtcgcgttttgtttaggtaggttttttagtttaaattggagaatattttcgataatcggttttttaaggcgtatcgcgtaattttgtttagtttttggatcgtagttggatatatgttcggcggagtaatttagttcgttaataaaggttatacgcgcgtcgattattataattttgcgatgtattcggcgaaatatattggtgcgtatattaaaaaggcgagggcggggatcgtagtagcggaatattacgttagttgtcgttagtttattgataaatttatcgttgagattcggcgaatcgtagttatttagtaagattttcgttttaatttcgcgttgcgttgttgt

SEQ ID NO: 23000 - DNA, 500 bp, Artificial Sequence
  chemically treated genomic DNA (Homo sapiens) CpG-island No: 23000
acaacaacgcaacgcgaaattaaaacgaaaatcttactaaataactacgattcgccgaatctcaacgataaatttatcaataaactaacgacaactaacgtaatattccgctactacgatccccgccctcgcctttttaatatacgcaccaatatatttcgccgaatacatcgcaaaattataataatcgacgcgcgtataacctttattaacgaactaaattactccgccgaacatatatccaactacgatccaaaaactaaacaaaattacgcgatacgccttaaaaaaccgattatcgaaaatattctccaatttaaactaaaaaacctacctaaacaaaacgcgacacgacgctaataacgacgtcatcacaaaacgaaaaaaaaccgccaaccgaaaaaaacgcaaatattactaatctaacgcgataacgaaaaacatcgcgataatattaaacgccattatttaaaaatactcactcaaacgcgacgaaaaat

SEQ ID NO: 23001 - DNA, 894 bp, Artificial Sequence
  chemically treated genomic DNA (Homo sapiens) CpG-island No: 23001
tttattacgttgcgttagttacgttatgttcgtcgttatttgtaataatcgttgtgtaatatttcggaagtacgaaaattgtttttgagtattttgcgttatttcggagcggtgcggcgcgggttattgttaatgtatcgttatagcgtgttcggcgcgtatatgtcgtaatggtcgtatatcgtcgggtagatgtagtttgatttgttttacgtttatacggtggatgaatatattattcgcgtgatgttgaaattggagagttttgttagtgaagaaacgcgttacgttattcgttgtgtgtggacgtttggtcgcgtttgtcgttaattgagttgatttttatcgtcgcgttgttttacgatatcgttaaaggacgcggcggcgattattttattttcggtgtttaggatgtagtgtattttgtcgaattttacgggttgaatttacgcgaaatatagttggtcgtttggttggttcgttagtatttgttgatgtcggtgatcgtttaacgtcgcgatatttaggattcggaagttattaagtagtttgtcgaagaagtgtaaacggaaaatcgtttgcgttatttggtatgtttgattgtggttgatatttgcgttattaacgagacgttgtggattagttggaagtaaagtttgttgcgtaattttattttgttatcggaaattagttacgacgcggaatgcgaaatacgtcggatatgcgcgaacgggtttatttggttggttgtttttttgcgtaaattacgttttaacgatcggcgtaacgaatcggaatatatcggatcggtattgacgaaatttacgttatttagttgcgcggcggtgattttttttttatgtgttaaagggtgattaatcggtaatataatta

SEQ ID NO: 23002 - DNA, 894 bp, Artificial Sequence
  chemically treated genomic DNA (Homo sapiens) CpG-island No: 23002
taattatattaccgattaatcaccctttaacacataaaaaaaaaatcaccgccgcgcaactaaataacgtaaatttcgtcaataccgatccgatatattccgattcgttacgccgatcgttaaaacgtaatttacgcaaaaaaacaaccaaccaaataaacccgttcgcgcatatccgacgtatttcgcattccgcgtcgtaactaatttccgataacaaaataaaattacgcaacaaactttacttccaactaatccacaacgtctcgttaataacgcaaatatcaaccacaatcaaacataccaaataacgcaaacgattttccgtttacacttcttcgacaaactacttaataacttccgaatcctaaatatcgcgacgttaaacgatcaccgacatcaacaaatactaacgaaccaaccaaacgaccaactatatttcgcgtaaattcaacccgtaaaattcgacaaaatacactacatcctaaacaccgaaaataaaataatcgccgccgcgtcctttaacgatatcgtaaaacaacgcgacgataaaaatcaactcaattaacgacaaacgcgaccaaacgtccacacacaacgaataacgtaacgcgtttcttcactaacaaaactctccaatttcaacatcacgcgaataatatattcatccaccgtataaacgtaaaacaaatcaaactacatctacccgacgatatacgaccattacgacatatacgcgccgaacacgctataacgatacattaacaataacccgcgccgcaccgctccgaaataacgcaaaatactcaaaaacaattttcgtacttccgaaatattacacaacgattattacaaataacgacgaacataacgtaactaacgcaacgtaataaa

SEQ ID NO: 23003 - DNA, 894 bp, Artificial Sequence
  chemically treated genomic DNA (Homo sapiens) CpG-island No: 23003
tggttgtgttatcggttgattattttttagtatatgaaaaagagattatcgtcgcgtaattggatggcgtgaatttcgttagtatcgattcggtgtatttcggttcgttgcgtcgatcgttaaagcgtggtttgcgtaagaaaatagttagttaaataaattcgttcgcgtatattcggcgtgtttcgtatttcgcgtcgtagttgattttcggtggtaaagtagagttacgtaatagattttgtttttagttaatttatagcgtttcgttggtggcgtaaatgttagttatagttaggtatattagatagcgtagacgatttttcgtttgtattttttcggtaaattgtttgatgattttcgggttttgaatatcgcggcgttgggcggttatcgatattaataggtgttggcgaattagttaggcgattagttgtgtttcgcgtgagtttagttcgtggagttcggtaaaatgtattatattttgagtatcgagaatggagtggtcgtcgtcgcgttttttggcgatatcgtgaaatagcgcggcgatgaaaattagtttagttgacggtaggcgcggttagacgtttatatataacggatggcgtggcgcgtttttttattggtaaaattttttagttttagtattacgcggatagtatgtttatttatcgtgtaggcgtggaatagattaaattgtatttgttcgacgatatgcgattattgcggtatatacgcgtcgagtacgttatggcgatgtattggtaatagttcgcgtcgtatcgtttcggggtgacgtagaatgtttaaaaatagttttcgtgttttcggaatattatatagcggttgttgtagatggcgacgggtatggcgtaattggcgtagcgtggtgga

SEQ ID NO: 23004 - DNA, 894 bp, Artificial Sequence
  chemically treated genomic DNA (Homo sapiens) CpG-island No: 23004
tccaccacgctacgccaattacgccatacccgtcgccatctacaacaaccgctatataatattccgaaaacacgaaaactatttttaaacattctacgtcaccccgaaacgatacgacgcgaactattaccaatacatcgccataacgtactcgacgcgtatataccgcaataatcgcatatcgtcgaacaaatacaatttaatctattccacgcctacacgataaataaacatactatccgcgtaatactaaaactaaaaaattttaccaataaaaaaacgcgccacgccatccgttatatataaacgtctaaccgcgcctaccgtcaactaaactaattttcatcgccgcgctatttcacgatatcgccaaaaaacgcgacgacgaccactccattctcgatactcaaaatataatacattttaccgaactccacgaactaaactcacgcgaaacacaactaatcgcctaactaattcgccaacacctattaatatcgataaccgcccaacgccgcgatattcaaaacccgaaaatcatcaaacaatttaccgaaaaaatacaaacgaaaaatcgtctacgctatctaatatacctaactataactaacatttacgccaccaacgaaacgctataaattaactaaaaacaaaatctattacgtaactctactttaccaccgaaaatcaactacgacgcgaaatacgaaacacgccgaatatacgcgaacgaatttatttaactaactattttcttacgcaaaccacgctttaacgatcgacgcaacgaaccgaaatacaccgaatcgatactaacgaaattcacgccatccaattacgcgacgataatctctttttcatatactaaaaaataatcaaccgataacacaacca

SEQ ID NO: 23005 - DNA, 614 bp, Artificial Sequence
  chemically treated genomic DNA (Homo sapiens) CpG-island No: 23005
  unsure (481, 489, 500..501, 550, 582, 608)
tggtggtcggtagtacgttataggagatgttcgacgcgggttattagtaggtaggtcgcgatttttttgtgtttttgtattcgtaaacgtatgaagagtatgcgttggtacgtatcgaacggaaattcggtttcggttatatcggttttatttgttatgtcgtatcggatgttacgttggaagatgattttaagcgtcgcgatttgattattaatgcgttggtttaggacgataacggcgagattatcgattcgtataacggtttgggcgatttgtaaaatcgtttgttgcgttatgtttttttcgtttttggcgaagattcgttacgcgtattgcgcgtggcgcgttttgttgcgcgttatgtttatttcggttttcgtattgtcgatgaaattttggcgttgatgcgcgagatgatttatgcgggtgaattggaatatttgacgtttgaacgggtatggaaagagatcgaaagcgtttnttatattngtaatttatanngtgttttttaggtattgcgcgattgcggttattgcggtttttatttttngaaattacgtattgtttggcgttttagttttngtaaggtgtattcggaaatcgatatnggtatt

SEQ ID NO: 23006 - DNA, 614 bp, Artificial Sequence
  chemically treated genomic DNA (Homo sapiens) CpG-island No: 23006
  unsure (7, 33, 65, 114..115, 126, 134)
aataccnatatcgatttccgaatacaccttacnaaaactaaaacgccaaacaatacgtaatttcnaaaaataaaaaccgcaataaccgcaatcgcgcaatacctaaaaaacacnntataaattacnaatataanaaacgctttcgatctctttccatacccgttcaaacgtcaaatattccaattcacccgcataaatcatctcgcgcatcaacgccaaaatttcatcgacaatacgaaaaccgaaataaacataacgcgcaacaaaacgcgccacgcgcaatacgcgtaacgaatcttcgccaaaaacgaaaaaaacataacgcaacaaacgattttacaaatcgcccaaaccgttatacgaatcgataatctcgccgttatcgtcctaaaccaacgcattaataatcaaatcgcgacgcttaaaatcatcttccaacgtaacatccgatacgacataacaaataaaaccgatataaccgaaaccgaatttccgttcgatacgtaccaacgcatactcttcatacgtttacgaatacaaaaacacaaaaaaatcgcgacctacctactaataacccgcgtcgaacatctcctataacgtactaccgaccacca

SEQ ID NO: 23007 - DNA, 614 bp, Artificial Sequence
  chemically treated genomic DNA (Homo sapiens) CpG-island No: 23007
  unsure (7, 33, 65, 114..115, 126, 134)
aatattngtatcgattttcggatgtattttgtnagggttggaacgttaaatagtgcgtaattttngggaataaaaatcgtagtggtcgtaatcgcgtagtatttggaagatatnntgtggattgtnggtgtgangggcgttttcggtttttttttatattcgtttaggcgttaggtgttttagtttattcgtatgggttatttcgcgtattaacgttagagttttatcggtaatacgaaaatcgaggtgggtataacgcgtagtaaaacgcgttacgcgtaatacgcgtaacggattttcgttaaaagcgggggaaatatggcgtaatagacgattttgtagatcgtttagatcgttgtacgggtcgataatttcgtcgttatcgttttgggttagcgtattaatggttagatcgcgacgtttaagattattttttagcgtgatattcggtgcggtatagtaagtaaaatcggtgtaatcggaatcggattttcgttcggtacgtgttagcgtatattttttatgcgtttgcggatgtagaaatataggaaaatcgcggtttatttgttggtagttcgcgtcgagtattttttgtggcgtattgtcgattatta

SEQ ID NO: 23008 - DNA, 614 bp, Artificial Sequence
  chemically treated genomic DNA (Homo sapiens) CpG-island No: 23008
  unsure (481, 489, 500..501, 550, 582, 608)
taataatcgacaatacgccacaaaaaatactcgacgcgaactaccaacaaataaaccgcgattttcctatatttctacatccgcaaacgcataaaaaatatacgctaacacgtaccgaacgaaaatccgattccgattacaccgattttacttactataccgcaccgaatatcacgctaaaaaataatcttaaacgtcgcgatctaaccattaatacgctaacccaaaacgataacgacgaaattatcgacccgtacaacgatctaaacgatctacaaaatcgtctattacgccatatttcccccgcttttaacgaaaatccgttacgcgtattacgcgtaacgcgttttactacgcgttatacccacctcgattttcgtattaccgataaaactctaacgttaatacgcgaaataacccatacgaataaactaaaacacctaacgcctaaacgaatataaaaaaaaaccgaaaacgcccntcacaccnacaatccacannatatcttccaaatactacgcgattacgaccactacgatttttattcccnaaaattacgcactatttaacgttccaaccctnacaaaatacatccgaaaatcgatacnaatatt

SEQ ID NO: 23009 - DNA, 549 bp, Artificial Sequence
  chemically treated genomic DNA (Homo sapiens) CpG-island No: 23009
ggttcggcggatttagtttttagtaatttgattatttggaaaggttttgtttcgttgaaggaagatttagcgggtaattatatttattacggggtgcgtgaatttggtatgattcgtatcgttaacggtatcgcgtattacggcggttttgtgtcgtatatcgcgacgtttttgatgtttgttgaatacgttcgtaacgtcgcgcggatggcggtattgatgaaagcgcggtagattatggtttatatttacgatttaattggtttgggcgaagatggttcgacgtattaggttgttgagtaattggttagtttgcgtttaacgttaaattttagtatttggcgatcgtgcgattaggtggaagcggcggtgggttggaagttggcggttgagcgttataacggatcgacggtattgatttttttaaggtagaatttggtttaggtggaacgtacgtcggattaggttaaagagattgttcgtggcggttatgtgttgaaagatagcggcggtaagttagatattattttgattgttatcggtttagag

SEQ ID NO: 23010 - DNA, 549 bp, Artificial Sequence
  chemically treated genomic DNA (Homo sapiens) CpG-island No: 23010
ctctaaaccgataacaatcaaaataatatctaacttaccgccgctatctttcaacacataaccgccacgaacaatctctttaacctaatccgacgtacgttccacctaaaccaaattctaccttaaaaaaatcaataccgtcgatccgttataacgctcaaccgccaacttccaacccaccgccgcttccacctaatcgcacgatcgccaaatactaaaatttaacgttaaacgcaaactaaccaattactcaacaacctaatacgtcgaaccatcttcgcccaaaccaattaaatcgtaaatataaaccataatctaccgcgctttcatcaataccgccatccgcgcgacgttacgaacgtattcaacaaacatcaaaaacgtcgcgatatacgacacaaaaccgccgtaatacgcgataccgttaacgatacgaatcataccaaattcacgcaccccgtaataaatataattacccgctaaatcttccttcaacgaaacaaaacctttccaaataatcaaattactaaaaactaaatccgccgaacc

SEQ ID NO: 23011 - DNA, 549 bp, Artificial Sequence
  chemically treated genomic DNA (Homo sapiens) CpG-island No: 23011
ttttgaatcggtggtaattagaataatatttggtttatcgtcgttgttttttagtatataatcgttacgagtaatttttttaatttgattcggcgtacgttttatttgggttagattttgttttgagaggattagtgtcgtcggttcgttgtggcgtttaatcgttagtttttagtttatcgtcgtttttatttgatcgtacggtcgttaggtgttgaaatttggcgttaagcgtaggttggttagttgtttaatagtttggtgcgtcggattattttcgtttaggttaattgagtcgtgggtataaattataatttgtcgcgtttttattagtgtcgttattcgcgcggcgttacgggcgtatttaataaatattaggaacgtcgcggtatacggtataaagtcgtcgtggtgcgcgatgtcgttggcgatacgggttatgttaaatttacgtatttcgtagtgaatgtagttgttcgttggatttttttttagcgaaatagaatttttttagatggttaggttgttgggagttagattcgtcgaatt

SEQ ID NO: 23012 - DNA, 549 bp, Artificial Sequence
  chemically treated genomic DNA (Homo sapiens) CpG-island No: 23012
aattcgacgaatctaactcccaacaacctaaccatctaaaaaaattctatttcgctaaaaaaaaatccaacgaacaactacattcactacgaaatacgtaaatttaacataacccgtatcgccaacgacatcgcgcaccacgacgactttataccgtataccgcgacgttcctaatatttattaaatacgcccgtaacgccgcgcgaataacgacactaataaaaacgcgacaaattataatttatacccacgactcaattaacctaaacgaaaataatccgacgcaccaaactattaaacaactaaccaacctacgcttaacgccaaatttcaacacctaacgaccgtacgatcaaataaaaacgacgataaactaaaaactaacgattaaacgccacaacgaaccgacgacactaatcctctcaaaacaaaatctaacccaaataaaacgtacgccgaatcaaattaaaaaaattactcgtaacgattatatactaaaaaacaacgacgataaaccaaatattattctaattaccaccgattcaaaa

SEQ ID NO: 23013 - DNA, 1069 bp, Artificial Sequence
  chemically treated genomic DNA (Homo sapiens) CpG-island No: 23013
  unsure (958)
tttcgatcgatattttcgacgtttaggatgaggaatatcgggagtcggtgttgttttttaacgttgcggtttgcgacgtaaaacgcgaggtggtgtatgatttacgtttttcgtcgattatttattatttgtttgttgttggttttcgtttgtgtggttgtaggtatttggggattacgtagcggtgtcgttacgttggaaatttcgtaggtattcgtcgcgttgatgggcgatgcgtcgcgtagtatgacgatggtggttatcgaatggcgtttattacgcgtgttgatggcgttgttgattggcgtacgattgggcgttagtggcgttattttttagtcgttgatgcgtaattcgttcggtagttttgacgtaatgggttttaatatcggggcgtggagcggcgtgttggtggcgatggtgttgtttggttaggatttgacggttatcgcgttgttagtaatggtgggcggtattgttatttcgttgttggtttggttgttcgtttggcgtaacggtatcgatatttttcggttgattattatcggtatcggcgttcgcgttatgttggtggtttttaatatttggttgttgttgaaagcgtttttagaaacggcgttaatagtaggtttgtggaatgtcggatcgtttaacggtttgacgtgggtaaaaatttcgtttttcgtatttattattatattgatgtttattgtcgtcgttttattggtacgtcggatgcgtttgttggaaatgggcgatgatatcgcgtgtgcgttgggcgttagcgtcgaacgttcgcgtttgttaatgatgttggttgtagtggtgtttatcgttgcggtaatagcgtttgtcgggtcgattttttttattgttttagtcgtatcgtatattgttcgacgtattagcggtatcgttcgttgggggttaatttaggcggcgttatgcggggcgttgntattgttggcggtcgatttttgcgtttaataattgtttatgtcgtattaattttcggttggcgtcgttatcgttagtttcggcggtatttattttatcgttttgttaattt

SEQ ID NO: 23014 - DNA, 1069 bp, Artificial Sequence
  chemically treated genomic DNA (Homo sapiens) CpG-island No: 23014
  unsure (112)
aaattaacaaaacgataaaataaataccgccgaaactaacgataacgacgccaaccgaaaattaatacgacataaacaattattaaacgcaaaaatcgaccgccaacaatancaacgccccgcataacgccgcctaaattaacccccaacgaacgataccgctaatacgtcgaacaatatacgatacgactaaaacaataaaaaaaatcgacccgacaaacgctattaccgcaacgataaacaccactacaaccaacatcattaacaaacgcgaacgttcgacgctaacgcccaacgcacacgcgatatcatcgcccatttccaacaaacgcatccgacgtaccaataaaacgacgacaataaacatcaatataataataaatacgaaaaacgaaatttttacccacgtcaaaccgttaaacgatccgacattccacaaacctactattaacgccgtttctaaaaacgctttcaacaacaaccaaatattaaaaaccaccaacataacgcgaacgccgataccgataataatcaaccgaaaaatatcgataccgttacgccaaacgaacaaccaaaccaacaacgaaataacaataccgcccaccattactaacaacgcgataaccgtcaaatcctaaccaaacaacaccatcgccaccaacacgccgctccacgccccgatattaaaacccattacgtcaaaactaccgaacgaattacgcatcaacgactaaaaaataacgccactaacgcccaatcgtacgccaatcaacaacgccatcaacacgcgtaataaacgccattcgataaccaccatcgtcatactacgcgacgcatcgcccatcaacgcgacgaatacctacgaaatttccaacgtaacgacaccgctacgtaatccccaaatacctacaaccacacaaacgaaaaccaacaacaaacaaataataaataatcgacgaaaaacgtaaatcatacaccacctcgcgttttacgtcgcaaaccgcaacgttaaaaaacaacaccgactcccgatattcctcatcctaaacgtcgaaaatatcgatcgaaa

SEQ ID NO: 23015 - DNA, 1069 bp, Artificial Sequence
  chemically treated genomic DNA (Homo sapiens) CpG-island No: 23015
  unsure (112)
gaattaataagacgataaggtaaatatcgtcgaggttgacggtaacgacgttaatcggaagttgatacggtataaatagttgttgggcgtagagatcggtcgttagtagtantagcgtttcgtatagcgtcgtttgggttagtttttagcgagcggtgtcgttaatgcgtcgggtaatgtgcggtgcgattaaagtaataaaggaaatcggttcggtaagcgttgttgtcgtagcggtaagtattattgtaattagtattattaatagacgcgaacgttcgacgttgacgtttagcgtatacgcggtattatcgtttatttttagtaagcgtattcggcgtattagtaaggcggcggtaatgagtattaatataatgatgggtgcggaaggcgaggtttttgtttacgttaggtcgttgagcgattcggtattttataaatttgttgttagcgtcgtttttaaagacgtttttagtaatagttaggtattaaaggttattagtatggcgcgaacgtcgatatcgataataattaatcgaaaggtgtcgatgtcgttgcgttaggcgagtagttagattagtagcgaagtgataatgtcgtttattattgttgatagcgcgatagtcgttaggttttgattaaatagtattatcgttattagtacgtcgttttacgtttcggtgttaaagtttattacgttagggttgtcgagcgggttacgtattagcgattgaaaaatagcgttattgacgtttagtcgtgcgttaattaatagcgttattagtacgcgtggtaaacgttattcggtgattattatcgttatattgcgcggcgtatcgtttattagcgcggcgaatatttgcgaggtttttagcgtgacggtatcgttgcgtaatttttagatatttgtaattatataggcggaaattagtagtaaataggtgatgagtaatcggcgagagacgtaaattatgtattatttcgcgttttacgtcgtaagtcgtaacgttagaaggtaatatcgattttcgatattttttattttgggcgtcgaaaatatcggtcgagg

SEQ ID NO: 23016 - DNA, 1069 bp, Artificial Sequence
  chemically treated genomic DNA (Homo sapiens) CpG-island No: 23016
  unsure (958)
cctcgaccgatattttcgacgcccaaaataaaaaatatcgaaaatcgatattaccttctaacgttacgacttacgacgtaaaacgcgaaataatacataatttacgtctctcgccgattactcatcacctatttactactaatttccgcctatataattacaaatatctaaaaattacgcaacgataccgtcacgctaaaaacctcgcaaatattcgccgcgctaataaacgatacgccgcgcaatataacgataataatcaccgaataacgtttaccacgcgtactaataacgctattaattaacgcacgactaaacgtcaataacgctatttttcaatcgctaatacgtaacccgctcgacaaccctaacgtaataaactttaacaccgaaacgtaaaacgacgtactaataacgataatactatttaatcaaaacctaacgactatcgcgctatcaacaataataaacgacattatcacttcgctactaatctaactactcgcctaacgcaacgacatcgacacctttcgattaattattatcgatatcgacgttcgcgccatactaataacctttaatacctaactattactaaaaacgtctttaaaaacgacgctaacaacaaatttataaaataccgaatcgctcaacgacctaacgtaaacaaaaacctcgccttccgcacccatcattatattaatactcattaccgccgccttactaatacgccgaatacgcttactaaaaataaacgataataccgcgtatacgctaaacgtcaacgtcgaacgttcgcgtctattaataatactaattacaataatacttaccgctacgacaacaacgcttaccgaaccgatttcctttattactttaatcgcaccgcacattacccgacgcattaacgacaccgctcgctaaaaactaacccaaacgacgctatacgaaacgctantactactaacgaccgatctctacgcccaacaactatttataccgtatcaacttccgattaacgtcgttaccgtcaacctcgacgatatttaccttatcgtcttattaattc

SEQ ID NO: 23017 - DNA, 554 bp, Artificial Sequence
  chemically treated genomic DNA (Homo sapiens) CpG-island No: 23017
acgtttgtttatgggtatgtttggttggatggcgagtatatttaatattacgttagtaaagaggttgtacgtcggattggtttgttggcgtaaaatgttattacgtcgggcgatattatcgtgtaggagttggtggcgcgtggacgttattcgtattaatcgttgtttattcgttggcgtaaagaggatgaagaagcggtaacgaaagtaatgtaggttacgggaataatttatttggtagattaaagcgtggatattttttttggcggataacgtagcgagcgtggatcgcgatggtgttggtttaggaaacggtaattatgttgttcgacgaatttacgatttggttggatattagttattgtggggataattcggttttatcggttttagttttaatttcgagcgggttacgtttagttgcggcgtagaaggtagttagtttatacgttcggcgcgaacgttgaaattaattagatgatcgttgtatttattggtatcggcgagcggggaaagtaatttttgagtagagatttttttatagcgttattggt

SEQ ID NO: 23018 - DNA, 554 bp, Artificial Sequence
  chemically treated genomic DNA (Homo sapiens) CpG-island No: 23018
accaataacgctataaaaaaatctctactcaaaaattactttccccgctcgccgataccaataaatacaacgatcatctaattaatttcaacgttcgcgccgaacgtataaactaactaccttctacgccgcaactaaacgtaacccgctcgaaattaaaactaaaaccgataaaaccgaattatccccacaataactaatatccaaccaaatcgtaaattcgtcgaacaacataattaccgtttcctaaaccaacaccatcgcgatccacgctcgctacgttatccgccaaaaaaaatatccacgctttaatctaccaaataaattattcccgtaacctacattactttcgttaccgcttcttcatcctctttacgccaacgaataaacaacgattaatacgaataacgtccacgcgccaccaactcctacacgataatatcgcccgacgtaataacattttacgccaacaaaccaatccgacgtacaacctctttactaacgtaatattaaatatactcgccatccaaccaaacatacccataaacaaacgt

SEQ ID NO: 23019 - DNA, 554 bp, Artificial Sequence
  chemically treated genomic DNA (Homo sapiens) CpG-island No: 23019
gttaatggcgttatgaaaaagtttttgtttaggagttatttttttcgttcgtcgatgttagtaagtatagcggttatttgattgattttaacgttcgcgtcgaacgtatgggttggttattttttgcgtcgtagttgggcgtaattcgttcgggattaaagttgaagtcgataaggtcggattatttttatagtgattgatatttagttaggtcgtgggttcgtcgagtagtataattgtcgttttttgggttagtattatcgcgatttacgttcgttgcgttgttcgttagaaagggtatttacgttttgatttgttagatgagttattttcgtggtttgtattgttttcgttatcgtttttttattttttttgcgttagcgggtaaatagcggttgatgcggataacgtttacgcgttattagtttttgtacggtgatatcgttcggcgtggtagtattttgcgttaatagattaattcggcgtgtaatttttttattggcgtaatgttgaatgtgttcgttatttagttagatatgtttatgagtaggcgt

SEQ ID NO: 23020 - DNA, 554 bp, Artificial Sequence
  chemically treated genomic DNA (Homo sapiens) CpG-island No: 23020
acgcctactcataaacatatctaactaaataacgaacacattcaacattacgccaataaaaaaattacacgccgaattaatctattaacgcaaaatactaccacgccgaacgatatcaccgtacaaaaactaataacgcgtaaacgttatccgcatcaaccgctatttacccgctaacgcaaaaaaaataaaaaaacgataacgaaaacaatacaaaccacgaaaataactcatctaacaaatcaaaacgtaaataccctttctaacgaacaacgcaacgaacgtaaatcgcgataatactaacccaaaaaacgacaattatactactcgacgaacccacgacctaactaaatatcaatcactataaaaataatccgaccttatcgacttcaactttaatcccgaacgaattacgcccaactacgacgcaaaaaataaccaacccatacgttcgacgcgaacgttaaaatcaatcaaataaccgctatacttactaacatcgacgaacgaaaaaaataactcctaaacaaaaactttttcataacgccattaac

SEQ ID NO: 23021 - DNA, 968 bp, Artificial Sequence
  chemically treated genomic DNA (Homo sapiens) CpG-island No: 23021
  unsure (830, 866, 933, 937)
tagtagcgcgtagtatacgatttgtagcgtagtaatcgtcgcgtttttttagtattattagtatcggtatgtcggtgtagcgacgtatatagtcggtgaaatattggtttgggttgtcgaggtggaatttacgtagtattacgtggtttatcgttagcgttattgtcgtatcggtgttttgtttcggtgttagttatagatcgtatagtttggcgattttagcgtagtttggtgtgacggtaatagttttggtttttttgtaacgtattttagtaaagaagtgagtattcggggtacgcgtttgcggtacgtttgatttttaggcgatgatgtagttggagttgtattagttagtagatttcggtacgttagtttgttcgttttaggtttgcggagacgtaggaggtaagtcgtagtattagtcgtagaagtttaagtaagtatcgttaattagcgagagatagcgtgtattcgatgcgtaagaaattatcgatattgtcggaattggcgagaaattagtaatacggttcgggtcgtagtttttgatggtgtaaacgttagatgcggcgattagttcgtttattttttgttaggaagaacgaataaatttatcgcgtttacgcgtttgtttaaagtttttcgttttatcggcgtttttaatgatagaagtttatgttttaatcggatcgttatgtagcgttttcgttttacgttatatttttattaggcgtttgcgtattatcgggtattttaggcggttggtattgtaaagatattaggagtagttggtatcgcgcgggtagttgcgagtttatggtttggtagatttngaacggtacgcggatagttagtttgttgggtttttnaggtgatagatcgtttttgacgtagatttttttagttgtagagtaggtgtagtttattcgtgggtanagtngacgattttgttatgttgttaaacgttgcga

SEQ ID NO: 23022 - DNA, 968 bp, Artificial Sequence
  chemically treated genomic DNA (Homo sapiens) CpG-island No: 23022
  unsure (32, 36, 103, 139)
tcgcaacgtttaacaacataacaaaatcgtcnactntacccacgaataaactacacctactctacaactaaaaaaatctacgtcaaaaacgatctatcacctnaaaaacccaacaaactaactatccgcgtaccgttcnaaatctaccaaaccataaactcgcaactacccgcgcgataccaactactcctaatatctttacaataccaaccgcctaaaatacccgataatacgcaaacgcctaataaaaatataacgtaaaacgaaaacgctacataacgatccgattaaaacataaacttctatcattaaaaacgccgataaaacgaaaaactttaaacaaacgcgtaaacgcgataaatttattcgttcttcctaacaaaaaataaacgaactaatcgccgcatctaacgtttacaccatcaaaaactacgacccgaaccgtattactaatttctcgccaattccgacaatatcgataatttcttacgcatcgaatacacgctatctctcgctaattaacgatacttacttaaacttctacgactaatactacgacttacctcctacgtctccgcaaacctaaaacgaacaaactaacgtaccgaaatctactaactaatacaactccaactacatcatcgcctaaaaatcaaacgtaccgcaaacgcgtaccccgaatactcacttctttactaaaatacgttacaaaaaaaccaaaactattaccgtcacaccaaactacgctaaaatcgccaaactatacgatctataactaacaccgaaacaaaacaccgatacgacaataacgctaacgataaaccacgtaatactacgtaaattccacctcgacaacccaaaccaatatttcaccgactatatacgtcgctacaccgacataccgatactaataatactaaaaaaacgcgacgattactacgctacaaatcgtatactacgcgctacta

SEQ ID NO: 23023 - DNA, 968 bp, Artificial Sequence
  chemically treated genomic DNA (Homo sapiens) CpG-island No: 23023
  unsure (32, 36, 103, 139)
tcgtagcgtttggtagtatgataaaatcgttngttntatttacgggtaaattgtatttgttttgtagttgggaaaatttacgttaaaaacggtttgttatttngggaatttagtagattgattattcgcgtatcgtttnggatttgttaaattatgaattcgtagttgttcgcgcggtgttagttatttttggtatttttatagtgttaatcgtttgaaatattcgatgatgcgtaaacgtttgatgaaaatgtggcgtgaagcgaaggcgttgtatagcgattcggttgaggtatgggtttttattattgaagacgtcgataaagcgaaaagttttaagtaggcgcgtggacgcggtggatttgttcgttttttttggtaggaggtgaacgaattgatcgtcgtatttaacgtttatattattaaaaattacggttcggatcgtgttgttggtttttcgttaatttcggtaatgtcgatggttttttacgtatcgggtgtacgttatttttcgttgattggcggtatttgtttaagtttttacgattggtattgcgatttgttttttgcgttttcgtaaatttggggcgagtaaattgacgtatcggaatttgttgattggtataattttagttatattatcgtttgggggttaaacgtgtcgtagacgcgtatttcggatgtttatttttttattgaagtgcgttataaagggattaaaattgttgtcgttatattagattacgttgaaatcgttaaattgtgcgatttgtggttggtatcgaaatagggtatcgatgcggtaatggcgttggcgatgggttacgtaatgttgcgtgaattttatttcgataatttaagttagtattttatcgattatgtgcgtcgttatatcgatatgtcgatgttggtgatgttggaagaacgcgacggttattacgttgtaggtcgtatgttgcgcgttgttg

SEQ ID NO: 23024 - DNA, 968 bp, Artificial Sequence
  chemically treated genomic DNA (Homo sapiens) CpG-island No: 23024
  unsure (830, 866, 933, 937)
caacaacgcgcaacatacgacctacaacgtaataaccgtcgcgttcttccaacatcaccaacatcgacatatcgatataacgacgcacataatcgataaaatactaacttaaattatcgaaataaaattcacgcaacattacgtaacccatcgccaacgccattaccgcatcgataccctatttcgataccaaccacaaatcgcacaatttaacgatttcaacgtaatctaatataacgacaacaattttaatccctttataacgcacttcaataaaaaaataaacatccgaaatacgcgtctacgacacgtttaacccccaaacgataatataactaaaattataccaatcaacaaattccgatacgtcaatttactcgccccaaatttacgaaaacgcaaaaaacaaatcgcaataccaatcgtaaaaacttaaacaaataccgccaatcaacgaaaaataacgtacacccgatacgtaaaaaaccatcgacattaccgaaattaacgaaaaaccaacaacacgatccgaaccgtaatttttaataatataaacgttaaatacgacgatcaattcgttcacctcctaccaaaaaaaacgaacaaatccaccgcgtccacgcgcctacttaaaacttttcgctttatcgacgtcttcaataataaaaacccatacctcaaccgaatcgctatacaacgccttcgcttcacgccacattttcatcaaacgtttacgcatcatcgaatatttcaaacgattaacactataaaaataccaaaaataactaacaccgcgcgaacaactacgaattcataatttaacaaatccnaaacgatacgcgaataatcaatctactaaattcccnaaataacaaaccgtttttaacgtaaattttcccaactacaaaacaaatacaatttacccgtaaatanaacnaacgattttatcatactaccaaacgctacga

SEQ ID NO: 23025 - DNA, 650 bp, Artificial Sequence
  chemically treated genomic DNA (Homo sapiens) CpG-island No: 23025
gcgtagtgcggtaacggtgcgcgttgttttgttcgttttgtgcgtttgaaaggattgattaataagcgtgatattcgcgttagtatcgttaacgggcggatggttttgatcgttatcgatgatgatttggttcgcgtaaatatgggcgaatttaatttcgaatttttcgtcgtgtcgtttcgcgttaataaagcggaaaagatttatattatgcgcgtcgtcgagtagataattttatgcggcgtggtgtcgatgggaaattcgtattgcgtgatttaggtcgatgatgtcgatatcgcggcggtagaaacgtttggttttgttttggaaagttacgagcgtttttcggagcgcgttaatatcggttttatgtaagtggttaagcgcgagtatattcgtttacgcgtttatgagcgtggggtaggagaaatttaggtttgcggtagcggcgcgtgtgcggcggttgtagtagggatttagtaaggtttgttggtcgaagaagtacgcgtggaatttttcggcggtcgttttgatatcgtttggaaaggttcgggttattcgttatatatgattggttcggcggtatatgtttacgacggatttatttatttatgaagtaattaggggaagaattgtaggaaatatttacg

SEQ ID NO: 23026 - DNA, 650 bp, Artificial Sequence
  chemically treated genomic DNA (Homo sapiens) CpG-island No: 23026
cgtaaatatttcctacaattcttcccctaattacttcataaataaataaatccgtcgtaaacatataccgccgaaccaatcatatataacgaataacccgaacctttccaaacgatatcaaaacgaccgccgaaaaattccacgcgtacttcttcgaccaacaaaccttactaaatccctactacaaccgccgcacacgcgccgctaccgcaaacctaaatttctcctaccccacgctcataaacgcgtaaacgaatatactcgcgcttaaccacttacataaaaccgatattaacgcgctccgaaaaacgctcgtaactttccaaaacaaaaccaaacgtttctaccgccgcgatatcgacatcatcgacctaaatcacgcaatacgaatttcccatcgacaccacgccgcataaaattatctactcgacgacgcgcataatataaatcttttccgctttattaacgcgaaacgacacgacgaaaaattcgaaattaaattcgcccatatttacgcgaaccaaatcatcatcgataacgatcaaaaccatccgcccgttaacgatactaacgcgaatatcacgcttattaatcaatcctttcaaacgcacaaaacgaacaaaacaacgcgcaccgttaccgcactacgc

SEQ ID NO: 23027 - DNA, 650 bp, Artificial Sequence
  chemically treated genomic DNA (Homo sapiens) CpG-island No: 23027
cgtgagtgttttttgtagttttttttttggttgttttatagatgaataaattcgtcgtagatatgtatcgtcgggttagttatatataacgggtgattcggatttttttaggcgatattaagacgatcgtcggggagttttacgcgtattttttcggttagtaaattttgttgaatttttattgtaatcgtcgtatacgcgtcgttgtcgtaggtttgggttttttttgttttacgtttataaacgcgtaaacgaatatgttcgcgtttaattatttgtataaaatcgatattggcgcgtttcggaaaacgttcgtggttttttagaataggattaagcgtttttatcgtcgcggtatcgatattatcgatttgaattacgtaatgcggattttttatcgatattacgtcgtataagattgtttgttcggcggcgcgtataatataggtttttttcgttttgttagcgcgaaacggtacggcggaaggttcgaagttgggttcgtttatatttacgcggattagattattatcggtgacggttagaattattcgttcgttggcggtgttgacgcggatattacgtttattggttagtttttttagacgtataaaacgggtaaagtagcgcgtatcgttgtcgtattgcgt

SEQ ID NO: 23028 - DNA, 650 bp, Artificial Sequence
  chemically treated genomic DNA (Homo sapiens) CpG-island No: 23028
acgcaatacgacaacgatacgcgctactttacccgttttatacgtctaaaaaaactaaccaataaacgtaatatccgcgtcaacaccgccaacgaacgaataattctaaccgtcaccgataataatctaatccgcgtaaatataaacgaacccaacttcgaaccttccgccgtaccgtttcgcgctaacaaaacgaaaaaaacctatattatacgcgccgccgaacaaacaatcttatacgacgtaatatcgataaaaaatccgcattacgtaattcaaatcgataatatcgataccgcgacgataaaaacgcttaatcctattctaaaaaaccacgaacgttttccgaaacgcgccaatatcgattttatacaaataattaaacgcgaacatattcgtttacgcgtttataaacgtaaaacaaaaaaaacccaaacctacgacaacgacgcgtatacgacgattacaataaaaattcaacaaaatttactaaccgaaaaaatacgcgtaaaactccccgacgatcgtcttaatatcgcctaaaaaaatccgaatcacccgttatatataactaacccgacgatacatatctacgacgaatttattcatctataaaacaaccaaaaaaaaaactacaaaaaacactcacg

SEQ ID NO: 23029 - DNA, 795 bp, Artificial Sequence
  chemically treated genomic DNA (Homo sapiens) CpG-island No: 23029
  unsure (202, 789)
gggtatgtattaggatattaattgggataacgataacggtattaagtggtggatcgtcggtattcgttcgatgtataagtggacgttaattatgagtatcgtgatggaaatcggttacgataacgtcgaattttagcgtatcggcgataagaataattagtataaaattattttcgtataataatggtaggttggcgatatnatttggttacgttcggttattcgtgttttcgtaatttacgttaagtgggatgagaaatggggttacgattatatcggtaacgttgataataacgcgaatttcggtaaagcgtttttgttgattttaacggcggtatttcggtcgtggcgatacgacgagtggatttcggtgtttagatggaaatttggtggtaatagtaaaatttgggtcggataaggcgtttacgtcgtattcggtaatcggtgtacgattgtttgatgcgacgtttgcgcgttttattaggtttatagtcgttgtcgaacgtaggttggataagacgtttacgtcgtattcggtatttgtgcgttgatgtttgatgcgacgttgacgcgttttattatgtttataaatttgtacgcgaagtgtagatcggataatgcgtttacgtcgtattcggtagtcgtgcgttatgtttgatgcgacgtttgcgcgttttattagcgtacggtttacgggcgaagtgtaggtcggataaggcgtttacgtcgtattcggtatgaataaagcgtattttgtttataatttgaggttgatttttttcgtatgtntaattt

SEQ ID NO: 23030 - DNA, 795 bp, Artificial Sequence
  chemically treated genomic DNA (Homo sapiens) CpG-island No: 23030
  unsure (7, 594)
aaattanacatacgaaaaaaatcaacctcaaattataaacaaaatacgctttattcataccgaatacgacgtaaacgccttatccgacctacacttcgcccgtaaaccgtacgctaataaaacgcgcaaacgtcgcatcaaacataacgcacgactaccgaatacgacgtaaacgcattatccgatctacacttcgcgtacaaatttataaacataataaaacgcgtcaacgtcgcatcaaacatcaacgcacaaataccgaatacgacgtaaacgtcttatccaacctacgttcgacaacgactataaacctaataaaacgcgcaaacgtcgcatcaaacaatcgtacaccgattaccgaatacgacgtaaacgccttatccgacccaaattttactattaccaccaaatttccatctaaacaccgaaatccactcgtcgtatcgccacgaccgaaataccgccgttaaaatcaacaaaaacgctttaccgaaattcgcgttattatcaacgttaccgatataatcgtaaccccatttctcatcccacttaacgtaaattacgaaaacacgaataaccgaacgtaaccaaatnatatcgccaacctaccattattatacgaaaataattttatactaattattcttatcgccgatacgctaaaattcgacgttatcgtaaccgatttccatcacgatactcataattaacgtccacttatacatcgaacgaataccgacgatccaccacttaataccgttatcgttatcccaattaatatcctaatacataccc

SEQ ID NO: 23031 - DNA, 795 bp, Artificial Sequence
  chemically treated genomic DNA (Homo sapiens) CpG-island No: 23031
  unsure (7, 594)
ggattanatatgcggaaagaattagttttagattgtagataaagtgcgttttgtttatgtcggatgcggcgtgaacgttttattcggtttatatttcgttcgtaagtcgtacgttgataagacgcgtaaacgtcgtattaggtatggcgtacgattgtcggatgcggcgtgaacgtattattcggtttatatttcgcgtatagatttgtaggtatgataagacgcgttagcgtcgtattaggtattagcgtataaatgtcggatgcggcgtaaacgttttatttagtttacgttcggtaacggttgtaggtttgataagacgcgtaagcgtcgtattaggtagtcgtgtatcgattgtcggatgcggcgtgaacgttttattcggtttaggttttgttattattattagatttttatttgggtatcgaagtttattcgtcgtgtcgttacgatcgaagtgtcgtcgttgaaattagtaggaacgttttgtcgaagttcgcgttgttattagcgttatcggtgtagtcgtaattttattttttattttatttggcgtaggttgcgaagatacgaatagtcgggcgtgattagatngtgtcgttagtttgttattgttgtgcgagggtaattttgtattgattgtttttgtcgtcggtgcgttgggattcgacgttgtcgtagtcgatttttattacggtgtttatgattggcgtttatttgtatatcgggcgaatatcgacggtttattatttggtgtcgttgtcgttattttagttgatattttggtatatattt

SEQ ID NO: 23032 - DNA, 795 bp, Artificial Sequence
  chemically treated genomic DNA (Homo sapiens) CpG-island No: 23032
  unsure (202, 789)
aaatatataccaaaatatcaactaaaataacgacaacgacaccaaataataaaccgtcgatattcgcccgatatacaaataaacgccaatcataaacaccgtaataaaaatcgactacgacaacgtcgaatcccaacgcaccgacgacaaaaacaatcaatacaaaattaccctcgcacaacaataacaaactaacgacacnatctaatcacgcccgactattcgtatcttcgcaacctacgccaaataaaataaaaaataaaattacgactacaccgataacgctaataacaacgcgaacttcgacaaaacgttcctactaatttcaacgacgacacttcgatcgtaacgacacgacgaataaacttcgatacccaaataaaaatctaataataataacaaaacctaaaccgaataaaacgttcacgccgcatccgacaatcgatacacgactacctaatacgacgcttacgcgtcttatcaaacctacaaccgttaccgaacgtaaactaaataaaacgtttacgccgcatccgacatttatacgctaatacctaatacgacgctaacgcgtcttatcatacctacaaatctatacgcgaaatataaaccgaataatacgttcacgccgcatccgacaatcgtacgccatacctaatacgacgtttacgcgtcttatcaacgtacgacttacgaacgaaatataaaccgaataaaacgttcacgccgcatccgacataaacaaaacgcactttatctacaatctaaaactaattctttccgcatatntaatcc

SEQ ID NO: 23033 - DNA, 581 bp, Artificial Sequence
  chemically treated genomic DNA (Homo sapiens) CpG-island No: 23033
  unsure (530)
tagcgtcgacgtgatttattttggtgaagcggtatgtagtaagcgtcgggtaattaaagttggcgattggttggagatggtaaaatcgttcgtcgggagtggtaagtagatggtgttttttaagttggcgttggtgtaggtattatttgaattgggcgaattgaaacgttatgttgagaacggtgagtttttgattgaagttagcgatttcggcgtggtgaatatgtgcgttgaacgtaaattgtcgttcgtcgtcgggtacgcgttgaattgttataacgcggtgatattgaaaatattgtttaaatagggtatgatgcgttggtgtatgttagtggagttttttcgcgattggttggtgaattttgttaattagtgcgatgaattgggtattcgtaattaatttgaagtggaagttttgagttacggttaattgtcgttgggtttattttcgtcggttgtttaatcgcgcggttcgaagatcgttcgaagatgagtgtaaaattgttgtattacgtattcgaatcggncgaacgtgttgtcgtaggaaatttattaggtgttgtattttattgtattta

SEQ ID NO: 23034 - DNA, 581 bp, Artificial Sequence
  chemically treated genomic DNA (Homo sapiens) CpG-island No: 23034
  unsure (52)
taaatacaataaaatacaacacctaataaatttcctacgacaacacgttcgnccgattcgaatacgtaatacaacaattttacactcatcttcgaacgatcttcgaaccgcgcgattaaacaaccgacgaaaataaacccaacgacaattaaccgtaactcaaaacttccacttcaaattaattacgaatacccaattcatcgcactaattaacaaaattcaccaaccaatcgcgaaaaaactccactaacatacaccaacgcatcataccctatttaaacaatattttcaatatcaccgcgttataacaattcaacgcgtacccgacgacgaacgacaatttacgttcaacgcacatattcaccacgccgaaatcgctaacttcaatcaaaaactcaccgttctcaacataacgtttcaattcgcccaattcaaataatacctacaccaacgccaacttaaaaaacaccatctacttaccactcccgacgaacgattttaccatctccaaccaatcgccaactttaattacccgacgcttactacataccgcttcaccaaaataaatcacgtcgacgcta

SEQ ID NO: 23035 - DNA, 581 bp, Artificial Sequence
  chemically treated genomic DNA (Homo sapiens) CpG-island No: 23035
  unsure (52)
tgaatgtaatggagtataatatttggtgggttttttgcgatagtacgttcgntcggttcggatacgtaatgtagtagttttatatttattttcgggcggttttcggatcgcgcggttaaataatcggcggaaataggtttagcggtagttgatcgtagtttaggatttttattttaaattggttacgaatgtttagtttatcgtattgattaataggatttattagttagtcgcgggaaagttttattggtatatattagcgtattatgttttgtttgagtaatatttttagtgttatcgcgttgtagtagtttagcgcgtgttcggcgacgaacggtagtttgcgtttagcgtatatatttattacgtcgagatcgttggttttaattagaaatttatcgtttttaatatagcgttttagttcgtttagtttagatgatgtttgtattagcgttagtttggagagtattatttgtttattattttcggcgagcgattttgttatttttagttagtcgttaattttggttgttcgacgtttgttgtatatcgttttattaagataaattacgtcggcgttg

SEQ ID NO: 23036 - DNA, 581 bp, Artificial Sequence
  chemically treated genomic DNA (Homo sapiens) CpG-island No: 23036
  unsure (530)
caacgccgacgtaatttatcttaataaaacgatatacaacaaacgtcgaacaaccaaaattaacgactaactaaaaataacaaaatcgctcgccgaaaataataaacaaataatactctccaaactaacgctaatacaaacatcatctaaactaaacgaactaaaacgctatattaaaaacgataaatttctaattaaaaccaacgatctcgacgtaataaatatatacgctaaacgcaaactaccgttcgtcgccgaacacgcgctaaactactacaacgcgataacactaaaaatattactcaaacaaaacataatacgctaatatataccaataaaactttcccgcgactaactaataaatcctattaatcaatacgataaactaaacattcgtaaccaatttaaaataaaaatcctaaactacgatcaactaccgctaaacctatttccgccgattatttaaccgcgcgatccgaaaaccgcccgaaaataaatataaaactactacattacgtatccgaaccgancgaacgtactatcgcaaaaaacccaccaaatattatactccattacattca

SEQ ID NO: 23037 - DNA, 537 bp, Artificial Sequence
  chemically treated genomic DNA (Homo sapiens) CpG-island No: 23037
taaattcggattttttttggttttattcgtttttgtatcgtttttagtcgtttcggttatttacgtgtgtttttagtttatcgattacgttttcggtatattttatagtttcgcgttgttttcgggagagcggacggggaaagtcgagggttttcgaggggcgttcgggttttggcgagaggaggaaggatttagggaagtagtcggggaggttcggggtttcggggagaggtcgggaaggtcgaagcgttttggcgaagaggtcggggaggtcgaggggttttcggaagcgggtcgggaggttaggggttttaggggaggtttagcgggtcgtgtagcgggcgcgtgtggcggcgagcggggttttatcgttagttacggtttttatggcgtgcgcggcggcggcggcggcggcggcggcgtaagttgaggcggcggttggcggcggcggaggttaaatttttataatgtagtcgggtaaatagttatggaggaggaggcggcggcgttcgcggtcgtttgttttgataattttat

SEQ ID NO: 23038 - DNA, 537 bp, Artificial Sequence
  chemically treated genomic DNA (Homo sapiens) CpG-island No: 23038
ataaaattatcaaaacaaacgaccgcgaacgccgccgcctcctcctccataactatttacccgactacattataaaaatttaacctccgccgccgccaaccgccgcctcaacttacgccgccgccgccgccgccgccgccgcgcacgccataaaaaccgtaactaacgataaaaccccgctcgccgccacacgcgcccgctacacgacccgctaaacctcccctaaaacccctaacctcccgacccgcttccgaaaacccctcgacctccccgacctcttcgccaaaacgcttcgaccttcccgacctctccccgaaaccccgaacctccccgactacttccctaaatccttcctcctctcgccaaaacccgaacgcccctcgaaaaccctcgactttccccgtccgctctcccgaaaacaacgcgaaactataaaatataccgaaaacgtaatcgataaactaaaaacacacgtaaataaccgaaacgactaaaaacgatacaaaaacgaataaaaccaaaaaaaatccgaattta

SEQ ID NO: 23039 - DNA, 537 bp, Artificial Sequence
  chemically treated genomic DNA (Homo sapiens) CpG-island No: 23039
gtagagttattagagtaggcggtcgcgggcgtcgtcgtttttttttttatggttgtttattcggttgtattgtgggagtttgattttcgtcgtcgttaatcgtcgttttagtttgcgtcgtcgtcgtcgtcgtcgtcgtcgcgtacgttatgggagtcgtgattgacggtgaggtttcgttcgtcgttatacgcgttcgttgtacggttcgttgggttttttttgagatttttggtttttcggttcgttttcgggaatttttcggttttttcggttttttcgttagagcgtttcggttttttcgattttttttcggagtttcgggttttttcggttgtttttttgagtttttttttttttcgttagagttcgagcgtttttcggagattttcggtttttttcgttcgttttttcggaggtagcgcggggttatagggtgtgtcgggagcgtggtcggtgggttgggaatatacgtgggtggtcgagacggttagaagcggtgtaagggcgggtgggattagagggagttcgggtttg

SEQ ID NO: 23040 - DNA, 537 bp, Artificial Sequence
  chemically treated genomic DNA (Homo sapiens) CpG-island No: 23040
caaacccgaactccctctaatcccacccgcccttacaccgcttctaaccgtctcgaccacccacgtatattcccaacccaccgaccacgctcccgacacaccctataaccccgcgctacctccgaaaaaacgaacgaaaaaaaccgaaaatctccgaaaaacgctcgaactctaacgaaaaaaaaaaaaactcaaaaaaacaaccgaaaaaacccgaaactccgaaaaaaaatcgaaaaaaccgaaacgctctaacgaaaaaaccgaaaaaaccgaaaaattcccgaaaacgaaccgaaaaaccaaaaatctcaaaaaaaacccaacgaaccgtacaacgaacgcgtataacgacgaacgaaacctcaccgtcaatcacgactcccataacgtacgcgacgacgacgacgacgacgacgacgcaaactaaaacgacgattaacgacgacgaaaatcaaactcccacaatacaaccgaataaacaaccataaaaaaaaaaacgacgacgcccgcgaccgcctactctaataactctac

SEQ ID NO: 23041 - DNA, 922 bp, Artificial Sequence
  chemically treated genomic DNA (Homo sapiens) CpG-island No: 23041
cgttattgcggcggtcgaggtggaggcggcgtcgggttcgtcgtttttcggtcgtgtgcgtcgtggcggcggtggcgggtgttgttgtcgttggggttgcggaggcggtttttgttgttgttgttgttgttgttgttgttgtcgggcggtcgcggtcgttgtttcgttcgtcgtcgtcgtcgcgcggcgcggtttttttttgacgttattcgcggttcgtttcgatatttttttcgtttttataatgtaataaaaaaaagggggaaagagtcgcgcgggggtcgttttttaaggaggcgttagggagtttcggcggcgtgcgcggttcgcggatcgggtggggtacgttgatagcgtttttatggtcgtttagtttttcgagttcgtttttttaaggttatttttcgtttcgggtttaaagttcgcggcgcgggttagttttcgttttcgattttcgcggtcgttcgagggaggggacgggtagtaggcggttcgttatcgcggcgttgggttttttgtttgtttttgtttagaggatttggcgcggaggttagcgtcggagcggttcggttttaatttcgcgttttattatggtagttcgcgcggggaagttcgagtcgtattttaggatttttagttgtttatttttcggtcgtttgtattttcgggttcggttcggttgtttcgtttttttttttcgttcgcgcgttcgttcgagcggcggtattcggtcggtttttttaagcggagacgtttttcgtcgtttttttttatttgtcggttttttttttttagttcgtttcggcgaagtttgtacgttaagttttcggattggagttagggcgaagtcggaaatgtagttatttatggaggagtcggtcggtcggttttagggtagcgcgggagaggttggtgtaggggg

SEQ ID NO: 23042 - DNA, 922 bp, Artificial Sequence
  chemically treated genomic DNA (Homo sapiens) CpG-island No: 23042
ccccctacaccaacctctcccgcgctaccctaaaaccgaccgaccgactcctccataaataactacatttccgacttcgccctaactccaatccgaaaacttaacgtacaaacttcgccgaaacgaactaaaaaaaaaaaaccgacaaataaaaaaaaacgacgaaaaacgtctccgcttaaaaaaaccgaccgaataccgccgctcgaacgaacgcgcgaacgaaaaaaaaaaacgaaacaaccgaaccgaacccgaaaatacaaacgaccgaaaaataaacaactaaaaatcctaaaatacgactcgaacttccccgcgcgaactaccataataaaacgcgaaattaaaaccgaaccgctccgacgctaacctccgcgccaaatcctctaaacaaaaacaaacaaaaaacccaacgccgcgataacgaaccgcctactacccgtcccctccctcgaacgaccgcgaaaatcgaaaacgaaaactaacccgcgccgcgaactttaaacccgaaacgaaaaataaccttaaaaaaacgaactcgaaaaactaaacgaccataaaaacgctatcaacgtaccccacccgatccgcgaaccgcgcacgccgccgaaactccctaacgcctccttaaaaaacgacccccgcgcgactctttcccccttttttttattacattataaaaacgaaaaaaatatcgaaacgaaccgcgaataacgtcaaaaaaaaaccgcgccgcgcgacgacgacgacgaacgaaacaacgaccgcgaccgcccgacaacaacaacaacaacaacaacaacaacaaaaaccgcctccgcaaccccaacgacaacaacacccgccaccgccgccacgacgcacacgaccgaaaaacgacgaacccgacgccgcctccacctcgaccgccgcaataacg

SEQ ID NO: 23043 - DNA, 922 bp, Artificial Sequence
  chemically treated genomic DNA (Homo sapiens) CpG-island No: 23043
ttttttgtattagtttttttcgcgttgttttggggtcggtcggtcggtttttttataggtggttgtattttcgatttcgttttggttttagttcgggggtttgacgtgtaaatttcgtcggagcgagttgagagggagggatcggtaagtgggaggaggcggcgggaggcgttttcgtttaagggagtcggtcgggtgtcgtcgttcggacggacgcgcggacggaaggaaggagcggggtagtcgggtcgggttcggggatgtaagcggtcgaagggtgggtagttggaggttttggggtgcggttcgggttttttcgcgcgggttgttatggtggggcgcggggttggagtcgggtcgtttcggcgttggttttcgcgttaggttttttgagtagaagtaggtaggggatttagcgtcgcggtggcgggtcgtttgttgttcgttttttttttcgggcggtcgcgggagtcgaaagcgaaagttagttcgcgtcgcggattttgagttcggggcggggggtggttttgaggaggcgggttcggggggttgggcggttatgggggcgttgttagcgtgttttattcggttcgcgggtcgcgtacgtcgtcggaattttttggcgtttttttaaaaaacggttttcgcgcgatttttttttttttttttttgttatattgtaggagcggaaagaatgtcggagcgggtcgcggatgacgttaggggggagtcgcgtcgcgcggcggcggcggcgggcggagtagcggtcgcggtcgttcggtagtagtagtagtagtagtagtagtagtaaaaatcgttttcgtagttttagcggtagtagtattcgttatcgtcgttacggcgtatacggtcggaggacggcgggttcggcgtcgtttttatttcggtcgtcgtaatggcg

SEQ ID NO: 23044 - DNA, 922 bp, Artificial Sequence
  chemically treated genomic DNA (Homo sapiens) CpG-island No: 23044
cgccattacgacgaccgaaataaaaacgacgccgaacccgccgtcctccgaccgtatacgccgtaacgacgataacgaatactactaccgctaaaactacgaaaacgatttttactactactactactactactactactaccgaacgaccgcgaccgctactccgcccgccgccgccgccgcgcgacgcgactcccccctaacgtcatccgcgacccgctccgacattctttccgctcctacaatataacaaaaaaaaaaaaaaaaaaatcgcgcgaaaaccgttttttaaaaaaacgccaaaaaattccgacgacgtacgcgacccgcgaaccgaataaaacacgctaacaacgcccccataaccgcccaaccccccgaacccgcctcctcaaaaccaccccccgccccgaactcaaaatccgcgacgcgaactaactttcgctttcgactcccgcgaccgcccgaaaaaaaaaacgaacaacaaacgacccgccaccgcgacgctaaatcccctacctacttctactcaaaaaacctaacgcgaaaaccaacgccgaaacgacccgactccaaccccgcgccccaccataacaacccgcgcgaaaaaacccgaaccgcaccccaaaacctccaactacccacccttcgaccgcttacatccccgaacccgacccgactaccccgctccttccttccgtccgcgcgtccgtccgaacgacgacacccgaccgactcccttaaacgaaaacgcctcccgccgcctcctcccacttaccgatccctccctctcaactcgctccgacgaaatttacacgtcaaacccccgaactaaaaccaaaacgaaatcgaaaatacaaccacctataaaaaaaccgaccgaccgaccccaaaacaacgcgaaaaaaactaatacaaaaaa

SEQ ID NO: 23045 - DNA, 553 bp, Artificial Sequence
  chemically treated genomic DNA (Homo sapiens) CpG-island No: 23045
agggcggagcgcgatcggcggaataagtttaaaggttagtttgtttttgcggagttcggcgagttcggtattcgtgttcgcggaggaaacgcgttcgtagtttaggagaggcgtttgcgcggatttcgtcgagagtcgagggtagagttttacgagggaagttcgaataacggcggtcgtcggtgtttttttaagtcgtttttcgttgttttttggggcgtagcgtcggcgggtatttagtttttttatttcggtttcgtcggatcgtttatcgtttttcgtattatttattttttttttttttatttttttttatcgttttatttttttttttagtttcgtatcgttacgtttttattttattgtttgtggtcggtttcggtttatttttttttttatttttttttacgtcgttttggttattatacgatttatttgtcgacgcggttatttttcgatggggtttcgattttagttatttaaaaaggaaatgttatttcgtttttttagttttcgggtttcggtttttttaagttttttttggttaatgggg

SEQ ID NO: 23046 - DNA, 553 bp, Artificial Sequence
  chemically treated genomic DNA (Homo sapiens) CpG-island No: 23046
ccccattaaccaaaaaaaacttaaaaaaaccgaaacccgaaaactaaaaaaacgaaataacatttcctttttaaataactaaaatcgaaaccccatcgaaaaataaccgcgtcgacaaataaatcgtataataaccaaaacgacgtaaaaaaaaataaaaaaaaaaataaaccgaaaccgaccacaaacaataaaataaaaacgtaacgatacgaaactaaaaaaaaaaataaaacgataaaaaaaaataaaaaaaaaaaaaataaataatacgaaaaacgataaacgatccgacgaaaccgaaataaaaaaactaaatacccgccgacgctacgccccaaaaaacaacgaaaaacgacttaaaaaaacaccgacgaccgccgttattcgaacttccctcgtaaaactctaccctcgactctcgacgaaatccgcgcaaacgcctctcctaaactacgaacgcgtttcctccgcgaacacgaataccgaactcgccgaactccgcaaaaacaaactaacctttaaacttattccgccgatcgcgctccgccct

SEQ ID NO: 23047 - DNA, 553 bp, Artificial Sequence
  chemically treated genomic DNA (Homo sapiens) CpG-island No: 23047
ttttattggttaggggaagtttagaagagtcggaattcgggagttagagaagcgaaatgatattttttttttaaatagttggagtcggggttttatcgagaaatggtcgcgtcggtaggtgggtcgtgtggtggttagggcggcgtggagggaggtgagggggaaggtgggtcggggtcggttataggtagtgggatgaggacgtagcggtgcggagttagagggaaggatgaagcggtggaggggaatgagaagagggaggatgaatggtgcggagggcggtgggcggttcggcgggatcgggatggggaggttgggtattcgtcggcgttgcgttttaggaggtagcgggaggcggtttgagggggtatcggcggtcgtcgttgttcgagtttttttcgtgaggttttgttttcggttttcggcggagttcgcgtagacgttttttttgggttgcgagcgcgtttttttcgcgagtacgggtgtcgggttcgtcgggtttcgtaggagtaggttggtttttgaatttgtttcgtcgatcgcgtttcgtttt

SEQ ID NO: 23048 - DNA, 553 bp, Artificial Sequence
  chemically treated genomic DNA (Homo sapiens) CpG-island No: 23048
aaaacgaaacgcgatcgacgaaacaaattcaaaaaccaacctactcctacgaaacccgacgaacccgacacccgtactcgcgaaaaaaacgcgctcgcaacccaaaaaaaacgtctacgcgaactccgccgaaaaccgaaaacaaaacctcacgaaaaaaactcgaacaacgacgaccgccgataccccctcaaaccgcctcccgctacctcctaaaacgcaacgccgacgaatacccaacctccccatcccgatcccgccgaaccgcccaccgccctccgcaccattcatcctccctcttctcattcccctccaccgcttcatccttccctctaactccgcaccgctacgtcctcatcccactacctataaccgaccccgacccaccttccccctcacctccctccacgccgccctaaccaccacacgacccacctaccgacgcgaccatttctcgataaaaccccgactccaactatttaaaaaaaaaatatcatttcgcttctctaactcccgaattccgactcttctaaacttcccctaaccaataaaa

SEQ ID NO: 23049 - DNA, 705 bp, Artificial Sequence
  chemically treated genomic DNA (Homo sapiens) CpG-island No: 23049
gcgtgcgtatacgcgagttcgttgcgtttgcgcgcggtgcggtcgtcgttttttttttcgcggcgttttttatttgcgcgggtttgaatggtttttaggagtatagtcggtttgaggagttgacggttatttatcgtcgtgagtttaagtaattcgttttttttcggttagaaatttttcgtttgggttcgcgcgataggagcgcggtttttgaggggagcggcgatttcgttagtttcggtttttttttttggcggcggcggtttttttcgtgggataatatgtttaagagaatggtcgaatttgggtttgatttcggcgggagagtaaaggttagtgttcggatcgtttttttttcggggtggttttttcgtttcggtttttttttgcgcggcgcggggagggtttattgggttttttttcgcgtttttttttttcgggtttgaatcgtggttttaggttggagagcgagttagagttattgagcgaaaaatcggcgtttattgggttttaattttttcgcgttattgttaatttttattttcgttaaaaaataaatagataaatggtggtttggggaaattcggacgtggttgttaaggaaacgggcgatttcgagggttgggaaagtttagtttggtgtatattcgttgttaatttaggttattggtgaagcggtgacgttatttttttggtgtgaggata

SEQ ID NO: 23050 - DNA, 705 bp, Artificial Sequence
  chemically treated genomic DNA (Homo sapiens) CpG-island No: 23050
tatcctcacaccaaaaaaataacgtcaccgcttcaccaataacctaaattaacaacgaatatacaccaaactaaactttcccaaccctcgaaatcgcccgtttccttaacaaccacgtccgaatttccccaaaccaccatttatctatttattttttaacgaaaataaaaattaacaataacgcgaaaaaattaaaacccaataaacgccgatttttcgctcaataactctaactcgctctccaacctaaaaccacgattcaaacccgaaaaaaaaaaacgcgaaaaaaaacccaataaaccctccccgcgccgcgcaaaaaaaaaccgaaacgaaaaaaccaccccgaaaaaaaaacgatccgaacactaacctttactctcccgccgaaatcaaacccaaattcgaccattctcttaaacatattatcccacgaaaaaaaccgccgccgccaaaaaaaaaaaccgaaactaacgaaatcgccgctcccctcaaaaaccgcgctcctatcgcgcgaacccaaacgaaaaatttctaaccgaaaaaaaacgaattacttaaactcacgacgataaataaccgtcaactcctcaaaccgactatactcctaaaaaccattcaaacccgcgcaaataaaaaacgccgcgaaaaaaaaaacgacgaccgcaccgcgcgcaaacgcaacgaactcgcgtatacgcacgc

SEQ ID NO: 23051 - DNA, 705 bp, Artificial Sequence
  chemically treated genomic DNA (Homo sapiens) CpG-island No: 23051
tatttttatattaggagggtggcgttatcgttttattaataatttagattggtagcgaatgtgtattaagttgagtttttttagttttcggagtcgttcgtttttttggtagttacgttcgggtttttttaagttattatttatttgtttgttttttggcgggggtgggagttggtagtgacgcgaggaagttggggtttaatgaacgtcggtttttcgtttaatggttttgattcgttttttaatttgaaattacggtttaaattcgaggagaaaaggcgcgaaaggaaatttagtgggtttttttcgcgtcgcgtagggaggaatcgaggcgggagagttatttcggaagaggggcggttcgggtattgatttttattttttcgtcggagttaggtttaaattcggttatttttttgaatatattgttttacggaagaagtcgtcgtcgttagggaaagagatcggggttggcggggtcgtcgttttttttagagatcgcgtttttgtcgcgcgggtttaggcggagggtttttagtcgaaggagggcgagttatttgggtttacggcggtgagtaatcgttaattttttaggtcgattgtgtttttgaaggttatttaggttcgcgtaggtggagaacgtcgcgaaaagaggggcgacggtcgtatcgcgcgtaggcgtaacgggttcgcgtatgcgtacgt

SEQ ID NO: 23052 - DNA, 705 bp, Artificial Sequence
  chemically treated genomic DNA (Homo sapiens) CpG-island No: 23052
acgtacgcatacgcgaacccgttacgcctacgcgcgatacgaccgtcgcccctcttttcgcgacgttctccacctacgcgaacctaaataaccttcaaaaacacaatcgacctaaaaaattaacgattactcaccgccgtaaacccaaataactcgccctccttcgactaaaaaccctccgcctaaacccgcgcgacaaaaacgcgatctctaaaaaaaacgacgaccccgccaaccccgatctctttccctaacgacgacgacttcttccgtaaaacaatatattcaaaaaaataaccgaatttaaacctaactccgacgaaaaaataaaaatcaatacccgaaccgcccctcttccgaaataactctcccgcctcgattcctccctacgcgacgcgaaaaaaacccactaaatttcctttcgcgccttttctcctcgaatttaaaccgtaatttcaaattaaaaaacgaatcaaaaccattaaacgaaaaaccgacgttcattaaaccccaacttcctcgcgtcactaccaactcccacccccgccaaaaaacaaacaaataaataataacttaaaaaaacccgaacgtaactaccaaaaaaacgaacgactccgaaaactaaaaaaactcaacttaatacacattcgctaccaatctaaattattaataaaacgataacgccaccctcctaatataaaaata

SEQ ID NO: 23053 - DNA, 899 bp, Artificial Sequence
  chemically treated genomic DNA (Homo sapiens) CpG-island No: 23053
aggcgttacgtcgaaatttgtcgtaaattcgagaaggagagtttcggggattgggcgcgcgggatataaagggtcgtgaacgcggttttttatgaggcgatagtgcgcgggtagggagataaaatggagcgatgggaggaatcggagttcgagcggtagcggcggggaaggggcggcggcggcgggtacgcgtttcgttagggttttttttttcgattagcgacgggggagggggcgcggcggcggttagtttttttcgtcgtttatacgcggttttatcgttcgggtttagcgcggcgggaagcgttagtcgggtgtcgttaataatagggagcgaggtagcgtcggcgagggaggagtcggcggtagttgtatagcggttcgcgttcgcgtttcgggtttcgcggcgattcgtcgcgttcgcggttcgtgaaacgacgcggtagaacgaggggcgggggggcgttacgttaggggtcggcggcgcggtttagaggcggtaagggcgtatattttgtagtcgtttcggttcgcggtcgtagcgggtttcgggttagtttttcggtcgtagcgtcgttcgcgtcggcggcggggatttgggtttttacgtatttggttgaatttttcgtcgatattcgcgtaaatgtttatgtggtttacgtcgttcgttatttttttttagtttcggtcgtcgtcgtcgtcgtcgttttttgtaggtttgttcgtcgcggtagtagtagcggatttagcggcggtgggggggcgtttgcgttattttcgaggttcgagggagggaggcgcgggcgataggggtcggtcgggggcggggattttgtagtttagtcgttttgttggttgaggaaaggttgcgtttttgagggtagaggacgttttttttg

SEQ ID NO: 23054 - DNA, 899 bp, Artificial Sequence
  chemically treated genomic DNA (Homo sapiens) CpG-island No: 23054
caaaaaaaacgtcctctaccctcaaaaacgcaacctttcctcaaccaacaaaacgactaaactacaaaatccccgcccccgaccgacccctatcgcccgcgcctccctccctcgaacctcgaaaataacgcaaacgcccccccaccgccgctaaatccgctactactaccgcgacgaacaaacctacaaaaaacgacgacgacgacgacgaccgaaactaaaaaaaaataacgaacgacgtaaaccacataaacatttacgcgaatatcgacgaaaaattcaaccaaatacgtaaaaacccaaatccccgccgccgacgcgaacgacgctacgaccgaaaaactaacccgaaacccgctacgaccgcgaaccgaaacgactacaaaatatacgcccttaccgcctctaaaccgcgccgccgacccctaacgtaacgcccccccgcccctcgttctaccgcgtcgtttcacgaaccgcgaacgcgacgaatcgccgcgaaacccgaaacgcgaacgcgaaccgctatacaactaccgccgactcctccctcgccgacgctacctcgctccctattattaacgacacccgactaacgcttcccgccgcgctaaacccgaacgataaaaccgcgtataaacgacgaaaaaaactaaccgccgccgcgccccctcccccgtcgctaatcgaaaaaaaaaaccctaacgaaacgcgtacccgccgccgccgccccttccccgccgctaccgctcgaactccgattcctcccatcgctccattttatctccctacccgcgcactatcgcctcataaaaaaccgcgttcacgaccctttatatcccgcgcgcccaatccccgaaactctccttctcgaatttacgacaaatttcgacgtaacgcct

SEQ ID NO: 23055 - DNA, 899 bp, Artificial Sequence
  chemically treated genomic DNA (Homo sapiens) CpG-island No: 23055
taaaagaaacgttttttgtttttagaggcgtagtttttttttagttagtagagcggttgggttgtagagttttcgttttcggtcggtttttgtcgttcgcgtttttttttttcgggtttcggaagtgacgtaagcgtttttttatcgtcgttagattcgttgttgttgtcgcggcgggtagatttgtaggaggcggcggcggcggcggcggtcgaggttgaaggaagatggcggacggcgtggattatatagatatttacgcggatgtcggcgaagagtttaattaggtacgtgagagtttaggttttcgtcgtcgacgcgggcggcgttgcggtcgggaagttgattcggggttcgttgcggtcgcgagtcgaagcgattgtagagtgtgcgtttttgtcgtttttgggtcgcgtcgtcgatttttggcgtggcgttttttcgtttttcgttttatcgcgtcgttttacgggtcgcgggcgcggcgagtcgtcgcggggttcggagcgcggacgcgggtcgttgtgtagttgtcgtcggtttttttttcgtcggcgttgtttcgttttttattgttggcggtattcggttggcgtttttcgtcgcgttaggttcgggcggtggggtcgcgtgtaagcggcggagagaattggtcgtcgtcgcgttttttttttcgtcgttggtcggaggaggaagttttggcggggcgcgtgttcgtcgtcgtcgtttttttttcgtcgttgtcgttcgggtttcgattttttttatcgttttattttgtttttttgttcgcgtattgtcgttttatggaaggtcgcgtttacggttttttgtatttcgcgcgtttagttttcggggttttttttttcgggtttgcgataggtttcggcgtggcgttt

SEQ ID NO: 23056 - DNA, 899 bp, Artificial Sequence
  chemically treated genomic DNA (Homo sapiens) CpG-island No: 23056
aaacgccacgccgaaacctatcgcaaacccgaaaaaaaaaaccccgaaaactaaacgcgcgaaatacaaaaaaccgtaaacgcgaccttccataaaacgacaatacgcgaacaaaaaaacaaaataaaacgataaaaaaaatcgaaacccgaacgacaacgacgaaaaaaaaacgacgacgacgaacacgcgccccgccaaaacttcctcctccgaccaacgacgaaaaaaaaaacgcgacgacgaccaattctctccgccgcttacacgcgaccccaccgcccgaacctaacgcgacgaaaaacgccaaccgaataccgccaacaataaaaaacgaaacaacgccgacgaaaaaaaaaccgacgacaactacacaacgacccgcgtccgcgctccgaaccccgcgacgactcgccgcgcccgcgacccgtaaaacgacgcgataaaacgaaaaacgaaaaaacgccacgccaaaaatcgacgacgcgacccaaaaacgacaaaaacgcacactctacaatcgcttcgactcgcgaccgcaacgaaccccgaatcaacttcccgaccgcaacgccgcccgcgtcgacgacgaaaacctaaactctcacgtacctaattaaactcttcgccgacatccgcgtaaatatctatataatccacgccgtccgccatcttccttcaacctcgaccgccgccgccgccgccgcctcctacaaatctacccgccgcgacaacaacaacgaatctaacgacgataaaaaaacgcttacgtcacttccgaaacccgaaaaaaaaaaacgcgaacgacaaaaaccgaccgaaaacgaaaactctacaacccaaccgctctactaactaaaaaaaaactacgcctctaaaaacaaaaaacgtttctttta

SEQ ID NO: 23057 - DNA, 578 bp, Artificial Sequence
  chemically treated genomic DNA (Homo sapiens) CpG-island No: 23057
  unsure (570)
ttttcgatttatttcgtttatcgtttattttttttttcgttttgttcgtcgagtttcggttcggcgggcgttttcgttcgcgtttcggtcgcgtttttttttttttcgcgtcggtttttcgcgtattatcgttttcggtcggttcgacgcgtttttttagacgttcgatcggcgtcgtgtcggtcgtttttcgacgtttattttttttgcgtttatttttatttttttttttttattttttttcggtttttttttttcgttcgggtcgtcgttcgtttttttttttcgtttttattgtttgtcggatcgttttttcgcgttacgttattatatttttttgtcggtcgttcgggtcgagcggcgcgtaatgacgtcgtcgtttttcgtttgatgcgttttagttttatcgtatatttttagtggaattcggatttttcgtgtttcggcgatcggtttgcgcgttttggttatcgtatgtttagtgacgcgcgaggttatatagatagtatttcggtaatatcgtaaaattttaaaatatttaaaattttatttattttttttcgataatanaattttaa

SEQ ID NO: 23058 - DNA, 578 bp, Artificial Sequence
  chemically treated genomic DNA (Homo sapiens) CpG-island No: 23058
  unsure (9)
ttaaaattntattatcgaaaaaaaataaataaaattttaaatattttaaaattttacgatattaccgaaatactatctatataacctcgcgcgtcactaaacatacgataaccaaaacgcgcaaaccgatcgccgaaacacgaaaaatccgaattccactaaaaatatacgataaaactaaaacgcatcaaacgaaaaacgacgacgtcattacgcgccgctcgacccgaacgaccgacaaaaaaatataataacgtaacgcgaaaaaacgatccgacaaacaataaaaacgaaaaaaaaaaacgaacgacgacccgaacgaaaaaaaaaaaccgaaaaaaaataaaaaaaaaaaaataaaaataaacgcaaaaaaaataaacgtcgaaaaacgaccgacacgacgccgatcgaacgtctaaaaaaacgcgtcgaaccgaccgaaaacgataatacgcgaaaaaccgacgcgaaaaaaaaaaaaacgcgaccgaaacgcgaacgaaaacgcccgccgaaccgaaactcgacgaacaaaacgaaaaaaaaaataaacgataaacgaaataaatcgaaaa

SEQ ID NO: 23059 - DNA, 578 bp, Artificial Sequence
  chemically treated genomic DNA (Homo sapiens) CpG-island No: 23059
  unsure (9)
ttggggttntgttgtcggggaggggtgaatggggttttgagtattttggagttttacgatgttgtcgaagtgttatttatgtggtttcgcgcgttattgagtatgcggtgattaaaacgcgtaggtcggtcgtcggggtacgagaggttcgaattttattagagatgtgcgatgggattggggcgtattaggcggggggcggcgacgttattgcgcgtcgttcggttcgggcggtcgatagaaaggtgtggtggcgtggcgcgggggaacgattcgataagtagtgggggcgaggggggggggcgggcggcgattcgggcggggggggggggtcggggaggggtggggggagggaggtagagatgggcgtagggggggtaggcgtcggggggcggtcggtacggcgtcggtcgggcgtttaagagagcgcgtcgggtcgatcgggggcggtggtgcgcggggggtcggcgcggggggggggagaacgcgatcggggcgcgggcgggagcgttcgtcgggtcggggttcggcgggtagggcgagaagaaaggtgggcggtgggcggggtgggtcgggaa

SEQ ID NO: 23060 - DNA, 578 bp, Artificial Sequence
  chemically treated genomic DNA (Homo sapiens) CpG-island No: 23060
  unsure (570)
ttcccgacccaccccgcccaccgcccacctttcttctcgccctacccgccgaaccccgacccgacgaacgctcccgcccgcgccccgatcgcgttctccccccccccgcgccgaccccccgcgcaccaccgcccccgatcgacccgacgcgctctcttaaacgcccgaccgacgccgtaccgaccgccccccgacgcctaccccccctacgcccatctctacctccctccccccacccctccccgaccccccccccccgcccgaatcgccgcccgcccccccccctcgcccccactacttatcgaatcgttcccccgcgccacgccaccacacctttctatcgaccgcccgaaccgaacgacgcgcaataacgtcgccgccccccgcctaatacgccccaatcccatcgcacatctctaataaaattcgaacctctcgtaccccgacgaccgacctacgcgttttaatcaccgcatactcaataacgcgcgaaaccacataaataacacttcgacaacatcgtaaaactccaaaatactcaaaaccccattcacccctccccgacaacanaaccccaa

SEQ ID NO: 23061 - DNA, 515 bp, Artificial Sequence
  chemically treated genomic DNA (Homo sapiens) CpG-island No: 23061
taggtcgtgggttttcgtcgcgttggttttaaggagcggtttttgagtgtagcgcgagttttgggttttttgcgttggttgcggcggcggttgcggttgcggcggcggtcgttagagggcgaggggtagggtatcgggttacgggcgagcgaggggtggggtcgtcggaaatcggacgaggggcggggttatgggagaggaagtaaggggcggggtcgcgggaaagcggatgaagggcggggttacgagcgaggggacgagggtcggggtcgcgggaaagcggacgaagggcggggttacgagcgagggtacgaggggcggggttgcgggaaagcggacgaggggcggggttacgagagaggtgacgagggtcgggattattagagagggtacgaggggtggggtcgtgagttcgggttgcggtatcgtttagcgttgcgtttggttggtttagtagggttggggggtatgtcgagggttttttttggtggtcgtttttcgtaggtttcgataag

SEQ ID NO: 23062 - DNA, 515 bp, Artificial Sequence
  chemically treated genomic DNA (Homo sapiens) CpG-island No: 23062
cttatcgaaacctacgaaaaacgaccaccaaaaaaaaccctcgacataccccccaaccctactaaaccaaccaaacgcaacgctaaacgataccgcaacccgaactcacgaccccacccctcgtaccctctctaataatcccgaccctcgtcacctctctcgtaaccccgcccctcgtccgctttcccgcaaccccgcccctcgtaccctcgctcgtaaccccgcccttcgtccgctttcccgcgaccccgaccctcgtcccctcgctcgtaaccccgcccttcatccgctttcccgcgaccccgccccttacttcctctcccataaccccgcccctcgtccgatttccgacgaccccacccctcgctcgcccgtaacccgataccctacccctcgccctctaacgaccgccgccgcaaccgcaaccgccgccgcaaccaacgcaaaaaacccaaaactcgcgctacactcaaaaaccgctccttaaaaccaacgcgacgaaaacccacgaccta

SEQ ID NO: 23063 - DNA, 515 bp, Artificial Sequence
  chemically treated genomic DNA (Homo sapiens) CpG-island No: 23063
tttgtcgggatttgcggggagcggttattaggggaagttttcggtatattttttagttttgttaagttagttaggcgtaacgttagacggtgtcgtagttcgggtttacggttttatttttcgtattttttttggtggtttcggttttcgttatttttttcgtgatttcgtttttcgttcgttttttcgtagtttcgtttttcgtattttcgttcgtggtttcgtttttcgttcgttttttcgcggtttcgattttcgttttttcgttcgtggtttcgttttttattcgttttttcgcggtttcgttttttgtttttttttttatgatttcgtttttcgttcggttttcggcggttttatttttcgttcgttcgtggttcggtattttgtttttcgttttttggcggtcgtcgtcgtagtcgtagtcgtcgtcgtagttagcgtaggaggtttagggttcgcgttatatttaggagtcgttttttgaggttagcgcggcgggggtttacggtttg

SEQ ID NO: 23064 - DNA, 515 bp, Artificial Sequence
  chemically treated genomic DNA (Homo sapiens) CpG-island No: 23064
caaaccgtaaacccccgccgcgctaacctcaaaaaacgactcctaaatataacgcgaaccctaaacctcctacgctaactacgacgacgactacgactacgacgacgaccgccaaaaaacgaaaaacaaaataccgaaccacgaacgaacgaaaaataaaaccgccgaaaaccgaacgaaaaacgaaatcataaaaaaaaaaacaaaaaacgaaaccgcgaaaaaacgaataaaaaacgaaaccacgaacgaaaaaacgaaaatcgaaaccgcgaaaaaacgaacgaaaaacgaaaccacgaacgaaaatacgaaaaacgaaactacgaaaaaacgaacgaaaaacgaaatcacgaaaaaaataacgaaaaccgaaaccaccaaaaaaaatacgaaaaataaaaccgtaaacccgaactacgacaccgtctaacgttacgcctaactaacttaacaaaactaaaaaatataccgaaaacttcccctaataaccgctccccgcaaatcccgacaaa

SEQ ID NO: 23065 - DNA, 582 bp, Artificial Sequence
  chemically treated genomic DNA (Homo sapiens) CpG-island No: 23065
tcgtcgttattgtcgtttcggatagcgaaggagttggtgtttaatatcggcgtggagacggtttcgaaggtgtagggttcgggcgagacgatcgtttggaagtgtttaaggtagacgcggaagaaagttcggtagtcgggttcgtaaggtcgtttattggttagtacgtcgcgttcgttgatgaatttttgtagttgtagttggaagacgtcggagtcggtcgcgcgttattgtatagggatcgagggaaggagggaggggatcggttagtttagttggtgttcggggttgaggtttagagcgcggtagaggggacggagagggcgcgggacgtgttatttgttgttaaagtgttattagtagtagtagcgtttagttagaggcgtttcgggacgttgtcgttattttttcgggcgtcgttttttttattcgcgggtttttaatttggttttgttcgcgacgtcgttttttcgcgcgttcggtagtcgggggggttttttaaaaagaggcgttttttttggggacgttgtttttttttggttttttcgttggtttcgttgtagttgtcgttgtaggtaattt

SEQ ID NO: 23066 - DNA, 582 bp, Artificial Sequence
  chemically treated genomic DNA (Homo sapiens) CpG-island No: 23066
aaattacctacaacgacaactacaacgaaaccaacgaaaaaaccaaaaaaaaacaacgtccccaaaaaaaacgcctctttttaaaaaacccccccgactaccgaacgcgcgaaaaaacgacgtcgcgaacaaaaccaaattaaaaacccgcgaataaaaaaaacgacgcccgaaaaaataacgacaacgtcccgaaacgcctctaactaaacgctactactactaataacactttaacaacaaataacacgtcccgcgccctctccgtcccctctaccgcgctctaaacctcaaccccgaacaccaactaaactaaccgatcccctccctccttccctcgatccctatacaataacgcgcgaccgactccgacgtcttccaactacaactacaaaaattcatcaacgaacgcgacgtactaaccaataaacgaccttacgaacccgactaccgaactttcttccgcgtctaccttaaacacttccaaacgatcgtctcgcccgaaccctacaccttcgaaaccgtctccacgccgatattaaacaccaactccttcgctatccgaaacgacaataacgacga

SEQ ID NO: 23067 - DNA, 582 bp, Artificial Sequence
  chemically treated genomic DNA (Homo sapiens) CpG-island No: 23067
gaattatttatagcggtagttgtagcgaagttagcgagaaggttaaaggggagtagcgtttttaagagaagcgtttttttttaagggattttttcggttgtcgaacgcgcgggaaagcggcgtcgcgaatagagttagattgagggttcgcgggtggagagagcgacgttcgaggggatggcggtagcgtttcggagcgtttttggttgggcgttattgttgttggtggtattttggtagtaggtaatacgtttcgcgtttttttcgttttttttgtcgcgttttgggttttagtttcgggtattagttgagttgatcggttttttttttttttttttcggtttttgtgtaatagcgcgcggtcggtttcggcgttttttagttgtagttgtaggagtttattaacgagcgcggcgtattggttagtgggcggttttgcgagttcggttgtcggattttttttcgcgtttgttttaagtatttttaggcggtcgtttcgttcggattttgtattttcgggatcgtttttacgtcggtattgggtattaattttttcgttgttcgggacgatagtagcggcgg

SEQ ID NO: 23068 - DNA, 582 bp, Artificial Sequence
  chemically treated genomic DNA (Homo sapiens) CpG-island No: 23068
ccgccgctactatcgtcccgaacaacgaaaaaattaatacccaataccgacgtaaaaacgatcccgaaaatacaaaatccgaacgaaacgaccgcctaaaaatacttaaaacaaacgcgaaaaaaaatccgacaaccgaactcgcaaaaccgcccactaaccaatacgccgcgctcgttaataaactcctacaactacaactaaaaaacgccgaaaccgaccgcgcgctattacacaaaaaccgaaaaaaaaaaaaaaaaaaccgatcaactcaactaatacccgaaactaaaacccaaaacgcgacaaaaaaaacgaaaaaaacgcgaaacgtattacctactaccaaaataccaccaacaacaataacgcccaaccaaaaacgctccgaaacgctaccgccatcccctcgaacgtcgctctctccacccgcgaaccctcaatctaactctattcgcgacgccgctttcccgcgcgttcgacaaccgaaaaaatcccttaaaaaaaaacgcttctcttaaaaacgctactcccctttaaccttctcgctaacttcgctacaactaccgctataaataattc

SEQ ID NO: 23069 - DNA, 578 bp, Artificial Sequence
  chemically treated genomic DNA (Homo sapiens) CpG-island No: 23069
gtttgttcggtgttttcgtagttttattcgtgttggtttagttttcgcgagttcgggattcggggttttcggggtggtagggggtttttatgtcgtttgcgaggtttcggttcgggtcgttttcggaatttgtattttaggggttttggttcgtcgtttttagtaggagtaaaataagagtacgcgtatttgtcggttcgttcgtttttttggtgtcggttaatcgcgcgttcggggcggggtcgggcgcgttggaattagagtcggagtcggattttagtcggagtttaagcgtagttcgtatttcgcgtagcggttgagtcgggagttagcgtagtttcggtttcgtagtttaagtttcgttttcgtcgtcgtcgtcgtcgtcgtcgtcgtcgttttcggggtatggtttgtttgatggtcgttttttcggtcggtatcgttatggtgagtgagcgtatttttcgttcgtcgggaacggttttatttttaaggagagtaggaaatatataaagattcgtaagttcgatttgatattttttttaggagcgcgttttttgggcgttgatttagggtat

SEQ ID NO: 23070 - DNA, 578 bp, Artificial Sequence
  chemically treated genomic DNA (Homo sapiens) CpG-island No: 23070
ataccctaaatcaacgcccaaaaaacgcgctcctaaaaaaaatatcaaatcgaacttacgaatctttatatatttcctactctccttaaaaataaaaccgttcccgacgaacgaaaaatacgctcactcaccataacgataccgaccgaaaaaacgaccatcaaacaaaccataccccgaaaacgacgacgacgacgacgacgacgacgacgaaaacgaaacttaaactacgaaaccgaaactacgctaactcccgactcaaccgctacgcgaaatacgaactacgcttaaactccgactaaaatccgactccgactctaattccaacgcgcccgaccccgccccgaacgcgcgattaaccgacaccaaaaaaacgaacgaaccgacaaatacgcgtactcttattttactcctactaaaaacgacgaaccaaaacccctaaaatacaaattccgaaaacgacccgaaccgaaacctcgcaaacgacataaaaaccccctaccaccccgaaaaccccgaatcccgaactcgcgaaaactaaaccaacacgaataaaactacgaaaacaccgaacaaac

SEQ ID NO: 23071 - DNA, 578 bp, Artificial Sequence
  chemically treated genomic DNA (Homo sapiens) CpG-island No: 23071
gtgttttgggttagcgtttagaggacgcgtttttgggaggggtgttaggtcgagtttgcgagtttttgtgtgttttttgttttttttgaaaataaaatcgttttcggcggacgaaggatgcgtttatttattatggcggtgtcgatcgagaaagcggttattagataggttatgtttcgggggcggcggcggcggcggcggcggcggcggcggggacgaggtttgagttgcggggtcgaggttgcgttggttttcggtttagtcgttgcgcggggtgcgggttgcgtttgggtttcggttgggattcggtttcggttttggttttagcgcgttcgatttcgtttcgagcgcgcgattggtcggtattaagggggcgggcgggtcggtaggtgcgcgtgtttttgttttgtttttgttgggggcggcggattaggatttttgaagtgtaggtttcgggagcggttcgagtcgaggtttcgtaggcggtatgggaattttttgttatttcggaaatttcgggtttcgaattcgcgggggttgggttagtacgggtgaggttgcggggatatcggatagat

SEQ ID NO: 23072 - DNA, 578 bp, Artificial Sequence
  chemically treated genomic DNA (Homo sapiens) CpG-island No: 23072
atctatccgatatccccgcaacctcacccgtactaacccaacccccgcgaattcgaaacccgaaatttccgaaataacaaaaaattcccataccgcctacgaaacctcgactcgaaccgctcccgaaacctacacttcaaaaatcctaatccgccgcccccaacaaaaacaaaacaaaaacacgcgcacctaccgacccgcccgcccccttaataccgaccaatcgcgcgctcgaaacgaaatcgaacgcgctaaaaccaaaaccgaaaccgaatcccaaccgaaacccaaacgcaacccgcaccccgcgcaacgactaaaccgaaaaccaacgcaacctcgaccccgcaactcaaacctcgtccccgccgccgccgccgccgccgccgccgccgcccccgaaacataacctatctaataaccgctttctcgatcgacaccgccataataaataaacgcatccttcgtccgccgaaaacgattttattttcaaaaaaaacaaaaaacacacaaaaactcgcaaactcgacctaacacccctcccaaaaacgcgtcctctaaacgctaacccaaaacac

SEQ ID NO: 23073 - DNA, 1022 bp, Artificial Sequence
  chemically treated genomic DNA (Homo sapiens) CpG-island No: 23073
  unsure (206, 208, 569)
tcgcgtcgggatattttatattttcgtcgtaatttcgtttaagtttcgcgggaaaatatttttcgtcgcggtacggcgtcgttcgaggtcgtaacgtttatttagcgtcgatcgaggtttcgcgtcgaatcgatacgtcgcgggcgcgattcgacgacgaattttaattttatacgtttcgtttttcgcgggcgggaggggcgaantnatattaatcgaaggcgttcgatcgcgggcggtttcgttttttttatatatgtcgtttatcgcgattatgttttttttcgttttatttcggggcgtttattttacgcggttagcgtcgatcgtattcgatattatatcgtttttaatttatagtttttattcgtatacgatatatatttttatattatcgtagttcgtttttatattatatatcggttttttatattttattattattttaacgtttacgtttacgatatttagttttttttatatttttttatagtgtttttttttgcggtatattttcgtacggtttatatagttttttcgttattattcgtttgtcgttttttcgtttntatcgcgtcgataattatattcgttaaatgtcggtatcgtcgattttttcgatttataatatcgacgttcgaacgaggattatatatagtataatacgacgaattcggtttggtcgtcgattcgtttttcgtcgcgtttaaatatgattaagagatcgttcgacgttttattttcgtacgattattatgtcgtcgtttacgagagtattgtgtttttatcgatttagtcgtgttcggggagcgtttcgcgtcgttttcgttattatcgttcgttgtttaagtatataaaatttaattttcgtattttttttaattttttagaattagtgtttcgggtattcgtatttttattcgattacgtaataatattatttatttatttttattatttatttttatttattcgtattttatatattttaattacgtttttatttttagaatcgatagtag

SEQ ID NO: 23074 - DNA, 1022 bp, Artificial Sequence
  chemically treated genomic DNA (Homo sapiens) CpG-island No: 23074
  unsure (454, 815, 817)
ctactatcgattctaaaaataaaaacgtaattaaaatatataaaatacgaataaataaaaataaataataaaaataaataaataatattattacgtaatcgaataaaaatacgaatacccgaaacactaattctaaaaaattaaaaaaaatacgaaaattaaattttatatacttaaacaacgaacgataataacgaaaacgacgcgaaacgctccccgaacacgactaaatcgataaaaacacaatactctcgtaaacgacgacataataatcgtacgaaaataaaacgtcgaacgatctcttaatcatatttaaacgcgacgaaaaacgaatcgacgaccaaaccgaattcgtcgtattatactatatataatcctcgttcgaacgtcgatattataaatcgaaaaaatcgacgataccgacatttaacgaatataattatcgacgcgatanaaacgaaaaaacgacaaacgaataataacgaaaaaactatataaaccgtacgaaaatataccgcaaaaaaaaacactataaaaaaatataaaaaaaactaaatatcgtaaacgtaaacgttaaaataataataaaatataaaaaaccgatatataatataaaaacgaactacgataatataaaaatatatatcgtatacgaataaaaactataaattaaaaacgatataatatcgaatacgatcgacgctaaccgcgtaaaataaacgccccgaaataaaacgaaaaaaaacataatcgcgataaacgacatatataaaaaaaacgaaaccgcccgcgatcgaacgccttcgattaatatnanttcgcccctcccgcccgcgaaaaacgaaacgtataaaattaaaattcgtcgtcgaatcgcgcccgcgacgtatcgattcgacgcgaaacctcgatcgacgctaaataaacgttacgacctcgaacgacgccgtaccgcgacgaaaaatattttcccgcgaaacttaaacgaaattacgacgaaaatataaaatatcccgacgcga

SEQ ID NO: 23075 - DNA, 1022 bp, Artificial Sequence
  chemically treated genomic DNA (Homo sapiens) CpG-island No: 23075
  unsure (454, 815, 817)
ttattgtcggttttgggggtgggaacgtagttgaagtgtatgaggtgcgaatgggtgagagtgagtaataggggtgagtgggtagtattattgcgtggtcgggtggggatgcgagtgttcggggtattaattttggggggttggggggggtgcgggagttgggttttgtgtatttaaatagcgagcggtggtggcggaggcggcgcggggcgtttttcgggtacgattgaatcggtgaaaatataatattttcgtggacggcggtataatgatcgtgcggaggtggggcgtcgggcggttttttaattatatttaagcgcggcgggagacgggtcgacgattagatcgagttcgtcgtgttgtgttgtgtgtggttttcgttcgggcgtcgatattatgggtcgagagggtcggcggtgtcgatatttggcgggtgtggttgtcggcgcggtanaaacgagaaaacggtagacgggtaatagcgggggaattgtgtggatcgtgcggagatatgtcgtaagggggggtattgtaggggggtgtgggaggggttggatgtcgtgagcgtggacgttggggtggtggtgggatatgaagggtcggtgtatgatgtgggggcggattgcggtaatatggggatatatatcgtgtgcgggtaagggttataagttgggggcggtgtggtgtcgggtgcggtcggcgttaatcgcgtgaggtaagcgtttcggggtgaggcggagggggatatagtcgcggtggacggtatgtgtagggggagcggggtcgttcgcggtcgggcgttttcggttggtgtngnttcgtttttttcgttcgcggggggcggggcgtgtggggttagggttcgtcgtcgggtcgcgttcgcggcgtgtcggttcggcgcggggtttcggtcggcgttgggtgggcgttgcggtttcgggcggcgtcgtgtcgcggcggggggtgttttttcgcggggtttgggcggggttgcggcgggggtgtggggtgtttcggcgcgg

SEQ ID NO: 23076 - DNA, 1022 bp, Artificial Sequence
  chemically treated genomic DNA (Homo sapiens) CpG-island No: 23076
  unsure (206, 208, 569)
ccgcgccgaaacaccccacacccccgccgcaaccccgcccaaaccccgcgaaaaaacaccccccgccgcgacacgacgccgcccgaaaccgcaacgcccacccaacgccgaccgaaaccccgcgccgaaccgacacgccgcgaacgcgacccgacgacgaaccctaaccccacacgccccgccccccgcgaacgaaaaaaacgaancnacaccaaccgaaaacgcccgaccgcgaacgaccccgctccccctacacataccgtccaccgcgactatatccccctccgcctcaccccgaaacgcttacctcacgcgattaacgccgaccgcacccgacaccacaccgcccccaacttataacccttacccgcacacgatatatatccccatattaccgcaatccgcccccacatcatacaccgacccttcatatcccaccaccaccccaacgtccacgctcacgacatccaacccctcccacacccccctacaatacccccccttacgacatatctccgcacgatccacacaattcccccgctattacccgtctaccgttttctcgtttntaccgcgccgacaaccacacccgccaaatatcgacaccgccgaccctctcgacccataatatcgacgcccgaacgaaaaccacacacaacacaacacgacgaactcgatctaatcgtcgacccgtctcccgccgcgcttaaatataattaaaaaaccgcccgacgccccacctccgcacgatcattataccgccgtccacgaaaatattatattttcaccgattcaatcgtacccgaaaaacgccccgcgccgcctccgccaccaccgctcgctatttaaatacacaaaacccaactcccgcaccccccccaaccccccaaaattaataccccgaacactcgcatccccacccgaccacgcaataatactacccactcacccctattactcactctcacccattcgcacctcatacacttcaactacgttcccacccccaaaaccgacaataa

SEQ ID NO: 23077 - DNA, 597 bp, Artificial Sequence
  chemically treated genomic DNA (Homo sapiens) CpG-island No: 23077
  unsure (258)
ttttgtttcgttgttttcgttttgttgttttgttttttgttttttttttcgtttgttttttttttgttcgcgtgttcgttgtttttttttttttcgtcgtttttttttttttcgtttgtgtgtgcgtttcgtgtgtcgttttttttttttttttttcgttttttttttttttttttttttttttttcgttttttttttttttttttttgtgcgtttttttcgtttttttttttttttttcgttttttttttgtttttntgtttttttttttttttttttgttttttcgttttttcgttttttttttttttttttttttttgttgtgttttttcgtttttttttttttttgcgtgggtcgggttcgttttttttttcgtttcgtttttttttttttttttttttttttttttttttttttttcgtcgtttttttttttttttttttttttttttttgtggttcgagcgtttttttttgttttttttttttttttttttttttattttttttttttttttttttttcgtcgtttttttttttcggttttttttcgtttttttttttttcgtcggttttttttttttttcgttttttttt

SEQ ID NO: 23078 - DNA, 597 bp, Artificial Sequence
  chemically treated genomic DNA (Homo sapiens) CpG-island No: 23078
  unsure (340)
aaaaaaaaacgaaaaaaaaaaaaaaccgacgaaaaaaaaaaaaacgaaaaaaaaccgaaaaaaaaaaacgacgaaaaaaaaaaaaaaaaaaaaaataaaaaaaaaaaaaaaaaaaaaaaacaaaaaaaaacgctcgaaccacaaaaaaaaaaaaaaaaaaaaaaaaaaaaacgacgaaaaaaaaaaaaaaaaaaaaaaaaaaaaaaaaaaaaaaacgaaacgaaaaaaaaaacgaacccgacccacgcaaaaaaaaaaaaaaacgaaaaaacacaacaaaaaaaaaaaaaaaaaaaaaaaacgaaaaaacgaaaaaacaaaaaaaaaaaaaaaaaaacanaaaaacaaaaaaaaaacgaaaaaaaaaaaaaaaaacgaaaaaaacgcacaaaaaaaaaaaaaaaaaaaacgaaaaaaaaaaaaaaaaaaaaaaaaaaaacgaaaaaaaaaaaaaaaaaacgacacacgaaacgcacacacaaacgaaaaaaaaaaaaacgacgaaaaaaaaaaaaacaacgaacacgcgaacaaaaaaaaaacaaacgaaaaaaaaaacaaaaaacaaaacaacaaaacgaaaacaacgaaacaaaa

SEQ ID NO: 23079 - DNA, 597 bp, Artificial Sequence
  chemically treated genomic DNA (Homo sapiens) CpG-island No: 23079
  unsure (340)
agggggaggcgagggaaagaagaaatcggcgaggagaagaggaacgggggggaatcgggaggaaagaacggcgagggaaggggaggggggaaaaataggaagaggaagaggggagagggataggggggggcgttcggattatagaaggaaggggagaggaaagggaaaaaacgacgagggaaagagggagggggggaaggaaagaaaaaaaagggcgagacgggagaaggagcgaattcggtttacgtagagaaggggaaaaacgggggagtatagtaaaaggaaaggggaggagggagaacgaaggagcggggggatagaaaaggaagggaaaagatangaaaataaggagagagcggggggagagaaagagggcgagagggacgtataaagggagagggaaagaaagcggaaaaggaagagagagaggagaaagggacggaggaagaagagagagggcgatatacggggcgtatatataaacgagaaggagaagggcgacgggggagggaaagataacgagtacgcgaataagagaaaggtaaacgagagggggaataagaaataaggtaataagacgggagtagcggggtagag

SEQ ID NO: 23080 - DNA, 597 bp, Artificial Sequence
  chemically treated genomic DNA (Homo sapiens) CpG-island No: 23080
  unsure (258)
ctctaccccgctactcccgtcttattaccttatttcttattccccctctcgtttacctttctcttattcgcgtactcgttatctttccctcccccgtcgcccttctccttctcgtttatatatacgccccgtatatcgccctctctcttcttcctccgtccctttctcctctctctcttccttttccgctttctttccctctccctttatacgtccctctcgccctctttctctccccccgctctctccttattttcntatcttttcccttccttttctatccccccgctccttcgttctccctcctcccctttccttttactatactcccccgtttttccccttctctacgtaaaccgaattcgctccttctcccgtctcgcccttttttttctttccttccccccctccctctttccctcgtcgttttttccctttcctctccccttccttctataatccgaacgcccccccctatccctctcccctcttcctcttcctatttttcccccctccccttccctcgccgttctttcctcccgattcccccccgttcctcttctcctcgccgatttcttctttccctcgcctccccct

SEQ ID NO: 23081 - DNA, 761 bp, Artificial Sequence
  chemically treated genomic DNA (Homo sapiens) CpG-island No: 23081
acggtggcggagttcggttttagttagatttacgtatttatagttttcgttgtcgttttcgttttaggttaaggggcgttattcgttttattgttcgtttcgagagggtttttttttaggtttcgtatttttacgtcgtgcgatttggatttttacggcgggattcgggtttatatttttttttgttgcggggcggagtcgtcgtcgtttcgggtttttgttttcgttttcgagattttcgcgcgtttttagtattttcggtcgcgggagttaagggttcgtgtcgggtagcgtttttcggggttaggtcgttttttgtcgggattcgggcgcgttgtagtcgcggagtcgggtgtttcgtttttttttcgtcggcggcggagtcgttgtcgtttcgggttttcgttttcgttttcgagattttcgcgcgttttttttaggcgagttgcggggcgggaagggttcggttatcgtgggtcgttgttagtcgcggggttgtcgagggtcgcgggtacggggcgttggtttcgggtttggcgaatcgttgatgggagtcggagttcgggcgggcgagcggcggcgcggcggttattatggggaataagtagattatttttatcgaagagtagttagataattattaggtgagttcggcgcgttcggtttttaatataggtttcgtcgtttcgtcgttttttttttttttcggtcgttggtcgaggtttttcgagagttagtttttttaggtttaaattttgttt

SEQ ID NO: 23082 - DNA, 761 bp, Artificial Sequence
  chemically treated genomic DNA (Homo sapiens) CpG-island No: 23082
aaacaaaatttaaacctaaaaaaactaactctcgaaaaacctcgaccaacgaccgaaaaaaaaaaaaaacgacgaaacgacgaaacctatattaaaaaccgaacgcgccgaactcacctaataattatctaactactcttcgataaaaataatctacttattccccataataaccgccgcgccgccgctcgcccgcccgaactccgactcccatcaacgattcgccaaacccgaaaccaacgccccgtacccgcgaccctcgacaaccccgcgactaacaacgacccacgataaccgaacccttcccgccccgcaactcgcctaaaaaaaacgcgcgaaaatctcgaaaacgaaaacgaaaacccgaaacgacaacgactccgccgccgacgaaaaaaaaacgaaacacccgactccgcgactacaacgcgcccgaatcccgacaaaaaacgacctaaccccgaaaaacgctacccgacacgaacccttaactcccgcgaccgaaaatactaaaaacgcgcgaaaatctcgaaaacgaaaacaaaaacccgaaacgacgacgactccgccccgcaacaaaaaaaaatataaacccgaatcccgccgtaaaaatccaaatcgcacgacgtaaaaatacgaaacctaaaaaaaaaccctctcgaaacgaacaataaaacgaataacgccccttaacctaaaacgaaaacgacaacgaaaactataaatacgtaaatctaactaaaaccgaactccgccaccgt

SEQ ID NO: 23083 - DNA, 761 bp, Artificial Sequence
  chemically treated genomic DNA (Homo sapiens) CpG-island No: 23083
aggtagggtttgaatttgggagagttggttttcgggaggtttcggttagcgatcgagaaaagggaggggcggcggggcggcggggtttgtgttgggggtcgggcgcgtcgagtttatttggtagttgtttagttgtttttcggtgaagatggtttgtttgttttttatggtggtcgtcgcgtcgtcgttcgttcgttcgggtttcgatttttattagcggttcgttagattcggagttagcgtttcgtgttcgcggttttcggtagtttcgcggttggtagcggtttacggtggtcggatttttttcgtttcgtagttcgtttggaggaggcgcgcgggggtttcggaggcggggacgggaattcggagcggtagcgatttcgtcgtcggcgggaagagggcggggtattcggtttcgcggttgtagcgcgttcgggtttcggtaggaggcgatttggtttcgggagacgttgttcggtacgaatttttggttttcgcggtcggaagtgttgggggcgcgcgggggtttcggaggcggggataaagattcggagcggcggcgatttcgtttcgtagtaggaagaggtgtgagttcgggtttcgtcgtgggagtttaggtcgtacggcgtgagggtgcggggtttgggaaaaaattttttcgaggcgggtagtggggcgagtggcgttttttgatttggggcgggggcggtagcgaggattgtgagtgcgtggatttagttggggtcgggtttcgttatcgt

SEQ ID NO: 23084 - DNA, 761 bp, Artificial Sequence
  chemically treated genomic DNA (Homo sapiens) CpG-island No: 23084
acgataacgaaacccgaccccaactaaatccacgcactcacaatcctcgctaccgcccccgccccaaatcaaaaaacgccactcgccccactacccgcctcgaaaaaattttttcccaaaccccgcaccctcacgccgtacgacctaaactcccacgacgaaacccgaactcacacctcttcctactacgaaacgaaatcgccgccgctccgaatctttatccccgcctccgaaacccccgcgcgcccccaacacttccgaccgcgaaaaccaaaaattcgtaccgaacaacgtctcccgaaaccaaatcgcctcctaccgaaacccgaacgcgctacaaccgcgaaaccgaataccccgccctcttcccgccgacgacgaaatcgctaccgctccgaattcccgtccccgcctccgaaacccccgcgcgcctcctccaaacgaactacgaaacgaaaaaaatccgaccaccgtaaaccgctaccaaccgcgaaactaccgaaaaccgcgaacacgaaacgctaactccgaatctaacgaaccgctaataaaaatcgaaacccgaacgaacgaacgacgacgcgacgaccaccataaaaaacaaacaaaccatcttcaccgaaaaacaactaaacaactaccaaataaactcgacgcgcccgacccccaacacaaaccccgccgccccgccgcccctcccttttctcgatcgctaaccgaaacctcccgaaaaccaactctcccaaattcaaaccctacct

SEQ ID NO: 23085 - DNA, 723 bp, Artificial Sequence
  chemically treated genomic DNA (Homo sapiens) CpG-island No: 23085
gtaacggtcggcgggcgggcgggggcgagattataagttttagggtgttttgcgcgttcgcgggtcgtgcggagcgaaggggcggtgcggagggggtagggggcgtagcggtcgcggcgcggaggcgtagggcgcgggcgtttacggttggcgcgcggtagcgatgtcgggggtcggagttcgggcggaggagggcggcggcggcggcgagggcgcggcgtagggggcggtcgcggagttcggggcgggttcggcgcgggagttagcgcggttgtgtggttatttgtagaagttgtcgggtaagggttttttgcgtggttatcgtagtcgttggttcgtgttcgacgcgcgtcgttgttatttttattattttaagagttcgtaggacgcgttgtttttcggttatttggatatcgcggacgtttgttttagttattagggtttcgacgaggcggcggagtcgggtacggagtcgttcgcgtatttttaggtgtatagcgcgggagtcgttacggtgtttaaggtgggatcgttcgttttaaagtcgttcgcgcgttttcgtcggcgttttttgttttcgttattggtttgcgttatttatttttttttttttaaggttttttcgtttttgtttacgtcggtttgtttttttttgtttttttatatttcgttttcgtttttattttttttttattatttgggtttaggttagtttcgttgggg

SEQ ID NO: 23086 - DNA, 723 bp, Artificial Sequence
  chemically treated genomic DNA (Homo sapiens) CpG-island No: 23086
ccccaacgaaactaacctaaacccaaataataaaaaaaaaataaaaacgaaaacgaaatataaaaaaacaaaaaaaaacaaaccgacgtaaacaaaaacgaaaaaaccttaaaaaaaaaaaaataaataacgcaaaccaataacgaaaacaaaaaacgccgacgaaaacgcgcgaacgactttaaaacgaacgatcccaccttaaacaccgtaacgactcccgcgctatacacctaaaaatacgcgaacgactccgtacccgactccgccgcctcgtcgaaaccctaataactaaaacaaacgtccgcgatatccaaataaccgaaaaacaacgcgtcctacgaactcttaaaataataaaaataacaacgacgcgcgtcgaacacgaaccaacgactacgataaccacgcaaaaaacccttacccgacaacttctacaaataaccacacaaccgcgctaactcccgcgccgaacccgccccgaactccgcgaccgccccctacgccgcgccctcgccgccgccgccgccctcctccgcccgaactccgacccccgacatcgctaccgcgcgccaaccgtaaacgcccgcgccctacgcctccgcgccgcgaccgctacgccccctaccccctccgcaccgccccttcgctccgcacgacccgcgaacgcgcaaaacaccctaaaacttataatctcgcccccgcccgcccgccgaccgttac

SEQ ID NO: 23087 - DNA, 723 bp, Artificial Sequence
  chemically treated genomic DNA (Homo sapiens) CpG-island No: 23087
ttttagcgagattggtttaagtttagatagtggggaggagataggaacgagggcgggatgtggagaagtagggaaaggtaggtcgacgtgggtaggggcgaggaggttttggaggaaggagggtggatggcgtaagttagtggcggaggtaggggacgtcggcggaagcgcgcgggcggttttggggcgagcggttttattttgagtatcgtgacggttttcgcgttgtgtatttggaagtgcgcgggcggtttcgtgttcggtttcgtcgtttcgtcggggttttggtagttgaagtaggcgttcgcgatgtttaagtggtcgaggggtagcgcgttttgcggatttttgaaatagtaaaggtagtagcggcgcgcgtcgaatacgaattagcggttgcggtagttacgtagggggtttttgttcgatagtttttgtagatagttatatagtcgcgttggttttcgcgtcggattcgtttcgggtttcgcggtcgttttttgcgtcgcgttttcgtcgtcgtcgtcgttttttttcgttcgggtttcggttttcggtatcgttatcgcgcgttaatcgtaggcgttcgcgttttgcgttttcgcgtcgcggtcgttgcgttttttatttttttcgtatcgttttttcgtttcgtacggttcgcgggcgcgtaaagtattttgggatttgtagtttcgttttcgttcgttcgtcggtcgttgt

SEQ ID NO: 23088 - DNA, 723 bp, Artificial Sequence
  chemically treated genomic DNA (Homo sapiens) CpG-island No: 23088
acaacgaccgacgaacgaacgaaaacgaaactacaaatcccaaaatactttacgcgcccgcgaaccgtacgaaacgaaaaaacgatacgaaaaaaataaaaaacgcaacgaccgcgacgcgaaaacgcaaaacgcgaacgcctacgattaacgcgcgataacgataccgaaaaccgaaacccgaacgaaaaaaaacgacgacgacgacgaaaacgcgacgcaaaaaacgaccgcgaaacccgaaacgaatccgacgcgaaaaccaacgcgactatataactatctacaaaaactatcgaacaaaaaccccctacgtaactaccgcaaccgctaattcgtattcgacgcgcgccgctactacctttactatttcaaaaatccgcaaaacgcgctacccctcgaccacttaaacatcgcgaacgcctacttcaactaccaaaaccccgacgaaacgacgaaaccgaacacgaaaccgcccgcgcacttccaaatacacaacgcgaaaaccgtcacgatactcaaaataaaaccgctcgccccaaaaccgcccgcgcgcttccgccgacgtcccctacctccgccactaacttacgccatccaccctccttcctccaaaacctcctcgcccctacccacgtcgacctacctttccctacttctccacatcccgccctcgttcctatctcctccccactatctaaacttaaaccaatctcgctaaaa

SEQ ID NO: 23089 - DNA, 754 bp, Artificial Sequence
  chemically treated genomic DNA (Homo sapiens) CpG-island No: 23089
cgagttcggcgattcgttagcggaatgtttaggggcggggtagcgagcgagcgcgaagtaattttgaggcggtttagggggcggggcgtttagggggcgtggtcgtgtaggggcgggtttcgagcgtggggtgggcgtttgcgtattgtcgttgcggttgttgttgcggagttaggaggggaagcgatggttgggttcgcgtggatttttaaggtgagcgttggtaggtcggcgtgtggtaggtaggtaggtcgcgagggttggtaggagagtcggtcgcgtgtcgggtgtgggcgggcgcgtgggttagatagggaggcggtggttgttcgcggggatagtttgggagtcggttttggtcgttcgtgtttcgcgtttcgtggtcggttcgtagtgtatgggtcgtttcgggtcgggttagtagcgtagaggcggggacggcgttaaggttaaggcgggggggcgtcggttttgtttttgtcgagattcggttgtcgttattcgtattcgtttaggttagagtttaggtttcgcgtcgagttcgggaaggttacgggagtttttgtttcggtttcgttattcgggtcgttttttcggttgcggttttgttgcgggattgatttttttagtattgtttatattttttattcgttgtttgcgcggtttttggtcggggaatcgtaggtgttacgggtattggcgttgagtttgggaggtttttttaggtgagagaattcgggggttttttttttta

SEQ ID NO: 23090 - DNA, 754 bp, Artificial Sequence
  chemically treated genomic DNA (Homo sapiens) CpG-island No: 23090
taaaaaaaaaaacccccgaattctctcacctaaaaaaacctcccaaactcaacgccaatacccgtaacacctacgattccccgaccaaaaaccgcgcaaacaacgaataaaaaatataaacaatactaaaaaaatcaatcccgcaacaaaaccgcaaccgaaaaaacgacccgaataacgaaaccgaaacaaaaactcccgtaaccttcccgaactcgacgcgaaacctaaactctaacctaaacgaatacgaataacgacaaccgaatctcgacaaaaacaaaaccgacgcccccccgccttaaccttaacgccgtccccgcctctacgctactaacccgacccgaaacgacccatacactacgaaccgaccacgaaacgcgaaacacgaacgaccaaaaccgactcccaaactatccccgcgaacaaccaccgcctccctatctaacccacgcgcccgcccacacccgacacgcgaccgactctcctaccaaccctcgcgacctacctacctaccacacgccgacctaccaacgctcaccttaaaaatccacgcgaacccaaccatcgcttcccctcctaactccgcaacaacaaccgcaacgacaatacgcaaacgcccaccccacgctcgaaacccgcccctacacgaccacgccccctaaacgccccgccccctaaaccgcctcaaaattacttcgcgctcgctcgctaccccgcccctaaacattccgctaacgaatcgccgaactcg

SEQ ID NO: 23091 - DNA, 754 bp, Artificial Sequence
  chemically treated genomic DNA (Homo sapiens) CpG-island No: 23091
tagggaaaagggttttcggatttttttatttgggaaaattttttaagtttaacgttagtgttcgtggtatttgcggtttttcggttaagggtcgcgtagatagcggatgagaggtgtgggtagtgttgaggggattagtttcgtagtagggtcgtagtcggggaagcggttcggatggcggagtcgggatagaggttttcgtgattttttcgggttcggcgcgaagtttgggttttggtttgggcggatgcgggtgacggtagtcgggtttcggtaggagtagggtcggcgttttttcgttttgattttgacgtcgttttcgtttttgcgttgttgattcggttcggggcggtttatatattgcgagtcggttacggagcgcggggtacgggcgattaggatcggtttttaagttgttttcgcgggtagttatcgtttttttgtttggtttacgcgttcgtttatattcggtacgcgatcggtttttttgttagttttcgcggtttgtttgtttgttatacgtcggtttgttagcgtttattttagagatttacgcgggtttagttatcgtttttttttttggtttcgtagtaatagtcgtagcggtagtgcgtaagcgtttattttacgttcggagttcgtttttgtacggttacgttttttgaacgtttcgttttttagatcgttttaggattgtttcgcgttcgttcgttgtttcgtttttggatatttcgttggcgaatcgtcgggttcg

SEQ ID NO: 23092 - DNA, 754 bp, Artificial Sequence
  chemically treated genomic DNA (Homo sapiens) CpG-island No: 23092
cgaacccgacgattcgccaacgaaatatccaaaaacgaaacaacgaacgaacgcgaaacaatcctaaaacgatctaaaaaacgaaacgttcaaaaaacgtaaccgtacaaaaacgaactccgaacgtaaaataaacgcttacgcactaccgctacgactattactacgaaaccaaaaaaaaaaacgataactaaacccgcgtaaatctctaaaataaacgctaacaaaccgacgtataacaaacaaacaaaccgcgaaaactaacaaaaaaaccgatcgcgtaccgaatataaacgaacgcgtaaaccaaacaaaaaaacgataactacccgcgaaaacaacttaaaaaccgatcctaatcgcccgtaccccgcgctccgtaaccgactcgcaatatataaaccgccccgaaccgaatcaacaacgcaaaaacgaaaacgacgtcaaaatcaaaacgaaaaaacgccgaccctactcctaccgaaacccgactaccgtcacccgcatccgcccaaaccaaaacccaaacttcgcgccgaacccgaaaaaatcacgaaaacctctatcccgactccgccatccgaaccgcttccccgactacgaccctactacgaaactaatcccctcaacactacccacacctctcatccgctatctacgcgacccttaaccgaaaaaccgcaaataccacgaacactaacgttaaacttaaaaaattttcccaaataaaaaaatccgaaaacccttttcccta

SEQ ID NO: 23093 - DNA, 652 bp, Artificial Sequence
  chemically treated genomic DNA (Homo sapiens) CpG-island No: 23093
ttattcgtcgttattgttttattttatagttacgttttcgtttttttatttttttcgttttattcgtttcgtttttttgaacgaaaaagtttcgttcgtttcgaaatttcgtcgtaattcgtttaagtattttttaggattcgatcgcgcgtaggcgcgtcgggcgtaatcgcggattacgtaacgttttattagtttttcgattattttaaattttcgttttcgtaacgttcgatatttttcgtaattattcgttcgtcgtatcgttttttaaaaattagcggtcgcgagttagtcgagaggttaacgtcgtcgagcgtagtttatattatgattattaatcgcgcgtcgtttattttttttcgtttcggtagcggttttttattaggtcgattcgtttttacgacggatcgttgtcgtcgacgcgttatcgcgaattttttttatcgttttcgatttatttttatcgtaatcgaaggtttcgcgttatttatatcgaaattagaaatcgttttttatttcgttaatatcgaagcgttttttatcggggcgaagattcggtcgtcgtattttatcggtaatttatttatatattcgatttatttattttcgttattattacgtaagttatttcgatatacgagtacgtttt

SEQ ID NO: 23094 - DNA, 652 bp, Artificial Sequence
  chemically treated genomic DNA (Homo sapiens) CpG-island No: 23094
aaaacgtactcgtatatcgaaataacttacgtaataataacgaaaataaataaatcgaatatataaataaattaccgataaaatacgacgaccgaatcttcgccccgataaaaaacgcttcgatattaacgaaataaaaaacgatttctaatttcgatataaataacgcgaaaccttcgattacgataaaaataaatcgaaaacgataaaaaaaattcgcgataacgcgtcgacgacaacgatccgtcgtaaaaacgaatcgacctaataaaaaaccgctaccgaaacgaaaaaaaataaacgacgcgcgattaataatcataatataaactacgctcgacgacgttaacctctcgactaactcgcgaccgctaatttttaaaaaacgatacgacgaacgaataattacgaaaaatatcgaacgttacgaaaacgaaaatttaaaataatcgaaaaactaataaaacgttacgtaatccgcgattacgcccgacgcgcctacgcgcgatcgaatcctaaaaaatacttaaacgaattacgacgaaatttcgaaacgaacgaaactttttcgttcaaaaaaacgaaacgaataaaacgaaaaaaataaaaaaacgaaaacgtaactataaaataaaacaataacgacgaataa

SEQ ID NO: 23095 - DNA, 652 bp, Artificial Sequence
  chemically treated genomic DNA (Homo sapiens) CpG-island No: 23095
agggcgtgttcgtgtgtcggggtggtttgcgtggtggtgacgggggtgggtgggtcgggtatatggatagattgtcggtggggtgcggcgatcgggttttcgtttcggtggggggcgtttcggtgttggcggggtggggggcggtttttggtttcggtgtgggtggcgcggggttttcggttgcggtgggagtgggtcgggggcggtggggggggttcgcggtggcgcgtcggcggtagcgattcgtcgtgggggcgggtcggtttagtggggggtcgttatcggggcgaaggggggtgggcggcgcgcggttggtgattatagtatgggttacgttcggcggcgttggtttttcgattggttcgcggtcgttggtttttggggggcggtgcggcgaacgggtagttgcggggggtatcgggcgttgcgggggcgggggtttggggtggtcgggaggttggtgggacgttgcgtggttcgcggttgcgttcggcgcgtttgcgcgcggtcgggttttggggggtgtttaggcgggttgcggcggggtttcggggcgggcggggttttttcgtttaggggggcgggacgggtgggacggggggggtggggaagcgggggcgtggttgtggggtgaggtagtgacggcggataa

SEQ ID NO: 23096 - DNA, 652 bp, Artificial Sequence
  chemically treated genomic DNA (Homo sapiens) CpG-island No: 23096
ttatccgccgtcactacctcaccccacaaccacgcccccgcttccccaccccccccgtcccacccgtcccgcccccctaaacgaaaaaaccccgcccgccccgaaaccccgccgcaacccgcctaaacaccccccaaaacccgaccgcgcgcaaacgcgccgaacgcaaccgcgaaccacgcaacgtcccaccaacctcccgaccaccccaaacccccgcccccgcaacgcccgataccccccgcaactacccgttcgccgcaccgccccccaaaaaccaacgaccgcgaaccaatcgaaaaaccaacgccgccgaacgtaacccatactataatcaccaaccgcgcgccgcccaccccccttcgccccgataacgaccccccactaaaccgacccgcccccacgacgaatcgctaccgccgacgcgccaccgcgaaccccccccaccgcccccgacccactcccaccgcaaccgaaaaccccgcgccacccacaccgaaaccaaaaaccgccccccaccccgccaacaccgaaacgccccccaccgaaacgaaaacccgatcgccgcaccccaccgacaatctatccatatacccgacccacccacccccgtcaccaccacgcaaaccaccccgacacacgaacacgccct

SEQ ID NO: 23097 - DNA, 1211 bp, Artificial Sequence
  chemically treated genomic DNA (Homo sapiens) CpG-island No: 23097
atatatcgaaagcgtcgatatagttaggcgtgagggcgaggacgggggtgggggtgggggtcggacgttattggttttcgagtttcgattttgattacgattttcggagcgtagggtcggttcgggagttattagtttggtttttagttttcggttcgttttcgattcgttttcggttggttttcgcggttcgcgttcgtttatcgtaagcgtagatgtttcgtagtaggttttttcgtaggtttatggtgtcgaacgtgggggttatatttattttttcgttggtttcgaattttattttagttatgtttttttttttgagtagtcgttttcgcgtcgagttcgaggtcgttatcgtggtcgtggtcgttatgatttagagttcgcggaagagtatagcgcgcgtcgttgtcgatttcgttgtcgttgtcgatttcgttgtgtcgttgtcgatttcgttgtcgttgtcgatttcgttgtgtcgttgtcgatttcgttgtgtcgttgtcgatttcgttgtgtcgttgtcgatttcgttgtgtcgttgtcgagaatagacgttttaagtatgcgaaagcgagagacgtgcgtgcgtacgtgcgtacgtgcgtacgcgcgacgcggttacgtttttgggggacggggtatttttcgttacgtgaaagggaattgggcgtttgtcgtagggaaaagtaaggtgtttttgttttcgcgttatatgtagttttcgcgggatttcgttgagggcggggtatttagttttttacgaaagggatggagggggtggtatttttaaagttggcggtgtttcgtatcggtcgcgggatttcgcggattggggcgttgaggttttttgagcggcgtgtggatttgaattttttggaaataggttggggtcgcgaggggttttcgtttcgggcggggtttttagatagtttcgtttcgaataaaaatgacgagtacgggttttttttcgggttcgtagtgggtggattgcgtcgtagattcgtagtggaggcgtttagttcgtcggggagattcgagtggaaatttttacggtcgtcggtggtgggtttcggcgcggcgttgggtttcggcgggtttgcgttggggagggttagggtttttgaagtcggcgttttttttaggggacgcgtttgggtgtgtttttatcgtttgtttggtgagttggagatagggtttcgtttcgt

SEQ ID NO: 23098 - DNA, 1211 bp, Artificial Sequence
  chemically treated genomic DNA (Homo sapiens) CpG-island No: 23098
acgaaacgaaaccctatctccaactcaccaaacaaacgataaaaacacacccaaacgcgtcccctaaaaaaaacgccgacttcaaaaaccctaaccctccccaacgcaaacccgccgaaacccaacgccgcgccgaaacccaccaccgacgaccgtaaaaatttccactcgaatctccccgacgaactaaacgcctccactacgaatctacgacgcaatccacccactacgaacccgaaaaaaaacccgtactcgtcatttttattcgaaacgaaactatctaaaaaccccgcccgaaacgaaaacccctcgcgaccccaacctatttccaaaaaattcaaatccacacgccgctcaaaaaacctcaacgccccaatccgcgaaatcccgcgaccgatacgaaacaccgccaactttaaaaataccaccccctccatccctttcgtaaaaaactaaataccccgccctcaacgaaatcccgcgaaaactacatataacgcgaaaacaaaaacaccttacttttccctacgacaaacgcccaattccctttcacgtaacgaaaaataccccgtcccccaaaaacgtaaccgcgtcgcgcgtacgcacgtacgcacgtacgcacgcacgtctctcgctttcgcatacttaaaacgtctattctcgacaacgacacaacgaaatcgacaacgacacaacgaaatcgacaacgacacaacgaaatcgacaacgacacaacgaaatcgacaacgacaacgaaatcgacaacgacacaacgaaatcgacaacgacaacgaaatcgacaacgacgcgcgctatactcttccgcgaactctaaatcataacgaccacgaccacgataacgacctcgaactcgacgcgaaaacgactactcaaaaaaaaaaacataactaaaataaaattcgaaaccaacgaaaaaataaatataacccccacgttcgacaccataaacctacgaaaaaacctactacgaaacatctacgcttacgataaacgaacgcgaaccgcgaaaaccaaccgaaaacgaatcgaaaacgaaccgaaaactaaaaaccaaactaataactcccgaaccgaccctacgctccgaaaatcgtaatcaaaatcgaaactcgaaaaccaataacgtccgacccccacccccacccccgtcctcgccctcacgcctaactatatcgacgctttcgatatat

SEQ ID NO: 23099 - DNA, 1211 bp, Artificial Sequence
  chemically treated genomic DNA (Homo sapiens) CpG-island No: 23099
acggagcgagattttgtttttaatttattaggtaaacggtgaagatatatttaggcgcgttttttaagagggacgtcggttttaggggttttggttttttttagcgtagattcgtcggagtttagcgtcgcgtcggggtttattatcggcggtcgtgagggtttttattcgaattttttcggcgagttgggcgtttttattacgggtttgcgacgtagtttatttattgcgggttcgagagaggattcgtgttcgttatttttattcgaggcggggttatttggggatttcgttcggagcggaggtttttcgcggttttagtttgtttttagggaatttaggtttatacgtcgtttaaagaattttagcgttttagttcgcgaaatttcgcggtcggtacgaaatatcgttaattttagaagtattattttttttatttttttcgtaaggaattgggtgtttcgtttttaacgagatttcgcgggaattgtatatggcgcgagagtagaaatattttatttttttttgcggtaaacgtttagtttttttttacgtgacgaagagtgtttcgttttttagaggcgtggtcgcgtcgcgcgtacgtacgtacgtacgtacgtacgtacgtttttcgttttcgtatatttaaggcgtttgttttcggtagcggtatagcgaggtcggtagcggtatagcgaggtcggtagcggtatagcgaggtcggtagcggtatagcgaggtcggtagcggtagcgaggtcggtagcggtatagcgaggtcggtagcggtagcgaggtcggtagcggcgcgcgttgtgttttttcgcggattttgaattatggcgattacggttacgatggcgatttcgggttcggcgcgaaagcggttgtttaaagaggaagatatgattaaagtggaattcgagattagcgaggaggtggatgtgatttttacgttcgatattatgggtttgcgggaggatttgttgcggggtatttacgtttacggtgagcgggcgcgggtcgcgggggttagtcgggggcgagtcgggggcgagtcgggggttgagggttagattggtgattttcgggtcggttttgcgtttcggaggtcgtggttagggtcgaggttcgggggttagtgacgttcgatttttatttttattttcgttttcgtttttacgtttggttgtgtcggcgttttcggtgtgt

SEQ ID NO: 23100 - DNA, 1211 bp, Artificial Sequence
  chemically treated genomic DNA (Homo sapiens) CpG-island No: 23100
acacaccgaaaacgccgacacaaccaaacgtaaaaacgaaaacgaaaataaaaataaaaatcgaacgtcactaacccccgaacctcgaccctaaccacgacctccgaaacgcaaaaccgacccgaaaatcaccaatctaaccctcaacccccgactcgcccccgactcgcccccgactaacccccgcgacccgcgcccgctcaccgtaaacgtaaataccccgcaacaaatcctcccgcaaacccataatatcgaacgtaaaaatcacatccacctcctcgctaatctcgaattccactttaatcatatcttcctctttaaacaaccgctttcgcgccgaacccgaaatcgccatcgtaaccgtaatcgccataattcaaaatccgcgaaaaaacacaacgcgcgccgctaccgacctcgctaccgctaccgacctcgctataccgctaccgacctcgctaccgctaccgacctcgctataccgctaccgacctcgctataccgctaccgacctcgctataccgctaccgacctcgctataccgctaccgaaaacaaacgccttaaatatacgaaaacgaaaaacgtacgtacgtacgtacgtacgtacgtacgcgcgacgcgaccacgcctctaaaaaacgaaacactcttcgtcacgtaaaaaaaaactaaacgtttaccgcaaaaaaaaataaaatatttctactctcgcgccatatacaattcccgcgaaatctcgttaaaaacgaaacacccaattccttacgaaaaaaataaaaaaaataatacttctaaaattaacgatatttcgtaccgaccgcgaaatttcgcgaactaaaacgctaaaattctttaaacgacgtataaacctaaattccctaaaaacaaactaaaaccgcgaaaaacctccgctccgaacgaaatccccaaataaccccgcctcgaataaaaataacgaacacgaatcctctctcgaacccgcaataaataaactacgtcgcaaacccgtaataaaaacgcccaactcgccgaaaaaattcgaataaaaaccctcacgaccgccgataataaaccccgacgcgacgctaaactccgacgaatctacgctaaaaaaaaccaaaacccctaaaaccgacgtccctcttaaaaaacgcgcctaaatatatcttcaccgtttacctaataaattaaaaacaaaatctcgctccgt

SEQ ID NO: 23101 - DNA, 770 bp, Artificial Sequence
  chemically treated genomic DNA (Homo sapiens) CpG-island No: 23101
ttatcgtcggtagcgcggggtagacgttaggtgttttattcgtttcgtgttttagttttttcgttagttgcggtacgcgtagagtttttttcgttgaataacgggcggacgaggagaatttagaggtggtcggggtttttcgcgttatcgaggttattgttttatttgttgttttattttcgatttttattcgcggtttcggcgataattttagtttttttaattgagaggtcgcgcgggtagtcgatcgttttatcgattcggttcgcgtttagggaagtttcgtagtttcggttcggtttattttcgcgtacgcgcgttttggtcgttcgcggagatttcggggtcgtgttcgggggcgcgtagaggcgggttacgtgatcggcgggagttcgtcgcggggcggggtcgcggtgggttacgtgacgcggtttttcgcgtaggcgttcgaggtaagggtgcgcgttcgcgttacgttttttagtggcggtttcggtagagcgggtttgggcgcgttttcgttttcggagggggtttggggagcgcgtttggttgcgcgttcggcgtttcgcggggagaggtttacgcgtgttgttcgttgtcggtttttttggggttagagacggggcgaggttttcgttggcgtagtttcggttcggttttcgtggggtcggagatggggcgtggttttcgttgtttcggtttgggttttcgtagttcgtagggttttgtaaggggttggtttagtcgcgttttgcgtttagggattt

SEQ ID NO: 23102 - DNA, 770 bp, Artificial Sequence
  chemically treated genomic DNA (Homo sapiens) CpG-island No: 23102
aaatccctaaacgcaaaacgcgactaaaccaaccccttacaaaaccctacgaactacgaaaacccaaaccgaaacaacgaaaaccacgccccatctccgaccccacgaaaaccgaaccgaaactacgccaacgaaaacctcgccccgtctctaaccccaaaaaaaccgacaacgaacaacacgcgtaaacctctccccgcgaaacgccgaacgcgcaaccaaacgcgctccccaaaccccctccgaaaacgaaaacgcgcccaaacccgctctaccgaaaccgccactaaaaaacgtaacgcgaacgcgcacccttacctcgaacgcctacgcgaaaaaccgcgtcacgtaacccaccgcgaccccgccccgcgacgaactcccgccgatcacgtaacccgcctctacgcgcccccgaacacgaccccgaaatctccgcgaacgaccaaaacgcgcgtacgcgaaaataaaccgaaccgaaactacgaaacttccctaaacgcgaaccgaatcgataaaacgatcgactacccgcgcgacctctcaattaaaaaaactaaaattatcgccgaaaccgcgaataaaaatcgaaaataaaacaacaaataaaacaataacctcgataacgcgaaaaaccccgaccacctctaaattctcctcgtccgcccgttattcaacgaaaaaaactctacgcgtaccgcaactaacgaaaaaactaaaacacgaaacgaataaaacacctaacgtctaccccgcgctaccgacgataa

SEQ ID NO: 23103 - DNA, 770 bp, Artificial Sequence
  chemically treated genomic DNA (Homo sapiens) CpG-island No: 23103
gaatttttgggcgtaaggcgcggttgggttagttttttataaagttttacgagttgcggggatttaggtcggggtagcgggggttacgttttattttcgattttacggggatcgggtcgggattgcgttagcgggggtttcgtttcgtttttgattttagaggaatcggtagcgggtagtacgcgtgggttttttttcgcgggacgtcggacgcgtagttagacgcgttttttaggtttttttcgagagcgaggacgcgtttaggttcgttttgtcggagtcgttattggggggcgtagcgcggacgcgtatttttgtttcgggcgtttgcgcgggaggtcgcgttacgtgatttatcgcggtttcgtttcgcgacgagttttcgtcggttacgtgattcgtttttgcgcgttttcgggtacgatttcggagttttcgcgggcggttagggcgcgcgtgcgcggaggtgagtcgggtcggggttgcggggtttttttgagcgcgggtcgggtcggtggggcggtcggttgttcgcgcggttttttagttgggaaagttgaggttgtcgtcggggtcgcgggtggaggtcggggatgaggtagtaggtaggatagtgatttcggtgacgcgaaggatttcggttatttttaggtttttttcgttcgttcgttgtttagcgagggaggttttgcgcgtgtcgtagttgacggggaaattgaggtacggagcgggtgagatatttgacgtttgtttcgcgttgtcggcggtaa

SEQ ID NO: 23104 - DNA, 770 bp, Artificial Sequence
  chemically treated genomic DNA (Homo sapiens) CpG-island No: 23104
ttaccgccgacaacgcgaaacaaacgtcaaatatctcacccgctccgtacctcaatttccccgtcaactacgacacgcgcaaaacctccctcgctaaacaacgaacgaacgaaaaaaacctaaaaataaccgaaatccttcgcgtcaccgaaatcactatcctacctactacctcatccccgacctccacccgcgaccccgacgacaacctcaactttcccaactaaaaaaccgcgcgaacaaccgaccgccccaccgacccgacccgcgctcaaaaaaaccccgcaaccccgacccgactcacctccgcgcacgcgcgccctaaccgcccgcgaaaactccgaaatcgtacccgaaaacgcgcaaaaacgaatcacgtaaccgacgaaaactcgtcgcgaaacgaaaccgcgataaatcacgtaacgcgacctcccgcgcaaacgcccgaaacaaaaatacgcgtccgcgctacgccccccaataacgactccgacaaaacgaacctaaacgcgtcctcgctctcgaaaaaaacctaaaaaacgcgtctaactacgcgtccgacgtcccgcgaaaaaaaacccacgcgtactacccgctaccgattcctctaaaatcaaaaacgaaacgaaacccccgctaacgcaatcccgacccgatccccgtaaaatcgaaaataaaacgtaacccccgctaccccgacctaaatccccgcaactcgtaaaactttataaaaaactaacccaaccgcgccttacgcccaaaaattc

SEQ ID NO: 23105 - DNA, 664 bp, Artificial Sequence
  chemically treated genomic DNA (Homo sapiens) CpG-island No: 23105
gttcgataggtcgggaaagttgagcgcgcgttgttggggggacgtatattttggaggttgtgtgggcgcgcgtcggtattttataagtttttattcgtttgtttcgtcgatttagttagataaagatcgtaagtttttcggtttatcgttttagataggcggggattagttttttcgaattaggtttatttcgggttcgggcgtttttattcgtcgcggggaaaagtttttaggtgttttttcgtgatttaggtttttttataacgttttcgtttttgttggcgtttcgtatttcgaggacggcggtcggatttcggttttttttcggtttcgcggttgtaggtttacgcgtttcgcgcgtttcgcgcgttttcgttttagtttcgtcgagggggcgttgttcgttgcgcggtggatttttcggatttcgttttcgcggtttcgttcgggtttcgatatttattcgggtttcgttgcgggggtcggattcgcgtcggtttcgagagtcgttatcgtcgttttcgtcgttgtcgtcgttagtgaggcgcggcggggcggggacgcgcggggaggttcggttttcggttcgttttcgggttcgttttcggttcggtttttgtttgttttcgtcggttttttcgtttattttttggtttagttttgg

SEQ ID NO: 23106 - DNA, 664 bp, Artificial Sequence
  chemically treated genomic DNA (Homo sapiens) CpG-island No: 23106
ccaaaactaaaccaaaaaataaacgaaaaaaccgacgaaaacaaacaaaaaccgaaccgaaaacgaacccgaaaacgaaccgaaaaccgaacctccccgcgcgtccccgccccgccgcgcctcactaacgacgacaacgacgaaaacgacgataacgactctcgaaaccgacgcgaatccgacccccgcaacgaaacccgaataaatatcgaaacccgaacgaaaccgcgaaaacgaaatccgaaaaatccaccgcgcaacgaacaacgccccctcgacgaaactaaaacgaaaacgcgcgaaacgcgcgaaacgcgtaaacctacaaccgcgaaaccgaaaaaaaaccgaaatccgaccgccgtcctcgaaatacgaaacgccaacaaaaacgaaaacgttataaaaaaacctaaatcacgaaaaaacacctaaaaacttttccccgcgacgaataaaaacgcccgaacccgaaataaacctaattcgaaaaaactaatccccgcctatctaaaacgataaaccgaaaaacttacgatctttatctaactaaatcgacgaaacaaacgaataaaaacttataaaataccgacgcgcgcccacacaacctccaaaatatacgtccccccaacaacgcgcgctcaactttcccgacctatcgaac

SEQ ID NO: 23107 - DNA, 664 bp, Artificial Sequence
  chemically treated genomic DNA (Homo sapiens) CpG-island No: 23107
ttagggttgggttagaaggtgggcggggagatcggcgggggtaggtaggggtcgggtcgggggcgggttcgggggcgggtcgggggtcgggttttttcgcgcgttttcgtttcgtcgcgttttattggcggcggtagcggcggaggcgacggtggcggttttcggagtcggcgcgaattcggttttcgtagcgggattcgggtgggtatcggggttcggacggggtcgcgggggcggggttcgaggggtttatcgcgtagcgagtagcgttttttcggcggagttggggcgggggcgcgcggggcgcgcggggcgcgtgggtttgtagtcgcgggatcggggaggggtcggggttcggtcgtcgttttcggggtgcggggcgttagtaggagcgggagcgttgtgggaggatttggattacggaggggtatttggggattttttttcgcggcgagtgagggcgttcgggttcggaatgggtttaattcggggagattggttttcgtttgtttggagcggtggatcggggaatttgcggtttttgtttggttgaatcggcggagtagacggatgagaatttgtggggtgtcggcgcgcgtttatatagtttttaaagtgtgcgtttttttagtagcgcgcgtttagttttttcggtttgtcgggt

SEQ ID NO: 23108 - DNA, 664 bp, Artificial Sequence
  chemically treated genomic DNA (Homo sapiens) CpG-island No: 23108
acccgacaaaccgaaaaaactaaacgcgcgctactaaaaaaacgcacactttaaaaactatataaacgcgcgccgacaccccacaaattctcatccgtctactccgccgattcaaccaaacaaaaaccgcaaattccccgatccaccgctccaaacaaacgaaaaccaatctccccgaattaaacccattccgaacccgaacgccctcactcgccgcgaaaaaaaatccccaaatacccctccgtaatccaaatcctcccacaacgctcccgctcctactaacgccccgcaccccgaaaacgacgaccgaaccccgacccctccccgatcccgcgactacaaacccacgcgccccgcgcgccccgcgcgcccccgccccaactccgccgaaaaaacgctactcgctacgcgataaacccctcgaaccccgcccccgcgaccccgtccgaaccccgatacccacccgaatcccgctacgaaaaccgaattcgcgccgactccgaaaaccgccaccgtcgcctccgccgctaccgccgccaataaaacgcgacgaaacgaaaacgcgcgaaaaaacccgacccccgacccgcccccgaacccgcccccgacccgacccctacctacccccgccgatctccccgcccaccttctaacccaaccctaa

SEQ ID NO: 23109 - DNA, 792 bp, Artificial Sequence
  chemically treated genomic DNA (Homo sapiens) CpG-island No: 23109
attttcgggcgtttagtagttcggggtttttaggtgttcggtaggttttttcgggatttcgagtcgttcgttgggtatacgttgacgtcgttgtcgttttatagaaattgagcgtagtcgaggcgggattcgggcgtagagagcgataaaggaaaagtatggtcgtgttttaattattatagtttaagggacgatacgtcgagacggcgcgcgtttttgcgtgcgtggagatggtataaagatcgcgtcgttttcggcggttttcgttttcgtagcgcgcgtggtttcggttcggtcggatgttgatagcgtcgtttagtaacgggaaatggcggaatcggtcggcgcggcgggtcggtaagtcgggtcgaggggtagcgggttttggagtcgttaggtcgcgtttttcgtttaacgttttaggtggttttcgcgtcggtttttgtttcgttttttcgtttttattttttttttttttcgtttgtgttttttttttcgttattttgttggtttttttcgtttattgcgtttagttttttattttttcgttaattttttttatttttttttttttgtttttttgttttttttcggttttttttttttttttattttaagcgcgcgattttttttaaaattcgggatcgtttattttgtagttattatggtaattattttgcgtggcggtttttgcgcgtagtttttttaagagtagagggttttgtagggcgcggggttgttggatatcgtttttgattttgtttcggggttattcgttgtggtcggagatta

SEQ ID NO: 23110 - DNA, 792 bp, Artificial Sequence
  chemically treated genomic DNA (Homo sapiens) CpG-island No: 23110
taatctccgaccacaacgaataaccccgaaacaaaatcaaaaacgatatccaacaaccccgcgccctacaaaaccctctactcttaaaaaaactacgcgcaaaaaccgccacgcaaaataattaccataataactacaaaataaacgatcccgaattttaaaaaaaatcgcgcgcttaaaataaaaaaaaaaaaaaaaccgaaaaaaaacaaaaaaacaaaaaaaaaaaaataaaaaaaattaacgaaaaaataaaaaactaaacgcaataaacgaaaaaaaccaacaaaataacgaaaaaaaaaacacaaacgaaaaaaaaaaaaaataaaaacgaaaaaacgaaacaaaaaccgacgcgaaaaccacctaaaacgttaaacgaaaaacgcgacctaacgactccaaaacccgctacccctcgacccgacttaccgacccgccgcgccgaccgattccgccatttcccgttactaaacgacgctatcaacatccgaccgaaccgaaaccacgcgcgctacgaaaacgaaaaccgccgaaaacgacgcgatctttataccatctccacgcacgcaaaaacgcgcgccgtctcgacgtatcgtcccttaaactataataattaaaacacgaccatacttttcctttatcgctctctacgcccgaatcccgcctcgactacgctcaatttctataaaacgacaacgacgtcaacgtatacccaacgaacgactcgaaatcccgaaaaaacctaccgaacacctaaaaaccccgaactactaaacgcccgaaaat

SEQ ID NO: 23111 - DNA, 792 bp, Artificial Sequence
  chemically treated genomic DNA (Homo sapiens) CpG-island No: 23111
tggttttcggttatagcgagtggtttcggagtaaggttaggggcggtatttaatagtttcgcgttttgtagagttttttatttttaggaggattgcgcgtagggatcgttacgtagagtggttgttatggtgattgtagagtgagcggtttcgggttttagagggagtcgcgcgtttggagtaggggaaagagggaggtcgagagaggataaagggataggaggggagaagtgagaagggttggcgggggggtgaggggttgaacgtagtggacgggaaaggttagtaaaatggcgagagaagggatataggcgagaggaagggggagtggaggcgaaggggcgaggtaggagtcgacgcgggggttatttggagcgttgaacggagagcgcggtttggcgattttaagattcgttgtttttcggttcggtttatcggttcgtcgcgtcggtcggtttcgttatttttcgttgttaggcgacgttgttaatattcggtcgggtcgggattacgcgcgttgcgagggcgggggtcgtcgggggcggcgcggtttttgtgttatttttacgtacgtagaggcgcgcgtcgtttcgacgtgtcgttttttagattgtaatgattagagtacgattatgttttttttttatcgttttttgcgttcgggtttcgtttcggttgcgtttaatttttgtaaagcgatagcggcgttagcgtgtgtttagcgggcggttcgaggtttcgaagggatttgtcgggtatttggggatttcggattgttaagcgttcgggaat

SEQ ID NO: 23112 - DNA, 792 bp, Artificial Sequence
  chemically treated genomic DNA (Homo sapiens) CpG-island No: 23112
attcccgaacgcttaacaatccgaaatccccaaatacccgacaaatcccttcgaaacctcgaaccgcccgctaaacacacgctaacgccgctatcgctttacaaaaattaaacgcaaccgaaacgaaacccgaacgcaaaaaacgataaaaaaaaaacataatcgtactctaatcattacaatctaaaaaacgacacgtcgaaacgacgcgcgcctctacgtacgtaaaaataacacaaaaaccgcgccgcccccgacgacccccgccctcgcaacgcgcgtaatcccgacccgaccgaatattaacaacgtcgcctaacaacgaaaaataacgaaaccgaccgacgcgacgaaccgataaaccgaaccgaaaaacaacgaatcttaaaatcgccaaaccgcgctctccgttcaacgctccaaataacccccgcgtcgactcctacctcgccccttcgcctccactcccccttcctctcgcctatatcccttctctcgccattttactaacctttcccgtccactacgttcaacccctcacccccccgccaacccttctcacttctcccctcctatccctttatcctctctcgacctccctctttcccctactccaaacgcgcgactccctctaaaacccgaaaccgctcactctacaatcaccataacaaccactctacgtaacgatccctacgcgcaatcctcctaaaaataaaaaactctacaaaacgcgaaactattaaataccgcccctaaccttactccgaaaccactcgctataaccgaaaacca

SEQ ID NO: 23113 - DNA, 643 bp, Artificial Sequence
  chemically treated genomic DNA (Homo sapiens) CpG-island No: 23113
tcgttagatagagtcgtttattattataatcgtttgtagcgacggcgtttagcgtttatgtcgcggcggcgtgatttgtcgggatttttgttcgtcgcgtattcgtagttatcgtcgagcgggcgtcgggtcgggattcgtgagtgtgtatcggcggtcgggttggcgtcgagtttagagcggattagtagtagtttaagcgttgcggtcgtcgttttttcgttgatttcgcggtaagagtcgggttgggcgcgggtcgcgggggcgggagggtcgggtagggtggagggcgagggtttttcggggtttttgttttcgtagacgggtatttacgcggtttttcgcgcgtttttttggtattagggttgtgtcgaggttatcgagtggattcgtagcggtcggagcggagtcggggcggcgtgggggttaaggtatagttgggcgcggaggcggcgcgggtttttttttgggttagcgtgcgtcgcggcgtttttattagggcgggaatcgtcgttttttttagggttgttcgggttgttattcgcgcgtatcgagataattttaggggcgggtggggttagaagttttggtgagattttatggtttttcgtggtcgtttagttttttatcgtaggggaagggg

SEQ ID NO: 23114 - DNA, 643 bp, Artificial Sequence
  chemically treated genomic DNA (Homo sapiens) CpG-island No: 23114
ccccttcccctacgataaaaaactaaacgaccacgaaaaaccataaaatctcaccaaaacttctaaccccacccgcccctaaaattatctcgatacgcgcgaataacaacccgaacaaccctaaaaaaaacgacgattcccgccctaataaaaacgccgcgacgcacgctaacccaaaaaaaaacccgcgccgcctccgcgcccaactataccttaacccccacgccgccccgactccgctccgaccgctacgaatccactcgataacctcgacacaaccctaataccaaaaaaacgcgcgaaaaaccgcgtaaatacccgtctacgaaaacaaaaaccccgaaaaaccctcgccctccaccctacccgaccctcccgcccccgcgacccgcgcccaacccgactcttaccgcgaaatcaacgaaaaaacgacgaccgcaacgcttaaactactactaatccgctctaaactcgacgccaacccgaccgccgatacacactcacgaatcccgacccgacgcccgctcgacgataactacgaatacgcgacgaacaaaaatcccgacaaatcacgccgccgcgacataaacgctaaacgccgtcgctacaaacgattataataataaacgactctatctaacga

SEQ ID NO: 23115 - DNA, 643 bp, Artificial Sequence
  chemically treated genomic DNA (Homo sapiens) CpG-island No: 23115
tttttttttttacgatgagggattaagcggttacggaggattatgaggttttattagagtttttgattttattcgtttttggagttgtttcggtgcgcgcgggtggtagttcgagtagttttagaggaggcggcggttttcgttttggtgaaggcgtcgcggcgtacgttagtttagggaaaagttcgcgtcgttttcgcgtttagttgtgttttggtttttacgtcgtttcgatttcgtttcggtcgttgcgagtttattcggtgatttcggtatagttttggtgttaagagggcgcgcgggaggtcgcgtgggtgttcgtttgcgagggtaggagtttcggggggttttcgttttttattttgttcggttttttcgttttcgcggttcgcgtttagttcggtttttatcgcggggttagcggggaggcggcggtcgtagcgtttgagttgttgttggttcgttttgggttcggcgttagttcggtcgtcggtgtatatttacgggtttcggttcggcgttcgttcggcggtgattgcgggtgcgcggcgggtaagggtttcggtaggttacgtcgtcgcgatatgggcgttggacgtcgtcgttgtagacggttatggtaatgagcggttttgtttagcga

SEQ ID NO: 23116 - DNA, 643 bp, Artificial Sequence
  chemically treated genomic DNA (Homo sapiens) CpG-island No: 23116
tcgctaaacaaaaccgctcattaccataaccgtctacaacgacgacgtccaacgcccatatcgcgacgacgtaacctaccgaaacccttacccgccgcgcacccgcaatcaccgccgaacgaacgccgaaccgaaacccgtaaatatacaccgacgaccgaactaacgccgaacccaaaacgaaccaacaacaactcaaacgctacgaccgccgcctccccgctaaccccgcgataaaaaccgaactaaacgcgaaccgcgaaaacgaaaaaaccgaacaaaataaaaaacgaaaaccccccgaaactcctaccctcgcaaacgaacacccacgcgacctcccgcgcgccctcttaacaccaaaactataccgaaatcaccgaataaactcgcaacgaccgaaacgaaatcgaaacgacgtaaaaaccaaaacacaactaaacgcgaaaacgacgcgaacttttccctaaactaacgtacgccgcgacgccttcaccaaaacgaaaaccgccgcctcctctaaaactactcgaactaccacccgcgcgcaccgaaacaactccaaaaacgaataaaatcaaaaactctaataaaacctcataatcctccgtaaccgcttaatccctcatcgtaaaaaaaaaaa

SEQ ID NO: 23117 - DNA, 555 bp, Artificial Sequence
  chemically treated genomic DNA (Homo sapiens) CpG-island No: 23117
ttatgaggttgtcgtataggggtagtttaggttgcggcggcggttgcgttttttttatggtcggcgtcgtcgtcgacgacgtcgcggatatttttatatttttttttatcggtttttttttaggagtcggcgtttacgatttgttagtttttaggaaagttcggtattaggttcgattcgcgtagtttacgcgcgaattttcgcgttgtcgacgcgttcggcgttattttttttttattcgttttcgtttcgttttagcgttcgtttttttttttttttgggtttcggtcgcgttgttaggtatttgagtttcgtttttttttattttttttttttttttattcgttttgtttattttcgtatatttcgtttcgtcgttttgagtgatttggtcgcgtattagttatagagacggtaggtattcgggggggcgggcggggcggggcgggggcgggaagaatcgggataggttgcgtaggggggattgttgattggacgtgttttcgtgggttttggttaattaacgtgagataagtttgagttttgggtagagag

SEQ ID NO: 23118 - DNA, 555 bp, Artificial Sequence
  chemically treated genomic DNA (Homo sapiens) CpG-island No: 23118
ctctctacccaaaactcaaacttatctcacgttaattaaccaaaacccacgaaaacacgtccaatcaacaatcccccctacgcaacctatcccgattcttcccgcccccgccccgccccgcccgcccccccgaatacctaccgtctctataactaatacgcgaccaaatcactcaaaacgacgaaacgaaatatacgaaaataaacaaaacgaataaaaaaaaaaaaaaaataaaaaaaaacgaaactcaaatacctaacaacgcgaccgaaacccaaaaaaaaaaaaaaacgaacgctaaaacgaaacgaaaacgaataaaaaaaaaataacgccgaacgcgtcgacaacgcgaaaattcgcgcgtaaactacgcgaatcgaacctaataccgaactttcctaaaaactaacaaatcgtaaacgccgactcctaaaaaaaaaccgataaaaaaaaatataaaaatatccgcgacgtcgtcgacgacgacgccgaccataaaaaaaacgcaaccgccgccgcaacctaaactacccctatacgacaacctcataa

SEQ ID NO: 23119 - DNA, 555 bp, Artificial Sequence
  chemically treated genomic DNA (Homo sapiens) CpG-island No: 23119
ttttttatttaaggtttaggtttgttttacgttgattggttagagtttacgagggtacgtttaattagtaattttttttgcgtaatttatttcggtttttttcgttttcgtttcgtttcgttcgttttttcgggtatttatcgtttttgtgattggtgcgcggttaggttatttagggcggcggggcgaggtgtgcgggagtgggtaggacgggtgggaggaggggaggggtgggagaaggcggggtttaggtgtttggtagcgcggtcggggtttaggaaggggagggggcgaacgttggagcgaggcgggggcgggtgaggagggggtgacgtcggacgcgtcgatagcgcgagggttcgcgcgtgagttgcgcgggtcgggtttggtatcgagtttttttgggggttagtaggtcgtggacgtcggtttttggaggagagtcggtaggagggagtgtgaaggtgttcgcggcgtcgtcgacggcggcgtcggttatggaggagacgtagtcgtcgtcgtagtttaagttgtttttgtgcgatagttttatga

SEQ ID NO: 23120 - DNA, 555 bp, Artificial Sequence
  chemically treated genomic DNA (Homo sapiens) CpG-island No: 23120
tcataaaactatcgcacaaaaacaacttaaactacgacgacgactacgtctcctccataaccgacgccgccgtcgacgacgccgcgaacaccttcacactccctcctaccgactctcctccaaaaaccgacgtccacgacctactaacccccaaaaaaactcgataccaaacccgacccgcgcaactcacgcgcgaaccctcgcgctatcgacgcgtccgacgtcaccccctcctcacccgcccccgcctcgctccaacgttcgccccctccccttcctaaaccccgaccgcgctaccaaacacctaaaccccgccttctcccacccctcccctcctcccacccgtcctacccactcccgcacacctcgccccgccgccctaaataacctaaccgcgcaccaatcacaaaaacgataaatacccgaaaaaacgaacgaaacgaaacgaaaacgaaaaaaaccgaaataaattacgcaaaaaaaattactaattaaacgtaccctcgtaaactctaaccaatcaacgtaaaacaaacctaaaccttaaataaaaaa

SEQ ID NO: 23121 - DNA, 1163 bp, Artificial Sequence
  chemically treated genomic DNA (Homo sapiens) CpG-island No: 23121
ggagcgcggcgtggaaaagggtgggcgtgggttaggttttggttggaggtagacgaggtcggcgagttgggcgcggggtcgcggggttatttcggggtatcgggtatagagtcgagaagtttaagttagggaaaatcgaggtcggcgttggcgggaattcgggaggacgtgggggtttcgggtggggtttgtttttttttttcgttcggtttttgagttcgtcgtagtttaggttgacgtcgggtttacgtggggaagtcggcggcgggtttttagcgtcgggagggttcgcggggtttagtttttttttttgttttttttttcgggatcggcgcgcggttttagtttcggcggtttcggcggtttcggcgtttttttggtgttggttgttcgtcgtcgttgtttgttcgttcgttcgttcgttgttgtttggggggtcgggatcgtcgtcgtttttttcgggggagtcggtcggggcggggcggagcggcgagagggggtgtggggggcgggcgaggagggggttgagcgtcgtgggagggagagtaggagcgagcgcgcgagagagcggggtatttttgcgtagttttagcgcgtttcggagttcgtcggggtagtcgtcggatattaggatcgcgagttagatagttttcggaagtcgcgtcgtcgtcgttaggttagtcgtattcgtcgttttttttcgcgtttcggggatttcgtcgcgtcgggtttcgcgtgtgcgtgtggggtggtcgtcgagggcggcgggttcgattttcgatttttgggtattgataggtcggcgggtcggttttaggagtcgcgggtttcggttcgtgtgtgtggggattgtcgcgggtttgtgtgtcggggttttagtttttgggtgtgtgttaggtgtgagcgcgcgtgtgttcgtggattcgtgcgagcggttgttcggtgtgcgcgcgcgtgcgtgtgtgcgtcgggtgtgtatttgtgtgtgcgtgtgtgagggtgtgtgttttgcgtgttttcgcgagtggtgcgtgcgtatttgggtgagggtgcgtgtgtttgcgtgtgtttgtcggtgaatgtatttgtgagagggtgtgttcgaatgtgtagtagtgtgtatatttttgggtgagggcgtgtgttagtggtttcgtttgtgg

SEQ ID NO: 23122 - DNA, 1163 bp, Artificial Sequence
  chemically treated genomic DNA (Homo sapiens) CpG-island No: 23122
ccacaaacgaaaccactaacacacgccctcacccaaaaatatacacactactacacattcgaacacaccctctcacaaatacattcaccgacaaacacacgcaaacacacgcaccctcacccaaatacgcacgcaccactcgcgaaaacacgcaaaacacacaccctcacacacgcacacacaaatacacacccgacgcacacacgcacgcgcgcgcacaccgaacaaccgctcgcacgaatccacgaacacacgcgcgctcacacctaacacacacccaaaaactaaaaccccgacacacaaacccgcgacaatccccacacacacgaaccgaaacccgcgactcctaaaaccgacccgccgacctatcaatacccaaaaatcgaaaatcgaacccgccgccctcgacgaccaccccacacgcacacgcgaaacccgacgcgacgaaatccccgaaacgcgaaaaaaaacgacgaatacgactaacctaacgacgacgacgcgacttccgaaaactatctaactcgcgatcctaatatccgacgactaccccgacgaactccgaaacgcgctaaaactacgcaaaaataccccgctctctcgcgcgctcgctcctactctccctcccacgacgctcaaccccctcctcgcccgccccccacaccccctctcgccgctccgccccgccccgaccgactcccccgaaaaaaacgacgacgatcccgaccccccaaacaacaacgaacgaacgaacgaacaaacaacgacgacgaacaaccaacaccaaaaaaacgccgaaaccgccgaaaccgccgaaactaaaaccgcgcgccgatcccgaaaaaaaaaacaaaaaaaaaaactaaaccccgcgaaccctcccgacgctaaaaacccgccgccgacttccccacgtaaacccgacgtcaacctaaactacgacgaactcaaaaaccgaacgaaaaaaaaaaacaaaccccacccgaaacccccacgtcctcccgaattcccgccaacgccgacctcgattttccctaacttaaacttctcgactctatacccgataccccgaaataaccccgcgaccccgcgcccaactcgccgacctcgtctacctccaaccaaaacctaacccacgcccacccttttccacgccgcgctcc

SEQ ID NO: 23123 - DNA, 1163 bp, Artificial Sequence
  chemically treated genomic DNA (Homo sapiens) CpG-island No: 23123
ttataagcgaagttattggtatacgtttttatttagaggtgtatatattgttatatattcggatatatttttttatagatatatttatcgatagatatacgtagatatacgtatttttatttagatacgtacgtattattcgcgaagatacgtaaggtatatatttttatatacgtatatatagatgtatattcggcgtatatacgtacgcgcgcgtatatcgagtagtcgttcgtacggatttacgggtatacgcgcgtttatatttaatatatatttagagattggagtttcgatatataaattcgcgatagtttttatatatacgaatcgaagttcgcggtttttggagtcggttcgtcggtttgttagtgtttaaagatcgggaatcgagttcgtcgttttcggcggttattttatacgtatacgcgggattcgacgcggcggggttttcgggacgcggagggggacggcgggtgcggttaatttggcggcggcggcgcggttttcgggagttgtttggttcgcggttttggtgttcggcggttgtttcggcgggtttcgaggcgcgttagagttgcgtagaaatgtttcgttttttcgcgcgttcgtttttgtttttttttttacggcgtttagtttttttttcgttcgttttttatattttttttcgtcgtttcgtttcgtttcggtcggttttttcggaggaggcggcggcgatttcggttttttaagtagtagcgggcgggcgaacgagtaagtagcggcggcgagtagttaatattaggggagcgtcggagtcgtcggagtcgtcggagttggggtcgcgcgtcggtttcggggaggggagtagaggaaggggttgagtttcgcgaattttttcggcgttggggattcgtcgtcggtttttttacgtgggttcggcgttaatttgagttgcggcgggtttagaggtcgggcgaagaagaggagtagattttattcggggtttttacgttttttcgggttttcgttagcgtcgatttcgattttttttagtttagatttttcggttttgtgttcggtgtttcggggtaatttcgcggtttcgcgtttagttcgtcgatttcgtttatttttagttaggatttggtttacgtttatttttttttacgtcgcgtttt

SEQ ID NO: 23124 - DNA, 1163 bp, Artificial Sequence
  chemically treated genomic DNA (Homo sapiens) CpG-island No: 23124
aaaacgcgacgtaaaaaaaaataaacgtaaaccaaatcctaactaaaaataaacgaaatcgacgaactaaacgcgaaaccgcgaaattaccccgaaacaccgaacacaaaaccgaaaaatctaaactaaaaaaaatcgaaatcgacgctaacgaaaacccgaaaaaacgtaaaaaccccgaataaaatctactcctcttcttcgcccgacctctaaacccgccgcaactcaaattaacgccgaacccacgtaaaaaaaccgacgacgaatccccaacgccgaaaaaattcgcgaaactcaaccccttcctctactcccctccccgaaaccgacgcgcgaccccaactccgacgactccgacgactccgacgctcccctaatattaactactcgccgccgctacttactcgttcgcccgcccgctactacttaaaaaaccgaaatcgccgccgcctcctccgaaaaaaccgaccgaaacgaaacgaaacgacgaaaaaaaatataaaaaacgaacgaaaaaaaaactaaacgccgtaaaaaaaaaaacaaaaacgaacgcgcgaaaaaacgaaacatttctacgcaactctaacgcgcctcgaaacccgccgaaacaaccgccgaacaccaaaaccgcgaaccaaacaactcccgaaaaccgcgccgccgccgccaaattaaccgcacccgccgtccccctccgcgtcccgaaaaccccgccgcgtcgaatcccgcgtatacgtataaaataaccgccgaaaacgacgaactcgattcccgatctttaaacactaacaaaccgacgaaccgactccaaaaaccgcgaacttcgattcgtatatataaaaactatcgcgaatttatatatcgaaactccaatctctaaatatatattaaatataaacgcgcgtatacccgtaaatccgtacgaacgactactcgatatacgcgcgcgtacgtatatacgccgaatatacatctatatatacgtatataaaaatatataccttacgtatcttcgcgaataatacgtacgtatctaaataaaaatacgtatatctacgtatatctatcgataaatatatctataaaaaaatatatccgaatatataacaatatatacacctctaaataaaaacgtataccaataacttcgcttataa

SEQ ID NO: 23125 - DNA, 596 bp, Artificial Sequence
  chemically treated genomic DNA (Homo sapiens) CpG-island No: 23125
tcggttagcggtcgggtaggcgggtagcgggtagtaggtaggttcgttattcgtcgtttgtcgttcgtcgcgcgagttttagttttttcgtttttagagtaatgtttttggattgataaagttaattatttatttttcgtatataaatcgagcgggaggtcgcgaggcgcgcgttaatggggagttagttggttcgcggttatttgattttcggtcggattgtttattggtcgtcgcgaggttgattggtagcgcggagcggagaatatggtagtcgcggtcgagcgattttcgttgattgggtagtcgtcgggtgtttggtaggtgaggcggcggttgtcgggcggtcgcgagtgggttttatcgggtttgagtggttgcggggaattggggttaggttttagtcggtaaacggcgggacgtcgtcgggattttcgcgggtttttttttatttttcgcgggttttttgtttcgcgaggatcggttttattgttgcgtcgatggaggagacgcggcgtttaacgtttagttttgtttgggttttcgttgttttattattttgagaatatgttttttttgtagttgtagggcgtaga

SEQ ID NO: 23126 - DNA, 596 bp, Artificial Sequence
  chemically treated genomic DNA (Homo sapiens) CpG-island No: 23126
tctacgccctacaactacaaaaaaaacatattctcaaaataataaaacaacgaaaacccaaacaaaactaaacgttaaacgccgcgtctcctccatcgacgcaacaataaaaccgatcctcgcgaaacaaaaaacccgcgaaaaataaaaaaaaacccgcgaaaatcccgacgacgtcccgccgtttaccgactaaaacctaaccccaattccccgcaaccactcaaacccgataaaacccactcgcgaccgcccgacaaccgccgcctcacctaccaaacacccgacgactacccaatcaacgaaaatcgctcgaccgcgactaccatattctccgctccgcgctaccaatcaacctcgcgacgaccaataaacaatccgaccgaaaatcaaataaccgcgaaccaactaactccccattaacgcgcgcctcgcgacctcccgctcgatttatatacgaaaaataaataattaactttatcaatccaaaaacattactctaaaaacgaaaaaactaaaactcgcgcgacgaacgacaaacgacgaataacgaacctacctactacccgctacccgcctacccgaccgctaaccga

SEQ ID NO: 23127 - DNA, 596 bp, Artificial Sequence
  chemically treated genomic DNA (Homo sapiens) CpG-island No: 23127
tttgcgttttgtagttatagaggggatatgtttttaaggtggtgaggtagcgggggtttaagtaggattggacgttgagcgtcgcgttttttttatcggcgtagtagtgggatcgattttcgcggggtaaagagttcgcgaggggtgggggaaagttcgcgagagtttcggcggcgtttcgtcgtttgtcggttggagtttggttttagtttttcgtagttatttaagttcggtggagtttattcgcggtcgttcggtagtcgtcgttttatttgttaggtattcggcggttgtttaattagcgggggtcgttcggtcgcggttgttatgtttttcgtttcgcgttgttaattagtttcgcggcggttaatgggtagttcggtcggaggttaggtgatcgcgggttagttggttttttattggcgcgcgtttcgcggtttttcgttcggtttatgtgcgaggagtgagtgattgattttattagtttaaggatattattttggaggcgaagaggttgggattcgcgcggcgagcggtaagcggcgagtaacgagtttgtttattgttcgttgttcgtttgttcggtcgttagtcgg

SEQ ID NO: 23128 - DNA, 596 bp, Artificial Sequence
  chemically treated genomic DNA (Homo sapiens) CpG-island No: 23128
ccgactaacgaccgaacaaacgaacaacgaacaataaacaaactcgttactcgccgcttaccgctcgccgcgcgaatcccaacctcttcgcctccaaaataatatccttaaactaataaaatcaatcactcactcctcgcacataaaccgaacgaaaaaccgcgaaacgcgcgccaataaaaaaccaactaacccgcgatcacctaacctccgaccgaactacccattaaccgccgcgaaactaattaacaacgcgaaacgaaaaacataacaaccgcgaccgaacgacccccgctaattaaacaaccgccgaatacctaacaaataaaacgacgactaccgaacgaccgcgaataaactccaccgaacttaaataactacgaaaaactaaaaccaaactccaaccgacaaacgacgaaacgccgccgaaactctcgcgaactttcccccacccctcgcgaactctttaccccgcgaaaatcgatcccactactacgccgataaaaaaaacgcgacgctcaacgtccaatcctacttaaacccccgctacctcaccaccttaaaaacatatcccctctataactacaaaacgcaaa

SEQ ID NO: 23129 - DNA, 888 bp, Artificial Sequence
  chemically treated genomic DNA (Homo sapiens) CpG-island No: 23129
ggaagtcgttttcgttatcgttcgtcgttattcgttgggttttcgcggcgtttgaggtcgcgtaaattcggagcgtcggttttcggagttttcgtcggtagcgttttaggaaagttatttaggggaagtttgtttcgttttttatcgcgcgttttttcgggagaggggcgcggttttcgttatttgttaggcgtcgaggtttttcgatcgcgttttttgtttggattttcgttattttcggggtcgcgtatttcgcgggcgttcgtacggttaggcgggttcgtgcgttttttttcgcggtttttcggttgaggcggttttgttttttcgttttcggtattaggattttcgcgcgggttcgacgcgttttattgggattttttttttttcggaaagttagttcgcgcggttagcgtttttcgagttcgggggacggatatgggattttttggtttcgtgggttcgaggtcgatttgcggttattagttcggttttttttcgtttcgttcggttttttcggtcggtcgtagggcgcgcgtttttgttcgggcggtttcgcgttgcgtacgcgcggaggcgtcgattcgttcgttcgcggcgtttttatttatcgttagcgttttttttcgtttcgggcgacgtagtcgttcgtcgttttgttttgtgttcgttttttaggtttcggtcggggtattcggagatttagcgttcggcgggttcggcgggtattcgtacgtagggtacgttttgcgggagcgagcgcgcgtgttcggttatcgggagggagcggagcggtatgggaggtgttttcggaggcggttttggatacggggtatgcgtaatgtttgttttgtttttaagtaggagtgaggggtgggcgggaattcg

SEQ ID NO: 23130 - DNA, 888 bp, Artificial Sequence
  chemically treated genomic DNA (Homo sapiens) CpG-island No: 23130
cgaattcccgcccacccctcactcctacttaaaaacaaaacaaacattacgcataccccgtatccaaaaccgcctccgaaaacacctcccataccgctccgctccctcccgataaccgaacacgcgcgctcgctcccgcaaaacgtaccctacgtacgaatacccgccgaacccgccgaacgctaaatctccgaataccccgaccgaaacctaaaaaacgaacacaaaacaaaacgacgaacgactacgtcgcccgaaacgaaaaaaaacgctaacgataaataaaaacgccgcgaacgaacgaatcgacgcctccgcgcgtacgcaacgcgaaaccgcccgaacaaaaacgcgcgccctacgaccgaccgaaaaaaccgaacgaaacgaaaaaaaaccgaactaataaccgcaaatcgacctcgaacccacgaaaccaaaaaatcccatatccgtcccccgaactcgaaaaacgctaaccgcgcgaactaactttccgaaaaaaaaaaaatcccaataaaacgcgtcgaacccgcgcgaaaatcctaataccgaaaacgaaaaaacaaaaccgcctcaaccgaaaaaccgcgaaaaaaaacgcacgaacccgcctaaccgtacgaacgcccgcgaaatacgcgaccccgaaaataacgaaaatccaaacaaaaaacgcgatcgaaaaacctcgacgcctaacaaataacgaaaaccgcgcccctctcccgaaaaaacgcgcgataaaaaacgaaacaaacttcccctaaataactttcctaaaacgctaccgacgaaaactccgaaaaccgacgctccgaatttacgcgacctcaaacgccgcgaaaacccaacgaataacgacgaacgataacgaaaacgacttcc

SEQ ID NO: 23131 - DNA, 888 bp, Artificial Sequence
  chemically treated genomic DNA (Homo sapiens) CpG-island No: 23131
cgggttttcgtttattttttatttttgtttgaggatagggtagatattgcgtatgtttcgtatttaaggtcgttttcgggagtattttttatgtcgtttcgttttttttcggtgatcgggtacgcgcgttcgttttcgtagagcgtgttttgcgtgcgggtgttcgtcgagttcgtcgggcgttggattttcgagtgtttcggtcggggtttgaggagcgggtatagggtaaggcggcggacggttgcgtcgttcgaggcgaggaggagcgttggcggtgagtgagggcgtcgcgggcgagcgggtcggcgttttcgcgcgtgcgtagcgcgggatcgttcgggtaggggcgcgcgttttgcggtcggtcggaggggtcgagcgaagcgaggagaggtcgggttggtggtcgtaggtcggtttcggatttacgggattagaggattttatattcgtttttcgggttcgagaggcgttggtcgcgcgggttggtttttcgagggggggggggttttagtggggcgcgtcgggttcgcgcggaggttttggtgtcgggggcggaggggtagggtcgttttagtcgaaagatcgcggggaggggcgtacgagttcgtttggtcgtgcggacgttcgcggggtgcgcgatttcggaggtggcggaggtttaggtagggggcgcggtcgggaagtttcggcgtttagtaggtggcgggggtcgcgtttttttttcggggaggcgcgcggtgggaagcggagtaaattttttttaagtaatttttttgaggcgttgtcggcggggatttcggggatcgacgtttcgggtttgcgcggttttaggcgtcgcgggaatttagcgagtggcggcgggcgatggcgggggcggttttt

SEQ ID NO: 23132 - DNA, 888 bp, Artificial Sequence
  chemically treated genomic DNA (Homo sapiens) CpG-island No: 23132
aaaaaccgcccccgccatcgcccgccgccactcgctaaattcccgcgacgcctaaaaccgcgcaaacccgaaacgtcgatccccgaaatccccgccgacaacgcctcaaaaaaattacttaaaaaaaatttactccgcttcccaccgcgcgcctccccgaaaaaaaaacgcgacccccgccacctactaaacgccgaaacttcccgaccgcgccccctacctaaacctccgccacctccgaaatcgcgcaccccgcgaacgtccgcacgaccaaacgaactcgtacgcccctccccgcgatctttcgactaaaacgaccctacccctccgcccccgacaccaaaacctccgcgcgaacccgacgcgccccactaaaaccccccccccctcgaaaaaccaacccgcgcgaccaacgcctctcgaacccgaaaaacgaatataaaatcctctaatcccgtaaatccgaaaccgacctacgaccaccaacccgacctctcctcgcttcgctcgacccctccgaccgaccgcaaaacgcgcgcccctacccgaacgatcccgcgctacgcacgcgcgaaaacgccgacccgctcgcccgcgacgccctcactcaccgccaacgctcctcctcgcctcgaacgacgcaaccgtccgccgccttaccctatacccgctcctcaaaccccgaccgaaacactcgaaaatccaacgcccgacgaactcgacgaacacccgcacgcaaaacacgctctacgaaaacgaacgcgcgtacccgatcaccgaaaaaaaacgaaacgacataaaaaatactcccgaaaacgaccttaaatacgaaacatacgcaatatctaccctatcctcaaacaaaaataaaaaataaacgaaaacccg

SEQ ID NO: 23133 - DNA, 582 bp, Artificial Sequence
  chemically treated genomic DNA (Homo sapiens) CpG-island No: 23133
tcgttttttatttatagcgagcgggtcggttagttgtttggcgtcggggtggtcggggtggtcggggttgggttcggcgtagttcgggagagtttgggcgtcgtcgtcgtcgcgtgagaggtatagagggagggcgttcgagagtcgagagtcgcggcggtttagtcgcgggttggagacgcgttgtgcgcggtagcggagcgcgttgtcgttcgttttagggtttgtcgtcgtcgttgttgtttttttttaggatattttttacgttcgcgattttaggtttagggtgaattttattcgattgggagaaattcgtttgatcgggaggttgtagcgtgcgggaattaatttgacgtgttttttacgttaatttcggtagttacgtcggagacgcgcgagttggtagtttattggttttcgttattgcgttttagcgttttttttttcgttttgaaattttattttttttttttatttttttttttcggtttttttttattattttttcggaatttatttttttatatatatatatatatatatatatatatatatatatatatatacgttttaattttagtt

SEQ ID NO: 23134 - DNA, 582 bp, Artificial Sequence
  chemically treated genomic DNA (Homo sapiens) CpG-island No: 23134
aactaaaattaaaacgtatatatatatatatatatatatatatatatatatatatatataaaaaaataaattccgaaaaaataataaaaaaaaaccgaaaaaaaaaaataaaaaaaaaaaataaaatttcaaaacgaaaaaaaaaacgctaaaacgcaataacgaaaaccaataaactaccaactcgcgcgtctccgacgtaactaccgaaattaacgtaaaaaacacgtcaaattaattcccgcacgctacaacctcccgatcaaacgaatttctcccaatcgaataaaattcaccctaaacctaaaatcgcgaacgtaaaaaatatcctaaaaaaaaacaacaacgacgacgacaaaccctaaaacgaacgacaacgcgctccgctaccgcgcacaacgcgtctccaacccgcgactaaaccgccgcgactctcgactctcgaacgccctccctctatacctctcacgcgacgacgacgacgcccaaactctcccgaactacgccgaacccaaccccgaccaccccgaccaccccgacgccaaacaactaaccgacccgctcgctataaataaaaaacga

SEQ ID NO: 23135 - DNA, 582 bp, Artificial Sequence
  chemically treated genomic DNA (Homo sapiens) CpG-island No: 23135
agttggggttgggacgtgtgtgtgtgtgtgtgtgtgtgtgtgtgtgtgtgtgtgtgtgtagaggggtgggtttcgggggggtggtggaagagggtcgaggggggaggatagaaggagggggtagagttttagggcggggaggggggcgttggggcgtagtgacgggaattaatgagttgttaattcgcgcgttttcggcgtgattgtcgagattgacgtggaggatacgttaaattgattttcgtacgttgtagtttttcggttagacgaattttttttaatcggatgaagtttattttgggtttggggtcgcgggcgtggagagtgttttgggagggggtagtagcggcggcggtaggttttggagcgggcggtagcgcgtttcgttgtcgcgtatagcgcgtttttagttcgcggttgggtcgtcgcggttttcggttttcgggcgttttttttttatgttttttacgcggcggcggcggcgtttaagttttttcggattgcgtcgggtttagtttcggttatttcggttatttcggcgttaggtagttggtcggttcgttcgttatgggtaaggggcgg

SEQ ID NO: 23136 - DNA, 582 bp, Artificial Sequence
  chemically treated genomic DNA (Homo sapiens) CpG-island No: 23136
ccgccccttacccataacgaacgaaccgaccaactacctaacgccgaaataaccgaaataaccgaaactaaacccgacgcaatccgaaaaaacttaaacgccgccgccgccgcgtaaaaaacataaaaaaaaaacgcccgaaaaccgaaaaccgcgacgacccaaccgcgaactaaaaacgcgctatacgcgacaacgaaacgcgctaccgcccgctccaaaacctaccgccgccgctactaccccctcccaaaacactctccacgcccgcgaccccaaacccaaaataaacttcatccgattaaaaaaaattcgtctaaccgaaaaactacaacgtacgaaaatcaatttaacgtatcctccacgtcaatctcgacaatcacgccgaaaacgcgcgaattaacaactcattaattcccgtcactacgccccaacgcccccctccccgccctaaaactctaccccctccttctatcctcccccctcgaccctcttccaccacccccccgaaacccacccctctacacacacacacacacacacacacacacacacacacacacacacgtcccaaccccaact

SEQ ID NO: 23137 - DNA, 665 bp, Artificial Sequence
  chemically treated genomic DNA (Homo sapiens) CpG-island No: 23137
gggcgttcgtgcggagcgcgtttagcgttggagcgcgtttaagaggcgttttgtagtgtggtttcggggtgtgggcggggttcggagaaggttttcgttttgggaggggttgggtttcgcgtttaaatttcgtttcggggcggggcgagggcgacgtagttttttttgttttttgggtcgttgcggacggtggtgcgcgatttcgtttcgggcgcgcgcgttgtgggcggtgtacgtcgtcgtttttcggaagtgcgtgttgtgggcggtgtcgcgcggattttcgggaagtgtttttgtgggcggtcgtcgggttgagttgcggtatacgtgcgacggtcgtgatgaagttcgtttatcgggtgagcgcgggcggcgggcggtttgttggatcggcgcggttttttcggtggacggcgtttgagttggtttcgggcgggttgggggcgcgtggtttgtttttgcggcgtttggtcgcgtgggggtcgtcggttgtttgcgcgttcgtggtttcggggacgcggggttgtggtggggtttttgggagagttgggacggaggcgtcgacggtttttcggagggaatagggatatttgtcggggtttcgggatatttttaatttgagtatggtttaatttaaaggttggagttggtgtagtcgggga

SEQ ID NO: 23138 - DNA, 665 bp, Artificial Sequence
  chemically treated genomic DNA (Homo sapiens) CpG-island No: 23138
tccccgactacaccaactccaacctttaaattaaaccatactcaaattaaaaatatcccgaaaccccgacaaatatccctattccctccgaaaaaccgtcgacgcctccgtcccaactctcccaaaaaccccaccacaaccccgcgtccccgaaaccacgaacgcgcaaacaaccgacgacccccacgcgaccaaacgccgcaaaaacaaaccacgcgcccccaacccgcccgaaaccaactcaaacgccgtccaccgaaaaaaccgcgccgatccaacaaaccgcccgccgcccgcgctcacccgataaacgaacttcatcacgaccgtcgcacgtataccgcaactcaacccgacgaccgcccacaaaaacacttcccgaaaatccgcgcgacaccgcccacaacacgcacttccgaaaaacgacgacgtacaccgcccacaacgcgcgcgcccgaaacgaaatcgcgcaccaccgtccgcaacgacccaaaaaacaaaaaaaactacgtcgccctcgccccgccccgaaacgaaatttaaacgcgaaacccaacccctcccaaaacgaaaaccttctccgaaccccgcccacaccccgaaaccacactacaaaacgcctcttaaacgcgctccaacgctaaacgcgctccgcacgaacgccc

SEQ ID NO: 23139 - DNA, 665 bp, Artificial Sequence
  chemically treated genomic DNA (Homo sapiens) CpG-island No: 23139
ttttcgattgtattaattttagtttttaggttgggttatatttaggttaaaaatatttcgggatttcgataaatgtttttgtttttttcgagaagtcgtcggcgttttcgttttagtttttttaggagttttattatagtttcgcgttttcgaggttacgggcgcgtagatagtcggcgatttttacgcggttagacgtcgtaaaagtagattacgcgtttttagttcgttcggagttagtttaggcgtcgtttatcggaagagtcgcgtcgatttaatagatcgttcgtcgttcgcgtttattcggtaagcgaattttattacggtcgtcgtacgtgtgtcgtagtttaattcggcggtcgtttatagagatatttttcgggggttcgcgcggtatcgtttatagtacgtattttcgggaagcgacggcgtgtatcgtttatagcgcgcgcgttcgggacggggtcgcgtattatcgttcgtagcggtttaggaggtaggaggagttgcgtcgttttcgtttcgtttcgaggcggagtttgaacgcgaggtttaattttttttaaggcgggggtttttttcgggtttcgtttatatttcggagttatattgtagggcgttttttaggcgcgttttagcgttgggcgcgtttcgtacggacgttt

SEQ ID NO: 23140 - DNA, 665 bp, Artificial Sequence
  chemically treated genomic DNA (Homo sapiens) CpG-island No: 23140
aaacgtccgtacgaaacgcgcccaacgctaaaacgcgcctaaaaaacgccctacaatataactccgaaatataaacgaaacccgaaaaaaacccccgccttaaaaaaaattaaacctcgcgttcaaactccgcctcgaaacgaaacgaaaacgacgcaactcctcctacctcctaaaccgctacgaacgataatacgcgaccccgtcccgaacgcgcgcgctataaacgatacacgccgtcgcttcccgaaaatacgtactataaacgataccgcgcgaacccccgaaaaatatctctataaacgaccgccgaattaaactacgacacacgtacgacgaccgtaataaaattcgcttaccgaataaacgcgaacgacgaacgatctattaaatcgacgcgactcttccgataaacgacgcctaaactaactccgaacgaactaaaaacgcgtaatctacttttacgacgtctaaccgcgtaaaaatcgccgactatctacgcgcccgtaacctcgaaaacgcgaaactataataaaactcctaaaaaaactaaaacgaaaacgccgacgacttctcgaaaaaaacaaaaacatttatcgaaatcccgaaatatttttaacctaaatataacccaacctaaaaactaaaattaatacaatcgaaaa

SEQ ID NO: 23141 - DNA, 2005 bp, Artificial Sequence
  chemically treated genomic DNA (Homo sapiens) CpG-island No: 23141
aaatacgtagtagtttcggggtaatgcgcgggtaggaggagtagcgagcgcggggagcgtagggttttttggagagggcgttttatcggttttgcgtttcgtatttgtgtcgttacgtttatcggttttttgttgagtttagtatcgtttatttagatttagtattattcgttcggatcgaatttagtatcgttcgttcggatttagtagcgtttatttggatattgtatcgttcgtttagatttagaatcgttcgttcggatttagtattatttatcggatttagcgtcgtttatttagatttagtatcgttagttcgaatcgaatttagtatcgtttatgggatttatcgttcgttcggatttagtatcgttcgtttagatttagtattgtatttttatttggatttagtatcgttcgtttagattcggattcgttagttcggatcgaatttagtatcgtttatcggattcggcgtcgtttatttagatttagtattatttattcgaatcgaatttagtatcgtttatcggatttatcgttcgtttggatttagtatcgttcgtttggaattagtatcgttcgtttatagatttattattatttatttggatttagtatcgttcgttttcgttcgttcggatcgaacgtagtatcgtttatcggatttagtagcgtttatttagatttagtatcgttcgttcgaatcgaatatagtatcgtttatcggatttattatcgttcgtttagatttagtatcgtttatttggatttagtatcgttcgttcggattttgtatcgcgcgttcggatttaatatagtattatttatcggatttagtattgtttatttagatttagtagcgcgcgttcgaatcgaatttagtatcgttggtcgggaaggaattcggtatcgtcggttgggatttattatcgttagtttagacggaattttagtatcgcgcggggttcgtttttcgatatttttttttttggcggtcgcggtagtagtatttagtggagcggttcggaggtgcggcggcgtcgcgcggggcggcggcgcgtacggcgggcggcggcgcgtacggcggcgggcggggcgcgggcgggtgcgggcggcgggcggcgggcgtcgggcgtatatcggtcggcggggttgaggcggcgcggcgcggcgcggattgagttttaggcggaggttaagtcggaggacgcggcgcggtcgcggaggcggaggtagtcgcggaggcggaggcggtcggcggggggtggcgaggggcgtcgggttttcgcggatttgtcgttttcggttcgtttttcggtttcggtttcgcgcggttgaggaggcgcggttaggattatgtcggcgggcggtcgtgacgaggagcggcggaagttggtcgatattatttattattggaacgttaatcggttggatttgttcgagattagttagtcgatcgaggtgagtatcgtcgggcgcggggtttgcgcgattttcgttcgttgcgtcgcgtttcgtttttttttttcgtcgtcgttcgttagtcgcggattcgttttttttttttttttttttttttcgttttttttttttttttttttttttttaggtttatcgcgggtttcggcgtttttcgtagttttcgtttttttgtcgcggtgtatttcggggtcgcgcgggtcgagcgggggttggcggggcgcggtagttatttgttttttttttcggtcgtttatttggtggtttatttgggtcgtcgtttttattttcgcgagcgcggcgcggtttcggttttattttcggcggcgcggggggcgcggcggcgcgcggggtcggcgttttttatttgtagttcggttgtggttcgcggcgttttttcgtcgtggtcgggatggagtttgtgacgcgcgttgtgtttcgggtttataaatttgtaggttgttagttgggaggggaaagttagtattataaagttcgggaggtgcgggttgtttgatggtat

SEQ ID NO: 23142 - DNA, 2005 bp, Artificial Sequence
  chemically treated genomic DNA (Homo sapiens) CpG-island No: 23142
ataccatcaaacaacccgcacctcccgaactttataatactaactttcccctcccaactaacaacctacaaatttataaacccgaaacacaacgcgcgtcacaaactccatcccgaccacgacgaaaaaacgccgcgaaccacaaccgaactacaaataaaaaacgccgaccccgcgcgccgccgcgccccccgcgccgccgaaaataaaaccgaaaccgcgccgcgctcgcgaaaataaaaacgacgacccaaataaaccaccaaataaacgaccgaaaaaaaaaacaaataactaccgcgccccgccaacccccgctcgacccgcgcgaccccgaaatacaccgcgacaaaaaaacgaaaactacgaaaaacgccgaaacccgcgataaacctaaaaaaaaaaaaaaaaaaaaaaaaaacgaaaaaaaaaaaaaaaaaaaaaaaacgaatccgcgactaacgaacgacgacgaaaaaaaaaaacgaaacgcgacgcaacgaacgaaaatcgcgcaaaccccgcgcccgacgatactcacctcgatcgactaactaatctcgaacaaatccaaccgattaacgttccaataataaataatatcgaccaacttccgccgctcctcgtcacgaccgcccgccgacataatcctaaccgcgcctcctcaaccgcgcgaaaccgaaaccgaaaaacgaaccgaaaacgacaaatccgcgaaaacccgacgcccctcgccaccccccgccgaccgcctccgcctccgcgactacctccgcctccgcgaccgcgccgcgtcctccgacttaacctccgcctaaaactcaatccgcgccgcgccgcgccgcctcaaccccgccgaccgatatacgcccgacgcccgccgcccgccgcccgcacccgcccgcgccccgcccgccgccgtacgcgccgccgcccgccgtacgcgccgccgccccgcgcgacgccgccgcacctccgaaccgctccactaaatactactaccgcgaccgccaaaaaaaaaaatatcgaaaaacgaaccccgcgcgatactaaaattccgtctaaactaacgataataaatcccaaccgacgataccgaattccttcccgaccaacgatactaaattcgattcgaacgcgcgctactaaatctaaataaacaatactaaatccgataaataatactatattaaatccgaacgcgcgatacaaaatccgaacgaacgatactaaatccaaataaacgatactaaatctaaacgaacgataataaatccgataaacgatactatattcgattcgaacgaacgatactaaatctaaataaacgctactaaatccgataaacgatactacgttcgatccgaacgaacgaaaacgaacgatactaaatccaaataaataataataaatctataaacgaacgatactaattccaaacgaacgatactaaatccaaacgaacgataaatccgataaacgatactaaattcgattcgaataaataatactaaatctaaataaacgacgccgaatccgataaacgatactaaattcgatccgaactaacgaatccgaatctaaacgaacgatactaaatccaaataaaaatacaatactaaatctaaacgaacgatactaaatccgaacgaacgataaatcccataaacgatactaaattcgattcgaactaacgatactaaatctaaataaacgacgctaaatccgataaataatactaaatccgaacgaacgattctaaatctaaacgaacgatacaatatccaaataaacgctactaaatccgaacgaacgatactaaattcgatccgaacgaataatactaaatctaaataaacgatactaaactcaacaaaaaaccgataaacgtaacgacacaaatacgaaacgcaaaaccgataaaacgccctctccaaaaaaccctacgctccccgcgctcgctactcctcctacccgcgcattaccccgaaactactacgtattt

SEQ ID NO: 23143 - DNA, 2005 bp, Artificial Sequence
  chemically treated genomic DNA (Homo sapiens) CpG-island No: 23143
gtgttattaggtagttcgtatttttcgaattttgtgatattgattttttttttttagttggtagtttgtaagtttatgaattcgaagtatagcgcgcgttataggttttatttcggttacggcgaaggggcgtcgcgagttataatcgggttgtaggtggagggcgtcggtttcgcgcgtcgtcgcgtttttcgcgtcgtcggggatgaggtcggggtcgcgtcgcgttcgcgggggtgggggcggcggtttaggtgagttattaggtgagcggtcggagaggggaataagtgattgtcgcgtttcgttagttttcgttcggttcgcgcgatttcgggatatatcgcggtagggggacgggggttgcgggggacgtcggggttcgcggtgggtttgggggagggggaggggagagaaggggcggagggggggagggggaaaggagggcgggttcgcggttggcgggcggcggcgggggggaggggcggggcgcggcgtagcgggcgggggtcgcgtaggtttcgcgttcggcggtgtttatttcggtcggttggttgatttcgaataggtttagtcggttggcgttttagtggtggatgatgtcggttagttttcgtcgtttttcgttacggtcgttcgtcgatatggttttggtcgcgtttttttagtcgcgcggggtcggggtcggaggacgggtcgaggacgataggttcgcgggggttcggcgtttttcgttatttttcgtcggtcgttttcgttttcgcggttgttttcgttttcgcggtcgcgtcgcgtttttcgatttggttttcgtttggggtttagttcgcgtcgcgtcgcgtcgttttagtttcgtcggtcggtgtgcgttcggcgttcgtcgttcgtcgttcgtattcgttcgcgtttcgttcgtcgtcgtgcgcgtcgtcgttcgtcgtgcgcgtcgtcgtttcgcgcggcgtcgtcgtattttcgggtcgttttattaggtgttgttgtcgcggtcgttagggagggaggtgtcggagggcgggtttcgcgcggtgttagggtttcgtttggattggcggtggtgggttttaatcggcggtatcgggttttttttcgattagcggtgttaggttcggttcggacgcgcgttgttggatttaaatgggtagtgttgggttcgatgggtggtgttgtgttgggttcggacgcgcggtgtagagttcggacgggcggtgttggatttaaatgggcggtgttggatttggacgggcggtgatgggttcgatgggcggtgttatgttcggttcggacgggcggtgttaggtttaaatgggcgttgttgggttcgatgggcggtgttgcgttcggttcggacgggcggggacgggcggtgttgggtttaaatgggtggtgatggatttgtggacgggcggtgttggttttagacgggcggtgttgggtttagacgggcggtgggttcgatgggcggtgttaggttcggttcggatgggtggtgttaggtttaaatgggcggcgtcggattcgatgggcggtgttgggttcggttcggattggcgggttcgggtttggacgggcggtgttggatttaaatgggggtgtagtgttggatttggacgggcggtgttgggttcgaacgggcgatgggttttatgggcggtgttaggttcggttcggattggcggtgttgggtttaaatgggcggcgttgggttcgatgggtggtattgggttcggacgggcggttttgggtttggacgggcggtgtagtatttaaatgggcgttgttgggttcggacgggcggtgttaggttcggttcggacgggtggtgttgggtttaaatgggcggtgttaggtttagtaggggatcggtgggcgtggcggtataggtacggagcgtagggtcggtggagcgttttttttaaagggttttgcgtttttcgcgttcgttgttttttttgttcgcgtattgtttcggggttgttgcgtgttt

SEQ ID NO: 23144 - DNA, 2005 bp, Artificial Sequence
  chemically treated genomic DNA (Homo sapiens) CpG-island No: 23144
aaacacgcaacaaccccgaaacaatacgcgaacaaaaaaaacaacgaacgcgaaaaacgcaaaaccctttaaaaaaaacgctccaccgaccctacgctccgtacctataccgccacgcccaccgatcccctactaaacctaacaccgcccatttaaacccaacaccacccgtccgaaccgaacctaacaccgcccgtccgaacccaacaacgcccatttaaatactacaccgcccgtccaaacccaaaaccgcccgtccgaacccaataccacccatcgaacccaacgccgcccatttaaacccaacaccgccaatccgaaccgaacctaacaccgcccataaaacccatcgcccgttcgaacccaacaccgcccgtccaaatccaacactacacccccatttaaatccaacaccgcccgtccaaacccgaacccgccaatccgaaccgaacccaacaccgcccatcgaatccgacgccgcccatttaaacctaacaccacccatccgaaccgaacctaacaccgcccatcgaacccaccgcccgtctaaacccaacaccgcccgtctaaaaccaacaccgcccgtccacaaatccatcaccacccatttaaacccaacaccgcccgtccccgcccgtccgaaccgaacgcaacaccgcccatcgaacccaacaacgcccatttaaacctaacaccgcccgtccgaaccgaacataacaccgcccatcgaacccatcaccgcccgtccaaatccaacaccgcccatttaaatccaacaccgcccgtccgaactctacaccgcgcgtccgaacccaacacaacaccacccatcgaacccaacactacccatttaaatccaacaacgcgcgtccgaaccgaacctaacaccgctaatcgaaaaaaaacccgataccgccgattaaaacccaccaccgccaatccaaacgaaaccctaacaccgcgcgaaacccgccctccgacacctccctccctaacgaccgcgacaacaacacctaataaaacgacccgaaaatacgacgacgccgcgcgaaacgacgacgcgcacgacgaacgacgacgcgcacgacgacgaacgaaacgcgaacgaatacgaacgacgaacgacgaacgccgaacgcacaccgaccgacgaaactaaaacgacgcgacgcgacgcgaactaaaccccaaacgaaaaccaaatcgaaaaacgcgacgcgaccgcgaaaacgaaaacaaccgcgaaaacgaaaacgaccgacgaaaaataacgaaaaacgccgaacccccgcgaacctatcgtcctcgacccgtcctccgaccccgaccccgcgcgactaaaaaaacgcgaccaaaaccatatcgacgaacgaccgtaacgaaaaacgacgaaaactaaccgacatcatccaccactaaaacgccaaccgactaaacctattcgaaatcaaccaaccgaccgaaataaacaccgccgaacgcgaaacctacgcgacccccgcccgctacgccgcgccccgcccctcccccccgccgccgcccgccaaccgcgaacccgccctcctttccccctccccccctccgccccttctctcccctccccctcccccaaacccaccgcgaaccccgacgtcccccgcaacccccgtccccctaccgcgatatatcccgaaatcgcgcgaaccgaacgaaaactaacgaaacgcgacaatcacttattcccctctccgaccgctcacctaataactcacctaaaccgccgcccccacccccgcgaacgcgacgcgaccccgacctcatccccgacgacgcgaaaaacgcgacgacgcgcgaaaccgacgccctccacctacaacccgattataactcgcgacgccccttcgccgtaaccgaaataaaacctataacgcgcgctatacttcgaattcataaacttacaaactaccaactaaaaaaaaaaaatcaatatcacaaaattcgaaaaatacgaactacctaataacac

SEQ ID NO: 23145 - DNA, 589 bp, Artificial Sequence
  chemically treated genomic DNA (Homo sapiens) CpG-island No: 23145
tcggtttcgtttcgggttttttcggaaggatggttagttcggaggagggatattatttgaggaaagaatttttaggttcgtaaagagtgatcgttttttagaggagagcggatcgattattgtgttagcgttttaaaagttaatatttgagtttttagtttttgatttcggggttaggtaggtcggatgtgatttcgttttcggtgagaggggagcggttttgacgagggcgttgagtttttagtttttgatttcggggttaggtaggtcggatgtgatttcgttttcggtgagaggggagcggttttgacgagggcgttgagtttttagtttttgatttcggggttaggtaggtcggatgtgatttcgttttcggtgagaggggagcggttttgacgagggcgttgagtttttagtttttgatttcggggttaggtaggtcggatgtgatttcgttttcggtgagaggggagcggttttgacgagggcgttttttttttgatttagtttattattttaggatgttagtgggttgagttttcgtttttcggtaggcgttttcgtattttggtttgggtgggaagtggtt

SEQ ID NO: 23146 - DNA, 589 bp, Artificial Sequence
  chemically treated genomic DNA (Homo sapiens) CpG-island No: 23146
aaccacttcccacccaaaccaaaatacgaaaacgcctaccgaaaaacgaaaactcaacccactaacatcctaaaataataaactaaatcaaaaaaaaaacgccctcgtcaaaaccgctcccctctcaccgaaaacgaaatcacatccgacctacctaaccccgaaatcaaaaactaaaaactcaacgccctcgtcaaaaccgctcccctctcaccgaaaacgaaatcacatccgacctacctaaccccgaaatcaaaaactaaaaactcaacgccctcgtcaaaaccgctcccctctcaccgaaaacgaaatcacatccgacctacctaaccccgaaatcaaaaactaaaaactcaacgccctcgtcaaaaccgctcccctctcaccgaaaacgaaatcacatccgacctacctaaccccgaaatcaaaaactaaaaactcaaatattaacttttaaaacgctaacacaataatcgatccgctctcctctaaaaaacgatcactctttacgaacctaaaaattctttcctcaaataatatccctcctccgaactaaccatccttccgaaaaaacccgaaacgaaaccga

SEQ ID NO: 23147 - DNA, 589 bp, Artificial Sequence
  chemically treated genomic DNA (Homo sapiens) CpG-island No: 23147
gattattttttatttaaattaagatacgaaggcgtttatcggaaaacgaaggtttaatttattagtattttagagtaatgggttgagttaaaagagggacgttttcgttagggtcgttttttttttatcggaaacgaagttatattcgatttatttgatttcggggttagaagttgaggatttagcgttttcgttagggtcgttttttttttatcggaaacgaagttatattcgatttatttgatttcggggttagaagttgaggatttagcgttttcgttagggtcgttttttttttatcggaaacgaagttatattcgatttatttgatttcggggttagaagttgaggatttagcgttttcgttagggtcgttttttttttatcggaaacgaagttatattcgatttatttgatttcggggttagaagttgaggatttagatgttgatttttagggcgttgatatagtggtcgattcgtttttttttggaaggcggttattttttgcggatttgaaaattttttttttaggtggtgtttttttttcgagttggttattttttcgggggagttcggagcgagatcgg

SEQ ID NO: 23148 - DNA, 589 bp, Artificial Sequence
  chemically treated genomic DNA (Homo sapiens) CpG-island No: 23148
ccgatctcgctccgaactcccccgaaaaaataaccaactcgaaaaaaaaacaccacctaaaaaaaaaattttcaaatccgcaaaaaataaccgccttccaaaaaaaaacgaatcgaccactatatcaacgccctaaaaatcaacatctaaatcctcaacttctaaccccgaaatcaaataaatcgaatataacttcgtttccgataaaaaaaaaacgaccctaacgaaaacgctaaatcctcaacttctaaccccgaaatcaaataaatcgaatataacttcgtttccgataaaaaaaaaacgaccctaacgaaaacgctaaatcctcaacttctaaccccgaaatcaaataaatcgaatataacttcgtttccgataaaaaaaaaacgaccctaacgaaaacgctaaatcctcaacttctaaccccgaaatcaaataaatcgaatataacttcgtttccgataaaaaaaaaacgaccctaacgaaaacgtccctcttttaactcaacccattactctaaaatactaataaattaaaccttcgttttccgataaacgccttcgtatcttaatttaaataaaaaataatc

SEQ ID NO: 23149 - DNA, 1427 bp, Artificial Sequence
  chemically treated genomic DNA (Homo sapiens) CpG-island No: 23149
tttcgttgtgtatttttgtttttttcgaaagttcgagtagtaaagggaggttttttgcggttttcgcgggtttttagggattcgtaagttgaagcgcgagggttttacgcgggttgcggggacgcgggtttcggtgttgtagatttttttagggcgtttgggtcgcggtaggcgcggagtttcgcgcgtaatagttgtttcgtcggtttcgttttcgattttcgttttgcgttaagcgcggaagcgttcgcgatttaattgtttcgggtgtcgggcgtttagggaggggtcgttatcgttcgtttcgtttcgggggtttgcgtttagtagttttcgttttttcggaatttagaggtcgagtcggaggcggcggggttacggtgggagttcgcgaggtggttcgagcgagggtttcgtattttcgtagagttcgttcgagggcgtagtttgttacgttaggggaggcggtcgggcggcggggaacggcgggggcggagcgtagtttttcgacgtcgtcgttttagcgttttttttcgttttttcggttttcgttcgtagtcgtcgttttcgttttcgtcgggttgaggagtcgggagttcgtcgcgtcggttcggggttgcgggatggggagttagcgttacggcggcggtagtggtcgtagcgtatttcgtcgtcgtttaggagttcgtttagttaggggtgtcgggttcgtttagttcgtttcggagttaggttcgcgggcggcggcggagttgggtaggtggatgcggttggaagatggcgttttcgggttcgggtagtagcgttaggcggcggtgtcggcgggtgttgtattggatttcggtggtgtttattatttttttgttcggttggttttattacgtttacgttatttagttgtgtataggtgagtgcgtttttcgtcgcggcgtttttagcgtagcgtagtttatttcgattgtttcgggacgtttagtcgttttttcgttttcgtttttcggatgcgtttcgggcgttgttaatttgtcgcgtttcgtcggtttcgtcgttaaaagtagtttcggggtagttttttttacgcgtacgtttttcgttttttttttttaattttcgggttaaggtggcgtttacgtttcgtattcgtcgtcgagtttttcgtcgtttttcgtttatcgtcgtcgtttcggttatattttttagaggggcggaaggttttcgggatcgttgtggagaggggaggtcgaggtcggcgaggcgcgtcgggggttgaagggttgagttgggttcggtttcgagttgcgttagattcgcgcgggggtgttgggttttggcggcggagttggattttttgttggttggcgttaatgtatttgttaaaaatttgtgatagcgtttaggggcgtttttgttgtttttatgatttgagg

SEQ ID NO: 23150 - DNA, 1427 bp, Artificial Sequence
  chemically treated genomic DNA (Homo sapiens) CpG-island No: 23150
cctcaaatcataaaaacaacaaaaacgcccctaaacgctatcacaaatttttaacaaatacattaacgccaaccaacaaaaaatccaactccgccgccaaaacccaacacccccgcgcgaatctaacgcaactcgaaaccgaacccaactcaacccttcaacccccgacgcgcctcgccgacctcgacctcccctctccacaacgatcccgaaaaccttccgcccctctaaaaaatataaccgaaacgacgacgataaacgaaaaacgacgaaaaactcgacgacgaatacgaaacgtaaacgccaccttaacccgaaaattaaaaaaaaaaaacgaaaaacgtacgcgtaaaaaaaactaccccgaaactacttttaacgacgaaaccgacgaaacgcgacaaattaacaacgcccgaaacgcatccgaaaaacgaaaacgaaaaaacgactaaacgtcccgaaacaatcgaaataaactacgctacgctaaaaacgccgcgacgaaaaacgcactcacctatacacaactaaataacgtaaacgtaataaaaccaaccgaacaaaaaaataataaacaccaccgaaatccaatacaacacccgccgacaccgccgcctaacgctactacccgaacccgaaaacgccatcttccaaccgcatccacctacccaactccgccgccgcccgcgaacctaactccgaaacgaactaaacgaacccgacacccctaactaaacgaactcctaaacgacgacgaaatacgctacgaccactaccgccgccgtaacgctaactccccatcccgcaaccccgaaccgacgcgacgaactcccgactcctcaacccgacgaaaacgaaaacgacgactacgaacgaaaaccgaaaaaacgaaaaaaaacgctaaaacgacgacgtcgaaaaactacgctccgcccccgccgttccccgccgcccgaccgcctcccctaacgtaacaaactacgccctcgaacgaactctacgaaaatacgaaaccctcgctcgaaccacctcgcgaactcccaccgtaaccccgccgcctccgactcgacctctaaattccgaaaaaacgaaaactactaaacgcaaacccccgaaacgaaacgaacgataacgacccctccctaaacgcccgacacccgaaacaattaaatcgcgaacgcttccgcgcttaacgcaaaacgaaaatcgaaaacgaaaccgacgaaacaactattacgcgcgaaactccgcgcctaccgcgacccaaacgccctaaaaaaatctacaacaccgaaacccgcgtccccgcaacccgcgtaaaaccctcgcgcttcaacttacgaatccctaaaaacccgcgaaaaccgcaaaaaacctccctttactactcgaactttcgaaaaaaacaaaaatacacaacgaaa

SEQ ID NO: 23151 - DNA, 1427 bp, Artificial Sequence
  chemically treated genomic DNA (Homo sapiens) CpG-island No: 23151
ttttaaattataaaggtagtaaaaacgtttttgagcgttgttataaatttttaataagtgtattgacgttaattagtaagggatttagtttcgtcgttaaggtttagtattttcgcgcgggtttggcgtagttcggggtcgggtttagtttagttttttagttttcggcgcgtttcgtcggtttcggttttttttttttatagcggtttcggggatttttcgtttttttagggggtgtggtcggggcggcggcggtgagcggaaggcggcgggaggttcggcggcgagtgcggggcgtaggcgttattttaattcgagagttgggaggggagggcgaggggcgtgcgcgtggaaaaagttgtttcgaggttgtttttagcggcggagtcggcgggacgcggtaggttggtagcgttcggggcgtattcggggggcgagagcggaggagcggttgagcgtttcgggatagtcggggtgggttgcgttgcgttgggggcgtcgcggcggggggcgtatttatttatgtatagttggatggcgtaggcgtagtaggattagtcgagtaggagggtgatgaatattatcgggatttagtatagtattcgtcggtatcgtcgtttggcgttgttgttcgggttcgagggcgttattttttagtcgtatttatttgtttagtttcgtcgtcgttcgcgggtttggtttcggggcgggttgggcgggttcggtatttttggttggacgggtttttgggcggcggcggggtgcgttgcggttattgtcgtcgtcgtggcgttaattttttatttcgtagtttcgagtcggcgcggcggattttcggttttttagttcggcggaggcggaggcggcggttgcgagcggaggtcgaggaggcggagaggaacgttgaggcggcggcgtcgggagattgcgtttcgttttcgtcgtttttcgtcgttcggtcgttttttttggcgtggtaggttgcgttttcgggcgggttttgcggggatgcggggttttcgttcgggttatttcgcgggtttttatcgtggtttcgtcgttttcggttcggtttttggatttcggggaggcgggggttgttgggcgtaggttttcggggcggagcgggcggtggcggtttttttttaggcgttcggtattcggggtagttaggtcgcgagcgttttcgcgtttggcgtagggcgggggtcggaggcgaggtcggcggagtagttgttgcgcgcgggatttcgcgtttgtcgcgatttaggcgttttgagaaagtttgtagtatcgaggttcgcgttttcgtagttcgcgtggaattttcgcgttttaatttgcgggtttttgggagttcgcgggggtcgtaaggagtttttttttattattcgggttttcgggggaagtagaaatgtatagcgaag

SEQ ID NO: 23152 - DNA, 1427 bp, Artificial Sequence
  chemically treated genomic DNA (Homo sapiens) CpG-island No: 23152
cttcgctatacatttctacttcccccgaaaacccgaataataaaaaaaaactccttacgacccccgcgaactcccaaaaacccgcaaattaaaacgcgaaaattccacgcgaactacgaaaacgcgaacctcgatactacaaactttctcaaaacgcctaaatcgcgacaaacgcgaaatcccgcgcgcaacaactactccgccgacctcgcctccgacccccgccctacgccaaacgcgaaaacgctcgcgacctaactaccccgaataccgaacgcctaaaaaaaaaccgccaccgcccgctccgccccgaaaacctacgcccaacaacccccgcctccccgaaatccaaaaaccgaaccgaaaacgacgaaaccacgataaaaacccgcgaaataacccgaacgaaaaccccgcatccccgcaaaacccgcccgaaaacgcaacctaccacgccaaaaaaaacgaccgaacgacgaaaaacgacgaaaacgaaacgcaatctcccgacgccgccgcctcaacgttcctctccgcctcctcgacctccgctcgcaaccgccgcctccgcctccgccgaactaaaaaaccgaaaatccgccgcgccgactcgaaactacgaaataaaaaattaacgccacgacgacgacaataaccgcaacgcaccccgccgccgcccaaaaacccgtccaaccaaaaataccgaacccgcccaacccgccccgaaaccaaacccgcgaacgacgacgaaactaaacaaataaatacgactaaaaaataacgccctcgaacccgaacaacaacgccaaacgacgataccgacgaatactatactaaatcccgataatattcatcaccctcctactcgactaatcctactacgcctacgccatccaactatacataaataaatacgccccccgccgcgacgcccccaacgcaacgcaacccaccccgactatcccgaaacgctcaaccgctcctccgctctcgccccccgaatacgccccgaacgctaccaacctaccgcgtcccgccgactccgccgctaaaaacaacctcgaaacaactttttccacgcgcacgcccctcgccctcccctcccaactctcgaattaaaataacgcctacgccccgcactcgccgccgaacctcccgccgccttccgctcaccgccgccgccccgaccacaccccctaaaaaaacgaaaaatccccgaaaccgctataaaaaaaaaaaaccgaaaccgacgaaacgcgccgaaaactaaaaaactaaactaaacccgaccccgaactacgccaaacccgcgcgaaaatactaaaccttaacgacgaaactaaatcccttactaattaacgtcaatacacttattaaaaatttataacaacgctcaaaaacgtttttactacctttataatttaaaa

SEQ ID NO: 23153 - DNA, 610 bp, Artificial Sequence
  chemically treated genomic DNA (Homo sapiens) CpG-island No: 23153
attttcgttttattgcgaagttttaggtataaagtttttgcgttagttattacgcgttaattttttgataaatttttagttttagttatttagtttttaattcgtcgttaggttttttttttcgttagtcgtattttagttggcgttatcgcgtatttttttaggtttatcgttttcgttttttttttatttttttaattcgttttttttttcgtaaggttgtagcggatgtaagatttatttgtgtcgttgagttcgcgtttttttttttttttttcgttatagagatagtattcggcggcggtggcggtggcggtggcggtagcggcggcggtagcgggtgttttatagatatttttcgtttagcgaagggaaaggcgagtaggagttgcgtcgtatcgtgttgcgtcgtcgtttttcgtacgttttgacgggggcgttagatgatgacgcgatacgtagagggggcggagagcgttttcgggggcggggtacgtaagtgacggcggcgcgggtggtggagcgttgggcggttaggttttttggttggtcggtttgggcgtttgggtcgtgaaggtgggattttttgtttcgggtcgtaagttttttt

SEQ ID NO: 23154 - DNA, 610 bp, Artificial Sequence
  chemically treated genomic DNA (Homo sapiens) CpG-island No: 23154
aaaaaaacttacgacccgaaacaaaaaatcccaccttcacgacccaaacgcccaaaccgaccaaccaaaaaacctaaccgcccaacgctccaccacccgcgccgccgtcacttacgtaccccgcccccgaaaacgctctccgccccctctacgtatcgcgtcatcatctaacgcccccgtcaaaacgtacgaaaaacgacgacgcaacacgatacgacgcaactcctactcgcctttcccttcgctaaacgaaaaatatctataaaacacccgctaccgccgccgctaccgccaccgccaccgccaccgccgccgaatactatctctataacgaaaaaaaaaaaaaaaaacgcgaactcaacgacacaaataaatcttacatccgctacaaccttacgaaaaaaaaaacgaattaaaaaaataaaaaaaaaacgaaaacgataaacctaaaaaaatacgcgataacgccaactaaaatacgactaacgaaaaaaaaaacctaacgacgaattaaaaactaaataactaaaactaaaaatttatcaaaaaattaacgcgtaataactaacgcaaaaactttatacctaaaacttcgcaataaaacgaaaat

SEQ ID NO: 23155 - DNA, 610 bp, Artificial Sequence
  chemically treated genomic DNA (Homo sapiens) CpG-island No: 23155
agggaaatttgcggttcggaataggaggttttatttttacggtttagacgtttaaatcggttagttagggagtttggtcgtttagcgttttattattcgcgtcgtcgttatttgcgtgtttcgttttcgggggcgtttttcgttttttttgcgtgtcgcgttattatttagcgttttcgttaggacgtgcgaaaagcgacggcgtagtacggtgcggcgtagtttttgttcgttttttttttcgttgggcgagaggtgtttatggggtattcgttgtcgtcgtcgttatcgttatcgttatcgttatcgtcgtcgagtgttgtttttatggcgaggaggaggaggaggagcgcgagtttagcgatataagtagattttgtattcgttgtagttttacggggggaggggcgggttagggaagtagaaagggggcggggacgatgaatttgagagggtgcgcgatggcgttagttggagtgcggttggcggaggaaggagtttggcggcggattgggggttgggtaattggggttgggggtttgttaaggggttggcgcgtagtgattgacgtaaaggttttgtatttggggtttcgtagtgggacggaaat

SEQ ID NO: 23156 - DNA, 610 bp, Artificial Sequence
  chemically treated genomic DNA (Homo sapiens) CpG-island No: 23156
atttccgtcccactacgaaaccccaaatacaaaacctttacgtcaatcactacgcgccaaccccttaacaaacccccaaccccaattacccaacccccaatccgccgccaaactccttcctccgccaaccgcactccaactaacgccatcgcgcaccctctcaaattcatcgtccccgccccctttctacttccctaacccgcccctccccccgtaaaactacaacgaatacaaaatctacttatatcgctaaactcgcgctcctcctcctcctcctcgccataaaaacaacactcgacgacgataacgataacgataacgataacgacgacgacaacgaataccccataaacacctctcgcccaacgaaaaaaaaaacgaacaaaaactacgccgcaccgtactacgccgtcgcttttcgcacgtcctaacgaaaacgctaaataataacgcgacacgcaaaaaaaacgaaaaacgcccccgaaaacgaaacacgcaaataacgacgacgcgaataataaaacgctaaacgaccaaactccctaactaaccgatttaaacgtctaaaccgtaaaaataaaacctcctattccgaaccgcaaatttccct

SEQ ID NO: 23157 - DNA, 858 bp, Artificial Sequence
  chemically treated genomic DNA (Homo sapiens) CpG-island No: 23157
ttttcgcgcgtagtttttttttttcggttcgcgtttatcggtttagttcggggttagcgttcgtttacgtgtgttcggttttaggtaaatttcgttgagtagcggtcgtatatcgtttatttcggggattggttagcgcggtcggggttcggcgggaggcgggttcggggtcgcgtttcgggagcgcggaggaggcggtgtcgttcggtttcgcgtttcgttttcgtttcgggtggttatatagaggggcgtttacgtgtttagttttttttttgtagcgcggtcggcgggcgttttttttttcgggattagcgaggcggcggtcgttgttttagcgttttttagtcgcgggttttcgacgcgttgtagtcggtagtttatcgtcgtttttttggcgcgattttaatttagttttagtaagttgttaggtttttagtttcgtcgagagttcgcgggcgaggggtagttcggacgttggggtcggcggggaaggagcggggcgagggcgttttggggtcggcggggaattagagggtcgagggttttcggggacgagtttagttgcgcgtagttgttttgaggtcgcgttttagcgagttttcgttagggagtcggggtcgtgggttggggttgaagtcgtggattttcgttttcggggttgcgtttcggaatgcgtttcgtttcgttcggtttttgtgtagtcggttttgttcggggatttcggggatcgttggaattgggagaggggttggtacggcgatttcgcggggattttttagttattatttttagaggagttcggcgtattttttttcgggtgggtaggttgaattttttggttttgtacgttgtcggggt

SEQ ID NO: 23158 - DNA, 858 bp, Artificial Sequence
  chemically treated genomic DNA (Homo sapiens) CpG-island No: 23158
accccgacaacgtacaaaaccaaaaaattcaacctacccacccgaaaaaaaatacgccgaactcctctaaaaataataactaaaaaatccccgcgaaatcgccgtaccaacccctctcccaattccaacgatccccgaaatccccgaacaaaaccgactacacaaaaaccgaacgaaacgaaacgcattccgaaacgcaaccccgaaaacgaaaatccacgacttcaaccccaacccacgaccccgactccctaacgaaaactcgctaaaacgcgacctcaaaacaactacgcgcaactaaactcgtccccgaaaaccctcgaccctctaattccccgccgaccccaaaacgccctcgccccgctccttccccgccgaccccaacgtccgaactacccctcgcccgcgaactctcgacgaaactaaaaacctaacaacttactaaaactaaattaaaatcgcgccaaaaaaacgacgataaactaccgactacaacgcgtcgaaaacccgcgactaaaaaacgctaaaacaacgaccgccgcctcgctaatcccgaaaaaaaaaacgcccgccgaccgcgctacaaaaaaaaaactaaacacgtaaacgcccctctatataaccacccgaaacgaaaacgaaacgcgaaaccgaacgacaccgcctcctccgcgctcccgaaacgcgaccccgaacccgcctcccgccgaaccccgaccgcgctaaccaatccccgaaataaacgatatacgaccgctactcaacgaaatttacctaaaaccgaacacacgtaaacgaacgctaaccccgaactaaaccgataaacgcgaaccgaaaaaaaaaaactacgcgcgaaaa

SEQ ID NO: 23159 - DNA, 858 bp, Artificial Sequence
  chemically treated genomic DNA (Homo sapiens) CpG-island No: 23159
atttcggtagcgtgtagggttaggaggtttagtttgtttattcggagaggggtgcgtcgagtttttttggaaatagtgattgaagggttttcgcgaagtcgtcgtgttagttttttttttagttttagcggttttcgaagttttcgggtagagtcggttgtatagggatcggacgaggcgaggcgtatttcggggcgtagtttcgaggacgaaggtttacggttttagttttagtttacggtttcgattttttgacgaagattcgttggagcgcggttttagggtagttgcgcgtagttggattcgttttcgggagttttcgattttttagtttttcgtcggttttagggcgttttcgtttcgtttttttttcgtcggttttagcgttcgggttgtttttcgttcgcggattttcggcggggttggagatttagtaatttattggggttgggttggggtcgcgttaagaaggcggcggtgggttgtcggttgtagcgcgtcgggggttcgcggttgggggacgttggagtagcggtcgtcgtttcgttggtttcgggaagaggagcgttcgtcggtcgcgttgtagaaggagggttgggtacgtgggcgtttttttgtgtagttattcggggcgggggcggggcgcggggtcgggcggtatcgtttttttcgcgttttcggaacgcgatttcgagttcgtttttcgtcgggtttcggtcgcgttggttaattttcggggtgggcggtgtgcggtcgttgtttagcggggtttgtttggagtcgagtatacgtgggcgggcgttagtttcgggttaggtcggtgggcgcgggtcggggaagagaggttgcgcgcgagga

SEQ ID NO: 23160 - DNA, 858 bp, Artificial Sequence
  chemically treated genomic DNA (Homo sapiens) CpG-island No: 23160
tcctcgcgcgcaacctctcttccccgacccgcgcccaccgacctaacccgaaactaacgcccgcccacgtatactcgactccaaacaaaccccgctaaacaacgaccgcacaccgcccaccccgaaaattaaccaacgcgaccgaaacccgacgaaaaacgaactcgaaatcgcgttccgaaaacgcgaaaaaaacgataccgcccgaccccgcgccccgcccccgccccgaataactacacaaaaaaacgcccacgtacccaaccctccttctacaacgcgaccgacgaacgctcctcttcccgaaaccaacgaaacgacgaccgctactccaacgtcccccaaccgcgaacccccgacgcgctacaaccgacaacccaccgccgccttcttaacgcgaccccaacccaaccccaataaattactaaatctccaaccccgccgaaaatccgcgaacgaaaaacaacccgaacgctaaaaccgacgaaaaaaaaacgaaacgaaaacgccctaaaaccgacgaaaaactaaaaaatcgaaaactcccgaaaacgaatccaactacgcgcaactaccctaaaaccgcgctccaacgaatcttcgtcaaaaaatcgaaaccgtaaactaaaactaaaaccgtaaaccttcgtcctcgaaactacgccccgaaatacgcctcgcctcgtccgatccctatacaaccgactctacccgaaaacttcgaaaaccgctaaaactaaaaaaaaaactaacacgacgacttcgcgaaaacccttcaatcactatttccaaaaaaactcgacgcacccctctccgaataaacaaactaaacctcctaaccctacacgctaccgaaat

SEQ ID NO: 23161 - DNA, 865 bp, Artificial Sequence
  chemically treated genomic DNA (Homo sapiens) CpG-island No: 23161
tgtaagcgttttaggtttcgttttatttttttcgttagaggttatttcgaggcgagttgtcgtttttgcggttttcgaggtttttaggatattgtcgtttttcgttttcgggtcgttttcgaacgttggggtcgttttatcgtgtcggggtgtttacggagaaaagtgaggtttgagcggacgaaagagaagtttacgtgggcgataatattggtagtttagggagttgggacgacgcgggcgcgttagaaattcgtacgttcgcgtcgtttattaatttagttagttaggatttcgtttcgtttcgtttcggtggcgggggtattttcggttttttagtttttatggtattaattttcggcgcgcgttatttttcgcgagatttcggcggcgtagtaatggttagagcgtgagtgtcgttgatagaagttaagagaatcggttgggacggggttggggcgataacgggtcgggggggattcgataggttagagttttttggggaggagcggcggttggaggcgcgaggttttttcggatgttcggagagtcgtttgcgatttaattttcgttttttttttagatgtcgcgttattgtttcgtcgtcggttgttgtatacgggatacgcgcgagacgcgtaatcgcggtatttttttttataggttagcgcgcgtgcgtcgcgggtttacgtgcgtatgcgttagttgttgttcgtttcgggtcgtaattgcgtagaggtttcgcgttttttttagatattgaggaggtttgaatttgtgggtgggaggtgaagcggaacggtttcggcgggattgaatgtagtcgggaaggggaggacgggaagtttagtcggtttggattcgt

SEQ ID NO: 23162 - DNA, 865 bp, Artificial Sequence
  chemically treated genomic DNA (Homo sapiens) CpG-island No: 23162
acgaatccaaaccgactaaacttcccgtcctccccttcccgactacattcaatcccgccgaaaccgttccgcttcacctcccacccacaaattcaaacctcctcaatatctaaaaaaaacgcgaaacctctacgcaattacgacccgaaacgaacaacaactaacgcatacgcacgtaaacccgcgacgcacgcgcgctaacctataaaaaaaaataccgcgattacgcgtctcgcgcgtatcccgtatacaacaaccgacgacgaaacaataacgcgacatctaaaaaaaaaacgaaaattaaatcgcaaacgactctccgaacatccgaaaaaacctcgcgcctccaaccgccgctcctccccaaaaaactctaacctatcgaatcccccccgacccgttatcgccccaaccccgtcccaaccgattctcttaacttctatcaacgacactcacgctctaaccattactacgccgccgaaatctcgcgaaaaataacgcgcgccgaaaattaataccataaaaactaaaaaaccgaaaatacccccgccaccgaaacgaaacgaaacgaaatcctaactaactaaattaataaacgacgcgaacgtacgaatttctaacgcgcccgcgtcgtcccaactccctaaactaccaatattatcgcccacgtaaacttctctttcgtccgctcaaacctcacttttctccgtaaacaccccgacacgataaaacgaccccaacgttcgaaaacgacccgaaaacgaaaaacgacaatatcctaaaaacctcgaaaaccgcaaaaacgacaactcgcctcgaaataacctctaacgaaaaaaataaaacgaaacctaaaacgcttaca

SEQ ID NO: 23163 - DNA, 865 bp, Artificial Sequence
  chemically treated genomic DNA (Homo sapiens) CpG-island No: 23163
gcgggtttaagtcggttagatttttcgttttttttttttcgattgtatttagtttcgtcgggatcgtttcgttttattttttatttataggtttaagtttttttagtatttgagaaaggcgcgaagtttttacgtagttgcgattcgaggcgagtaataattagcgtatgcgtacgtgagttcgcggcgtacgcgcgttgatttgtggaaggagatgtcgcggttgcgcgtttcgcgcgtgtttcgtgtgtagtagtcggcggcggagtagtgacgcggtatttgggaaagaggcgggagttaagtcgtaagcggtttttcgggtattcggaggagtttcgcgtttttagtcgtcgtttttttttaaggggttttggtttgtcgggtttttttcggttcgttgtcgttttaatttcgttttagtcgatttttttgatttttgttagcggtatttacgttttggttattgttgcgtcgtcgaagtttcgcgaggggtagcgcgcgtcggaagttggtattatagagattggagagtcggaggtgttttcgttatcggggcggggcggggcgaggttttagttagttgggttagtaagcggcgcgagcgtgcgagtttttgacgcgttcgcgtcgttttagttttttggattattagtattgtcgtttacgtgggtttttttttcgttcgtttaggttttattttttttcgtaaatatttcggtacgatggagcggttttagcgttcgggagcggttcgggagcggaaagcggtagtgttttgggagtttcgaaagtcgtaggggcggtagttcgtttcggaatgatttttgacggaagaaataaaacggggtttgggacgtttgta

SEQ ID NO: 23164 - DNA, 865 bp, Artificial Sequence
  chemically treated genomic DNA (Homo sapiens) CpG-island No: 23164
tacaaacgtcccaaaccccgttttatttcttccgtcaaaaatcattccgaaacgaactaccgcccctacgactttcgaaactcccaaaacactaccgctttccgctcccgaaccgctcccgaacgctaaaaccgctccatcgtaccgaaatatttacgaaaaaaaataaaacctaaacgaacgaaaaaaaaacccacgtaaacgacaatactaataatccaaaaaactaaaacgacgcgaacgcgtcaaaaactcgcacgctcgcgccgcttactaacccaactaactaaaacctcgccccgccccgccccgataacgaaaacacctccgactctccaatctctataataccaacttccgacgcgcgctacccctcgcgaaacttcgacgacgcaacaataaccaaaacgtaaataccgctaacaaaaatcaaaaaaatcgactaaaacgaaattaaaacgacaacgaaccgaaaaaaacccgacaaaccaaaaccccttaaaaaaaaacgacgactaaaaacgcgaaactcctccgaatacccgaaaaaccgcttacgacttaactcccgcctctttcccaaataccgcgtcactactccgccgccgactactacacacgaaacacgcgcgaaacgcgcaaccgcgacatctccttccacaaatcaacgcgcgtacgccgcgaactcacgtacgcatacgctaattattactcgcctcgaatcgcaactacgtaaaaacttcgcgcctttctcaaatactaaaaaaacttaaacctataaataaaaaataaaacgaaacgatcccgacgaaactaaatacaatcgaaaaaaaaaaaacgaaaaatctaaccgacttaaacccgc

SEQ ID NO: 23165 - DNA, 721 bp, Artificial Sequence
  chemically treated genomic DNA (Homo sapiens) CpG-island No: 23165
tcgtatcgggtatttacgaattcgtcgtagggcgggaggcgtcgttagcgatgtattgtttcgaagggttcgaagttgagcgttaggtattcgatattgttcgagtagttatggtcgaagtttacgttcggggttattttggatcgcgcgtcgtttgttagggtcgtagtttcgatttgttttttcgtgttgttcggtttagttatttcgggtttacgtcggatcggtcgcgttgtaagtttaatttgcggttatcgtttcgggtcggttggagaaattatatttttcggcgagttttgcgttgacggtgcggtacgttcggttagcgtcgtatttgcgttttttagtttttttcgataagtttagcgtttgtcgagatatcgcgggcgagcgtaggatgcggttgtcgatcgcgcggcgagcgtgggattttttggggagcgttttaggttatgtattggcgttgcgttgttttttttagtgaatgtagtgtgtcgtttttagtttcgtcgcgattgtttttttcggcgttttttaggtttacgtagttcgaagattcgcggtcggttcgtagttttcggtatgttttgggtttgcgcgtggtttcggtttggatcgtttgtcgttgtcgggattttttatggagggtttcgggttcgtagcggtttttgtaggcggtttaacgtttttttttttgttagcgtttttagttttgattttt

SEQ ID NO: 23166 - DNA, 721 bp, Artificial Sequence
  chemically treated genomic DNA (Homo sapiens) CpG-island No: 23166
aaaaatcaaaactaaaaacgctaacaaaaaaaaaaacgttaaaccgcctacaaaaaccgctacgaacccgaaaccctccataaaaaatcccgacaacgacaaacgatccaaaccgaaaccacgcgcaaacccaaaacataccgaaaactacgaaccgaccgcgaatcttcgaactacgtaaacctaaaaaacgccgaaaaaaacaatcgcgacgaaactaaaaacgacacactacattcactaaaaaaaacaacgcaacgccaatacataacctaaaacgctccccaaaaaatcccacgctcgccgcgcgatcgacaaccgcatcctacgctcgcccgcgatatctcgacaaacgctaaacttatcgaaaaaaactaaaaaacgcaaatacgacgctaaccgaacgtaccgcaccgtcaacgcaaaactcgccgaaaaatataatttctccaaccgacccgaaacgataaccgcaaattaaacttacaacgcgaccgatccgacgtaaacccgaaataactaaaccgaacaacacgaaaaaacaaatcgaaactacgaccctaacaaacgacgcgcgatccaaaataaccccgaacgtaaacttcgaccataactactcgaacaatatcgaatacctaacgctcaacttcgaacccttcgaaacaatacatcgctaacgacgcctcccgccctacgacgaattcgtaaatacccgatacga

SEQ ID NO: 23167 - DNA, 721 bp, Artificial Sequence
  chemically treated genomic DNA (Homo sapiens) CpG-island No: 23167
gggggttagggttgagggcgttagtaggaaagggagcgttgagtcgtttgtagaggtcgttgcgagttcggaattttttatgggggatttcggtagcggtagacgatttaggtcggagttacgcgtagatttagggtatgtcgggaattgcgagtcggtcgcgggttttcgggttgcgtgggtttgggaggcgtcgggaagagtagtcgcgacggggttagggacgatatattgtatttattggaagggataacgtagcgttagtatatagtttgaaacgttttttagaaggttttacgttcgtcgcgcggtcgataatcgtattttgcgttcgttcgcggtgtttcggtaagcgttaggtttgtcgggaagagttggagggcgtaagtgcggcgttggtcggacgtgtcgtatcgttagcgtagggttcgtcgggaaatgtggtttttttagtcggttcggggcggtggtcgtaagttgggtttatagcgcggtcgattcggcgtggattcgggatggttggatcgggtagtacgggggggtagatcggggttgcggttttggtaggcggcgcgcggtttaaggtagtttcgagcgtggatttcgattatagttgttcggatagtgtcgagtatttgacgtttaatttcgggtttttcgaaatagtgtatcgttggcggcgtttttcgttttgcgacgagttcgtgggtgttcggtacgg

SEQ ID NO: 23168 - DNA, 721 bp, Artificial Sequence
  chemically treated genomic DNA (Homo sapiens) CpG-island No: 23168
ccgtaccgaacacccacgaactcgtcgcaaaacgaaaaacgccgccaacgatacactatttcgaaaaacccgaaattaaacgtcaaatactcgacactatccgaacaactataatcgaaatccacgctcgaaactaccttaaaccgcgcgccgcctaccaaaaccgcaaccccgatctacccccccgtactacccgatccaaccatcccgaatccacgccgaatcgaccgcgctataaacccaacttacgaccaccgccccgaaccgactaaaaaaaccacatttcccgacgaaccctacgctaacgatacgacacgtccgaccaacgccgcacttacgccctccaactcttcccgacaaacctaacgcttaccgaaacaccgcgaacgaacgcaaaatacgattatcgaccgcgcgacgaacgtaaaaccttctaaaaaacgtttcaaactatatactaacgctacgttatcccttccaataaatacaatatatcgtccctaaccccgtcgcgactactcttcccgacgcctcccaaacccacgcaacccgaaaacccgcgaccgactcgcaattcccgacataccctaaatctacgcgtaactccgacctaaatcgtctaccgctaccgaaatcccccataaaaaattccgaactcgcaacgacctctacaaacgactcaacgctccctttcctactaacgccctcaaccctaaccccc

SEQ ID NO: 23169 - DNA, 593 bp, Artificial Sequence
  chemically treated genomic DNA (Homo sapiens) CpG-island No: 23169
ggtttcgcggcgagtcgggaaggggtcgttgtgggacgagagaaggacgaggtgagtttcggatttcggttagtgtttttggtttcgtttgttaatttttagtttttaacgtgtcgggtcggggttcgagatttgggagcgtaagcgttggttttcggcgtcggggcgaagaggcggggcggcgggcggggatcggggtttcggggattagggttttcggggcgggcgtttatttgggttcggcgcgggtttgggttcgggaatcgtttggggtcgcgggcgcgggggggcggggaggcgcgggcggggcgtgtttggcgttgcgtttgtattgcggtcggggagttcgcgggtttagtatcgtttcgtcgggtcggagtaggtggggggcggtcgggggataggggtaggtcgaggttttcggcgttcggatcggagtcgcggggcgtagggaggtagttaggggtcgttttggtcgggggcgtttcgggttcgagtttgggttttcggggattttcgcgattttttagggatgtttagttggggcgcgggtagggttttttttttttttttttttttttaaagttttagaa

SEQ ID NO: 23170 - DNA, 593 bp, Artificial Sequence
  chemically treated genomic DNA (Homo sapiens) CpG-island No: 23170
ttctaaaactttaaaaaaaaaaaaaaaaaaaaaaaaccctacccgcgccccaactaaacatccctaaaaaatcgcgaaaatccccgaaaacccaaactcgaacccgaaacgcccccgaccaaaacgacccctaactacctccctacgccccgcgactccgatccgaacgccgaaaacctcgacctacccctatcccccgaccgccccccacctactccgacccgacgaaacgatactaaacccgcgaactccccgaccgcaatacaaacgcaacgccaaacacgccccgcccgcgcctccccgcccccccgcgcccgcgaccccaaacgattcccgaacccaaacccgcgccgaacccaaataaacgcccgccccgaaaaccctaatccccgaaaccccgatccccgcccgccgccccgcctcttcgccccgacgccgaaaaccaacgcttacgctcccaaatctcgaaccccgacccgacacgttaaaaactaaaaattaacaaacgaaaccaaaaacactaaccgaaatccgaaactcacctcgtccttctctcgtcccacaacgaccccttcccgactcgccgcgaaacc

SEQ ID NO: 23171 - DNA, 593 bp, Artificial Sequence
  chemically treated genomic DNA (Homo sapiens) CpG-island No: 23171
ttttgagattttggaaagaaagaaaaggaaaaaagattttgttcgcgttttagttgggtatttttgggaggtcgcgaggattttcggagatttagattcgggttcggggcgttttcggttagagcggtttttggttgtttttttacgtttcgcgatttcggttcggacgtcgagggtttcggtttgtttttgtttttcggtcgttttttatttgtttcggttcggcggggcggtgttgggttcgcgggtttttcggtcgtagtgtaaacgtagcgttagatacgtttcgttcgcgttttttcgttttttcgcgttcgcggttttaagcggttttcgagtttaggttcgcgtcgagtttaggtgagcgttcgtttcggggattttggttttcggaatttcggttttcgttcgtcgtttcgttttttcgtttcggcgtcgggggttagcgtttgcgtttttaagtttcggatttcggttcggtacgttaggggttgggggttggtaagcggggttagaggtattggtcggggttcgaagtttatttcgtttttttttcgttttataacggttttttttcggttcgtcgcggggtt

SEQ ID NO: 23172 - DNA, 593 bp, Artificial Sequence
  chemically treated genomic DNA (Homo sapiens) CpG-island No: 23172
aaccccgcgacgaaccgaaaaaaaaccgttataaaacgaaaaaaaaacgaaataaacttcgaaccccgaccaatacctctaaccccgcttaccaacccccaacccctaacgtaccgaaccgaaatccgaaacttaaaaacgcaaacgctaacccccgacgccgaaacgaaaaaacgaaacgacgaacgaaaaccgaaattccgaaaaccaaaatccccgaaacgaacgctcacctaaactcgacgcgaacctaaactcgaaaaccgcttaaaaccgcgaacgcgaaaaaacgaaaaaacgcgaacgaaacgtatctaacgctacgtttacactacgaccgaaaaacccgcgaacccaacaccgccccgccgaaccgaaacaaataaaaaacgaccgaaaaacaaaaacaaaccgaaaccctcgacgtccgaaccgaaatcgcgaaacgtaaaaaaacaaccaaaaaccgctctaaccgaaaacgccccgaacccgaatctaaatctccgaaaatcctcgcgacctcccaaaaatacccaactaaaacgcgaacaaaatcttttttccttttctttctttccaaaatctcaaaa

SEQ ID NO: 23173 - DNA, 537 bp, Artificial Sequence
  chemically treated genomic DNA (Homo sapiens) CpG-island No: 23173
gtttcgttcggttcgcgtttgttagcgtttaaagttagcgaagtacgggtttaatcgggttatgtcgggggagtttgagtttattgagttgcgggagttggtattcgttgggcgcgttgggaagggtcgtattcggttggagcgtgttaacgcgttgcgtatcgcgcggggtatcgcgtgtaattttatacggtagttggtttttggtcgtggttatcgtttttagttcgcggggttcgttacgtatacgtggtgcgatttttgtggcgattttatttggggcgtcgtgcgtaaaggtttgtagtgcgcgcgtgagtagtggtttcgcgcgtttacgagagcggaaggggtagttaaggggtagcgtagtcgtcgcgggttaagtcgcggtagagggggtcggcggggatagttttcgaggattaggttcgttattttcgttttatcgttgaagagtgcgcgaaaatggtttattttttgtcgtattttattcgtatttgggttatagatgagtagaggtggttgtttatatgtaaa

SEQ ID NO: 23174 - DNA, 537 bp, Artificial Sequence
  chemically treated genomic DNA (Homo sapiens) CpG-island No: 23174
tttacatataaacaaccacctctactcatctataacccaaatacgaataaaatacgacaaaaaataaaccattttcgcgcactcttcaacgataaaacgaaaataacgaacctaatcctcgaaaactatccccgccgaccccctctaccgcgacttaacccgcgacgactacgctaccccttaactaccccttccgctctcgtaaacgcgcgaaaccactactcacgcgcgcactacaaacctttacgcacgacgccccaaataaaatcgccacaaaaatcgcaccacgtatacgtaacgaaccccgcgaactaaaaacgataaccacgaccaaaaaccaactaccgtataaaattacacgcgataccccgcgcgatacgcaacgcgttaacacgctccaaccgaatacgacccttcccaacgcgcccaacgaataccaactcccgcaactcaataaactcaaactcccccgacataacccgattaaacccgtacttcgctaactttaaacgctaacaaacgcgaaccgaacgaaac

SEQ ID NO: 23175 - DNA, 537 bp, Artificial Sequence
  chemically treated genomic DNA (Homo sapiens) CpG-island No: 23175
tttatatataagtagttatttttgtttatttgtggtttagatacgagtggagtgcgataagggataaattattttcgcgtattttttagcgatggggcgaaagtaacggatttagttttcgggagttgttttcgtcgattttttttgtcgcgatttgattcgcggcgattgcgttgttttttggttgtttttttcgttttcgtaggcgcgcggggttattatttacgcgcgtattgtaggtttttgcgtacgacgttttagatgaagtcgttatagaggtcgtattacgtgtgcgtggcgggtttcgcgggttggaagcggtggttacggttagggattagttgtcgtgtggggttgtacgcggtgtttcgcgcgatgcgtagcgcgttggtacgttttagtcgggtgcggttttttttagcgcgtttagcgggtgttagttttcgtagtttaatgagtttaggttttttcgatatggttcggttgggttcgtgtttcgttggttttgggcgttagtaagcgcgggtcgggcggggt

SEQ ID NO: 23176 - DNA, 537 bp, Artificial Sequence
  chemically treated genomic DNA (Homo sapiens) CpG-island No: 23176
accccgcccgacccgcgcttactaacgcccaaaaccaacgaaacacgaacccaaccgaaccatatcgaaaaaacctaaactcattaaactacgaaaactaacacccgctaaacgcgctaaaaaaaaccgcacccgactaaaacgtaccaacgcgctacgcatcgcgcgaaacaccgcgtacaaccccacacgacaactaatccctaaccgtaaccaccgcttccaacccgcgaaacccgccacgcacacgtaatacgacctctataacgacttcatctaaaacgtcgtacgcaaaaacctacaatacgcgcgtaaataataaccccgcgcgcctacgaaaacgaaaaaaacaaccaaaaaacaacgcaatcgccgcgaatcaaatcgcgacaaaaaaaatcgacgaaaacaactcccgaaaactaaatccgttactttcgccccatcgctaaaaaatacgcgaaaataatttatcccttatcgcactccactcgtatctaaaccacaaataaacaaaaataactacttatatataaa

SEQ ID NO: 23177 - DNA, 760 bp, Artificial Sequence
  chemically treated genomic DNA (Homo sapiens) CpG-island No: 23177
ggtttcgcgtacgcgtatttttcgtattttttcgttttcgttttcggttagaggttatttttgtgcgtttgttcggacgttggtattcgttttcgttttttgtggtaggtggggtttgtgagtggagtttcggagcgatgaggttatttttgggggcgaagcgtgcgtgttttcgtttcggcgtttttgttttaatgagataagagttagatttcggcgatttacgttttagttttaacggttgcggcgcggttttggttcgggcgtacgcgtatattgatacgcgtatacgtacgtacgcgatcggggcggtggttggcggttacggacgcgtaggattgggggacgggcgggtacggttatgggcgaggcggaggcgttttttttcgaaatgatttggagtagtacgacgagtagtggttattgtagttaagaggattcggattcggagttcgagtagtattttatcgcgcgaatttcgttagttcgtaggtcgcgtcgggattaggtgggagttagggggtgtcggcgggcgggaggggaagcggtcgttggagtttcgtttttttcggttcgttgtcgcgttttgggtcggtgggtagttttatttttttggttacgtggtttttcgcgggttttggtcggggatttgttcgcggaatcgtgcgtaagatttcgattttatcgtttagatgttgggtgtcggggtttttttggtttttgttatagataggttgaatacggaaaaagtagttgtatg

SEQ ID NO: 23178 - DNA, 760 bp, Artificial Sequence
  chemically treated genomic DNA (Homo sapiens) CpG-island No: 23178
catacaactactttttccgtattcaacctatctataacaaaaaccaaaaaaaccccgacacccaacatctaaacgataaaatcgaaatcttacgcacgattccgcgaacaaatccccgaccaaaacccgcgaaaaaccacgtaaccaaaaaaataaaactacccaccgacccaaaacgcgacaacgaaccgaaaaaaacgaaactccaacgaccgcttcccctcccgcccgccgacaccccctaactcccacctaatcccgacgcgacctacgaactaacgaaattcgcgcgataaaatactactcgaactccgaatccgaatcctcttaactacaataaccactactcgtcgtactactccaaatcatttcgaaaaaaaacgcctccgcctcgcccataaccgtacccgcccgtcccccaatcctacgcgtccgtaaccgccaaccaccgccccgatcgcgtacgtacgtatacgcgtatcaatatacgcgtacgcccgaaccaaaaccgcgccgcaaccgttaaaactaaaacgtaaatcgccgaaatctaactcttatctcattaaaacaaaaacgccgaaacgaaaacacgcacgcttcgcccccaaaaataacctcatcgctccgaaactccactcacaaaccccacctaccacaaaaaacgaaaacgaataccaacgtccgaacaaacgcacaaaaataacctctaaccgaaaacgaaaacgaaaaaatacgaaaaatacgcgtacgcgaaacc

SEQ ID NO: 23179 - DNA, 760 bp, Artificial Sequence
  chemically treated genomic DNA (Homo sapiens) CpG-island No: 23179
tatatagttgtttttttcgtgtttaatttgtttgtgatagaaattaagggggtttcggtatttagtatttaggcggtggaatcggggttttacgtacggtttcgcgggtaggttttcggttaggattcgcggggagttacgtagttaggagggtggggttgtttatcgatttaggacgcggtaacggatcggggagggcggagttttagcgatcgttttttttttcgttcgtcggtattttttggtttttatttggtttcggcgcggtttgcgagttagcgaggttcgcgcggtgaagtattgttcgagtttcgagttcgagtttttttggttgtagtagttattgttcgtcgtgttgttttaggttatttcgaaagaaggcgttttcgtttcgtttatagtcgtattcgttcgttttttagttttgcgcgttcgtagtcgttaattatcgtttcggtcgcgtgcgtgcgtgtacgcgtgttagtgtgcgcgtgcgttcgggttagagtcgcgtcgtaatcgttaagattgaaacgtagatcgtcgggatttagtttttgttttattggggtaggaacgtcggggcggggatacgtacgtttcgtttttaggaatgattttatcgtttcggagttttatttatagattttatttattatagggaacgggggcgggtgttagcgttcgggtaagcgtataagagtggtttttggtcggaggcgagggcgggaaggtgcgggaagtgcgcgtgcgcggagtt

SEQ ID NO: 23180 - DNA, 760 bp, Artificial Sequence
  chemically treated genomic DNA (Homo sapiens) CpG-island No: 23180
aactccgcgcacgcgcacttcccgcaccttcccgccctcgcctccgaccaaaaaccactcttatacgcttacccgaacgctaacacccgcccccgttccctataataaataaaatctataaataaaactccgaaacgataaaatcattcctaaaaacgaaacgtacgtatccccgccccgacgttcctaccccaataaaacaaaaactaaatcccgacgatctacgtttcaatcttaacgattacgacgcgactctaacccgaacgcacgcgcacactaacacgcgtacacgcacgcacgcgaccgaaacgataattaacgactacgaacgcgcaaaactaaaaaacgaacgaatacgactataaacgaaacgaaaacgccttctttcgaaataacctaaaacaacacgacgaacaataactactacaaccaaaaaaactcgaactcgaaactcgaacaatacttcaccgcgcgaacctcgctaactcgcaaaccgcgccgaaaccaaataaaaaccaaaaaataccgacgaacgaaaaaaaaaacgatcgctaaaactccgccctccccgatccgttaccgcgtcctaaatcgataaacaaccccaccctcctaactacgtaactccccgcgaatcctaaccgaaaacctacccgcgaaaccgtacgtaaaaccccgattccaccgcctaaatactaaataccgaaacccccttaatttctatcacaaacaaattaaacacgaaaaaaacaactatata

SEQ ID NO: 23181 - DNA, 595 bp, Artificial Sequence
  chemically treated genomic DNA (Homo sapiens) CpG-island No: 23181
atgcggatttttcggtcgtcgtcgtacgaggttagtagggttttcgcggggttttaggttaggaattagtagcgggagttcgggtgcgtcgggatacggtttagtagtattagcgagttttttatgtcggttcgacgtagggggaggtgggggcgggtagagttcgttgagtagatagcgggttttatcgcgcgcgtttgcgtatcgtttattttaggttttcgcggtcgatagaggttttcgttttcgtcggaggatttgggtcgtttcggaaatttaattgtttattgttgcggtcgttatattttttgggagttgtagtcgttttttttatttcggtagggaaagtatcgcgggatcgtttcgagttattagtttcgtgaggttttgcgtagagtcggcggcgcgtttaggttgtgacgcgcgcgggggacggggcggggagtcggaggaggcggaggtagaggaggaggaagtcggaagtgtatcggtttcgggtttgttcgggcgttgcgggattggggtttgggaacgttcggttttcggtagtcgagaagttcgtgattgggttgagtagtattattttagttttggg

SEQ ID NO: 23182 - DNA, 595 bp, Artificial Sequence
  chemically treated genomic DNA (Homo sapiens) CpG-island No: 23182
cccaaaactaaaataatactactcaacccaatcacgaacttctcgactaccgaaaaccgaacgttcccaaaccccaatcccgcaacgcccgaacaaacccgaaaccgatacacttccgacttcctcctcctctacctccgcctcctccgactccccgccccgtcccccgcgcgcgtcacaacctaaacgcgccgccgactctacgcaaaacctcacgaaactaataactcgaaacgatcccgcgatactttccctaccgaaataaaaaaaacgactacaactcccaaaaaatataacgaccgcaacaataaacaattaaatttccgaaacgacccaaatcctccgacgaaaacgaaaacctctatcgaccgcgaaaacctaaaataaacgatacgcaaacgcgcgcgataaaacccgctatctactcaacgaactctacccgcccccacctccccctacgtcgaaccgacataaaaaactcgctaatactactaaaccgtatcccgacgcacccgaactcccgctactaattcctaacctaaaaccccgcgaaaaccctactaacctcgtacgacgacgaccgaaaaatccgcat

SEQ ID NO: 23183 - DNA, 595 bp, Artificial Sequence
  chemically treated genomic DNA (Homo sapiens) CpG-island No: 23183
tttagggttgggatggtgttgtttagtttagttacgggtttttcggttgtcgggggtcgagcgtttttaggttttaatttcgtaacgttcggatagattcggggtcgatgtattttcggttttttttttttttgttttcgtttttttcggtttttcgtttcgtttttcgcgcgcgttatagtttgggcgcgtcgtcggttttgcgtagggttttacgggattggtagttcgaggcggtttcgcgatgttttttttgtcgaggtgaggggagcgattataatttttagagggtatggcggtcgtagtagtgggtagttgagttttcggggcgatttaggtttttcggcggaagcgggagtttttgtcggtcgcggaagtttggagtgggcggtacgtagacgcgcgcggtgagattcgttgtttgtttagcggattttgttcgtttttatttttttttgcgtcgggtcgatatgaaggattcgttggtgttgttgggtcgtgtttcggcgtattcggattttcgttgttggtttttggtttggaatttcgcggggattttgttggtttcgtgcggcggcgatcggagaattcgtat

SEQ ID NO: 23184 - DNA, 595 bp, Artificial Sequence
  chemically treated genomic DNA (Homo sapiens) CpG-island No: 23184
atacgaattctccgatcgccgccgcacgaaaccaacaaaatccccgcgaaattccaaaccaaaaaccaacaacgaaaatccgaatacgccgaaacacgacccaacaacaccaacgaatccttcatatcgacccgacgcaaaaaaaaataaaaacgaacaaaatccgctaaacaaacaacgaatctcaccgcgcgcgtctacgtaccgcccactccaaacttccgcgaccgacaaaaactcccgcttccgccgaaaaacctaaatcgccccgaaaactcaactacccactactacgaccgccataccctctaaaaattataatcgctcccctcacctcgacaaaaaaaacatcgcgaaaccgcctcgaactaccaatcccgtaaaaccctacgcaaaaccgacgacgcgcccaaactataacgcgcgcgaaaaacgaaacgaaaaaccgaaaaaaacgaaaacaaaaaaaaaaaaaaccgaaaatacatcgaccccgaatctatccgaacgttacgaaattaaaacctaaaaacgctcgacccccgacaaccgaaaaacccgtaactaaactaaacaacaccatcccaaccctaaa

SEQ ID NO: 23185 - DNA, 704 bp, Artificial Sequence
  chemically treated genomic DNA (Homo sapiens) CpG-island No: 23185
agtcgggcgcgttaaggagacgtcggaacgcggcggggacgcgcgggcgtcgagcggggaggcgcgggttggcgcggtcggaggggcgttcgggttggcgagggggagaaggaggacgacgaaggggcggggaggttcgtcgagattaaggagtcgtcgggagtcgggtcgaaacgcgtcgtcgtcgttgtcgttgttattaaaatagtttgaggcggagggaggcgagttttgtcgggagggaggggggtcggggtcgggcggaggaagggcggcggagggatacggtttcggggtcgcgttatcgtcgtttcgttcgtttcgtcgcgtcggtcgttggagcgagcgttattcgggttatttggttgcggcgaacggcgagattcggtggttatcgcgggatttcgaggagttgcggtcgttgagcgtatcggagggcgggcgcgtcgaggcgtcgggtgggagcggaggtgcggatagggattttttatcggaagtcggaggggttagacggaagtagaacgtgaggtggtttcggggtcgggagggatacgtgaggagcgggcggcgcgttgggttgttttttcgggggtcgggtgagggttaggcggcggtttttattcggattcgttttttttaaggcgggtttgtttttcggggagggcgtgtcggttttagtttttggggtttgtttggtgtggagg

SEQ ID NO: 23186 - DNA, 704 bp, Artificial Sequence
  chemically treated genomic DNA (Homo sapiens) CpG-island No: 23186
cctccacaccaaacaaaccccaaaaactaaaaccgacacgccctccccgaaaaacaaacccgccttaaaaaaaacgaatccgaataaaaaccgccgcctaaccctcacccgacccccgaaaaaacaacccaacgcgccgcccgctcctcacgtatccctcccgaccccgaaaccacctcacgttctacttccgtctaacccctccgacttccgataaaaaatccctatccgcacctccgctcccacccgacgcctcgacgcgcccgccctccgatacgctcaacgaccgcaactcctcgaaatcccgcgataaccaccgaatctcgccgttcgccgcaaccaaataacccgaataacgctcgctccaacgaccgacgcgacgaaacgaacgaaacgacgataacgcgaccccgaaaccgtatccctccgccgcccttcctccgcccgaccccgacccccctccctcccgacaaaactcgcctccctccgcctcaaactattttaataacaacgacaacgacgacgacgcgtttcgacccgactcccgacgactccttaatctcgacgaacctccccgccccttcgtcgtcctccttctccccctcgccaacccgaacgcccctccgaccgcgccaacccgcgcctccccgctcgacgcccgcgcgtccccgccgcgttccgacgtctccttaacgcgcccgact

SEQ ID NO: 23187 - DNA, 704 bp, Artificial Sequence
  chemically treated genomic DNA (Homo sapiens) CpG-island No: 23187
tttttatattaggtaggttttagaggttgagatcgatacgtttttttcgaagggtagattcgttttgaggaaggcggattcgggtagggatcgtcgtttggtttttattcgattttcgagaaagtaatttagcgcgtcgttcgttttttacgtgtttttttcggtttcggggttattttacgttttgttttcgtttgattttttcgattttcggtaaagagtttttattcgtattttcgtttttattcggcgtttcggcgcgttcgtttttcgatgcgtttagcggtcgtagtttttcggagtttcgcggtggttatcgagtttcgtcgttcgtcgtagttaggtggttcgggtggcgttcgttttagcggtcggcgcggcggagcgggcggggcggcggtggcgcggtttcgggatcgtattttttcgtcgtttttttttcgttcggtttcggtttttttttttttcggtagagttcgttttttttcgttttagattgttttggtagtaacggtaacggcggcggcgcgtttcggttcggttttcggcggttttttggtttcggcgggttttttcgttttttcgtcgttttttttttttttttcgttagttcgggcgttttttcggtcgcgttaattcgcgttttttcgttcggcgttcgcgcgttttcgtcgcgtttcggcgtttttttggcgcgttcggtt

SEQ ID NO: 23188 - DNA, 704 bp, Artificial Sequence
  chemically treated genomic DNA (Homo sapiens) CpG-island No: 23188
aaccgaacgcgccaaaaaaacgccgaaacgcgacgaaaacgcgcgaacgccgaacgaaaaaacgcgaattaacgcgaccgaaaaaacgcccgaactaacgaaaaaaaaaaaaaaaacgacgaaaaaacgaaaaaacccgccgaaaccaaaaaaccgccgaaaaccgaaccgaaacgcgccgccgccgttaccgttactaccaaaacaatctaaaacgaaaaaaaacgaactctaccgaaaaaaaaaaaaaccgaaaccgaacgaaaaaaaaacgacgaaaaaatacgatcccgaaaccgcgccaccgccgccccgcccgctccgccgcgccgaccgctaaaacgaacgccacccgaaccacctaactacgacgaacgacgaaactcgataaccaccgcgaaactccgaaaaactacgaccgctaaacgcatcgaaaaacgaacgcgccgaaacgccgaataaaaacgaaaatacgaataaaaactctttaccgaaaatcgaaaaaatcaaacgaaaacaaaacgtaaaataaccccgaaaccgaaaaaaacacgtaaaaaacgaacgacgcgctaaattactttctcgaaaatcgaataaaaaccaaacgacgatccctacccgaatccgccttcctcaaaacgaatctacccttcgaaaaaaacgtatcgatctcaacctctaaaacctacctaatataaaaa

SEQ ID NO: 23189 - DNA, 824 bp, Artificial Sequence
  chemically treated genomic DNA (Homo sapiens) CpG-island No: 23189
ttttagacgtattgttggtcgtattgttgagttgtattattttttttttcgtcgtatttgtatttttaagcgttacggcggatgtaatattttttgttcgtttagttgttgtttcggcgcgcgttgtcgcggatttcgtcgtatttttgttttgagttgtcgtcgtcgtattgttagtagtttttgtcgttttcgtggatgtcgtcgtggcgttgtttttcgttgttgacgtttgtttggtcgttttattttttgaagtagacgtcgatgatgtcgatgacgtcgtcgaattggttgacgatgcggtagtcgtttttgaggattttgcgtttgttttcgacgttttcgcgttcgtttcggatgttttcgttgcggaagtagatttcgttgttgcgttggtttgtttagtggtttcgttagttttcgttgtggttgttgaagtagacgatgcggcgttttttgtcgatttttcggcggcggtggtattggttgatgttttttcggtatttgttgacgttgtattggtagacgacgtagtcgttgtttttgagtttttcgtagtcgaggcgttttgtttcgttgtcgttttagaagatttggcgttcgtttcggacgttttttcgttttcgcggaattttttgtcgtcgtttgtcgaggaagttgtattattggcgtttgatgattcgtttcgttcggatgatttttatcgtttttttttaaggtcgtcgtaattcggtgtcgaggtttgtatttttttgaattttttcgttgttttcggtgtgatttaaatgttggtttgttgattttaaaattaattcgtgaat

SEQ ID NO: 23190 - DNA, 824 bp, Artificial Sequence
  chemically treated genomic DNA (Homo sapiens) CpG-island No: 23190
attcacgaattaattttaaaatcaacaaaccaacatttaaatcacaccgaaaacaacgaaaaaattcaaaaaaatacaaacctcgacaccgaattacgacgaccttaaaaaaaaacgataaaaatcatccgaacgaaacgaatcatcaaacgccaataatacaacttcctcgacaaacgacgacaaaaaattccgcgaaaacgaaaaaacgtccgaaacgaacgccaaatcttctaaaacgacaacgaaacaaaacgcctcgactacgaaaaactcaaaaacaacgactacgtcgtctaccaatacaacgtcaacaaataccgaaaaaacatcaaccaataccaccgccgccgaaaaatcgacaaaaaacgccgcatcgtctacttcaacaaccacaacgaaaactaacgaaaccactaaacaaaccaacgcaacaacgaaatctacttccgcaacgaaaacatccgaaacgaacgcgaaaacgtcgaaaacaaacgcaaaatcctcaaaaacgactaccgcatcgtcaaccaattcgacgacgtcatcgacatcatcgacgtctacttcaaaaaataaaacgaccaaacaaacgtcaacaacgaaaaacaacgccacgacgacatccacgaaaacgacaaaaactactaacaatacgacgacgacaactcaaaacaaaaatacgacgaaatccgcgacaacgcgcgccgaaacaacaactaaacgaacaaaaaatattacatccgccgtaacgcttaaaaatacaaatacgacgaaaaaaaaaataatacaactcaacaatacgaccaacaatacgtctaaaa

SEQ ID NO: 23191 - DNA, 824 bp, Artificial Sequence
  chemically treated genomic DNA (Homo sapiens) CpG-island No: 23191
gtttacgggttaattttaaaattagtaggttaatatttggattatatcggggataacggagggatttagaaagatgtagatttcggtatcggattacggcggttttaaaagaaagcggtaaaaattattcgaacggaacgaattattaagcgttagtagtgtagttttttcggtaaacggcggtaggaaatttcgcgaaggcggaaaaacgttcgagacgaacgttaagttttttgaaacggtaacgggatagagcgtttcggttgcggaaggtttaaaaatagcggttgcgtcgtttgttagtgtagcgttaataagtgtcgggaaagtattagttagtgttatcgtcgtcgggaaatcggtagaaagcgtcgtatcgtttgttttaatagttataacgaaggttggcgaagttattgaataggttagcgtagtagcgaggtttgttttcgtagcgaagatattcgaaacgaacgcgaaagcgtcggaaataagcgtagaatttttaaaaacggttgtcgtatcgttagttagttcggcggcgttatcggtattatcggcgtttgttttaaaagatgaggcgattagataagcgttagtagcgaagagtagcgttacgacggtatttacgaaggcgatagaggttgttggtagtgcgacggcggtagtttagagtaaaagtacggcggaattcgcggtaacgcgcgtcgagatagtagttaaacgggtagaggatattgtattcgtcgtggcgtttgaggatgtaagtacgacgaaaaaggggatagtatagtttagtagtgcgattaatagtacgtttgaaa

SEQ ID NO: 23192 - DNA, 824 bp, Artificial Sequence
  chemically treated genomic DNA (Homo sapiens) CpG-island No: 23192
tttcaaacgtactattaatcgcactactaaactatactatcccctttttcgtcgtacttacatcctcaaacgccacgacgaatacaatatcctctacccgtttaactactatctcgacgcgcgttaccgcgaattccgccgtacttttactctaaactaccgccgtcgcactaccaacaacctctatcgccttcgtaaataccgtcgtaacgctactcttcgctactaacgcttatctaatcgcctcatcttttaaaacaaacgccgataataccgataacgccgccgaactaactaacgatacgacaaccgtttttaaaaattctacgcttatttccgacgctttcgcgttcgtttcgaatatcttcgctacgaaaacaaacctcgctactacgctaacctattcaataacttcgccaaccttcgttataactattaaaacaaacgatacgacgctttctaccgatttcccgacgacgataacactaactaatactttcccgacacttattaacgctacactaacaaacgacgcaaccgctatttttaaaccttccgcaaccgaaacgctctatcccgttaccgtttcaaaaaacttaacgttcgtctcgaacgtttttccgccttcgcgaaatttcctaccgccgtttaccgaaaaaactacactactaacgcttaataattcgttccgttcgaataatttttaccgctttcttttaaaaccgccgtaatccgataccgaaatctacatctttctaaatccctccgttatccccgatataatccaaatattaacctactaattttaaaattaacccgtaaac

SEQ ID NO: 23193 - DNA, 522 bp, Artificial Sequence
  chemically treated genomic DNA (Homo sapiens) CpG-island No: 23193
  unsure (361)
gtttttcgttacgttagttgttaaacgtagaaatagcggtaaaagcggcgatttaggttttgattttatgtgtcgatttttcggtaatggcggaaagtttttcgttattgacggtatttagtttttgtatgcgtttttgttttagtaaagttatgaattggttattttaaatcgggttgagcggatgtagcgttttttgatttttaataaattttttagcggcgttaattattcgttgttgacgtaattcgcgtttattggcgggtaaatttttttcgttttttaatagacggtcgcgtatatgggtatcggttttcgttagttcggtacggcggttgatggggaagtttatcgaatttangatagtacgcgtttattgagagtgttgtgaaagttaaatgttttattttatatgcgggtatttgggaatcggggtatcgcgttgcgatatcgtttgatgaattattgtatcgcgtaattatggttatagttgttttttgtgtgaaattgttattcgtttat

SEQ ID NO: 23194 - DNA, 522 bp, Artificial Sequence
  chemically treated genomic DNA (Homo sapiens) CpG-island No: 23194
  unsure (162)
ataaacgaataacaatttcacacaaaaaacaactataaccataattacgcgatacaataattcatcaaacgatatcgcaacgcgataccccgattcccaaatacccgcatataaaataaaacatttaactttcacaacactctcaataaacgcgtactatcntaaattcgataaacttccccatcaaccgccgtaccgaactaacgaaaaccgatacccatatacgcgaccgtctattaaaaaacgaaaaaaatttacccgccaataaacgcgaattacgtcaacaacgaataattaacgccgctaaaaaatttattaaaaatcaaaaaacgctacatccgctcaacccgatttaaaataaccaattcataactttactaaaacaaaaacgcatacaaaaactaaataccgtcaataacgaaaaactttccgccattaccgaaaaatcgacacataaaatcaaaacctaaatcgccgcttttaccgctatttctacgtttaacaactaacgtaacgaaaaac

SEQ ID NO: 23195 - DNA, 522 bp, Artificial Sequence
  chemically treated genomic DNA (Homo sapiens) CpG-island No: 23195
  unsure (162)
gtgagcggataataattttatataggaaatagttatgattatgattacgcggtatagtagtttattaaacggtgtcgtaacgcggtgtttcggtttttaagtattcgtatgtagggtaaagtatttgatttttatagtatttttaataaacgcgtgttgttntgggttcggtgggtttttttattagtcgtcgtgtcgaattggcgaaagtcgatgtttatatgcgcgatcgtttgttggggagcgggaaagatttattcgttagtgagcgcgaattgcgttagtaacgggtgattagcgtcgttgagaagtttgttgaggattagagaacgttgtattcgtttaattcgatttgggataattagtttatgattttgttggagtagggacgtatataggaattggatgtcgttagtaacgaagagtttttcgttattgtcggaaagtcgatatatgaaattaaaatttgggtcgtcgtttttgtcgttatttttgcgtttggtaattggcgtagcgaagggt

SEQ ID NO: 23196 - DNA, 522 bp, Artificial Sequence
  chemically treated genomic DNA (Homo sapiens) CpG-island No: 23196
  unsure (361)
acccttcgctacgccaattaccaaacgcaaaaataacgacaaaaacgacgacccaaattttaatttcatatatcgactttccgacaataacgaaaaactcttcgttactaacgacatccaattcctatatacgtccctactccaacaaaatcataaactaattatcccaaatcgaattaaacgaatacaacgttctctaatcctcaacaaacttctcaacgacgctaatcacccgttactaacgcaattcgcgctcactaacgaataaatctttcccgctccccaacaaacgatcgcgcatataaacatcgactttcgccaattcgacacgacgactaataaaaaaacccaccgaacccanaacaacacgcgtttattaaaaatactataaaaatcaaatactttaccctacatacgaatacttaaaaaccgaaacaccgcgttacgacaccgtttaataaactactataccgcgtaatcataatcataactatttcctatataaaattattatccgctcac

SEQ ID NO: 23197 - DNA, 571 bp, Artificial Sequence
  chemically treated genomic DNA (Homo sapiens) CpG-island No: 23197
cgatacgtgtcgttgttacgtacggtgttagtattagaataacgcggataaacgtgatgattggatttatttagtgatgggtttaggcgttgacgggatatttttagtaggttaaagcgagaaatatggttgatttgaatacgcgtacggttttgacgtatcgttttacgtagacggttttttatcgtacgttggtggcgtattggcgttatgtcgatgaagtcgataataattaggtcgtcgaggttacgtaggcgtattgacgagtaattttatcggtagtttcgaggttagtgttaaacgcggttttttcgatatcgtcgtcgcgggtcgcgcgtgcggagttgatgtcgatggtcgttaacgtttcggtgttgtcgataataatggaattattagacggtagacgaattttacgttggaaggcggattcgatttgtgattcgatttggtagtggttgaatagcgggatttcgtcggtgtatagtttgattttgttgttgaaattcgggcgatttaatgtagcgatatgttgacgtgttagttcgagtattttcgggttatcgataag

SEQ ID NO: 23198 - DNA, 571 bp, Artificial Sequence
  chemically treated genomic DNA (Homo sapiens) CpG-island No: 23198
cttatcgataacccgaaaatactcgaactaacacgtcaacatatcgctacattaaatcgcccgaatttcaacaacaaaatcaaactatacaccgacgaaatcccgctattcaaccactaccaaatcgaatcacaaatcgaatccgccttccaacgtaaaattcgtctaccgtctaataattccattattatcgacaacaccgaaacgttaacgaccatcgacatcaactccgcacgcgcgacccgcgacgacgatatcgaaaaaaccgcgtttaacactaacctcgaaactaccgataaaattactcgtcaatacgcctacgtaacctcgacgacctaattattatcgacttcatcgacataacgccaatacgccaccaacgtacgataaaaaaccgtctacgtaaaacgatacgtcaaaaccgtacgcgtattcaaatcaaccatatttctcgctttaacctactaaaaatatcccgtcaacgcctaaacccatcactaaataaatccaatcatcacgtttatccgcgttattctaatactaacaccgtacgtaacaacgacacgtatcg

SEQ ID NO: 23199 - DNA, 571 bp, Artificial Sequence
  chemically treated genomic DNA (Homo sapiens) CpG-island No: 23199
tttatcgataattcgaaagtgttcgaattggtacgttagtatatcgttgtattaggtcgttcggattttagtagtaaaattaaattgtatatcggcgagatttcgttgtttagttattattagatcgagttatagatcgagttcgttttttagcgtgaagttcgtttgtcgtttggtggttttattgttatcgatagtatcgaagcgttaacggttatcgatattaatttcgtacgcgcgattcgcggcggcgatatcgaagaaatcgcgtttaatattaatttcgaagttgtcgatgagattgttcgttagtgcgtttgcgtgatttcggcggtttgattgttatcgattttatcgatatgacgttagtacgttattagcgtgcggtagaaaatcgtttgcgtgaagcggtgcgttaggatcgtgcgcgtatttaaattagttatatttttcgttttggtttgttggaaatgtttcgttagcgtttgagtttattattgggtgaatttagttattacgtttgttcgcgttgttttggtattggtatcgtgcgtgataacgatacgtgtcg

SEQ ID NO: 23200 - DNA, 571 bp, Artificial Sequence
  chemically treated genomic DNA (Homo sapiens) CpG-island No: 23200
cgacacgtatcgttatcacgcacgataccaataccaaaacaacgcgaacaaacgtaataactaaattcacccaataataaactcaaacgctaacgaaacatttccaacaaaccaaaacgaaaaatataactaatttaaatacgcgcacgatcctaacgcaccgcttcacgcaaacgattttctaccgcacgctaataacgtactaacgtcatatcgataaaatcgataacaatcaaaccgccgaaatcacgcaaacgcactaacgaacaatctcatcgacaacttcgaaattaatattaaacgcgatttcttcgatatcgccgccgcgaatcgcgcgtacgaaattaatatcgataaccgttaacgcttcgatactatcgataacaataaaaccaccaaacgacaaacgaacttcacgctaaaaaacgaactcgatctataactcgatctaataataactaaacaacgaaatctcgccgatatacaatttaattttactactaaaatccgaacgacctaatacaacgatatactaacgtaccaattcgaacactttcgaattatcgataaa

SEQ ID NO: 23201 - DNA, 695 bp, Artificial Sequence
  chemically treated genomic DNA (Homo sapiens) CpG-island No: 23201
  unsure (469)
taatttgcggacgcgtcgtagttatatcggatgcgattatggcgtttttgtaggtttttagcgtttgcgttggatcgttcgtttgcgttttaaatttcgtattattacgtagtattatcgcgttttttatcgacggtggttgagattttgtttgcgggattaatttattaaacgttcgttgcgttgttgcggtatcgttaagttgcgtttgtgttagcgttacgcgtcgttgtgtgtttagcgaggcgttatcggtagcgggtagtttcgttagttggttacgtgtcgtcgttttgttatcggtagtaatatttattttcgttagattaagaatggcgtcggcgttagttggttttcgcgttaggatattttgatatgtagcgcgggcggcggtgtaattacgtcgttgttgcgtttagttagttagcgtgaggttaatacgcgtggaaggtggttgttggcgtagtantgttttcgtttttgtttttttgtcgttttttcgtaggcggttagcggtttttagtatttgatcgttttgtagtcgattaattagtttttgaatattgttgttttattgcgtacgcggtaggttattgatatgcgttacgtcgttttgttttggttatgatagagaggtatagtcgtaagcgtaatttgttcgggtcgtcgatttttgtgcgttagatgcgtattaa

SEQ ID NO: 23202 - DNA, 695 bp, Artificial Sequence
  chemically treated genomic DNA (Homo sapiens) CpG-island No: 23202
  unsure (227)
ttaatacgcatctaacgcacaaaaatcgacgacccgaacaaattacgcttacgactatacctctctatcataaccaaaacaaaacgacgtaacgcatatcaataacctaccgcgtacgcaataaaacaacaatattcaaaaactaattaatcgactacaaaacgatcaaatactaaaaaccgctaaccgcctacgaaaaaacgacaaaaaaacaaaaacgaaaacantactacgccaacaaccaccttccacgcgtattaacctcacgctaactaactaaacgcaacaacgacgtaattacaccgccgcccgcgctacatatcaaaatatcctaacgcgaaaaccaactaacgccgacgccattcttaatctaacgaaaataaatattactaccgataacaaaacgacgacacgtaaccaactaacgaaactacccgctaccgataacgcctcgctaaacacacaacgacgcgtaacgctaacacaaacgcaacttaacgataccgcaacaacgcaacgaacgtttaataaattaatcccgcaaacaaaatctcaaccaccgtcgataaaaaacgcgataatactacgtaataatacgaaatttaaaacgcaaacgaacgatccaacgcaaacgctaaaaacctacaaaaacgccataatcgcatccgatataactacgacgcgtccgcaaatta

SEQ ID NO: 23203 - DNA, 695 bp, Artificial Sequence
  chemically treated genomic DNA (Homo sapiens) CpG-island No: 23203
  unsure (227)
ttaatgcgtatttggcgtatagaaatcgacgattcgggtaggttacgtttacggttgtatttttttgttatgattaggatagagcggcgtggcgtatattaatagtttgtcgcgtgcgtagtggaatagtaatatttaggagttggttaatcgattgtaaagcgattaggtgttggaaatcgttaatcgtttgcgagaaagcggtaaagaggtagaagcggaagtantgttgcgttagtaattattttttacgcgtattgattttacgttggttgattgggcgtaataacgacgtgattatatcgtcgttcgcgttgtatattagaatgttttgacgcgggagttagttaacgtcgacgttatttttggtttgacggaagtggatattgttgtcggtgataaagcggcggtacgtagttagttggcgaaattgttcgttatcgataacgtttcgttgaatatatagcggcgcgtggcgttggtataggcgtagtttggcgatatcgtagtagcgtagcggacgtttaataagttgatttcgtaggtaaaattttagttatcgtcgatggaaagcgcgatggtgttgcgtgatggtgcgaagtttgaagcgtaggcgggcgatttaacgtaggcgttggaaatttataaagacgttatggtcgtattcggtgtgattacgacgcgttcgtagatta

SEQ ID NO: 23204 - DNA, 695 bp, Artificial Sequence
  chemically treated genomic DNA (Homo sapiens) CpG-island No: 23204
  unsure (469)
taatctacgaacgcgtcgtaatcacaccgaatacgaccataacgtctttataaatttccaacgcctacgttaaatcgcccgcctacgcttcaaacttcgcaccatcacgcaacaccatcgcgctttccatcgacgataactaaaattttacctacgaaatcaacttattaaacgtccgctacgctactacgatatcgccaaactacgcctataccaacgccacgcgccgctatatattcaacgaaacgttatcgataacgaacaatttcgccaactaactacgtaccgccgctttatcaccgacaacaatatccacttccgtcaaaccaaaaataacgtcgacgttaactaactcccgcgtcaaaacattctaatatacaacgcgaacgacgatataatcacgtcgttattacgcccaatcaaccaacgtaaaatcaatacgcgtaaaaaataattactaacgcaacantacttccgcttctacctctttaccgctttctcgcaaacgattaacgatttccaacacctaatcgctttacaatcgattaaccaactcctaaatattactattccactacgcacgcgacaaactattaatatacgccacgccgctctatcctaatcataacaaaaaaatacaaccgtaaacgtaacctacccgaatcgtcgatttctatacgccaaatacgcattaa

SEQ ID NO: 23205 - DNA, 528 bp, Artificial Sequence
  chemically treated genomic DNA (Homo sapiens) CpG-island No: 23205
acgcgttaagtttttgggttagaaaaaaaaaaaaaaaacgggtcgggattggtttaggttgggggaggcgggtttacgacgagatacgattttttattggtttattcgttaggattttgtttaatcgacgcgatcgttttttttagaagattttcgtttttttttcgtcggcggtcgcggaggcggaagaaggcgttttttcgtcgttttagtaatcgttagcggattttcgtcgttcgggtaattgttttaggtttttcgttagtttttgtttgggttttttcggttattcggataatcgttattcgtttcggttaattattaattcgtttttcgttatttcggtaattatcgtcggatttatttatttttggacgtcgttttggttttgttcgtaggttttttcgttttaaattttcgtcgcgggtttcgacgttcgcgattttacgttttaggggtttttttttttttttgttcgttttttcgttttttcggggcggggggtattgttttttttttggtaggggg

SEQ ID NO: 23206 - DNA, 528 bp, Artificial Sequence
  chemically treated genomic DNA (Homo sapiens) CpG-island No: 23206
ccccctaccaaaaaaaaaacaataccccccgccccgaaaaaacgaaaaaacgaacaaaaaaaaaaaaaaacccctaaaacgtaaaatcgcgaacgtcgaaacccgcgacgaaaatttaaaacgaaaaaacctacgaacaaaaccaaaacgacgtccaaaaataaataaatccgacgataattaccgaaataacgaaaaacgaattaataattaaccgaaacgaataacgattatccgaataaccgaaaaaacccaaacaaaaactaacgaaaaacctaaaacaattacccgaacgacgaaaatccgctaacgattactaaaacgacgaaaaaacgccttcttccgcctccgcgaccgccgacgaaaaaaaaacgaaaatcttctaaaaaaaacgatcgcgtcgattaaacaaaatcctaacgaataaaccaataaaaaatcgtatctcgtcgtaaacccgcctcccccaacctaaaccaatcccgacccgttttttttttttttttctaacccaaaaacttaacgcgt

SEQ ID NO: 23207 - DNA, 528 bp, Artificial Sequence
  chemically treated genomic DNA (Homo sapiens) CpG-island No: 23207
ttttttgttaggggaggagtaatgtttttcgtttcggggaggcgagaagacgggtaggaggaggagggagtttttgagacgtggggtcgcggacgtcggagttcgcggcggaggtttggggcgaggaggtttgcggataggattaggacggcgtttaggggtaggtgggttcggcgatggttgtcggggtgacgggggacgggttgatggttgatcggaacgggtagcggttgttcgagtgatcggaggggtttaggtaaaggttgacgggaggtttgggatagttgttcgggcgacggagattcgttgacggttgttagggcgacggaaaggcgttttttttcgttttcgcggtcgtcggcgggagggaggcgggggttttttggggaagacgatcgcgtcgattgggtagagttttggcgagtaagttaatagaaaatcgtgtttcgtcgtagattcgttttttttagtttgagttaatttcggttcgttttttttttttttttttggtttaagggtttggcgcgt

SEQ ID NO: 23208 - DNA, 528 bp, Artificial Sequence
  chemically treated genomic DNA (Homo sapiens) CpG-island No: 23208
acgcgccaaacccttaaaccaaaaaaaaaaaaaaaaaacgaaccgaaattaactcaaactaaaaaaaacgaatctacgacgaaacacgattttctattaacttactcgccaaaactctacccaatcgacgcgatcgtcttccccaaaaaacccccgcctccctcccgccgacgaccgcgaaaacgaaaaaaaacgcctttccgtcgccctaacaaccgtcaacgaatctccgtcgcccgaacaactatcccaaacctcccgtcaacctttacctaaacccctccgatcactcgaacaaccgctacccgttccgatcaaccatcaacccgtcccccgtcaccccgacaaccatcgccgaacccacctacccctaaacgccgtcctaatcctatccgcaaacctcctcgccccaaacctccgccgcgaactccgacgtccgcgaccccacgtctcaaaaactccctcctcctcctacccgtcttctcgcctccccgaaacgaaaaacattactcctcccctaacaaaaaa

SEQ ID NO: 23209 - DNA, 532 bp, Artificial Sequence
  chemically treated genomic DNA (Homo sapiens) CpG-island No: 23209
ttacgcgatttcgtagtttcgatagcgttttcgtgcgattattttgaggtttaggaaatcgtgtttatttagcgaggggtcgtttaggtaggcgggggacgcgtttcgacggcgttcgtagtagtcgcgtcggggtcggtatagtacgtgcgtgagcgttatgtagtcgtagatcgtcgcggttattagcgttatcgagaatattaggttttatatgaaggcgcgtagtagttttagcgataggcgcgacggcgttagtagcgcggttattattagtttcggtatgtcgtcgcgtttcgggattacggcggcgttgtcggttaggggtatttgtagtagcggcgaagcggtgttagggtttaggggtttatcgtttttggtttggggttttttcgtgtcgtcgggatttgtgggacgcgttgaaggaagaggcgggcggtttcgatagaaaatagttagagcgtattatttatttgagtgttaggtaaatatttgggcgcgatagggataggaaataagggtagggtgcgga

SEQ ID NO: 23210 - DNA, 532 bp, Artificial Sequence
  chemically treated genomic DNA (Homo sapiens) CpG-island No: 23210
tccgcaccctacccttatttcctatccctatcgcgcccaaatatttacctaacactcaaataaataatacgctctaactattttctatcgaaaccgcccgcctcttccttcaacgcgtcccacaaatcccgacgacacgaaaaaaccccaaaccaaaaacgataaacccctaaaccctaacaccgcttcgccgctactacaaatacccctaaccgacaacgccgccgtaatcccgaaacgcgacgacataccgaaactaataataaccgcgctactaacgccgtcgcgcctatcgctaaaactactacgcgccttcatataaaacctaatattctcgataacgctaataaccgcgacgatctacgactacataacgctcacgcacgtactataccgaccccgacgcgactactacgaacgccgtcgaaacgcgtcccccgcctacctaaacgacccctcgctaaataaacacgatttcctaaacctcaaaataatcgcacgaaaacgctatcgaaactacgaaatcgcgtaa

SEQ ID NO: 23211 - DNA, 532 bp, Artificial Sequence
  chemically treated genomic DNA (Homo sapiens) CpG-island No: 23211
ttcgtattttatttttgttttttgtttttgtcgcgtttaggtgtttatttggtatttaggtgagtggtgcgttttggttgttttttgtcggagtcgttcgtttttttttttagcgcgttttataaatttcgacggtacggaggggttttaggttaagggcgatgggtttttgagttttgatatcgtttcgtcgttgttgtaggtgtttttggtcggtagcgtcgtcgtggtttcggagcgcggcgatatgtcggagttggtggtgatcgcgttgttggcgtcgtcgcgtttgtcgttgaagttgttgcgcgtttttatgtggagtttggtgttttcggtggcgttggtggtcgcggcggtttacggttgtatagcgtttacgtacgtgttgtgtcggtttcggcgcggttgttgcgggcgtcgtcggagcgcgtttttcgtttgtttgagcgatttttcgttgggtgagtacggttttttgaattttaaggtgatcgtacgggggcgttatcggggttgcggggtcgcgtgg

SEQ ID NO: 23212 - DNA, 532 bp, Artificial Sequence
  chemically treated genomic DNA (Homo sapiens) CpG-island No: 23212
ccacgcgaccccgcaaccccgataacgcccccgtacgatcaccttaaaattcaaaaaaccgtactcacccaacgaaaaatcgctcaaacaaacgaaaaacgcgctccgacgacgcccgcaacaaccgcgccgaaaccgacacaacacgtacgtaaacgctatacaaccgtaaaccgccgcgaccaccaacgccaccgaaaacaccaaactccacataaaaacgcgcaacaacttcaacgacaaacgcgacgacgccaacaacgcgatcaccaccaactccgacatatcgccgcgctccgaaaccacgacgacgctaccgaccaaaaacacctacaacaacgacgaaacgatatcaaaactcaaaaacccatcgcccttaacctaaaacccctccgtaccgtcgaaatttataaaacgcgctaaaaaaaaaaacgaacgactccgacaaaaaacaaccaaaacgcaccactcacctaaataccaaataaacacctaaacgcgacaaaaacaaaaaacaaaaataaaatacgaa

SEQ ID NO: 23213 - DNA, 902 bp, Artificial Sequence
  chemically treated genomic DNA (Homo sapiens) CpG-island No: 23213
tttcgtcgcgcgttggttacgttttttcgagcgcgggtggaggattgcggattgtaaacgtttcggttaatagtcgagttcgatattagttcgcgggagggggcggaatcgagatagattcggtttttagtttatgaatataagacgtaggcgcgttttttgattggtttaggatgtgtagggggcggggttcggcggaagcgtatataaggtcgggttcggggacgttttttttttattcgcgcgttaggaggttcgggtcgttgtggtgcgttgttttttcgtttgcgttagggatttgttcgatttagtggtgagggttttggttgtatcggtttcgaggagttcggggcggcgggcggtttgcggcggttaggcgaggcggggtcgtagcggtacgtttttgggagggggcgggttcggggtggagttcgtttcgtcggcggcgagggatagcgggagattgggtcgagtagcggttagagggttttttttcgtcggttcgggtcgtcggcgattcggttgtcgtcgtaaaatggcggtcgcgagttcgaggttgtgtttagcgaaatggcgggagcgtcgagttttcggatggagtggcgtagggtgcgcgcggggcgtatgcgtacgcggcgggggcggggttacgtggcgttttcggtttttagggtcgttttttcggttttggggttggaggtatttatatattaacgtttttgtttatcgagttttagtttttttttttttttattgcgattgtatgagggaaaggacggtttcgtaaattttgggtaggcgtggttcgttttagtgtggtttttcgtttgttacgtcgtgttttgcgtttaaagtttggtttaagttggtatagtttttagtgttagatttttaagtttagt

SEQ ID NO: 23214 - DNA, 902 bp, Artificial Sequence
  chemically treated genomic DNA (Homo sapiens) CpG-island No: 23214
actaaacttaaaaatctaacactaaaaactataccaacttaaaccaaactttaaacgcaaaacacgacgtaacaaacgaaaaaccacactaaaacgaaccacgcctacccaaaatttacgaaaccgtcctttccctcatacaatcgcaataaaaaaaaaaaaaaactaaaactcgataaacaaaaacgttaatatataaatacctccaaccccaaaaccgaaaaaacgaccctaaaaaccgaaaacgccacgtaaccccgcccccgccgcgtacgcatacgccccgcgcgcaccctacgccactccatccgaaaactcgacgctcccgccatttcgctaaacacaacctcgaactcgcgaccgccattttacgacgacaaccgaatcgccgacgacccgaaccgacgaaaaaaaaccctctaaccgctactcgacccaatctcccgctatccctcgccgccgacgaaacgaactccaccccgaacccgccccctcccaaaaacgtaccgctacgaccccgcctcgcctaaccgccgcaaaccgcccgccgccccgaactcctcgaaaccgatacaaccaaaaccctcaccactaaatcgaacaaatccctaacgcaaacgaaaaaacaacgcaccacaacgacccgaacctcctaacgcgcgaataaaaaaaaaacgtccccgaacccgaccttatatacgcttccgccgaaccccgccccctacacatcctaaaccaatcaaaaaacgcgcctacgtcttatattcataaactaaaaaccgaatctatctcgattccgccccctcccgcgaactaatatcgaactcgactattaaccgaaacgtttacaatccgcaatcctccacccgcgctcgaaaaaacgtaaccaacgcgcgacgaaa

SEQ ID NO: 23215 - DNA, 902 bp, Artificial Sequence
  chemically treated genomic DNA (Homo sapiens) CpG-island No: 23215
attagatttggaagtttggtattgggagttgtgttaatttggattaaattttgggcgtaaagtacgacgtggtagacgaggaattatattagaacgggttacgtttatttaagatttacgaggtcgtttttttttttatgtaatcgtaatgggaaaaggaggaaattaaggttcggtaagtaaaagcgttggtgtgtggatatttttagttttaaggtcgggaaagcggttttggagatcgggggcgttacgtggtttcgttttcgtcgcgtgcgtatgcgtttcgcgcgtattttgcgttattttattcgggaattcggcgttttcgttatttcgttgggtatagtttcgagttcgcggtcgttattttgcggcggtaatcgggtcgtcggcggttcggatcggcggggagaggttttttggtcgttattcggtttaatttttcgttgtttttcgtcgtcggcggggcggattttatttcgggttcgtttttttttaggggcgtgtcgttgcggtttcgtttcgtttggtcgtcgtaggtcgttcgtcgtttcgagtttttcggagtcggtgtagttagggtttttattattgagtcgggtaggtttttgacgtaagcgggaagatagcgtattataacgattcgagttttttaacgcgcgagtgaggggggggcgttttcgagttcggttttatatacgttttcgtcgggtttcgttttttatatattttgggttaattagagggcgcgtttgcgttttatatttatgagttgggggtcgagtttatttcggtttcgttttttttcgcggattggtgtcgggttcgattattggtcgagacgtttgtagttcgtagttttttattcgcgttcgagggggcgtgattagcgcgcggcgggg

SEQ ID NO: 23216 - DNA, 902 bp, Artificial Sequence
  chemically treated genomic DNA (Homo sapiens) CpG-island No: 23216
ccccgccgcgcgctaatcacgccccctcgaacgcgaataaaaaactacgaactacaaacgtctcgaccaataatcgaacccgacaccaatccgcgaaaaaaaacgaaaccgaaataaactcgacccccaactcataaatataaaacgcaaacgcgccctctaattaacccaaaatatataaaaaacgaaacccgacgaaaacgtatataaaaccgaactcgaaaacgcccccccctcactcgcgcgttaaaaaactcgaatcgttataatacgctatcttcccgcttacgtcaaaaacctacccgactcaataataaaaaccctaactacaccgactccgaaaaactcgaaacgacgaacgacctacgacgaccaaacgaaacgaaaccgcaacgacacgcccctaaaaaaaaacgaacccgaaataaaatccgccccgccgacgacgaaaaacaacgaaaaattaaaccgaataacgaccaaaaaacctctccccgccgatccgaaccgccgacgacccgattaccgccgcaaaataacgaccgcgaactcgaaactatacccaacgaaataacgaaaacgccgaattcccgaataaaataacgcaaaatacgcgcgaaacgcatacgcacgcgacgaaaacgaaaccacgtaacgcccccgatctccaaaaccgctttcccgaccttaaaactaaaaatatccacacaccaacgcttttacttaccgaaccttaatttcctccttttcccattacgattacataaaaaaaaaaacgacctcgtaaatcttaaataaacgtaacccgttctaatataattcctcgtctaccacgtcgtactttacgcccaaaatttaatccaaattaacacaactcccaataccaaacttccaaatctaat

SEQ ID NO: 23217 - DNA, 1295 bp, Artificial Sequence
  chemically treated genomic DNA (Homo sapiens) CpG-island No: 23217
acgggttgcggtgcgtcggtagtttacggggcggttagtttttgtttataacgatgtggagttttgtgaaagtcggattcgaataaagggttacgtgtgtatttagaaagtcgagtttgtggtttaggggggtttgtcggcggagcggggttattggaagaaaagtttgcggatttcggtttagcgtacgagtaggattcgatagggaagattgtaagggttattgttcgagtagtgatcgcggggggttcgttattgagggggttcgtagcgcggagattttagtttcgcgggatttgaggcgtattcggtttcgagggagcggcggtcgcgtagtcgttgttaggtttcgttttgggtcgagtttcgggttttttgtagtaggtttgggagcggggcgttatttttttgggttttggacgtggtcgacgcgtttttagtgttcgtgaggtcggggtaggagtggcgggggtcgtttcgaagtgggtgggaatgagcggttcgaggttttgaagtcggggttcgtttcgttttttcgttgttagttcgattttttcggaagtcgcgattttttacgttgggttggtagttttgggttttgtcggttgcgttttgtcgggatttttacgggcgggtttcgggttttcgttttgattttttggagcggttcgacgaagtaagtttcgcggcgggcgcgcggggtattgtgggtagcgtcggggtttattaggcggaggcggggttcggcgttaagtttcgttttcgcgttttattggttggtattattttcgcgcgtttgattgatagcgcgtataggggcggggcgtcgttatcgttttcgtcgggttatggggtcgcgcgtgttgtagtcgtcgttgttgttgtttttgttggcgttgttgttggcggcgttgtcgtgcggtgtcgaagaggtttcgtcgttgcgtttcgcgtaggttacgttgtcgtcgtcgtcggtcgtgacgaacgggagttagtcgggcgcgttatataatagtacgtatacgcgttcgtcgggggcgtcgggttcggcgttgacgcgttttttttacgtgattttgggtttttgcggtttgatcgcgttttattttttgattcgggcgtttaggtgcgttaggcgtacgtgggcgtcgttttttagttttggttaattagcgcgcgtttagtgcgttacgtgtcgggtcgcggggtttttttttttttttttttttttttttttttttttttgttggagtgggcgtgggcggtgttgtgcggggtcgttacgtggtgtg

SEQ ID NO: 23218 - DNA, 1295 bp, Artificial Sequence
  chemically treated genomic DNA (Homo sapiens) CpG-island No: 23218
cacaccacgtaacgaccccgcacaacaccgcccacgcccactccaacaaaaaaaaaaaaaaaaaaaaaaaaaaaaaaaaaaaaaccccgcgacccgacacgtaacgcactaaacgcgcgctaattaaccaaaactaaaaaacgacgcccacgtacgcctaacgcacctaaacgcccgaatcaaaaaataaaacgcgatcaaaccgcaaaaacccaaaatcacgtaaaaaaaacgcgtcaacgccgaacccgacgcccccgacgaacgcgtatacgtactattatataacgcgcccgactaactcccgttcgtcacgaccgacgacgacgacaacgtaacctacgcgaaacgcaacgacgaaacctcttcgacaccgcacgacaacgccgccaacaacaacgccaacaaaaacaacaacaacgacgactacaacacgcgcgaccccataacccgacgaaaacgataacgacgccccgcccctatacgcgctatcaatcaaacgcgcgaaaataataccaaccaataaaacgcgaaaacgaaacttaacgccgaaccccgcctccgcctaataaaccccgacgctacccacaataccccgcgcgcccgccgcgaaacttacttcgtcgaaccgctccaaaaaatcaaaacgaaaacccgaaacccgcccgtaaaaatcccgacaaaacgcaaccgacaaaacccaaaactaccaacccaacgtaaaaaatcgcgacttccgaaaaaatcgaactaacaacgaaaaaacgaaacgaaccccgacttcaaaacctcgaaccgctcattcccacccacttcgaaacgacccccgccactcctaccccgacctcacgaacactaaaaacgcgtcgaccacgtccaaaacccaaaaaaataacgccccgctcccaaacctactacaaaaaacccgaaactcgacccaaaacgaaacctaacaacgactacgcgaccgccgctccctcgaaaccgaatacgcctcaaatcccgcgaaactaaaatctccgcgctacgaaccccctcaataacgaaccccccgcgatcactactcgaacaataacccttacaatcttccctatcgaatcctactcgtacgctaaaccgaaatccgcaaacttttcttccaataaccccgctccgccgacaaacccccctaaaccacaaactcgactttctaaatacacacgtaaccctttattcgaatccgactttcacaaaactccacatcgttataaacaaaaactaaccgccccgtaaactaccgacgcaccgcaacccgt

SEQ ID NO: 23219 - DNA, 1295 bp, Artificial Sequence
  chemically treated genomic DNA (Homo sapiens) CpG-island No: 23219
tatattacgtgacgatttcgtatagtatcgtttacgtttattttaatagggagagagggagggagggagggagggaggggaggatttcgcggttcggtacgtgacgtattaggcgcgcgttaattggttaaggttgagagacggcgtttacgtgcgtttgacgtatttaaacgttcggattaggaagtagagcgcggttaggtcgtagaagtttaggattacgtagaaggagcgcgttagcgtcgagttcgacgttttcggcggacgcgtgtgcgtgttgttgtgtggcgcgttcggttggttttcgttcgttacggtcggcggcggcgataacgtgatttgcgcggggcgtagcggcgaggttttttcggtatcgtacggtagcgtcgttagtagtagcgttagtaggagtagtagtagcggcggttgtagtacgcgcggttttatggttcggcggaagcggtggcggcgtttcgtttttatgcgcgttgttagttaggcgcgcggaggtgatgttagttaatggggcgcggaggcggagtttgacgtcgggtttcgttttcgtttggtgagtttcggcgttatttatagtgtttcgcgcgttcgtcgcggaatttgtttcgtcgaatcgttttaagggattaggacggaggttcggagttcgttcgtgggagtttcggtaaggcgtagtcggtagagtttagaattgttagtttagcgtggggggtcgcggttttcgaggaaatcgggttggtagcggggagacggggcggatttcgattttaggatttcgggtcgtttatttttatttatttcggggcgattttcgttatttttgtttcggttttacggatattgagaacgcgtcggttacgtttagggtttaggaaggtggcgtttcgtttttaagtttgttatagggaattcgggattcggtttaagacggggtttgatagcggttgcgcggtcgtcgttttttcgaagtcgagtgcgttttagatttcgcgagattggagttttcgcgttgcgaatttttttagtggcgagtttttcgcggttattgttcggataatgatttttgtagttttttttgtcgggttttattcgtgcgttgaatcgaggttcgtaggttttttttttagtggtttcgtttcgtcgatagatttttttgaattatagattcggttttttgggtgtatacgtggttttttattcgaattcgatttttatagggttttatatcgttgtgggtaaggattggtcgtttcgtaagttgtcggcgtatcgtagttcgt

SEQ ID NO: 23220 - DNA, 1295 bp, Artificial Sequence
  chemically treated genomic DNA (Homo sapiens) CpG-island No: 23220
acgaactacgatacgccgacaacttacgaaacgaccaatccttacccacaacgatataaaaccctataaaaatcgaattcgaataaaaaaccacgtatacacccaaaaaaccgaatctataattcaaaaaaatctatcgacgaaacgaaaccactaaaaaaaaaacctacgaacctcgattcaacgcacgaataaaacccgacaaaaaaaactacaaaaatcattatccgaacaataaccgcgaaaaactcgccactaaaaaaattcgcaacgcgaaaactccaatctcgcgaaatctaaaacgcactcgacttcgaaaaaacgacgaccgcgcaaccgctatcaaaccccgtcttaaaccgaatcccgaattccctataacaaacttaaaaacgaaacgccaccttcctaaaccctaaacgtaaccgacgcgttctcaatatccgtaaaaccgaaacaaaaataacgaaaatcgccccgaaataaataaaaataaacgacccgaaatcctaaaatcgaaatccgccccgtctccccgctaccaacccgatttcctcgaaaaccgcgaccccccacgctaaactaacaattctaaactctaccgactacgccttaccgaaactcccacgaacgaactccgaacctccgtcctaatcccttaaaacgattcgacgaaacaaattccgcgacgaacgcgcgaaacactataaataacgccgaaactcaccaaacgaaaacgaaacccgacgtcaaactccgcctccgcgccccattaactaacatcacctccgcgcgcctaactaacaacgcgcataaaaacgaaacgccgccaccgcttccgccgaaccataaaaccgcgcgtactacaaccgccgctactactactcctactaacgctactactaacgacgctaccgtacgataccgaaaaaacctcgccgctacgccccgcgcaaatcacgttatcgccgccgccgaccgtaacgaacgaaaaccaaccgaacgcgccacacaacaacacgcacacgcgtccgccgaaaacgtcgaactcgacgctaacgcgctccttctacgtaatcctaaacttctacgacctaaccgcgctctacttcctaatccgaacgtttaaatacgtcaaacgcacgtaaacgccgtctctcaaccttaaccaattaacgcgcgcctaatacgtcacgtaccgaaccgcgaaatcctcccctccctccctccctccctccctctctccctattaaaataaacgtaaacgatactatacgaaatcgtcacgtaatata

SEQ ID NO: 23221 - DNA, 1112 bp, Artificial Sequence
  chemically treated genomic DNA (Homo sapiens) CpG-island No: 23221
atttgggacgcgtgcgtcggggttggtgaggttgcggatagcgttggaatcgggtaggtgagaggttcgggatttagggtcgggtcgggtggagcgcgtgggggcgcgggaggtagggtgcgttttcgtttttcggagattttaggtcgggttacgcggatgtcggcggggggcgcgtagaatcggggtcgttgggggtaggtttcgggggacgagtttgagacggggtgggtcggggtagggggcgggcgtaggttggagattttcgtttagttttcgcgcggtcggggtacggcgggagggggcgttcgcggttttttcgacgttcgggcgggataaaggtcggagttcgggttttttttcggcgggtgcggcggcggcggttcgcgtttcgatagttcgcgcggtcgggttttgcgttcggggcgatttcggcgtttcgtttcgtcgtcgtttgatttttcggcgttcgaggtcgcgcgcgcggaggcgggggcggttcgggatttttaagcgtcgtcgcgtttttttttcgttcgtttttcgttcgttcgttcggcggcggcggcggcggcggaggaggcggagaaggttggtaggcggcggtcgggagagcgagcgcggcggtcggatcggggttatggcgttcgcgtagcgttcgttgttttcgttgttgtttttgttgttatcgttgtcgtcgtcgtttttcgcgcgcgtcgaggacgtcgttcgcgttaattcggatcgttacgtcgtttattggaatcgtagtaattttaggtgagcgcggtcgcgcgcggggggcgttcggggattttttaacgttttttaagtcgcgttcggtttcgcgttttcggagtttcgggcgttttttacgcgcgcgtcgtcgtcgggatgcgggcgttcggttttcgcgggagttttttagggagtttcggtttttcggagtttgggggattcgtttttttcgcgtttgtttttttcggggcgttttattgttttacggattgtggggattcgcgttttatattttttagagcgtcgacgttttttggagtttggggaatttttttggtatttttcgatgtcgggtagtttttgagttgtttgtt

SEQ ID NO: 23222 - DNA, 1112 bp, Artificial Sequence
  chemically treated genomic DNA (Homo sapiens) CpG-island No: 23222
aacaaacaactcaaaaactacccgacatcgaaaaataccaaaaaaattccccaaactccaaaaaacgtcgacgctctaaaaaatataaaacgcgaatccccacaatccgtaaaacaataaaacgccccgaaaaaaacaaacgcgaaaaaaacgaatcccccaaactccgaaaaaccgaaactccctaaaaaactcccgcgaaaaccgaacgcccgcatcccgacgacgacgcgcgcgtaaaaaacgcccgaaactccgaaaacgcgaaaccgaacgcgacttaaaaaacgttaaaaaatccccgaacgccccccgcgcgcgaccgcgctcacctaaaattactacgattccaataaacgacgtaacgatccgaattaacgcgaacgacgtcctcgacgcgcgcgaaaaacgacgacgacaacgataacaacaaaaacaacaacgaaaacaacgaacgctacgcgaacgccataaccccgatccgaccgccgcgctcgctctcccgaccgccgcctaccaaccttctccgcctcctccgccgccgccgccgccgccgaacgaacgaacgaaaaacgaacgaaaaaaaaacgcgacgacgcttaaaaatcccgaaccgcccccgcctccgcgcgcgcgacctcgaacgccgaaaaatcaaacgacgacgaaacgaaacgccgaaatcgccccgaacgcaaaacccgaccgcgcgaactatcgaaacgcgaaccgccgccgccgcacccgccgaaaaaaaacccgaactccgacctttatcccgcccgaacgtcgaaaaaaccgcgaacgccccctcccgccgtaccccgaccgcgcgaaaactaaacgaaaatctccaacctacgcccgccccctaccccgacccaccccgtctcaaactcgtcccccgaaacctacccccaacgaccccgattctacgcgccccccgccgacatccgcgtaacccgacctaaaatctccgaaaaacgaaaacgcaccctacctcccgcgcccccacgcgctccacccgacccgaccctaaatcccgaacctctcacctacccgattccaacgctatccgcaacctcaccaaccccgacgcacgcgtcccaaat

SEQ ID NO: 23223 - DNA, 1112 bp, Artificial Sequence
  chemically treated genomic DNA (Homo sapiens) CpG-island No: 23223
ggtaggtaatttaggggttattcggtatcggagggtattagaggggttttttaaattttaggagacgtcggcgttttgggggatgtggggcgcgagtttttatagttcgtagggtaatggggcgtttcggggaaggtaggcgcgaaaagggcgagttttttaaatttcggggggtcggagttttttggggggttttcgcgggaatcgggcgttcgtatttcggcggcggcgcgcgcgtggggggcgttcggagtttcgggggcgcgaggtcgggcgcggtttggggggcgttggggggttttcgggcgtttttcgcgcgcggtcgcgtttatttggggttgttgcggttttagtagacggcgtagcggttcgagttggcgcgggcggcgttttcggcgcgcgcgaagggcggcggcggtagcggtaatagtaggagtagtagcgggagtagcgggcgttgcgcgggcgttatggtttcggttcggtcgtcgcgttcgttttttcggtcgtcgtttgttagtttttttcgtttttttcgtcgtcgtcgtcgtcgtcgagcgggcgggcggagggcgggcgggaggagggcgcggcggcgtttggagatttcgggtcgttttcgttttcgcgcgcgcgatttcgggcgtcgagaagttaggcggcggcggggcggggcgtcggggtcgtttcgggcgtaggattcggtcgcgcggattgtcggagcgcgggtcgtcgtcgtcgtattcgtcggggaggggttcgggtttcggtttttgtttcgttcgagcgtcgggagggtcgcgggcgttttttttcgtcgtgtttcggtcgcgcggggattgggcgggggtttttagtttgcgttcgttttttgtttcggtttatttcgttttaggttcgtttttcggggtttgtttttagcgatttcgattttgcgcgtttttcgtcggtattcgcgtggttcggtttggggttttcgaggggcgggggcgtattttgtttttcgcgtttttacgcgttttattcggttcggttttgggtttcgggttttttatttgttcggttttagcgttattcgtagttttattaatttcgacgtacgcgttttaaat

SEQ ID NO: 23224 - DNA, 1112 bp, Artificial Sequence
  chemically treated genomic DNA (Homo sapiens) CpG-island No: 23224
atttaaaacgcgtacgtcgaaattaataaaactacgaataacgctaaaaccgaacaaataaaaaacccgaaacccaaaaccgaaccgaataaaacgcgtaaaaacgcgaaaaacaaaatacgcccccgcccctcgaaaaccccaaaccgaaccacgcgaataccgacgaaaaacgcgcaaaatcgaaatcgctaaaaacaaaccccgaaaaacgaacctaaaacgaaataaaccgaaacaaaaaacgaacgcaaactaaaaacccccgcccaatccccgcgcgaccgaaacacgacgaaaaaaaacgcccgcgaccctcccgacgctcgaacgaaacaaaaaccgaaacccgaacccctccccgacgaatacgacgacgacgacccgcgctccgacaatccgcgcgaccgaatcctacgcccgaaacgaccccgacgccccgccccgccgccgcctaacttctcgacgcccgaaatcgcgcgcgcgaaaacgaaaacgacccgaaatctccaaacgccgccgcgccctcctcccgcccgccctccgcccgcccgctcgacgacgacgacgacgacgaaaaaaacgaaaaaaactaacaaacgacgaccgaaaaaacgaacgcgacgaccgaaccgaaaccataacgcccgcgcaacgcccgctactcccgctactactcctactattaccgctaccgccgccgcccttcgcgcgcgccgaaaacgccgcccgcgccaactcgaaccgctacgccgtctactaaaaccgcaacaaccccaaataaacgcgaccgcgcgcgaaaaacgcccgaaaaccccccaacgccccccaaaccgcgcccgacctcgcgcccccgaaactccgaacgccccccacgcgcgcgccgccgccgaaatacgaacgcccgattcccgcgaaaaccccccaaaaaactccgaccccccgaaatttaaaaaactcgcccttttcgcgcctaccttccccgaaacgccccattaccctacgaactataaaaactcgcgccccacatcccccaaaacgccgacgtctcctaaaatttaaaaaacccctctaataccctccgataccgaataacccctaaattacctacc

SEQ ID NO: 23225 - DNA, 686 bp, Artificial Sequence
  chemically treated genomic DNA (Homo sapiens) CpG-island No: 23225
gtttttcgtgtttttgatttcggttttcgtcgcgtatttcgattcgtttttcgtgtttttgttttttgattttggtttttttcgcgtatttcgattcgtgtttcgtttttcgtttcgggcgttgatttttggtcgttttgttttcgtaggttttacgtaggcgcgggggacgacggcgggggttatacggtggaggtgagtattaatgattatttggatatttattgttcgtattatggggcgtcgttgtcgtcggtcgagcgtatggagtattacgtgttgtatatggttaacggcgagggttacgttttttgcgattatcgttagcgcggttttaagcgttgggagtgtaatcggttcgcggcgttcggggggtcgtttaagttttcggagaagttttagttttttacgtttttttttttgggtttcgagtttcggttcggttacgagtattattatatttgtgagtggggtcgggtcggggttgtcggggttcgagtgggcggggacgcgggggcggggttaggaagtgggcgggattattggggtggggtcggggagtgggcggggtagcgtagtgggcggggtcgcggtgtggggttaggggggagtgggcggggtcgcggaatggggttaggggggagtgggcggggtcgcggagtggggttagggtcggtgttggttat

SEQ ID NO: 23226 - DNA, 686 bp, Artificial Sequence
  chemically treated genomic DNA (Homo sapiens) CpG-island No: 23226
ataaccaacaccgaccctaaccccactccgcgaccccgcccactcccccctaaccccattccgcgaccccgcccactcccccctaaccccacaccgcgaccccgcccactacgctaccccgcccactccccgaccccaccccaataatcccgcccacttcctaaccccgcccccgcgtccccgcccactcgaaccccgacaaccccgacccgaccccactcacaaatataataatactcgtaaccgaaccgaaactcgaaacccaaaaaaaaaaacgtaaaaaactaaaacttctccgaaaacttaaacgaccccccgaacgccgcgaaccgattacactcccaacgcttaaaaccgcgctaacgataatcgcaaaaaacgtaaccctcgccgttaaccatatacaacacgtaatactccatacgctcgaccgacgacaacgacgccccataatacgaacaataaatatccaaataatcattaatactcacctccaccgtataacccccgccgtcgtcccccgcgcctacgtaaaacctacgaaaacaaaacgaccaaaaatcaacgcccgaaacgaaaaacgaaacacgaatcgaaatacgcgaaaaaaaccaaaatcaaaaaacaaaaacacgaaaaacgaatcgaaatacgcgacgaaaaccgaaatcaaaaacacgaaaaac

SEQ ID NO: 23227 - DNA, 686 bp, Artificial Sequence
  chemically treated genomic DNA (Homo sapiens) CpG-island No: 23227
gtggttagtatcggttttggttttatttcgcggtttcgtttatttttttttggttttatttcgcggtttcgtttatttttttttggttttatatcgcggtttcgtttattgcgttgtttcgtttatttttcggttttattttagtggtttcgtttattttttggtttcgttttcgcgttttcgtttattcgggtttcggtagtttcggttcgattttatttatagatgtagtaatattcgtggtcgggtcggaattcgaagtttagggagaagggcgtgaagagttggaattttttcgagaatttgagcggtttttcgggcgtcgcgggtcggttgtatttttagcgtttgaagtcgcgttggcggtggtcgtaggaggcgtggttttcgtcgttgattatgtatagtacgtagtgttttatgcgttcggtcggcggtagcggcgttttatagtgcgggtagtagatgtttaggtagttattgatgtttatttttatcgtgtagttttcgtcgtcgtttttcgcgtttgcgtggaatttgcggggataaggcggttagaggttagcgttcggagcgaggaacggggtacgggtcggggtgcgcggggagggttagggttaggggataggagtacgagggacgggtcggggtgcgcggcgagggtcggggttaggagtacgggggat

SEQ ID NO: 23228 - DNA, 686 bp, Artificial Sequence
  chemically treated genomic DNA (Homo sapiens) CpG-island No: 23228
atcccccgtactcctaaccccgaccctcgccgcgcaccccgacccgtccctcgtactcctatcccctaaccctaaccctccccgcgcaccccgacccgtaccccgttcctcgctccgaacgctaacctctaaccgccttatccccgcaaattccacgcaaacgcgaaaaacgacgacgaaaactacacgataaaaataaacatcaataactacctaaacatctactacccgcactataaaacgccgctaccgccgaccgaacgcataaaacactacgtactatacataatcaacgacgaaaaccacgcctcctacgaccaccgccaacgcgacttcaaacgctaaaaatacaaccgacccgcgacgcccgaaaaaccgctcaaattctcgaaaaaattccaactcttcacgcccttctccctaaacttcgaattccgacccgaccacgaatattactacatctataaataaaatcgaaccgaaactaccgaaacccgaataaacgaaaacgcgaaaacgaaaccaaaaaataaacgaaaccactaaaataaaaccgaaaaataaacgaaacaacgcaataaacgaaaccgcgatataaaaccaaaaaaaaataaacgaaaccgcgaaataaaaccaaaaaaaaataaacgaaaccgcgaaataaaaccaaaaccgatactaaccac

SEQ ID NO: 23229 - DNA, 595 bp, Artificial Sequence
  chemically treated genomic DNA (Homo sapiens) CpG-island No: 23229
gttgaagtcgaggcgggagtttcggatttttcgagttcgcggtttgtttgcgtcgttcgggtcgggttaagttcgtagttttgagagtttagtttgagacggtttcgagattacgatttttatagttattatttttaacgtttttaagtcgaggagcgagaggggtttcgttcgacggttatcgttcgtatttagtttttggtcgcgttggtttcgtagtcgttcgttttatttgcgtgttcgtcgttattttgtcggggttgatttcggaatcgttttcggaacgttttcgggttatagcgtggtttacgcggtagggcgaggtcgggagttagcgggggtagggtttcgggtttggtgttttcgggtaggacggcggtcgttgtagttcgggtagtcggattacgggtttaaagttggttcgcgttcgagttataaggttttttttttagggttcgttttttagtttcgggcgtttcgtgggagattagcgtttgtaacgtggtgagttcgcggtgtaacgttatgggttcgttttgtagtttttgatttatttttagttcgtagggttagttttacgtgggttttttttgag

SEQ ID NO: 23230 - DNA, 595 bp, Artificial Sequence
  chemically treated genomic DNA (Homo sapiens) CpG-island No: 23230
ctcaaaaaaaacccacgtaaaactaaccctacgaactaaaaataaatcaaaaactacaaaacgaacccataacgttacaccgcgaactcaccacgttacaaacgctaatctcccacgaaacgcccgaaactaaaaaacgaaccctaaaaaaaaaaccttataactcgaacgcgaaccaactttaaacccgtaatccgactacccgaactacaacgaccgccgtcctacccgaaaacaccaaacccgaaaccctacccccgctaactcccgacctcgccctaccgcgtaaaccacgctataacccgaaaacgttccgaaaacgattccgaaatcaaccccgacaaaataacgacgaacacgcaaataaaacgaacgactacgaaaccaacgcgaccaaaaactaaatacgaacgataaccgtcgaacgaaacccctctcgctcctcgacttaaaaacgttaaaaataataactataaaaatcgtaatctcgaaaccgtctcaaactaaactctcaaaactacgaacttaacccgacccgaacgacgcaaacaaaccgcgaactcgaaaaatccgaaactcccgcctcgacttcaac

SEQ ID NO: 23231 - DNA, 595 bp, Artificial Sequence
  chemically treated genomic DNA (Homo sapiens) CpG-island No: 23231
tttaggaaaggtttacgtagggttggttttgcgggttggaagtgggttaggggttgtaaggcgggtttatagcgttatatcgcgggtttattacgttataagcgttagttttttacgaggcgttcggggttgaagagcgggttttggggaggaggttttgtggttcgggcgcgggttaattttaagttcgtgattcggttgttcgggttgtagcggtcgtcgttttgttcgggggtattaagttcggggttttgttttcgttggttttcggtttcgttttgtcgcgtgggttacgttgtgattcggaagcgtttcggaagcggtttcggagttagtttcggtaggatggcggcggatacgtaggtgaggcgggcggttgcggggttaacgcggttagggattgggtgcggacggtggtcgtcgggcggggtttttttcgtttttcggtttaggggcgttggaggtggtggttgtggaggtcgtagtttcggggtcgttttaggttggatttttagggttgcgggtttggttcggttcgggcggcgtaggtagatcgcgggttcgaggagttcggggttttcgtttcgattttagt

SEQ ID NO: 23232 - DNA, 595 bp, Artificial Sequence
  chemically treated genomic DNA (Homo sapiens) CpG-island No: 23232
actaaaatcgaaacgaaaaccccgaactcctcgaacccgcgatctacctacgccgcccgaaccgaaccaaacccgcaaccctaaaaatccaacctaaaacgaccccgaaactacgacctccacaaccaccacctccaacgcccctaaaccgaaaaacgaaaaaaaccccgcccgacgaccaccgtccgcacccaatccctaaccgcgttaaccccgcaaccgcccgcctcacctacgtatccgccgccatcctaccgaaactaactccgaaaccgcttccgaaacgcttccgaatcacaacgtaacccacgcgacaaaacgaaaccgaaaaccaacgaaaacaaaaccccgaacttaatacccccgaacaaaacgacgaccgctacaacccgaacaaccgaatcacgaacttaaaattaacccgcgcccgaaccacaaaacctcctccccaaaacccgctcttcaaccccgaacgcctcgtaaaaaactaacgcttataacgtaataaacccgcgatataacgctataaacccgccttacaacccctaacccacttccaacccgcaaaaccaaccctacgtaaacctttcctaaa

SEQ ID NO: 23233 - DNA, 604 bp, Artificial Sequence
  chemically treated genomic DNA (Homo sapiens) CpG-island No: 23233
ggcggtgcgttagggattgttacgtagggtttaaagacgatgttattgaggagagatagggagtttaggtttggttacgtcgatatttatttcgcggtttcgggtttaagaggagtaggatacgcgtaatcgttcgtcggttttgtttagggtagcggtcgttatttcggggcgtgtaagtcgttatcgaggttttaggcggaatagaataggattttatgtttttaaaggtttttaaagatttttttatgtttttcgtcggcgatttttggcgtttatttaattagtatacgaattttttacgaggacgtttggcgagagaagggtttcgcgttcgcgcgtgttttttataatgcgaataaagtagttaattagaaatcgcggatagcgtttttgtttattggttgcgttatcgttcgttagataaagttgaacgaatataggtaattattggataatatcgttgttattttagttaacggaaagtcgtttttaagtagggtcgcgaaggaaggcgttgtttcgcgttggaggagtttgttttgagttgttgttatttgttgggttggagttggagttggagttgcgaattcggagtttcggt

SEQ ID NO: 23234 - DNA, 604 bp, Artificial Sequence
  chemically treated genomic DNA (Homo sapiens) CpG-island No: 23234
accgaaactccgaattcgcaactccaactccaactccaacccaacaaataacaacaactcaaaacaaactcctccaacgcgaaacaacgccttccttcgcgaccctacttaaaaacgactttccgttaactaaaataacaacgatattatccaataattacctatattcgttcaactttatctaacgaacgataacgcaaccaataaacaaaaacgctatccgcgatttctaattaactactttattcgcattataaaaaacacgcgcgaacgcgaaacccttctctcgccaaacgtcctcgtaaaaaattcgtatactaattaaataaacgccaaaaatcgccgacgaaaaacataaaaaaatctttaaaaacctttaaaaacataaaatcctattctattccgcctaaaacctcgataacgacttacacgccccgaaataacgaccgctaccctaaacaaaaccgacgaacgattacgcgtatcctactcctcttaaacccgaaaccgcgaaataaatatcgacgtaaccaaacctaaactccctatctctcctcaataacatcgtctttaaaccctacgtaacaatccctaacgcaccgcc

SEQ ID NO: 23235 - DNA, 604 bp, Artificial Sequence
  chemically treated genomic DNA (Homo sapiens) CpG-island No: 23235
atcgggatttcgaattcgtagttttagttttagttttagtttagtaggtggtagtagtttagagtaagtttttttaacgcgaggtagcgttttttttcgcgattttatttaaaggcggtttttcgttggttggagtggtagcgatattatttaatggttgtttgtattcgtttagttttgtttgacgggcgatggcgtagttaatagataggagcgttattcgcggtttttgattggttattttgttcgtattataaaaggtacgcgcgggcgcgaggtttttttttcgttaggcgttttcgtggaaggttcgtgtgttagttagatgggcgttaggggtcgtcggcgggaagtatggaggggtttttgggggtttttgggaatatggagttttattttgtttcgtttggggtttcggtggcggtttgtacgtttcgagatgacggtcgttgttttaggtagggtcggcgggcgattgcgcgtgttttgttttttttaggttcgggatcgcgggatgggtgtcggcgtgattaggtttgagttttttgtttttttttagtgatatcgtttttaaattttgcgtggtaatttttgacgtatcgtt

SEQ ID NO: 23236 - DNA, 604 bp, Artificial Sequence
  chemically treated genomic DNA (Homo sapiens) CpG-island No: 23236
aacgatacgtcaaaaattaccacgcaaaatttaaaaacgatatcactaaaaaaaaacaaaaaactcaaacctaatcacgccgacacccatcccgcgatcccgaacctaaaaaaaacaaaacacgcgcaatcgcccgccgaccctacctaaaacaacgaccgtcatctcgaaacgtacaaaccgccaccgaaaccccaaacgaaacaaaataaaactccatattcccaaaaacccccaaaaacccctccatacttcccgccgacgacccctaacgcccatctaactaacacacgaaccttccacgaaaacgcctaacgaaaaaaaaacctcgcgcccgcgcgtaccttttataatacgaacaaaataaccaatcaaaaaccgcgaataacgctcctatctattaactacgccatcgcccgtcaaacaaaactaaacgaatacaaacaaccattaaataatatcgctaccactccaaccaacgaaaaaccgcctttaaataaaatcgcgaaaaaaaacgctacctcgcgttaaaaaaacttactctaaactactaccacctactaaactaaaactaaaactaaaactacgaattcgaaatcccgat

SEQ ID NO: 23237 - DNA, 580 bp, Artificial Sequence
  chemically treated genomic DNA (Homo sapiens) CpG-island No: 23237
tcggtgtcggggtcggtttggttcgagattaaggttcggttagggattttagtttcgcggagtttcggtcggtagggataggagttgaggtcggggtcgtcgagggtgggatttcgcggtttttgtcgttcgttggcgtttttttggttttaagttgcgcgtttttcgtttttttttttttcggtttttcgtttatttatcgaggtcgtttatggtcggattacgggcgtcggtttagggtcgcgttagttgttcgtttcggggtcgttcgtttatgtttcgtaattttttcgtcgcgagtttcggttcggaacggaacgcgtcgtcgtcgcgcgcgttcgcgttcgcgttcgtcgcgcgtttcgttttcggtcgttttttgtgtacgcgcgtttcgttttcggatattttcgcgagtttgttggtttcgttttttgcgtacgttggtttcgttttcgttaagagttcgggtagtgggcgtcgttgggcggggcggtggcgttttttcgcggttaagcgggtaggtgggcggtttttaggtttttagttatttttatttatttttttgttttttttaaag

SEQ ID NO: 23238 - DNA, 580 bp, Artificial Sequence
  chemically treated genomic DNA (Homo sapiens) CpG-island No: 23238
ctttaaaaaaaacaaaaaaataaataaaaataactaaaaacctaaaaaccgcccacctacccgcttaaccgcgaaaaaacgccaccgccccgcccaacgacgcccactacccgaactcttaacgaaaacgaaaccaacgtacgcaaaaaacgaaaccaacaaactcgcgaaaatatccgaaaacgaaacgcgcgtacacaaaaaacgaccgaaaacgaaacgcgcgacgaacgcgaacgcgaacgcgcgcgacgacgacgcgttccgttccgaaccgaaactcgcgacgaaaaaattacgaaacataaacgaacgaccccgaaacgaacaactaacgcgaccctaaaccgacgcccgtaatccgaccataaacgacctcgataaataaacgaaaaaccgaaaaaaaaaaaaacgaaaaacgcgcaacttaaaaccaaaaaaacgccaacgaacgacaaaaaccgcgaaatcccaccctcgacgaccccgacctcaactcctatccctaccgaccgaaactccgcgaaactaaaatccctaaccgaaccttaatctcgaaccaaaccgaccccgacaccga

SEQ ID NO: 23239 - DNA, 580 bp, Artificial Sequence
  chemically treated genomic DNA (Homo sapiens) CpG-island No: 23239
ttttgagagggatagaaagatggatgggagtggttggaggtttgggagtcgtttatttgttcgtttagtcgcgagggggcgttatcgtttcgtttagcgacgtttattgttcgggtttttggcgggggcgggattagcgtgcgtagggggcggggttagtaagttcgcgggggtgttcgggggcggggcgcgcgtgtatagggggcggtcgggggcggggcgcgcggcgggcgcgggcgcgggcgcgcgcggcggcggcgcgtttcgtttcgggtcgaggttcgcggcggaaaagttgcggggtatagacgagcggtttcgggacgggtagttagcgcgattttgagtcggcgttcgtggttcggttatggacgatttcggtgagtgagcgggaggtcgagggaggaggaggcgagaggcgcgtagtttggggttaggagggcgttagcgagcggtaggggtcgcgggattttattttcggcggtttcggttttagtttttgtttttgtcggtcggggtttcgcggggttgggatttttaatcgggttttagtttcgggttaggtcggtttcggtatcga

SEQ ID NO: 23240 - DNA, 580 bp, Artificial Sequence
  chemically treated genomic DNA (Homo sapiens) CpG-island No: 23240
tcgataccgaaaccgacctaacccgaaactaaaacccgattaaaaatcccaaccccgcgaaaccccgaccgacaaaaacaaaaactaaaaccgaaaccgccgaaaataaaatcccgcgacccctaccgctcgctaacgccctcctaaccccaaactacgcgcctctcgcctcctcctccctcgacctcccgctcactcaccgaaatcgtccataaccgaaccacgaacgccgactcaaaatcgcgctaactacccgtcccgaaaccgctcgtctataccccgcaacttttccgccgcgaacctcgacccgaaacgaaacgcgccgccgccgcgcgcgcccgcgcccgcgcccgccgcgcgccccgcccccgaccgccccctatacacgcgcgccccgcccccgaacacccccgcgaacttactaaccccgccccctacgcacgctaatcccgcccccgccaaaaacccgaacaataaacgtcgctaaacgaaacgataacgccccctcgcgactaaacgaacaaataaacgactcccaaacctccaaccactcccatccatctttctatccctctcaaaa

SEQ ID NO: 23241 - DNA, 593 bp, Artificial Sequence
  chemically treated genomic DNA (Homo sapiens) CpG-island No: 23241
cgaacgtttcgttcgcgtcgcgtatttggttgtttggcggtttttcggattcgacgttacgtattggttcgcgtttcgttttcggttcggggtcgtcgcgcgtttggtcggcgatttttcgggcgttttttagtcgcgttagttcgcggtttcgtgtttcgtattcgttttgcgttttttggcgttcgcgtcgtgcgttcgttagttttttggtgagcgcgtttaggcgttggcgtagttggcgtattttttcgcgcgcgcggttgcgtttagcgcgtattttgttttatttttcgcgttaattggtagtgtagttcgattatcggcgtatggttttttttatttgcgtcgttcgcgttcgcgttttttttagttttcgtagtcgtagtttttcgcggtttttttagtcgtcgtcggttagtagcgcgggcgcggggggtaggggtagtgcgggcggcggttcgggcgagggcgtgtcgttgggcggcgtgggcggtaaggagtcggtaggttttatgcgtttcggcgacgggttgtttaggatggttaggaggttgtttttggatagttgcggggattcggttagtcggggg

SEQ ID NO: 23242 - DNA, 593 bp, Artificial Sequence
  chemically treated genomic DNA (Homo sapiens) CpG-island No: 23242
cccccgactaaccgaatccccgcaactatccaaaaacaacctcctaaccatcctaaacaacccgtcgccgaaacgcataaaacctaccgactccttaccgcccacgccgcccaacgacacgccctcgcccgaaccgccgcccgcactacccctaccccccgcgcccgcgctactaaccgacgacgactaaaaaaaccgcgaaaaactacgactacgaaaactaaaaaaaacgcgaacgcgaacgacgcaaataaaaaaaaccatacgccgataatcgaactacactaccaattaacgcgaaaaataaaacaaaatacgcgctaaacgcaaccgcgcgcgcgaaaaaatacgccaactacgccaacgcctaaacgcgctcaccaaaaaactaacgaacgcacgacgcgaacgccaaaaaacgcaaaacgaatacgaaacacgaaaccgcgaactaacgcgactaaaaaacgcccgaaaaatcgccgaccaaacgcgcgacgaccccgaaccgaaaacgaaacgcgaaccaatacgtaacgtcgaatccgaaaaaccgccaaacaaccaaatacgcgacgcgaacgaaacgttcg

SEQ ID NO: 23243 - DNA, 593 bp, Artificial Sequence
  chemically treated genomic DNA (Homo sapiens) CpG-island No: 23243
ttttcggttggtcgagttttcgtagttgtttaagggtagttttttgattattttgggtagttcgtcgtcggagcgtatggggtttgtcgattttttgtcgtttacgtcgtttagcggtacgttttcgttcgggtcgtcgttcgtattgtttttgtttttcgcgttcgcgttgttggtcgacggcgattgggagagtcgcgaggagttgcggttgcgggagttggaggaggcgcgggcgcgggcggcgtagatggagaagattatgcgtcggtggtcggattgtattgttaattggcgcgagaaatggagtaaggtgcgcgttgagcgtaatcgcgcgcgcgaggaggtgcgttagttgcgttagcgtttggacgcgtttattaaggagttggcgggcgtacggcgcgagcgttaagaggcgtagggcgagtgcgaggtacggggtcgcgagttggcgcggttgaggggcgttcggggggtcgtcgattagacgcgcgacggtttcgagtcggaagcggagcgcgagttagtgcgtgacgtcgggttcgagaggtcgttaggtagttaggtgcgcggcgcgggcggggcgttcg

SEQ ID NO: 23244 - DNA, 593 bp, Artificial Sequence
  chemically treated genomic DNA (Homo sapiens) CpG-island No: 23244
cgaacgccccgcccgcgccgcgcacctaactacctaacgacctctcgaacccgacgtcacgcactaactcgcgctccgcttccgactcgaaaccgtcgcgcgtctaatcgacgaccccccgaacgcccctcaaccgcgccaactcgcgaccccgtacctcgcactcgccctacgcctcttaacgctcgcgccgtacgcccgccaactccttaataaacgcgtccaaacgctaacgcaactaacgcacctcctcgcgcgcgcgattacgctcaacgcgcaccttactccatttctcgcgccaattaacaatacaatccgaccaccgacgcataatcttctccatctacgccgcccgcgcccgcgcctcctccaactcccgcaaccgcaactcctcgcgactctcccaatcgccgtcgaccaacaacgcgaacgcgaaaaacaaaaacaatacgaacgacgacccgaacgaaaacgtaccgctaaacgacgtaaacgacaaaaaatcgacaaaccccatacgctccgacgacgaactacccaaaataatcaaaaaactacccttaaacaactacgaaaactcgaccaaccgaaaa

SEQ ID NO: 23245 - DNA, 789 bp, Artificial Sequence
  chemically treated genomic DNA (Homo sapiens) CpG-island No: 23245
ttagcgagggagatagggaggaaggaagggttggggaggcggagagatagatcgagcgagcgatatacggatagcgacggatagcgatagaagcggggttcgggatttgggagacggcgaggttgcggggcgcgaggtgttgggtacggagttatagggacggagagtcgagagtcggggtcgtagcgtggagggggcgttggttgttgtcgaagttcggagagcggcgtggcggaggcggagcggagtcgagcgaggggttagtacggaacgtttttttggaggcgagcggcgtagtcggcggagaggttttcggagtcgttttagaaaaagtcggttcggggggcgtggttacgcgttgtggcgtttttcgtttttcggtggtttcgttcggtttcggggttcgggggcggaaggggggaggggaggagaggagttgtagggaagggggttgtgtaggcgttcgacgtcgtagttttggttcgttgcgggggagggtcgagaagggtattgggcgtttagagtaattaatatcgagacgaatagcgagggttcggggagaaaaaacggaggatggtaaacggtaaagttaagggtacgaggtagcgtagcgcgtatttagaggtttttgggacggatattattttacgtttacgggttttttggcggtgttttttgagttgtcgggacggcgtaaggtggttgagcgaagttttttgttcggtgtttatagggagtatttgagatggtttgggaaaggaaatagggggttttagatcgtttgggtgt

SEQ ID NO: 23246 - DNA, 789 bp, Artificial Sequence
  chemically treated genomic DNA (Homo sapiens) CpG-island No: 23246
acacccaaacgatctaaaaccccctatttcctttcccaaaccatctcaaatactccctataaacaccgaacaaaaaacttcgctcaaccaccttacgccgtcccgacaactcaaaaaacaccgccaaaaaacccgtaaacgtaaaataatatccgtcccaaaaacctctaaatacgcgctacgctacctcgtacccttaactttaccgtttaccatcctccgttttttctccccgaaccctcgctattcgtctcgatattaattactctaaacgcccaatacccttctcgaccctcccccgcaacgaaccaaaactacgacgtcgaacgcctacacaacccccttccctacaactcctctcctcccctccccccttccgcccccgaaccccgaaaccgaacgaaaccaccgaaaaacgaaaaacgccacaacgcgtaaccacgccccccgaaccgactttttctaaaacgactccgaaaacctctccgccgactacgccgctcgcctccaaaaaaacgttccgtactaacccctcgctcgactccgctccgcctccgccacgccgctctccgaacttcgacaacaaccaacgccccctccacgctacgaccccgactctcgactctccgtccctataactccgtacccaacacctcgcgccccgcaacctcgccgtctcccaaatcccgaaccccgcttctatcgctatccgtcgctatccgtatatcgctcgctcgatctatctctccgcctccccaacccttccttcctccctatctccctcgctaa

SEQ ID NO: 23247 - DNA, 789 bp, Artificial Sequence
  chemically treated genomic DNA (Homo sapiens) CpG-island No: 23247
gtatttaagcggtttgagattttttgtttttttttttaaattattttaggtattttttgtaagtatcgagtaaaaagtttcgtttagttattttgcgtcgtttcggtagtttaaaggatatcgttagaggattcgtgagcgtggggtggtgttcgttttaggagtttttgggtgcgcgttgcgttatttcgtgtttttggttttgtcgtttgttatttttcgtttttttttttcgagttttcgttattcgtttcggtgttggttattttgggcgtttagtgtttttttcggttttttttcgtagcgggttaaggttgcggcgtcgagcgtttgtataatttttttttttatagttttttttttttttttttttttttcgttttcgggtttcggagtcgagcggggttatcggggggcggggagcgttatagcgcgtggttacgtttttcgagtcggttttttttagggcggtttcgggagttttttcgtcggttgcgtcgttcgtttttaagggagcgtttcgtgttggtttttcgttcggtttcgtttcgttttcgttacgtcgtttttcgagtttcggtagtagttagcgttttttttacgttgcgatttcggttttcggtttttcgtttttgtagtttcgtgtttagtatttcgcgtttcgtaatttcgtcgttttttaagtttcgggtttcgtttttgtcgttgttcgtcgttgttcgtgtgtcgttcgttcggtttgttttttcgtttttttagttttttttttttttttgtttttttcgttgg

SEQ ID NO: 23248 - DNA, 789 bp, Artificial Sequence
  chemically treated genomic DNA (Homo sapiens) CpG-island No: 23248
ccaacgaaaaaaacaaaaaaaaaaaaaaaactaaaaaaacgaaaaaacaaaccgaacgaacgacacacgaacaacgacgaacaacgacaaaaacgaaacccgaaacttaaaaaacgacgaaattacgaaacgcgaaatactaaacacgaaactacaaaaacgaaaaaccgaaaaccgaaatcgcaacgtaaaaaaaacgctaactactaccgaaactcgaaaaacgacgtaacgaaaacgaaacgaaaccgaacgaaaaaccaacacgaaacgctcccttaaaaacgaacgacgcaaccgacgaaaaaactcccgaaaccgccctaaaaaaaaccgactcgaaaaacgtaaccacgcgctataacgctccccgccccccgataaccccgctcgactccgaaacccgaaaacgaaaaaaaaaaaaaaaaaaaaaaaactataaaaaaaaaaattatacaaacgctcgacgccgcaaccttaacccgctacgaaaaaaaaccgaaaaaaacactaaacgcccaaaataaccaacaccgaaacgaataacgaaaactcgaaaaaaaaaaacgaaaaataacaaacgacaaaaccaaaaacacgaaataacgcaacgcgcacccaaaaactcctaaaacgaacaccaccccacgctcacgaatcctctaacgatatcctttaaactaccgaaacgacgcaaaataactaaacgaaactttttactcgatacttacaaaaaatacctaaaataatttaaaaaaaaaaacaaaaaatctcaaaccgcttaaatac

SEQ ID NO: 23249 - DNA, 762 bp, Artificial Sequence
  chemically treated genomic DNA (Homo sapiens) CpG-island No: 23249
ggtacgttttatttttttcgcgcggttgttgggaattcggaggtcgttcgggcggagcgcggagggcgcgtcggaatttggtcggggttttttattcgcgtcgtggtttcggtggttgcgtttcgtggcgagcgacgtcgataattttgcgatggagtttgtgcgggcgttgtggttgggtttggcgttggcgttggggtcggggttcgcggggggttatttttagtcgtgcggcgttttggcgcgtttcgggggtttcgtgcgtttgggcgtttttttgtttcgcgcgtttttcgttcgcgttcgcgttcgcgtcgttttggttcgggtcgttttggcgtcgcggttgtcgtataatttgagtttggagttggtggtcgtcgcgtttttcgttcgcgatttcgtttcgttgattcgcggtttgtgttaggcgttggtgttttcgggcgtggcggttttgttcgtttttttcgaggttcggttcgagttgttgtagttgtattttttggcggcggttatcgagattttcgtgtttagtttgttgcggcgggaggcgcgcgcgtttttcggagtttcggtacgcgggacgttcggagttaggacgagggggattcggggcgggagcggggtcgggagttttggggacgttcggagttaggatgggggtgtcgggattacgtagggaagggggatttcgggacgttggacgggttttagggattagggatggggaagattcgggtgttttcggagtaaggaaat

SEQ ID NO: 23250 - DNA, 762 bp, Artificial Sequence
  chemically treated genomic DNA (Homo sapiens) CpG-island No: 23250
atttccttactccgaaaacacccgaatcttccccatccctaatccctaaaacccgtccaacgtcccgaaatcccccttccctacgtaatcccgacacccccatcctaactccgaacgtccccaaaactcccgaccccgctcccgccccgaatccccctcgtcctaactccgaacgtcccgcgtaccgaaactccgaaaaacgcgcgcgcctcccgccgcaacaaactaaacacgaaaatctcgataaccgccgccaaaaaatacaactacaacaactcgaaccgaacctcgaaaaaaacgaacaaaaccgccacgcccgaaaacaccaacgcctaacacaaaccgcgaatcaacgaaacgaaatcgcgaacgaaaaacgcgacgaccaccaactccaaactcaaattatacgacaaccgcgacgccaaaacgacccgaaccaaaacgacgcgaacgcgaacgcgaacgaaaaacgcgcgaaacaaaaaaacgcccaaacgcacgaaacccccgaaacgcgccaaaacgccgcacgactaaaaataaccccccgcgaaccccgaccccaacgccaacgccaaacccaaccacaacgcccgcacaaactccatcgcaaaattatcgacgtcgctcgccacgaaacgcaaccaccgaaaccacgacgcgaataaaaaaccccgaccaaattccgacgcgccctccgcgctccgcccgaacgacctccgaattcccaacaaccgcgcgaaaaaaataaaacgtacc

SEQ ID NO: 23251 - DNA, 762 bp, Artificial Sequence
  chemically treated genomic DNA (Homo sapiens) CpG-island No: 23251
gtttttttgtttcggggatattcgggttttttttatttttgatttttggggttcgtttagcgtttcgggattttttttttttgcgtagtttcggtatttttattttgatttcggacgtttttagggttttcgatttcgttttcgtttcgggtttttttcgttttgatttcgggcgtttcgcgtatcggggtttcgaggggcgcgcgcgtttttcgtcgtagtaggttgagtacgggggtttcggtggtcgtcgttaggaagtgtagttgtagtagttcgggtcgagtttcgggaaaggcgagtagggtcgttacgttcggaggtattagcgtttggtataggtcgcgggttagcgaggcggggtcgcgggcggggggcgcggcgattattagttttaagtttaggttgtgcggtagtcgcggcgttagggcggttcgggttagggcggcgcgggcgcgggcgcgggcgagaggcgcgcggggtaggagggcgtttaggcgtacggagttttcgaggcgcgttaggacgtcgtacggttgagggtggtttttcgcggatttcggttttagcgttagcgttaggtttagttatagcgttcgtataaattttatcgtaaagttgtcggcgtcgttcgttacggggcgtaattatcgggattacggcgcgggtggagggtttcggttaggtttcgacgcgtttttcgcgtttcgttcgggcggttttcgggtttttagtaatcgcgcggggggagtgggacgtgtt

SEQ ID NO: 23252 - DNA, 762 bp, Artificial Sequence
  chemically treated genomic DNA (Homo sapiens) CpG-island No: 23252
aacacgtcccactccccccgcgcgattactaaaaacccgaaaaccgcccgaacgaaacgcgaaaaacgcgtcgaaacctaaccgaaaccctccacccgcgccgtaatcccgataattacgccccgtaacgaacgacgccgacaactttacgataaaatttatacgaacgctataactaaacctaacgctaacgctaaaaccgaaatccgcgaaaaaccaccctcaaccgtacgacgtcctaacgcgcctcgaaaactccgtacgcctaaacgccctcctaccccgcgcgcctctcgcccgcgcccgcgcccgcgccgccctaacccgaaccgccctaacgccgcgactaccgcacaacctaaacttaaaactaataatcgccgcgccccccgcccgcgaccccgcctcgctaacccgcgacctataccaaacgctaatacctccgaacgtaacgaccctactcgcctttcccgaaactcgacccgaactactacaactacacttcctaacgacgaccaccgaaacccccgtactcaacctactacgacgaaaaacgcgcgcgcccctcgaaaccccgatacgcgaaacgcccgaaatcaaaacgaaaaaaacccgaaacgaaaacgaaatcgaaaaccctaaaaacgtccgaaatcaaaataaaaataccgaaactacgcaaaaaaaaaaaatcccgaaacgctaaacgaaccccaaaaatcaaaaataaaaaaaacccgaatatccccgaaacaaaaaaac

SEQ ID NO: 23253 - DNA, 708 bp, Artificial Sequence
  chemically treated genomic DNA (Homo sapiens) CpG-island No: 23253
gtttcgaagtcggtcgcggggtgtaggaggttttcggaggtttttcgtttattttcggacgtgtatatcgtggttttttggttgtgtttgtcggttattttttgtcgttagcggtttttgtagaggtttagggcgcgagacggttgtttcggcggatattgattaggtcggtttcgtttttagcggtttcgaggtggagtagtagtagtagtagtaggattagttaacggtttcggagggttggaaacgggcgcgtcgggtcgtggataaggagcgtcgcgtgcgttttttgttggagttcgtcgtggttgtggtattcgaagcggacgcggaggcggaggttgcgtcgcgagagggtttcgtttggttgtgtttttacggtcgttcgttcgtcgtaaggtttacgggggttttttagttcggggagttgtaggagttggagcgtcgtatcgaagtcgcgcgtgagcggtttcgttaggttttggtgcggcgcggttagtttttggtatagttcggggatagcgtacgttatcggtttcggcgtttgttttaggttagagcggttttcgcggaggttttattatattttggtcgatcggggagttaggaatgaggcggtagtcgggtcgtttgggtttaagatatatatatagcgtagtgagtcgttgttaatagatagtttattttatatataaatataattttgta

SEQ ID NO: 23254 - DNA, 708 bp, Artificial Sequence
  chemically treated genomic DNA (Homo sapiens) CpG-island No: 23254
tacaaaattatatttatatataaaataaactatctattaacaacgactcactacgctatatatatatcttaaacccaaacgacccgactaccgcctcattcctaactccccgatcgaccaaaatataataaaacctccgcgaaaaccgctctaacctaaaacaaacgccgaaaccgataacgtacgctatccccgaactataccaaaaactaaccgcgccgcaccaaaacctaacgaaaccgctcacgcgcgacttcgatacgacgctccaactcctacaactccccgaactaaaaaacccccgtaaaccttacgacgaacgaacgaccgtaaaaacacaaccaaacgaaaccctctcgcgacgcaacctccgcctccgcgtccgcttcgaataccacaaccacgacgaactccaacaaaaaacgcacgcgacgctccttatccacgacccgacgcgcccgtttccaaccctccgaaaccgttaactaatcctactactactactactactccacctcgaaaccgctaaaaacgaaaccgacctaatcaatatccgccgaaacaaccgtctcgcgccctaaacctctacaaaaaccgctaacgacaaaaaataaccgacaaacacaaccaaaaaaccacgatatacacgtccgaaaataaacgaaaaacctccgaaaacctcctacaccccgcgaccgacttcgaaac

SEQ ID NO: 23255 - DNA, 708 bp, Artificial Sequence
  chemically treated genomic DNA (Homo sapiens) CpG-island No: 23255
tataaaattgtgtttgtatatagaataaattgtttgttgatagcggtttattgcgttgtgtgtgtgttttgagtttaaacggttcggttgtcgttttatttttggtttttcggtcggttagagtgtggtggggttttcgcgggggtcgttttggtttgaagtaagcgtcgaggtcggtgacgtgcgttgttttcgagttgtgttaggagttggtcgcgtcgtattagggtttggcggagtcgtttacgcgcgatttcgatgcggcgttttagtttttgtagtttttcgggttggggggttttcgtgggttttgcggcgggcgggcggtcgtaggagtatagttagacggggttttttcgcggcgtagttttcgttttcgcgttcgtttcgggtgttataattacggcgggttttagtaggaagcgtacgcggcgttttttgtttacggttcggcgcgttcgtttttagtttttcggagtcgttggttggttttgttgttgttgttgttgttttatttcggggtcgttggggacggaatcggtttggttagtgttcgtcggggtagtcgtttcgcgttttgggtttttgtagaggtcgttgacggtagaggatggtcgataggtataattagggagttacggtgtgtacgttcgggggtgggcgggggattttcgggaattttttgtatttcgcggtcggtttcggggt

SEQ ID NO: 23256 - DNA, 708 bp, Artificial Sequence
  chemically treated genomic DNA (Homo sapiens) CpG-island No: 23256
accccgaaaccgaccgcgaaatacaaaaaattcccgaaaatcccccgcccacccccgaacgtacacaccgtaactccctaattatacctatcgaccatcctctaccgtcaacgacctctacaaaaacccaaaacgcgaaacgactaccccgacgaacactaaccaaaccgattccgtccccaacgaccccgaaataaaacaacaacaacaacaacaaaaccaaccaacgactccgaaaaactaaaaacgaacgcgccgaaccgtaaacaaaaaacgccgcgtacgcttcctactaaaacccgccgtaattataacacccgaaacgaacgcgaaaacgaaaactacgccgcgaaaaaaccccgtctaactatactcctacgaccgcccgcccgccgcaaaacccacgaaaaccccccaacccgaaaaactacaaaaactaaaacgccgcatcgaaatcgcgcgtaaacgactccgccaaaccctaatacgacgcgaccaactcctaacacaactcgaaaacaacgcacgtcaccgacctcgacgcttacttcaaaccaaaacgacccccgcgaaaaccccaccacactctaaccgaccgaaaaaccaaaaataaaacgacaaccgaaccgtttaaactcaaaacacacacacaacgcaataaaccgctatcaacaaacaatttattctatatacaaacacaattttata

SEQ ID NO: 23257 - DNA, 721 bp, Artificial Sequence
  chemically treated genomic DNA (Homo sapiens) CpG-island No: 23257
ggttcgcgagttatacgatgaggatgatgtagaaggcggtggtggtgtcgttgaagaatttcgatatgatggtttttatttttgtagggagaggcggcgtcggttgaagcgggcggggcggggtgtagcgcggggcgggggaggtcgggtggggtttttatcgacgagggttaggatgacggttagtaggggcgttgcggggaaggcgatggttatgtttatttttagtatttgtagtaggtttattgcgggtatagggcggcgggcgttcggtgagggtttggaggacgttcgtttcgttttgcgtcggcgggatatttatcgatgaagacgaagatttggtggtgtgagtatcgtagtagtatggatacgtttagcgtttgtaaggggcgcgtaggaagcgttatgaggggttgcgagggtttgtttggttttcgttcggttagttttcgtattcgtttcgaggtatttacgaagatgattatgatggcgaaggcggttaggtaggacgttcgcgttatttatatgtttataaagcggtagtgttcgttcgatattatatttcgtaggaagtttgtagtagaaggagtcgtgagcgttcgtttttattcgcgttttcgtattttcggtttcggggtatgttttatttttgtttttttcgttttcggttaggttttttacgttggatatgaggatgttatcgtagtttaggaatttattt

SEQ ID NO: 23258 - DNA, 721 bp, Artificial Sequence
  chemically treated genomic DNA (Homo sapiens) CpG-island No: 23258
aaataaattcctaaactacgataacatcctcatatccaacgtaaaaaacctaaccgaaaacgaaaaaaacaaaaataaaacataccccgaaaccgaaaatacgaaaacgcgaataaaaacgaacgctcacgactccttctactacaaacttcctacgaaatataatatcgaacgaacactaccgctttataaacatataaataacgcgaacgtcctacctaaccgccttcgccatcataatcatcttcgtaaatacctcgaaacgaatacgaaaactaaccgaacgaaaaccaaacaaaccctcgcaacccctcataacgcttcctacgcgccccttacaaacgctaaacgtatccatactactacgatactcacaccaccaaatcttcgtcttcatcgataaatatcccgccgacgcaaaacgaaacgaacgtcctccaaaccctcaccgaacgcccgccgccctatacccgcaataaacctactacaaatactaaaaataaacataaccatcgccttccccgcaacgcccctactaaccgtcatcctaaccctcgtcgataaaaaccccacccgacctcccccgccccgcgctacaccccgccccgcccgcttcaaccgacgccgcctctccctacaaaaataaaaaccatcatatcgaaattcttcaacgacaccaccaccgccttctacatcatcctcatcgtataactcgcgaacc

SEQ ID NO: 23259 - DNA, 721 bp, Artificial Sequence
  chemically treated genomic DNA (Homo sapiens) CpG-island No: 23259
ggatgagtttttgggttacgatgatatttttatgtttagcgtgaagggtttggtcgagaacgaggagaataagggtgaggtatgtttcggggtcgagggtgcgagggcgcgggtgggggcgggcgtttacggttttttttgttgtaggttttttgcggaatgtggtgtcgggcgagtattatcgttttgtgagtatgtggatggcgcggacgttttatttggtcgttttcgttattatggttattttcgtgagtgtttcggggcgggtgcgggggttggtcgggcgggagttaagtaggttttcgtagttttttatagcgttttttgcgcgttttttgtagacgttgagcgtgtttatgttgttgcggtatttatattattagattttcgtttttatcggtgagtgtttcgtcggcgtagggcggggcgggcgttttttaggtttttatcgggcgttcgtcgttttgtgttcgtagtggatttgttgtagatgttggagatgaatatggttatcgtttttttcgtagcgtttttgttgatcgttattttggttttcgtcggtgaggattttattcggtttttttcgtttcgcgttgtatttcgtttcgttcgttttaatcggcgtcgtttttttttgtagggatggaggttattatgtcggagttttttaacgatattattatcgttttttatattatttttatcgtgtggttcgcggatt

SEQ ID NO: 23260 - DNA, 721 bp, Artificial Sequence
  chemically treated genomic DNA (Homo sapiens) CpG-island No: 23260
aatccgcgaaccacacgataaaaataatataaaaaacgataataatatcgttaaaaaactccgacataataacctccatccctacaaaaaaaaacgacgccgattaaaacgaacgaaacgaaatacaacgcgaaacgaaaaaaaccgaataaaatcctcaccgacgaaaaccaaaataacgatcaacaaaaacgctacgaaaaaaacgataaccatattcatctccaacatctacaacaaatccactacgaacacaaaacgacgaacgcccgataaaaacctaaaaaacgcccgccccgccctacgccgacgaaacactcaccgataaaaacgaaaatctaataatataaataccgcaacaacataaacacgctcaacgtctacaaaaaacgcgcaaaaaacgctataaaaaactacgaaaacctacttaactcccgcccgaccaacccccgcacccgccccgaaacactcacgaaaataaccataataacgaaaacgaccaaataaaacgtccgcgccatccacatactcacaaaacgataatactcgcccgacaccacattccgcaaaaaacctacaacaaaaaaaaccgtaaacgcccgcccccacccgcgccctcgcaccctcgaccccgaaacatacctcacccttattctcctcgttctcgaccaaacccttcacgctaaacataaaaatatcatcgtaacccaaaaactcatcc

SEQ ID NO: 23261 - DNA, 610 bp, Artificial Sequence
  chemically treated genomic DNA (Homo sapiens) CpG-island No: 23261
ggggttaggggtcgcggtcggaggtagtagatttgggggtcgggatagtcgttggggttaagggtcgggggtcggggtcgcggttattttgagtagtacgaagaattcgaagagacggcggaaggcgggcgggaagagtcgcgaataggtgatagttattttgaagaatagcgcgtggaagagtcggtcgcgtacgttgatgagggggttggggttgagattgggggtgcgaggttcgcgcgcgggggtcgggtcgtcgtcgtcgtcgttgggttcgggtttcggagttgcgggttttacgtgtttcgatatgttttttagcgtcgcgttttaacgattcgtaagtgttcgagggcgtttttcggtcgttatcggtcgttttcgtagtcgtcgttttttttacggtttttcggtcgtcgtcgttatttttcgttttttcgttcggttgcggcgttgttgacgttagcgagtcgttacgtcgggtaagagcggtttttttgcgttcgtagagaacgttgggatgttagcggcgttcgcggaggttttattttttatttcggtcgttttagggggcgggtttgtatttgggttattttttttgtatattggt

SEQ ID NO: 23262 - DNA, 610 bp, Artificial Sequence
  chemically treated genomic DNA (Homo sapiens) CpG-island No: 23262
accaatatacaaaaaaaataacccaaatacaaacccgccccctaaaacgaccgaaataaaaaataaaacctccgcgaacgccgctaacatcccaacgttctctacgaacgcaaaaaaaccgctcttacccgacgtaacgactcgctaacgtcaacaacgccgcaaccgaacgaaaaaacgaaaaataacgacgacgaccgaaaaaccgtaaaaaaaacgacgactacgaaaacgaccgataacgaccgaaaaacgccctcgaacacttacgaatcgttaaaacgcgacgctaaaaaacatatcgaaacacgtaaaacccgcaactccgaaacccgaacccaacgacgacgacgacgacccgacccccgcgcgcgaacctcgcacccccaatctcaaccccaaccccctcatcaacgtacgcgaccgactcttccacgcgctattcttcaaaataactatcacctattcgcgactcttcccgcccgccttccgccgtctcttcgaattcttcgtactactcaaaataaccgcgaccccgacccccgacccttaaccccaacgactatcccgacccccaaatctactacctccgaccgcgacccctaacccc

SEQ ID NO: 23263 - DNA, 610 bp, Artificial Sequence
  chemically treated genomic DNA (Homo sapiens) CpG-island No: 23263
gttaatatgtaaaagaggtggtttagatgtaggttcgttttttggagcggtcgaggtagggggtgaggttttcgcgggcgtcgttggtattttagcgttttttgcgggcgtaggggggtcgtttttgttcggcgtggcgattcgttagcgttagtagcgtcgtagtcggacgagaaagcggaagatggcggcggcggtcgggaggtcgtgaggagagcggcggttgcgagggcggtcgatggcggtcgggaggcgttttcggatatttgcgggtcgttagggcgcgacgttgggaggtatgtcggagtacgtggagttcgtagtttcggggttcgggtttaacggcggcggcggcggttcggttttcgcgcgcgggtttcgtatttttaattttaattttaatttttttattaacgtgcgcgatcggtttttttacgcgttgttttttaagatggttgttatttattcgcggtttttttcgttcgtttttcgtcgttttttcgagtttttcgtgttgtttaaggtgatcgcggtttcgattttcgatttttgattttagcggttgtttcgatttttaagtttgttattttcgatcgcgatttttggtttt

SEQ ID NO: 23264 - DNA, 610 bp, Artificial Sequence
  chemically treated genomic DNA (Homo sapiens) CpG-island No: 23264
aaaaccaaaaatcgcgatcgaaaataacaaacttaaaaatcgaaacaaccgctaaaatcaaaaatcgaaaatcgaaaccgcgatcaccttaaacaacacgaaaaactcgaaaaaacgacgaaaaacgaacgaaaaaaaccgcgaataaataacaaccatcttaaaaaacaacgcgtaaaaaaaccgatcgcgcacgttaataaaaaaattaaaattaaaattaaaaatacgaaacccgcgcgcgaaaaccgaaccgccgccgccgccgttaaacccgaaccccgaaactacgaactccacgtactccgacatacctcccaacgtcgcgccctaacgacccgcaaatatccgaaaacgcctcccgaccgccatcgaccgccctcgcaaccgccgctctcctcacgacctcccgaccgccgccgccatcttccgctttctcgtccgactacgacgctactaacgctaacgaatcgccacgccgaacaaaaacgacccccctacgcccgcaaaaaacgctaaaataccaacgacgcccgcgaaaacctcaccccctacctcgaccgctccaaaaaacgaacctacatctaaaccacctcttttacatattaac

SEQ ID NO: 23265 - DNA, 982 bp, Artificial Sequence
  chemically treated genomic DNA (Homo sapiens) CpG-island No: 23265
atcgtttcggagtcgagttttttattagtttgtttttagttaagttcgttattatttttacgtcgtagcgatttatacgtttttttagcgatttaaattcgtttttaatttattatatatacgcgcgcgtatatatatatatagggttatcggttttcggttatttaagggaatagggagggagcgagagattttgcgagcgagaagcggggtcgttttacggtttcgtttggttcggtatttatttgtaggtcgcgagttcgggggcggcggcgtcggcgtttcgttttcgttaaagacgagtttgaagtcgagttcgtcgtgggcgttatagtttgtagtagttatcggcgtggtttagggtgttgtagtttttttttaggcggcggcggcggtagcggtaagcggcggtagtagttttttaacgtcgttttatgtcgggtcgcgcgggttaagaggtcgcgattttacggtaaatttttcgggcggggttcgcgacgtcgagcgtttcgtttcgaaagttggtcgcgcgtcgagtagtattaggaatcgtagtcgttcgttatcggtgtttaagtttttattgtcggtttagttaatgtttttcgtcgtttttttatagtcgtcgttatcgtcgtcgcgggtgcgttttcgcgttttgtcgcgcgttcggtttcgttttttacgcgcgtttattttgtttggttgtcgattggttattaatacggcgaataggcgtcgggtttcgtttttttataggtttatcgcgtaattcggttttcgcgagaaggaaggaagttacgtgaatacgtaggcgttttttttttttttttcgtagagtttagttatttttcgggaattgtagtttggtttgtattttttcggcgattttttttaaattagacgagagaaggtcgttagtttttttaattggataggggattattatcggttaatgtagaagatttttttttttattggg

SEQ ID NO: 23266 - DNA, 982 bp, Artificial Sequence
  chemically treated genomic DNA (Homo sapiens) CpG-island No: 23266
cccaataaaaaaaaaaatcttctacattaaccgataataatcccctatccaattaaaaaaactaacgaccttctctcgtctaatttaaaaaaaatcgccgaaaaaatacaaaccaaactacaattcccgaaaaataactaaactctacgaaaaaaaaaaaaaaaacgcctacgtattcacgtaacttccttccttctcgcgaaaaccgaattacgcgataaacctataaaaaaacgaaacccgacgcctattcgccgtattaataaccaatcgacaaccaaacaaaataaacgcgcgtaaaaaacgaaaccgaacgcgcgacaaaacgcgaaaacgcacccgcgacgacgataacgacgactataaaaaaacgacgaaaaacattaactaaaccgacaataaaaacttaaacaccgataacgaacgactacgattcctaatactactcgacgcgcgaccaactttcgaaacgaaacgctcgacgtcgcgaaccccgcccgaaaaatttaccgtaaaatcgcgacctcttaacccgcgcgacccgacataaaacgacgttaaaaaactactaccgccgcttaccgctaccgccgccgccgcctaaaaaaaaactacaacaccctaaaccacgccgataactactacaaactataacgcccacgacgaactcgacttcaaactcgtctttaacgaaaacgaaacgccgacgccgccgcccccgaactcgcgacctacaaataaataccgaaccaaacgaaaccgtaaaacgaccccgcttctcgctcgcaaaatctctcgctccctccctattcccttaaataaccgaaaaccgataaccctatatatatatatacgcgcgcgtatatataataaattaaaaacgaatttaaatcgctaaaaaaacgtataaatcgctacgacgtaaaaataataacgaacttaactaaaaacaaactaataaaaaactcgactccgaaacgat

SEQ ID NO: 23267 - DNA, 982 bp, Artificial Sequence
  chemically treated genomic DNA (Homo sapiens) CpG-island No: 23267
tttaatgaggagaagggttttttgtattggtcggtggtggttttttatttaattagagaggttaacggttttttttcgtttggtttagaaggaatcgtcgggggaatataggttaaattataattttcgagaggtagttgggttttgcgggggggggggggggggcgtttgcgtgtttacgtgatttttttttttttcgcggagatcgagttacgcgataggtttgtgagggggcggggttcggcgtttgttcgtcgtgttagtggttaatcggtagttaggtagggtgggcgcgcgtagggggcggggtcgggcgcgcggtagggcgcgagagcgtattcgcggcggcggtggcggcgattgtgggggggcggcggggaatattggttaagtcgatagtggaggtttaggtatcggtggcgggcggttgcggtttttggtgttgttcggcgcgcggttagttttcggaacggaacgttcggcgtcgcgggtttcgttcggaaagtttgtcgtggagtcgcgattttttggttcgcgcggttcggtatgaagcggcgttgaggagttgttgtcgtcgtttgtcgttgtcgtcgtcgtcgtttgaggaggagttgtagtattttgggttacgtcgatgattattgtaaattgtggcgtttacgacgagttcgattttaaattcgtttttggcgaggacggggcgtcggcgtcgtcgttttcgggttcgcggtttgtaggtgggtgtcgggttaggcgggatcgtggagcgatttcgtttttcgttcgtaggatttttcgttttttttttgtttttttggatgatcggagatcgataattttgtgtgtgtgtgtgcgcgcgcgtgtgtgtggtgagttaaaaacggatttaaatcgttgaggaggcgtgtgggtcgttgcgacgtggaagtggtggcgggtttggttggaagtaaattagtggggaattcgatttcgggacgat

SEQ ID NO: 23268 - DNA, 982 bp, Artificial Sequence
  chemically treated genomic DNA (Homo sapiens) CpG-island No: 23268
atcgtcccgaaatcgaattccccactaatttacttccaaccaaacccgccaccacttccacgtcgcaacgacccacacgcctcctcaacgatttaaatccgtttttaactcaccacacacacgcgcgcgcacacacacacacaaaattatcgatctccgatcatccaaaaaaacaaaaaaaaaacgaaaaatcctacgaacgaaaaacgaaatcgctccacgatcccgcctaacccgacacccacctacaaaccgcgaacccgaaaacgacgacgccgacgccccgtcctcgccaaaaacgaatttaaaatcgaactcgtcgtaaacgccacaatttacaataatcatcgacgtaacccaaaatactacaactcctcctcaaacgacgacgacgacaacgacaaacgacgacaacaactcctcaacgccgcttcataccgaaccgcgcgaaccaaaaaatcgcgactccacgacaaactttccgaacgaaacccgcgacgccgaacgttccgttccgaaaactaaccgcgcgccgaacaacaccaaaaaccgcaaccgcccgccaccgatacctaaacctccactatcgacttaaccaatattccccgccgcccccccacaatcgccgccaccgccgccgcgaatacgctctcgcgccctaccgcgcgcccgaccccgccccctacgcgcgcccaccctacctaactaccgattaaccactaacacgacgaacaaacgccgaaccccgccccctcacaaacctatcgcgtaactcgatctccgcgaaaaaaaaaaaaatcacgtaaacacgcaaacgcccccccccccccccccgcaaaacccaactacctctcgaaaattataatttaacctatattcccccgacgattccttctaaaccaaacgaaaaaaaaccgttaacctctctaattaaataaaaaaccaccaccgaccaatacaaaaaacccttctcctcattaaa

SEQ ID NO: 23269 - DNA, 671 bp, Artificial Sequence
  chemically treated genomic DNA (Homo sapiens) CpG-island No: 23269
tttacgacgcgtttttttttaaggttggtcgggtttggatgtcgttattttttattcggagttatagatttcgtagttgaatttttaaaaagaatttcgttttttttttacggtgttttagttttatatatcgtattgagtttcgttagttatcgtacgcgaggtcgcggcgcgttcgtgacgttattgatgtgcgtttttttcgtattaagggaaatatggttttaacgcggtcggtgcggtttttttttttcgtgattcggttgtttttggcgtcgcgacggggttttacggttcgtagtttcgacgaatttttgtcggtggtgcgtattttagtggttttatagcggtagttggaatagcggtagagtaggcggcggaatttttcgaggtcggtgttggttcgattcggatcgttgttggtttcggcgcggcggtcggagttgaattagtcggcgcgttttatattgggtcgttgggagcgcgcgtcgttagttttttaaggttggaagagtcgacgcgcgcgtcgggattatttttttatcgagcgcgcgtaataggaggcgttagcggtgcgaaagttttcgtttaagggtagttttgttgatttgggtttggagtttcgtgtgttgtacgtattataggaggttgcgtttgaagtcgtttagttt

SEQ ID NO: 23270 - DNA, 671 bp, Artificial Sequence
  chemically treated genomic DNA (Homo sapiens) CpG-island No: 23270
aaactaaacgacttcaaacgcaacctcctataatacgtacaacacacgaaactccaaacccaaatcaacaaaactacccttaaacgaaaactttcgcaccgctaacgcctcctattacgcgcgctcgataaaaaaataatcccgacgcgcgcgtcgactcttccaaccttaaaaaactaacgacgcgcgctcccaacgacccaatataaaacgcgccgactaattcaactccgaccgccgcgccgaaaccaacaacgatccgaatcgaaccaacaccgacctcgaaaaattccgccgcctactctaccgctattccaactaccgctataaaaccactaaaatacgcaccaccgacaaaaattcgtcgaaactacgaaccgtaaaaccccgtcgcgacgccaaaaacaaccgaatcacgaaaaaaaaaaaccgcaccgaccgcgttaaaaccatatttcccttaatacgaaaaaaacgcacatcaataacgtcacgaacgcgccgcgacctcgcgtacgataactaacgaaactcaatacgatatataaaactaaaacaccgtaaaaaaaaaacgaaattctttttaaaaattcaactacgaaatctataactccgaataaaaaataacgacatccaaacccgaccaaccttaaaaaaaaacgcgtcgtaaa

SEQ ID NO: 23271 - DNA, 671 bp, Artificial Sequence
  chemically treated genomic DNA (Homo sapiens) CpG-island No: 23271
gggttgaacgattttaggcgtagttttttgtagtgcgtgtagtatacggggttttaggtttaggttagtaaagttgtttttagacgagagttttcgtatcgttggcgttttttgttgcgcgcgttcgatggagaagtggtttcgacgcgcgcgtcgatttttttagttttgagaggttagcggcgcgcgtttttaacggtttagtgtgaggcgcgtcggttggtttaatttcggtcgtcgcgtcgaaattagtagcggttcgggtcgaattagtatcggtttcgggaggtttcgtcgtttgttttgtcgttgttttaattgtcgttgtagagttattgggatgcgtattatcggtaggggttcgtcgggattgcggatcgtgaggtttcgtcgcggcgttaggagtaatcgagttacgagggaaaagagtcgtatcggtcgcgttagagttatgttttttttagtgcgggagaagcgtatattagtgacgttacggacgcgtcgcgatttcgcgtacggtggttggcgaggtttagtacggtgtgtggagttggagtatcgtgaggaagaagcgaggttttttttaagagtttagttgcgaggtttgtagtttcgaataggggatggcgatatttagattcggttagttttggggaagggcgcgtcgtgga

SEQ ID NO: 23272 - DNA, 671 bp, Artificial Sequence
  chemically treated genomic DNA (Homo sapiens) CpG-island No: 23272
tccacgacgcgcccttccccaaaactaaccgaatctaaatatcgccatcccctattcgaaactacaaacctcgcaactaaactcttaaaaaaaacctcgcttcttcctcacgatactccaactccacacaccgtactaaacctcgccaaccaccgtacgcgaaatcgcgacgcgtccgtaacgtcactaatatacgcttctcccgcactaaaaaaaacataactctaacgcgaccgatacgactcttttccctcgtaactcgattactcctaacgccgcgacgaaacctcacgatccgcaatcccgacgaacccctaccgataatacgcatcccaataactctacaacgacaattaaaacaacgacaaaacaaacgacgaaacctcccgaaaccgatactaattcgacccgaaccgctactaatttcgacgcgacgaccgaaattaaaccaaccgacgcgcctcacactaaaccgttaaaaacgcgcgccgctaacctctcaaaactaaaaaaatcgacgcgcgcgtcgaaaccacttctccatcgaacgcgcgcaacaaaaaacgccaacgatacgaaaactctcgtctaaaaacaactttactaacctaaacctaaaaccccgtatactacacgcactacaaaaaactacgcctaaaatcgttcaaccc

SEQ ID NO: 23273 - DNA, 514 bp, Artificial Sequence
  chemically treated genomic DNA (Homo sapiens) CpG-island No: 23273
aaataaatttttggatttttttgtttttttagttttaagggtcgcgatgttgtatttagaagattatttggaaagtgagtgcgcggcgttggcggcggtcgttagtgggacgtgcgggcgggtaagagcgcgagtggacgggtagcgagatggcgggagggagggggcggcgggggatgttttttttttacggtaattggtagtttcgttgtgggttgtcggttttttcgatttttttgacgtacgcgcgtagtgacgtaagcgcgtatttcgtcgttggtttcgtttttttgacggattttttttttgatagtgattgagtagttttttatggatttgcgggatcgttttacggaaatgcgcgagatggatttgtaggtgtagagtaagtcggcgcgtttattatttttgttcgttgcgcgcgtttagtgttagatttgtttgttattattgttagcgtttagtgtttttttattgttttttggtttatttcgttagtgtataaggagttgtt

SEQ ID NO: 23274 - DNA, 514 bp, Artificial Sequence
  chemically treated genomic DNA (Homo sapiens) CpG-island No: 23274
aacaactccttatacactaacgaaataaaccaaaaaacaataaaaaaacactaaacgctaacaataataacaaacaaatctaacactaaacgcgcgcaacgaacaaaaataataaacgcgccgacttactctacacctacaaatccatctcgcgcatttccgtaaaacgatcccgcaaatccataaaaaactactcaatcactatcaaaaaaaaaatccgtcaaaaaaacgaaaccaacgacgaaatacgcgcttacgtcactacgcgcgtacgtcaaaaaaatcgaaaaaaccgacaacccacaacgaaactaccaattaccgtaaaaaaaaaacatcccccgccgccccctccctcccgccatctcgctacccgtccactcgcgctcttacccgcccgcacgtcccactaacgaccgccgccaacgccgcgcactcactttccaaataatcttctaaatacaacatcgcgacccttaaaactaaaaaaacaaaaaaatccaaaaatttattt

SEQ ID NO: 23275 - DNA, 514 bp, Artificial Sequence
  chemically treated genomic DNA (Homo sapiens) CpG-island No: 23275
gataattttttatgtattagcggagtgagttagaggatagtgaaagagtattaggcgttagtagtgatgataagtaagtttggtattgaacgcgcgtagcgaataggagtagtagacgcgtcgatttattttgtatttgtaggtttatttcgcgtattttcgtgaagcggtttcgtagatttataggaagttgtttaattattgttaaagggagagttcgttagaggggcggggttaacggcgaaatacgcgtttacgttattgcgcgcgtgcgttaggggggtcgagggggtcggtagtttataacgaggttgttagttatcgtgagaaagaaatatttttcgtcgttttttttttttcgttatttcgttgttcgtttattcgcgtttttgttcgttcgtacgttttattggcggtcgtcgttagcgtcgcgtatttattttttagatagttttttaggtataatatcgcggtttttagagttgagggaataagggggtttaggggtttattt

SEQ ID NO: 23276 - DNA, 514 bp, Artificial Sequence
  chemically treated genomic DNA (Homo sapiens) CpG-island No: 23276
aaataaacccctaaacccccttattccctcaactctaaaaaccgcgatattatacctaaaaaactatctaaaaaataaatacgcgacgctaacgacgaccgccaataaaacgtacgaacgaacaaaaacgcgaataaacgaacaacgaaataacgaaaaaaaaaaaacgacgaaaaatatttctttctcacgataactaacaacctcgttataaactaccgaccccctcgacccccctaacgcacgcgcgcaataacgtaaacgcgtatttcgccgttaaccccgcccctctaacgaactctccctttaacaataattaaacaacttcctataaatctacgaaaccgcttcacgaaaatacgcgaaataaacctacaaatacaaaataaatcgacgcgtctactactcctattcgctacgcgcgttcaataccaaacttacttatcatcactactaacgcctaatactctttcactatcctctaactcactccgctaatacataaaaaattatc

SEQ ID NO: 23277 - DNA, 899 bp, Artificial Sequence
  chemically treated genomic DNA (Homo sapiens) CpG-island No: 23277
tcggtcgtttgttggttgcggcgttttcgcggttcgcgcgtatttttcgcgttgcgtttcgtatacgcgcgttttcgtcgcgtttcgttcgggtcgtttcgttggcggcggcgattgggttgtaggtagcgagttagtcggtttcggttcggtaatttatggtaatcgttttggtaatttatggtaattgcgcggcggaaagaaaaaaaagaatcgtggtggggcggggggcggcgggcggtgaatgggaataacgatcgtaaagagatagcgatttatcgcgcgggtttgcggttttcggtcgtatttgttgtagacggttcgcgaggttttttttcgcgttacggtgacgattttggttgttggggaaaagagtaataagtagaaagttttcgtgtagaggggattcgggcggtgtatttggtgtgggaggttgttttaaacgtcgatgattttttcggttttcgcgtgtttcggtttttagggtttcgttaggttggagagcgcgcgtggagagggttttgtcgtttgggggttggttgaggggcggtcgcgtcggggtcggggttggattttaggttttgttttgtagacgttcgcgttcggtcggaggaggggttatatcgtgttgtttcggttttatggggttcggttttcgagggttttcgcgagcggacgcggtggggtcgggtaaattttacgtgttttaaattttgttatttgtatacgtatcgtatatattagttaattttttttttttttaggttttcgagaatttaatttgttcggcgggcgcgcggttgcgttaatttggtttttttcgtttggagagggaggggacggtcgcgtttggtggtaggattgggttgtgtgtgtgtgtgtgtgtgtgtgtgtgtgtg

SEQ ID NO: 23278 - DNA, 899 bp, Artificial Sequence
  chemically treated genomic DNA (Homo sapiens) CpG-island No: 23278
cacacacacacacacacacacacacacacacaacccaatcctaccaccaaacgcgaccgtcccctccctctccaaacgaaaaaaaccaaattaacgcaaccgcgcgcccgccgaacaaattaaattctcgaaaacctaaaaaaaaaaaaaattaactaatatatacgatacgtatacaaataacaaaatttaaaacacgtaaaatttacccgaccccaccgcgtccgctcgcgaaaaccctcgaaaaccgaaccccataaaaccgaaacaacacgatataacccctcctccgaccgaacgcgaacgtctacaaaacaaaacctaaaatccaaccccgaccccgacgcgaccgcccctcaaccaacccccaaacgacaaaaccctctccacgcgcgctctccaacctaacgaaaccctaaaaaccgaaacacgcgaaaaccgaaaaaatcatcgacgtttaaaacaacctcccacaccaaatacaccgcccgaatcccctctacacgaaaactttctacttattactcttttccccaacaaccaaaatcgtcaccgtaacgcgaaaaaaaacctcgcgaaccgtctacaacaaatacgaccgaaaaccgcaaacccgcgcgataaatcgctatctctttacgatcgttattcccattcaccgcccgccgccccccgccccaccacgattcttttttttctttccgccgcgcaattaccataaattaccaaaacgattaccataaattaccgaaccgaaaccgactaactcgctacctacaacccaatcgccgccgccaacgaaacgacccgaacgaaacgcgacgaaaacgcgcgtatacgaaacgcaacgcgaaaaatacgcgcgaaccgcgaaaacgccgcaaccaacaaacgaccga

SEQ ID NO: 23279 - DNA, 899 bp, Artificial Sequence
  chemically treated genomic DNA (Homo sapiens) CpG-island No: 23279
tatatatatatatatatatatatatatatatagtttagttttattattaggcgcgatcgttttttttttttttagacggaaggggttaggttaacgtagtcgcgcgttcgtcgggtaggttaggttttcgggggtttagaagggaaaggggttaattaatgtgtgcgatgcgtgtgtagatgataaaatttagggtacgtagagtttgttcggttttatcgcgttcgttcgcggggattttcgggggtcgggttttatggggtcggggtagtacggtgtagtttttttttcggtcgggcgcgagcgtttgtagaataaagtttggagtttagtttcggtttcggcgcggtcgttttttaattaatttttaggcggtaaggttttttttacgcgcgttttttagtttggcggggttttggaagtcgggatacgcggaggtcgggagggttatcggcgtttaaggtagttttttatattaagtgtatcgttcggattttttttgtacgagggttttttgtttattgtttttttttttagtagttagaatcgttatcgtagcgcgggaaggggtttcgcgggtcgtttgtagtaggtgcggtcgggagtcgtaggttcgcgcggtaaatcgttgtttttttgcggtcgttgtttttatttatcgttcgtcgtttttcgttttattacggttttttttttttttttcgtcgcgtagttgttatgggttattagggcggttgttatgggttatcggatcgaggtcggttggttcgttatttgtagtttagtcgtcgtcgttagcggagcggttcgggcgggacgcggcgggagcgcgcgtgtgcgggacgtagcgcgggggatgcgcgcgggtcgcggaggcgtcgtaattaataggcggtcga

SEQ ID NO: 23280 - DNA, 899 bp, Artificial Sequence
  chemically treated genomic DNA (Homo sapiens) CpG-island No: 23280
tcgaccgcctattaattacgacgcctccgcgacccgcgcgcatcccccgcgctacgtcccgcacacgcgcgctcccgccgcgtcccgcccgaaccgctccgctaacgacgacgactaaactacaaataacgaaccaaccgacctcgatccgataacccataacaaccgccctaataacccataacaactacgcgacgaaaaaaaaaaaaaaaaccgtaataaaacgaaaaacgacgaacgataaataaaaacaacgaccgcaaaaaaacaacgatttaccgcgcgaacctacgactcccgaccgcacctactacaaacgacccgcgaaaccccttcccgcgctacgataacgattctaactactaaaaaaaaaaacaataaacaaaaaaccctcgtacaaaaaaaatccgaacgatacacttaatataaaaaactaccttaaacgccgataaccctcccgacctccgcgtatcccgacttccaaaaccccgccaaactaaaaaacgcgcgtaaaaaaaaccttaccgcctaaaaattaattaaaaaacgaccgcgccgaaaccgaaactaaactccaaactttattctacaaacgctcgcgcccgaccgaaaaaaaaactacaccgtactaccccgaccccataaaacccgacccccgaaaatccccgcgaacgaacgcgataaaaccgaacaaactctacgtaccctaaattttatcatctacacacgcatcgcacacattaattaacccctttcccttctaaacccccgaaaacctaacctacccgacgaacgcgcgactacgttaacctaaccccttccgtctaaaaaaaaaaaaaacgatcgcgcctaataataaaactaaactatatatatatatatatatatatatatatata

SEQ ID NO: 23281 - DNA, 702 bp, Artificial Sequence
  chemically treated genomic DNA (Homo sapiens) CpG-island No: 23281
gcgcggtttttgagtcgcgttcggtcgtttattttttttttttttagtatcgggtcggttttttttttcggttcggttcggcggttggggggtgggcggagtcgcggtcgggtagtttattatgttggatagggcgcgtttgcgttttcggtcgtcgcggttttcggggttttcgtttgtagtcggcggcggaacgagggtaggcggttgagataggcgagttatttgtatttttcggtagttatttttatatgcggaggtaatgaagttgttagcggcgtttcgagtgtggtagagtttgatatttaaatcgttttgttcgtttcgtttgttttcgttcgttggtttcgggagttttaggttgcgcgcgttcgtatcgtatcgtcgttttgtttcgcgatcgcgcgcgttttttcgttttttttcgcgtttttgttttcgttttttttttttttttttttttttttgtgtcgggttagatttagttttagaaattagttattttgtcgcgttcgattgttagggattttttacgtcgcgaggtgagttggtcgtaggtgtggggaagttcgcgggtgtagttaggtcgtcgttttcgcgttcgacgttacgttcgttttttttttttttttttaggggttttttgttttttttttattttcgtttttaagaaagatgatttagtattgttattatcgtttg

SEQ ID NO: 23282 - DNA, 702 bp, Artificial Sequence
  chemically treated genomic DNA (Homo sapiens) CpG-island No: 23282
caaacgataataacaatactaaatcatctttcttaaaaacgaaaataaaaaaaaaacaaaaaacccctaaaaaaaaaaaaaaaaaacgaacgtaacgtcgaacgcgaaaacgacgacctaactacacccgcgaacttccccacacctacgaccaactcacctcgcgacgtaaaaaatccctaacaatcgaacgcgacaaaataactaatttctaaaactaaatctaacccgacacaaaaaaaaaaaaaaaaaaaaaaaaaacgaaaacaaaaacgcgaaaaaaaacgaaaaaacgcgcgcgatcgcgaaacaaaacgacgatacgatacgaacgcgcgcaacctaaaactcccgaaaccaacgaacgaaaacaaacgaaacgaacaaaacgatttaaatatcaaactctaccacactcgaaacgccgctaacaacttcattacctccgcatataaaaataactaccgaaaaatacaaataactcgcctatctcaaccgcctaccctcgttccgccgccgactacaaacgaaaaccccgaaaaccgcgacgaccgaaaacgcaaacgcgccctatccaacataataaactacccgaccgcgactccgcccaccccccaaccgccgaaccgaaccgaaaaaaaaaaccgacccgatactaaaaaaaaaaaaaataaacgaccgaacgcgactcaaaaaccgcgc

SEQ ID NO: 23283 - DNA, 702 bp, Artificial Sequence
  chemically treated genomic DNA (Homo sapiens) CpG-island No: 23283
taaacggtaatggtagtattaggttattttttttggagacggaggtgaagggagggtaaggggtttttggggaaggaaagaggaggcgggcgtggcgtcgagcgcgagggcggcggtttagttgtattcgcgaatttttttatatttgcgattagtttatttcgcggcgtgagggatttttggtagtcggacgcggtagggtggttggtttttggggttgagtttggttcgatataaaagaggagggaaaggagaaggagacggaaataaaggcgcgggggaggacgaggaggcgcgcgcggtcgcggggtaaagcggcgatgcggtgcgggcgcgcgtagtttggggttttcgggattagcgggcgggagtaggcggagcgggtagggcgatttgaatattaggttttgttatattcggggcgtcgttgataattttattattttcgtatataaaaatgattgtcggggaatgtaaatagttcgtttgttttagtcgtttgttttcgtttcgtcgtcggttgtaggcggaggtttcgggagtcgcggcggtcggaggcgtagacgcgttttgtttaatataatgaattgttcggtcgcggtttcgtttattttttagtcgtcgagtcgggtcgggagggggagtcggttcggtgttggaggaggaaggggtgggcggtcgggcgcggtttagaggtcgcgt

SEQ ID NO: 23284 - DNA, 702 bp, Artificial Sequence
  chemically treated genomic DNA (Homo sapiens) CpG-island No: 23284
acgcgacctctaaaccgcgcccgaccgcccaccccttcctcctccaacaccgaaccgactccccctcccgacccgactcgacgactaaaaaataaacgaaaccgcgaccgaacaattcattatattaaacaaaacgcgtctacgcctccgaccgccgcgactcccgaaacctccgcctacaaccgacgacgaaacgaaaacaaacgactaaaacaaacgaactatttacattccccgacaatcatttttatatacgaaaataataaaattatcaacgacgccccgaatataacaaaacctaatattcaaatcgccctacccgctccgcctactcccgcccgctaatcccgaaaaccccaaactacgcgcgcccgcaccgcatcgccgctttaccccgcgaccgcgcgcgcctcctcgtcctcccccgcgcctttatttccgtctccttctcctttccctcctcttttatatcgaaccaaactcaaccccaaaaaccaaccaccctaccgcgtccgactaccaaaaatccctcacgccgcgaaataaactaatcgcaaatataaaaaaattcgcgaatacaactaaaccgccgccctcgcgctcgacgccacgcccgcctcctctttccttccccaaaaaccccttaccctcccttcacctccgtctccaaaaaaaataacctaatactaccattaccgttta

SEQ ID NO: 23285 - DNA, 577 bp, Artificial Sequence
  chemically treated genomic DNA (Homo sapiens) CpG-island No: 23285
cggtttcgtttttgttacgtgatagcgtgcgtttttttttttgtttttttgatttttttcgttatttaaagaaatagtatcgggggcgggtcgagcgacgtagtcgggacggtagttgcggtgcggatcggaggagttattttgtttcgtcgtcggggagttaggtttttaaatcgaagaagttttggcgcgttttttttttttttcgggtttggtagggcgaaggaacgggcgtgcggtcgatcgagcgatcggttggcggtttttttttttgttttggtatttagtttttggggcgtaggttcggtcgtcgcggcgcgcgttcggtggtcgttggcgttcgcgtcgcgttttttttttcgtacgtagaattcgggcggcggtttatgcgtttgcgattcgacgaggagtcgttcgggtggtcggcggcggcgggtagttgtttcgtttcgtttcgggggaggcggcggcggtagcggtcgcgggatttggagcggtcggggaggcgggggtggtcggggtcggtttggaggtttggcgttatttttcggggtttgtaaggatttagttggggggg

SEQ ID NO: 23286 - DNA, 577 bp, Artificial Sequence
  chemically treated genomic DNA (Homo sapiens) CpG-island No: 23286
cccccccaactaaatccttacaaaccccgaaaaataacgccaaacctccaaaccgaccccgaccacccccgcctccccgaccgctccaaatcccgcgaccgctaccgccgccgcctcccccgaaacgaaacgaaacaactacccgccgccgccgaccacccgaacgactcctcgtcgaatcgcaaacgcataaaccgccgcccgaattctacgtacgaaaaaaaaaacgcgacgcgaacgccaacgaccaccgaacgcgcgccgcgacgaccgaacctacgccccaaaaactaaataccaaaacaaaaaaaaaaaccgccaaccgatcgctcgatcgaccgcacgcccgttccttcgccctaccaaacccgaaaaaaaaaaaaaacgcgccaaaacttcttcgatttaaaaacctaactccccgacgacgaaacaaaataactcctccgatccgcaccgcaactaccgtcccgactacgtcgctcgacccgcccccgatactatttctttaaataacgaaaaaaatcaaaaaaacaaaaaaaaaaacgcacgctatcacgtaacaaaaacgaaaccg

SEQ ID NO: 23287 - DNA, 577 bp, Artificial Sequence
  chemically treated genomic DNA (Homo sapiens) CpG-island No: 23287
tttttttaattgggtttttgtaggtttcgaagggtggcgttaggtttttaagtcggtttcggttattttcgttttttcggtcgttttaaatttcgcggtcgttgtcgtcgtcgtttttttcggagcggggcggagtagttgttcgtcgtcgtcgattattcggacgatttttcgtcgaatcgtaaacgtataggtcgtcgttcgagttttgcgtacgagaagaaagacgcggcgcgagcgttaacggttatcgggcgcgcgtcgcggcggtcgggtttgcgttttaagagttggatgttagagtaggagaaagagtcgttaatcgatcgttcgatcgatcgtacgttcgttttttcgttttattagattcgggagggggggagggcgcgttagggttttttcgatttaggggtttgatttttcggcgacgagataagatggttttttcggttcgtatcgtagttatcgtttcggttgcgtcgttcggttcgttttcggtattgtttttttaaatggcggagagggttaggaaagtaggaagagaggcgtacgttgttacgtgataggggcgggatcg

SEQ ID NO: 23288 - DNA, 577 bp, Artificial Sequence
  chemically treated genomic DNA (Homo sapiens) CpG-island No: 23288
cgatcccgcccctatcacgtaacaacgtacgcctctcttcctactttcctaaccctctccgccatttaaaaaaacaataccgaaaacgaaccgaacgacgcaaccgaaacgataactacgatacgaaccgaaaaaaccatcttatctcgtcgccgaaaaatcaaacccctaaatcgaaaaaaccctaacgcgccctccccccctcccgaatctaataaaacgaaaaaacgaacgtacgatcgatcgaacgatcgattaacgactctttctcctactctaacatccaactcttaaaacgcaaacccgaccgccgcgacgcgcgcccgataaccgttaacgctcgcgccgcgtctttcttctcgtacgcaaaactcgaacgacgacctatacgtttacgattcgacgaaaaatcgtccgaataatcgacgacgacgaacaactactccgccccgctccgaaaaaaacgacgacgacaacgaccgcgaaatttaaaacgaccgaaaaaacgaaaataaccgaaaccgacttaaaaacctaacgccacccttcgaaacctacaaaaacccaattaaaaaaa

SEQ ID NO: 23289 - DNA, 839 bp, Artificial Sequence
  chemically treated genomic DNA (Homo sapiens) CpG-island No: 23289
agcgttataagcgtcgggatagatttattcggttcggaatagatttcgcgttttattcggttaggtttagtttttattcggggattcgtgtcgggtttcgtagttgggatatggcgtttttcgggggcggcgatggggttcggcggacgaagtttagatattcgtaaattttcgattttataggtagcggcgtcgacgtagggttttcgcgttttgtttttttaggtttcgtgttttcggtttattcggtcgtttttattatgttttcggcgtcgatttcgttttcgttcggtcgcgcgttttttcgttgtcgattcgcgtcgtcgtcgtcgttttcgtagtatcgatcgtcgtcgtcggagtcggataatatttcgtgttcgtttcgcgttgttgtggttaatgttcgtttgttttgttggttcgaattttagcggttgtttaatcgcgcgtttttttttagttagatttcgttttttcggtatcgtttttttaacggttgtttgtttttgtatacggtacgcggaggcggggtttttagttttaatagtgacgcgttttttgttttttattaggcgtttaagtttgacgaatagaaaggtaaattaatgagattggacgtttcgtagacgaaagttaataaaaatatcgttcgcgagtaagggaggcgggttattgggaaggatagtaaaattagttaataaggtgaagcgattgtaggcgttgtggttttttcgtttattcgcggcgttggttttttcgtttttgagatttgtttggggaggtaaagagtgttggacgtgttttttttggtgggtttttatagattgtgaggattt

SEQ ID NO: 23290 - DNA, 839 bp, Artificial Sequence
  chemically treated genomic DNA (Homo sapiens) CpG-island No: 23290
aaatcctcacaatctataaaaacccaccaaaaaaaacacgtccaacactctttacctccccaaacaaatctcaaaaacgaaaaaaccaacgccgcgaataaacgaaaaaaccacaacgcctacaatcgcttcaccttattaactaattttactatccttcccaataacccgcctcccttactcgcgaacgatatttttattaactttcgtctacgaaacgtccaatctcattaatttacctttctattcgtcaaacttaaacgcctaataaaaaacaaaaaacgcgtcactattaaaactaaaaaccccgcctccgcgtaccgtatacaaaaacaaacaaccgttaaaaaaacgataccgaaaaaacgaaatctaactaaaaaaaaacgcgcgattaaacaaccgctaaaattcgaaccaacaaaacaaacgaacattaaccacaacaacgcgaaacgaacacgaaatattatccgactccgacgacgacgatcgatactacgaaaacgacgacgacgacgcgaatcgacaacgaaaaaacgcgcgaccgaacgaaaacgaaatcgacgccgaaaacataataaaaacgaccgaataaaccgaaaacacgaaacctaaaaaaacaaaacgcgaaaaccctacgtcgacgccgctacctataaaatcgaaaatttacgaatatctaaacttcgtccgccgaaccccatcgccgcccccgaaaaacgccatatcccaactacgaaacccgacacgaatccccgaataaaaactaaacctaaccgaataaaacgcgaaatctattccgaaccgaataaatctatcccgacgcttataacgct

SEQ ID NO: 23291 - DNA, 839 bp, Artificial Sequence
  chemically treated genomic DNA (Homo sapiens) CpG-island No: 23291
aaatttttatagtttgtgaaaatttattaggagaagtacgtttaatattttttatttttttaaataagttttagaagcgggaaaattaacgtcgcgaatgggcgggaaagttatagcgtttgtaatcgttttattttattagttaattttgttgttttttttagtggttcgttttttttgttcgcgggcgatatttttattggttttcgtttgcgaggcgtttaattttattggtttgtttttttgttcgttaggtttgggcgtttggtgaaaggtagagagcgcgttattattggggttggaggtttcgttttcgcgtgtcgtgtgtaaaaataaatagtcgttaggaaggcggtgtcgggggggcggggtttggttagaaggaggcgcgcgattgaatagtcgttggggttcgaattagtaagataagcgggtattggttatagtagcgcgaggcgggtacggggtattgttcggtttcggcggcggcggtcggtgttgcgagagcggcggcggcggcgcgggtcggtagcgggagggcgcgcggtcgagcggaggcggagtcggcgtcgagaatatggtaagggcggtcgggtgggtcgggggtacggggtttgggagagtagagcgcggaggttttgcgtcggcgtcgttatttgtggagtcgggagtttgcgggtgtttgggtttcgttcgtcgagttttatcgtcgttttcggggggcgttatgttttagttgcggagttcgatacgggttttcgggtgagagttgggtttggtcgggtagagcgcgaagtttgtttcgagtcggatagatttgtttcgacgtttgtgacgtt

SEQ ID NO: 23292 - DNA, 839 bp, Artificial Sequence
  chemically treated genomic DNA (Homo sapiens) CpG-island No: 23292
aacgtcacaaacgtcgaaacaaatctatccgactcgaaacaaacttcgcgctctacccgaccaaacccaactctcacccgaaaacccgtatcgaactccgcaactaaaacataacgccccccgaaaacgacgataaaactcgacgaacgaaacccaaacacccgcaaactcccgactccacaaataacgacgccgacgcaaaacctccgcgctctactctcccaaaccccgtacccccgacccacccgaccgcccttaccatattctcgacgccgactccgcctccgctcgaccgcgcgccctcccgctaccgacccgcgccgccgccgccgctctcgcaacaccgaccgccgccgccgaaaccgaacaataccccgtacccgcctcgcgctactataaccaatacccgcttatcttactaattcgaaccccaacgactattcaatcgcgcgcctccttctaaccaaaccccgcccccccgacaccgccttcctaacgactatttatttttacacacgacacgcgaaaacgaaacctccaaccccaataataacgcgctctctacctttcaccaaacgcccaaacctaacgaacaaaaaaacaaaccaataaaattaaacgcctcgcaaacgaaaaccaataaaaatatcgcccgcgaacaaaaaaaacgaaccactaaaaaaaacaacaaaattaactaataaaataaaacgattacaaacgctataactttcccgcccattcgcgacgttaattttcccgcttctaaaacttatttaaaaaaataaaaaatattaaacgtacttctcctaataaattttcacaaactataaaaattt

SEQ ID NO: 23293 - DNA, 1414 bp, Artificial Sequence
  chemically treated genomic DNA (Homo sapiens) CpG-island No: 23293
agtggacgatatcggagtttaaagtaaaagtgttacgggaagaggcgcgtagatagacgtagcgggcggttgagttacgttaaggttggtaagtttttagggttagaaatcgagtagtaatattagtttatttttagtttgtcgttcgttcggcgcggtttttgacgttatttttttgcgttacgtcgtcgcggcgttttcggtcgcgaggtcgcggagggcgggacggagtgattttacgggaaatcgcgcgtcggaagtggttagggttgtacggaagtcgcgggggcggggcgcggaggcgatgggggggcggcggcggtcggcgatgagcggcgggagcgcgtgagcgagtcgggcgggcgaggttggggggtttcggagcgcgagtcggagggcgggggcgcgagcgcggcgggcggtggcggcgaggcggcggtttagaagatggcggacggcgatagcggtagcgagcgcggcggcggcggtgggtcgtgcgggttttagttcgcgtttcgcggcggcggcgagtaagagacgtaggagttggtttcgaagcggttggatatttagaataagcgtttttatttagatgtgaagtagaacgttaagggtcgtttttttaagatcgtcgaggtgggcgcgggcggttttaaggcgttttacgttgtttagtgcggtggtcgtcgagttacgcgattgttggcgatttatagaatattagcgtagttgggttttagtagtttcgagtagttggcggttggcgtcgaggagggcggcgggttcgggcgcgcgtttaagagcgaatttttggtgcgtgagaatcgtaagtattatttggattttaaggagaattagcgcggtcgttttttgcgtattcgttaaacggttaatcgcggcggtggcggtttcggcgcgggtttcgggtcgggcggtttgtagagcggttagattatcgcgttgtttgcgtagggttttatcgagtttcgcgacgcgttggcgaagtttatagacgattacggaggcgaggacgacgagttggtaggcggttcgggaggcggcgtcgggggtttagggggcggtttgtatggagagttttcggagggtatttttattatcgtggattttaagcgtttttttttcgatgtgggttgtaataaatacggggtgtttttgcgagtgagcgaggtgaagtcgttttatcgtaatgttattatcgtattttttaaagtttggggtaagttcggaggcgttttttgtcggtatgcggatgagatgaaagaaatttaggaacgatagagggataagttttatgagcgacgtggtgggggtagcggcggcggcgaagagttagagggtgaggaggtggatgaggattgaaacgggtagttttttttataggtttttatttaat

SEQ ID NO: 23294 - DNA, 1414 bp, Artificial Sequence
  chemically treated genomic DNA (Homo sapiens) CpG-island No: 23294
attaaataaaaacctataaaaaaaactacccgtttcaatcctcatccacctcctcaccctctaactcttcgccgccgccgctacccccaccacgtcgctcataaaacttatccctctatcgttcctaaatttctttcatctcatccgcataccgacaaaaaacgcctccgaacttaccccaaactttaaaaaatacgataataacattacgataaaacgacttcacctcgctcactcgcaaaaacaccccgtatttattacaacccacatcgaaaaaaaaacgcttaaaatccacgataataaaaataccctccgaaaactctccatacaaaccgccccctaaacccccgacgccgcctcccgaaccgcctaccaactcgtcgtcctcgcctccgtaatcgtctataaacttcgccaacgcgtcgcgaaactcgataaaaccctacgcaaacaacgcgataatctaaccgctctacaaaccgcccgacccgaaacccgcgccgaaaccgccaccgccgcgattaaccgtttaacgaatacgcaaaaaacgaccgcgctaattctccttaaaatccaaataatacttacgattctcacgcaccaaaaattcgctcttaaacgcgcgcccgaacccgccgccctcctcgacgccaaccgccaactactcgaaactactaaaacccaactacgctaatattctataaatcgccaacaatcgcgtaactcgacgaccaccgcactaaacaacgtaaaacgccttaaaaccgcccgcgcccacctcgacgatcttaaaaaaacgacccttaacgttctacttcacatctaaataaaaacgcttattctaaatatccaaccgcttcgaaaccaactcctacgtctcttactcgccgccgccgcgaaacgcgaactaaaacccgcacgacccaccgccgccgccgcgctcgctaccgctatcgccgtccgccatcttctaaaccgccgcctcgccgccaccgcccgccgcgctcgcgcccccgccctccgactcgcgctccgaaaccccccaacctcgcccgcccgactcgctcacgcgctcccgccgctcatcgccgaccgccgccgcccccccatcgcctccgcgccccgcccccgcgacttccgtacaaccctaaccacttccgacgcgcgatttcccgtaaaatcactccgtcccgccctccgcgacctcgcgaccgaaaacgccgcgacgacgtaacgcaaaaaaataacgtcaaaaaccgcgccgaacgaacgacaaactaaaaataaactaatattactactcgatttctaaccctaaaaacttaccaaccttaacgtaactcaaccgcccgctacgtctatctacgcgcctcttcccgtaacacttttactttaaactccgatatcgtccact

SEQ ID NO: 23295 - DNA, 1414 bp, Artificial Sequence
  chemically treated genomic DNA (Homo sapiens) CpG-island No: 23295
gttgggtggaggtttgtaggggaagttgttcgttttaatttttatttatttttttattttttgatttttcgtcgtcgtcgttgtttttattacgtcgtttataaagtttatttttttgtcgtttttggattttttttattttattcgtatatcggtaaaaggcgttttcgaatttgttttaggttttgaagggtacggtgatggtattgcggtaggacggttttatttcgtttattcgtagaaatatttcgtatttgttgtagtttatatcgaagaagaagcgtttggagtttacggtgatggaggtgtttttcgggagttttttatataggtcgttttttgggttttcggcgtcgtttttcgggtcgtttgttagttcgtcgttttcgttttcgtagtcgtttatgagtttcgttagcgcgtcgcggaattcgatgaggttttgcgtaggtagcgcgatggtttggtcgttttgtaagtcgttcggttcggggttcgcgtcgaagtcgttatcgtcgcggttgatcgtttggcggatgcgtaggaagcggtcgcgttggttttttttgaggtttaggtagtatttgcggtttttacgtattaagaattcgtttttgagcgcgcgttcgggttcgtcgtttttttcggcgttagtcgttagttgttcggggttgttagggtttagttgcgttagtgttttatgagtcgttagtagtcgcgtaattcggcggttatcgtattggatagcgtgaggcgttttggaatcgttcgcgtttatttcggcgattttgaggaagcggtttttggcgttttgttttatatttaagtagaagcgtttgttttggatgtttagtcgtttcgaggttagtttttgcgttttttgttcgtcgtcgtcgcgggacgcgggttggaattcgtacggtttatcgtcgtcgtcgcgttcgttgtcgttgtcgtcgttcgttattttttaggtcgtcgtttcgtcgttatcgttcgtcgcgttcgcgttttcgtttttcggttcgcgtttcggggttttttagtttcgttcgttcggttcgtttacgcgttttcgtcgtttatcgtcggtcgtcgtcgtttttttatcgttttcgcgtttcgttttcgcgattttcgtgtagttttagttattttcggcgcgcgatttttcgtgaagttatttcgtttcgtttttcgcggtttcgcggtcggaagcgtcgcggcggcgtggcgtagaggggtgacgttaggggtcgcgtcgggcgggcggtaagttgagagtaggttagtgttattgttcggtttttagttttggggatttgttagttttagcgtgatttagtcgttcgttgcgtttgtttacgcgttttttttcgtgatatttttattttagatttcggtgtcgtttatt

SEQ ID NO: 23296 - DNA, 1414 bp, Artificial Sequence
  chemically treated genomic DNA (Homo sapiens) CpG-island No: 23296
aataaacgacaccgaaatctaaaataaaaatatcacgaaaaaaaacgcgtaaacaaacgcaacgaacgactaaatcacgctaaaactaacaaatccccaaaactaaaaaccgaacaataacactaacctactctcaacttaccgcccgcccgacgcgacccctaacgtcacccctctacgccacgccgccgcgacgcttccgaccgcgaaaccgcgaaaaacgaaacgaaataacttcacgaaaaatcgcgcgccgaaaataactaaaactacacgaaaatcgcgaaaacgaaacgcgaaaacgataaaaaaacgacgacgaccgacgataaacgacgaaaacgcgtaaacgaaccgaacgaacgaaactaaaaaaccccgaaacgcgaaccgaaaaacgaaaacgcgaacgcgacgaacgataacgacgaaacgacgacctaaaaaataacgaacgacgacaacgacaacgaacgcgacgacgacgataaaccgtacgaattccaacccgcgtcccgcgacgacgacgaacaaaaaacgcaaaaactaacctcgaaacgactaaacatccaaaacaaacgcttctacttaaatataaaacaaaacgccaaaaaccgcttcctcaaaatcgccgaaataaacgcgaacgattccaaaacgcctcacgctatccaatacgataaccgccgaattacgcgactactaacgactcataaaacactaacgcaactaaaccctaacaaccccgaacaactaacgactaacgccgaaaaaaacgacgaacccgaacgcgcgctcaaaaacgaattcttaatacgtaaaaaccgcaaatactacctaaacctcaaaaaaaaccaacgcgaccgcttcctacgcatccgccaaacgatcaaccgcgacgataacgacttcgacgcgaaccccgaaccgaacgacttacaaaacgaccaaaccatcgcgctacctacgcaaaacctcatcgaattccgcgacgcgctaacgaaactcataaacgactacgaaaacgaaaacgacgaactaacaaacgacccgaaaaacgacgccgaaaacccaaaaaacgacctatataaaaaactcccgaaaaacacctccatcaccgtaaactccaaacgcttcttcttcgatataaactacaacaaatacgaaatatttctacgaataaacgaaataaaaccgtcctaccgcaataccatcaccgtacccttcaaaacctaaaacaaattcgaaaacgccttttaccgatatacgaataaaataaaaaaaatccaaaaacgacaaaaaaataaactttataaacgacgtaataaaaacaacgacgacgacgaaaaatcaaaaaataaaaaaataaataaaaattaaaacgaacaacttcccctacaaacctccacccaac

SEQ ID NO: 23297 - DNA, 885 bp, Artificial Sequence
  chemically treated genomic DNA (Homo sapiens) CpG-island No: 23297
ggtcgttttttttttgaggaagtcggtagcgcgcgggaggtcgttttttttttgaggaagtcggtagcgcgcgggaggtcgttttttttttgaggaagtcggtagcgcgcgggaggtcgttttttttttgtggaagtcggtagcgcgcgggaggtcgttttttttttgaggaagtcggtagcgcgcgggaggtcgttttttttttgaggaaatcggtagcgcgcgggaggtcgttttttttttgaggaagtaggtagcgcgcgggaggtcgttttttttttgaggaaatcggtagcgcgcgggaggtcgttttttttttgaggaaatcggtagtaggcgggaggtcgttttttttttgaggaagtaggtagcgcgcgggaggtcgttttttttttgaggaagtcggtagcgcgcgggaggtcgttttttttttgagaaagtaggtagcgcgcgggaggtcgttttttttttgaggaaatcggtagcgcgcgggaggtcgttttttttttgaggaagtcggtagcgcgcgggaggtcgttttttttttgaggaagtcggtagcgttcgggaggtcgttttttttttgaggaaatcggtagcgcgcgggaggtcgttttttttttgaggaagtcggtagcgcgcgggaggtcgttttttttttgaggaagtcggtagcgcgcgggaggtcgttttttttttgaggaagtaggtagcgcgcgggaggtcgttttttttttgagaaagtaggtagcgcgcgggaggtcgttttttttttcggtcgtaggtatcggagcgcgggaggtcgtttttttattttaaagtttcgttgtttcgtgggtgatgttaaagtgtatatttttaaatattgtttttgtttattgattg

SEQ ID NO: 23298 - DNA, 885 bp, Artificial Sequence
  chemically treated genomic DNA (Homo sapiens) CpG-island No: 23298
caatcaataaacaaaaacaatatttaaaaatatacactttaacatcacccacgaaacaacgaaactttaaaataaaaaaacgacctcccgcgctccgatacctacgaccgaaaaaaaaaacgacctcccgcgcgctacctactttctcaaaaaaaaaacgacctcccgcgcgctacctacttcctcaaaaaaaaaacgacctcccgcgcgctaccgacttcctcaaaaaaaaaacgacctcccgcgcgctaccgacttcctcaaaaaaaaaacgacctcccgcgcgctaccgatttcctcaaaaaaaaaacgacctcccgaacgctaccgacttcctcaaaaaaaaaacgacctcccgcgcgctaccgacttcctcaaaaaaaaaacgacctcccgcgcgctaccgatttcctcaaaaaaaaaacgacctcccgcgcgctacctactttctcaaaaaaaaaacgacctcccgcgcgctaccgacttcctcaaaaaaaaaacgacctcccgcgcgctacctacttcctcaaaaaaaaaacgacctcccgcctactaccgatttcctcaaaaaaaaaacgacctcccgcgcgctaccgatttcctcaaaaaaaaaacgacctcccgcgcgctacctacttcctcaaaaaaaaaacgacctcccgcgcgctaccgatttcctcaaaaaaaaaacgacctcccgcgcgctaccgacttcctcaaaaaaaaaacgacctcccgcgcgctaccgacttccacaaaaaaaaaacgacctcccgcgcgctaccgacttcctcaaaaaaaaaacgacctcccgcgcgctaccgacttcctcaaaaaaaaaacgacctcccgcgcgctaccgacttcctcaaaaaaaaaacgacc

SEQ ID NO: 23299 - DNA, 885 bp, Artificial Sequence
  chemically treated genomic DNA (Homo sapiens) CpG-island No: 23299
taattaatgaataaaaatagtatttgaaaatgtgtattttgatattatttacgaggtagcggggttttgagataagaggacggtttttcgcgtttcggtgtttgcggtcgaggaagaggacggtttttcgcgcgttgtttgtttttttaggaagaggacggtttttcgcgcgttgtttgtttttttaggaagaggacggtttttcgcgcgttgtcggtttttttaggaagaggacggtttttcgcgcgttgtcggtttttttaggaagaggacggtttttcgcgcgttgtcggtttttttaggaagaggacggtttttcgggcgttgtcggtttttttaggaagaggacggtttttcgcgcgttgtcggtttttttaggaagaggacggtttttcgcgcgttgtcggtttttttaggaagaggacggtttttcgcgcgttgtttgtttttttaggaagaggacggtttttcgcgcgttgtcggtttttttaggaagaggacggtttttcgcgcgttgtttgtttttttaggaagaggacggtttttcgtttgttgtcggtttttttaggaagaggacggtttttcgcgcgttgtcggtttttttaggaagaggacggtttttcgcgcgttgtttgtttttttaggaagaggacggtttttcgcgcgttgtcggtttttttaggaagaggacggtttttcgcgcgttgtcggtttttttaggaagaggacggtttttcgcgcgttgtcggtttttataggaagaggacggtttttcgcgcgttgtcggtttttttaggaagaggacggtttttcgcgcgttgtcggtttttttaggaagaggacggtttttcgcgcgttgtcggtttttttaggaagaggacggtt

SEQ ID NO: 23300 - DNA, 885 bp, Artificial Sequence
  chemically treated genomic DNA (Homo sapiens) CpG-island No: 23300
aaccgtcctcttcctaaaaaaaccgacaacgcgcgaaaaaccgtcctcttcctaaaaaaaccgacaacgcgcgaaaaaccgtcctcttcctaaaaaaaccgacaacgcgcgaaaaaccgtcctcttcctataaaaaccgacaacgcgcgaaaaaccgtcctcttcctaaaaaaaccgacaacgcgcgaaaaaccgtcctcttcctaaaaaaaccgacaacgcgcgaaaaaccgtcctcttcctaaaaaaacaaacaacgcgcgaaaaaccgtcctcttcctaaaaaaaccgacaacgcgcgaaaaaccgtcctcttcctaaaaaaaccgacaacaaacgaaaaaccgtcctcttcctaaaaaaacaaacaacgcgcgaaaaaccgtcctcttcctaaaaaaaccgacaacgcgcgaaaaaccgtcctcttcctaaaaaaacaaacaacgcgcgaaaaaccgtcctcttcctaaaaaaaccgacaacgcgcgaaaaaccgtcctcttcctaaaaaaaccgacaacgcgcgaaaaaccgtcctcttcctaaaaaaaccgacaacgcccgaaaaaccgtcctcttcctaaaaaaaccgacaacgcgcgaaaaaccgtcctcttcctaaaaaaaccgacaacgcgcgaaaaaccgtcctcttcctaaaaaaaccgacaacgcgcgaaaaaccgtcctcttcctaaaaaaacaaacaacgcgcgaaaaaccgtcctcttcctaaaaaaacaaacaacgcgcgaaaaaccgtcctcttcctcgaccgcaaacaccgaaacgcgaaaaaccgtcctcttatctcaaaaccccgctacctcgtaaataatatcaaaatacacattttcaaatactatttttattcattaatta

SEQ ID NO: 23301 - DNA, 501 bp, Artificial Sequence
  chemically treated genomic DNA (Homo sapiens) CpG-island No: 23301
tttagatcgggggtcgtcgttagtttcggaaggtcgagaggtgcgtttgttaggtcgtgcgcgtcgtcggttaggtcgtgtaggagtcggggtacggtagtggtatagttacggcgcgggttaaggtttagggcgcgggcgggcggtgttagtaggtcgggaggtttttcgtgggcgcgggcggttgcgcggggcgcggtttaggcggtttgaggaggttgcggttgcgttaggggcgttaggtcgttatatgggttttttgttaggtggggaaaggttgcggcggcgtcgggcgtttgatcgtagggtagcggtggttgcgggtagggcggcgggaagtagggcggttggaattcggcggtagttgtggcggtcggcgtgtggtagagcgggggcgtcggttcgtaggtcgtttggggtagagacgataggcgggtttcgtcggtagttgtttttagttcgtcggggcgtttttggggaaggagaggggtgttttaggtg

SEQ ID NO: 23302 - DNA, 501 bp, Artificial Sequence
  chemically treated genomic DNA (Homo sapiens) CpG-island No: 23302
cacctaaaacacccctctccttccccaaaaacgccccgacgaactaaaaacaactaccgacgaaacccgcctatcgtctctaccccaaacgacctacgaaccgacgcccccgctctaccacacgccgaccgccacaactaccgccgaattccaaccgccctacttcccgccgccctacccgcaaccaccgctaccctacgatcaaacgcccgacgccgccgcaacctttccccacctaacaaaaaacccatataacgacctaacgcccctaacgcaaccgcaacctcctcaaaccgcctaaaccgcgccccgcgcaaccgcccgcgcccacgaaaaacctcccgacctactaacaccgcccgcccgcgccctaaaccttaacccgcgccgtaactataccactaccgtaccccgactcctacacgacctaaccgacgacgcgcacgacctaacaaacgcacctctcgaccttccgaaactaacgacgacccccgatctaaa

SEQ ID NO: 23303 - DNA, 501 bp, Artificial Sequence
  chemically treated genomic DNA (Homo sapiens) CpG-island No: 23303
tatttaaggtatttttttttttttttaggagcgtttcgacgggttgggagtagttgtcggcggggttcgtttgtcgtttttgttttaggcggtttacgggtcggcgttttcgttttgttatacgtcggtcgttatagttgtcgtcgaattttagtcgttttatttttcgtcgttttattcgtagttatcgttgttttacggttaggcgttcgacgtcgtcgtagtttttttttatttggtaggggatttatatggcggtttggcgtttttggcgtagtcgtagtttttttaggtcgtttgggtcgcgtttcgcgtagtcgttcgcgtttacgaggagtttttcggtttgttggtatcgttcgttcgcgttttgggttttgattcgcgtcgtgattatgttattgtcgtgtttcggtttttgtacggtttggtcgacggcgcgtacggtttggtagacgtatttttcggtttttcggggttggcggcggttttcggtttgga

SEQ ID NO: 23304 - DNA, 501 bp, Artificial Sequence
  chemically treated genomic DNA (Homo sapiens) CpG-island No: 23304
tccaaaccgaaaaccgccgccaaccccgaaaaaccgaaaaatacgtctaccaaaccgtacgcgccgtcgaccaaaccgtacaaaaaccgaaacacgacaataacataatcacgacgcgaatcaaaacccaaaacgcgaacgaacgataccaacaaaccgaaaaactcctcgtaaacgcgaacgactacgcgaaacgcgacccaaacgacctaaaaaaactacgactacgccaaaaacgccaaaccgccatataaatcccctaccaaataaaaaaaaactacgacgacgtcgaacgcctaaccgtaaaacaacgataactacgaataaaacgacgaaaaataaaacgactaaaattcgacgacaactataacgaccgacgtataacaaaacgaaaacgccgacccgtaaaccgcctaaaacaaaaacgacaaacgaaccccgccgacaactactcccaacccgtcgaaacgctcctaaaaaaaaaaaaaaataccttaaata

SEQ ID NO: 23305 - DNA, 621 bp, Artificial Sequence
  chemically treated genomic DNA (Homo sapiens) CpG-island No: 23305
gcgggcgtaggagttttaggttggggatagcggttatttgcgtatcgcgtttttagttggcgaagtttttgcggtttttttttttcgagatttcgttagcgcgggataggagggttggaaagtttagtatttaggcgtttcgatttttcggtcgaatatgtttcgggttcgagattatttattatggcggagtaggtgtgtattagtatggggcggtgagtgtcgggcgcgaggcgtggcggcggcggagttttagttcgacggcgagcgttgcgggtagaggcgtcgggagtcggtatagttcgcggaggttacggtgcggtagttgggtgcgatttagtcgggattttagtgggcgtggggtttttagcggtggtcgttttcgggcgggtttatggaggtaggacggacgggtattgatcgtatttggaaaagtcggttaacgggtgtttagcgttcgtttttttttttttgagcgtagtttgttttatgtattttagttatagtggcgggggcgcgtcgggttttcgggggcgcgtattaaagagataagttatggtagtttttttttttttttttagcggttgttataggggaggtagtggttttggcgggatcggg

SEQ ID NO: 23306 - DNA, 621 bp, Artificial Sequence
  chemically treated genomic DNA (Homo sapiens) CpG-island No: 23306
cccgatcccgccaaaaccactacctcccctataacaaccgctaaaaaaaaaaaaaaaaactaccataacttatctctttaatacgcgcccccgaaaacccgacgcgcccccgccactataactaaaatacataaaacaaactacgctcaaaaaaaaaaaaacgaacgctaaacacccgttaaccgacttttccaaatacgatcaatacccgtccgtcctacctccataaacccgcccgaaaacgaccaccgctaaaaaccccacgcccactaaaatcccgactaaatcgcacccaactaccgcaccgtaacctccgcgaactataccgactcccgacgcctctacccgcaacgctcgccgtcgaactaaaactccgccgccgccacgcctcgcgcccgacactcaccgccccatactaatacacacctactccgccataataaataatctcgaacccgaaacatattcgaccgaaaaatcgaaacgcctaaatactaaactttccaaccctcctatcccgcgctaacgaaatctcgaaaaaaaaaaaccgcaaaaacttcgccaactaaaaacgcgatacgcaaataaccgctatccccaacctaaaactcctacgcccgc

SEQ ID NO: 23307 - DNA, 621 bp, Artificial Sequence
  chemically treated genomic DNA (Homo sapiens) CpG-island No: 23307
ttcgatttcgttaaagttattgttttttttgtggtagtcgttggggaaaagggagagaattgttatagtttgtttttttaatgcgcgttttcggaggttcggcgcgttttcgttattataattggagtgtatggagtaggttacgtttagaggaggaagggcgggcgttgggtattcgttgatcgatttttttaagtgcgattagtgttcgttcgttttgtttttatggattcgttcgggaacggttatcgttgaggattttacgtttattaggatttcggttgggtcgtatttagttatcgtatcgtgattttcgcgggttgtgtcggttttcggcgtttttgttcgtagcgttcgtcgtcgggttagggtttcgtcgtcgttacgtttcgcgttcggtatttatcgttttatgttggtgtatatttatttcgttatggtgagtagtttcgggttcgggatatattcggtcgggggatcggggcgtttgagtgttggattttttaatttttttgtttcgcgttaacgaaatttcggagggagggggtcgtagggatttcgttagttgagaacgcgatgcgtaagtgatcgttgtttttagtttgaggtttttgcgttcgt

SEQ ID NO: 23308 - DNA, 621 bp, Artificial Sequence
  chemically treated genomic DNA (Homo sapiens) CpG-island No: 23308
acgaacgcaaaaacctcaaactaaaaacaacgatcacttacgcatcgcgttctcaactaacgaaatccctacgaccccctccctccgaaatttcgttaacgcgaaacaaaaaaattaaaaaatccaacactcaaacgccccgatcccccgaccgaatatatcccgaacccgaaactactcaccataacgaaataaatatacaccaacataaaacgataaataccgaacgcgaaacgtaacgacgacgaaaccctaacccgacgacgaacgctacgaacaaaaacgccgaaaaccgacacaacccgcgaaaatcacgatacgataactaaatacgacccaaccgaaatcctaataaacgtaaaatcctcaacgataaccgttcccgaacgaatccataaaaacaaaacgaacgaacactaatcgcacttaaaaaaatcgatcaacgaatacccaacgcccgcccttcctcctctaaacgtaacctactccatacactccaattataataacgaaaacgcgccgaacctccgaaaacgcgcattaaaaaaacaaactataacaattctctcccttttccccaacgactaccacaaaaaaaacaataactttaacgaaatcgaa

SEQ ID NO: 23309 - DNA, 592 bp, Artificial Sequence
  chemically treated genomic DNA (Homo sapiens) CpG-island No: 23309
agcggtacgcgtaattatttagttatataatatatcggagggtaggacgcggtattttataagtaagtaatatagtatcgacggttacgggttaattcgtcgtgtattataaattatatatagggttcgtagcgcgtcgacgagtttattgcgagagatcgagagcgatcgtagtcgagcggagttacgttagtcgttattcgagaacgagcgagcgtcggtacgcggagagattacgttaagacgtcgatcgtttatagtcggtagaagagcgtagattgttttttcggacgcgcgcgtcgcgtaggagtaggtacgcgagagagagagaagcgcgcgtcgcgtacgagtttagtttacgtacgtcgcgtcgtattttttttttggttcgtttcgtcgtttcgagataataaaaagatagcgattattattatatgtttcgttatttttcgcgtcgtttcgttgattacgttacggagcgtagtcgcgcggtcgttgcgttcgcgtcgtgtcgcgattcgcgttttggcgcgattttatttacgacgtttcgaggagagatacgaggagcgagagagagagggcggggggg

SEQ ID NO: 23310 - DNA, 592 bp, Artificial Sequence
  chemically treated genomic DNA (Homo sapiens) CpG-island No: 23310
cccccccgccctctctctctcgctcctcgtatctctcctcgaaacgtcgtaaataaaatcgcgccaaaacgcgaatcgcgacacgacgcgaacgcaacgaccgcgcgactacgctccgtaacgtaatcaacgaaacgacgcgaaaaataacgaaacatataataataatcgctatctttttattatctcgaaacgacgaaacgaaccaaaaaaaaaatacgacgcgacgtacgtaaactaaactcgtacgcgacgcgcgcttctctctctctcgcgtacctactcctacgcgacgcgcgcgtccgaaaaaacaatctacgctcttctaccgactataaacgatcgacgtcttaacgtaatctctccgcgtaccgacgctcgctcgttctcgaataacgactaacgtaactccgctcgactacgatcgctctcgatctctcgcaataaactcgtcgacgcgctacgaaccctatatataatttataatacacgacgaattaacccgtaaccgtcgatactatattacttacttataaaataccgcgtcctaccctccgatatattatataactaaataattacgcgtaccgct

SEQ ID NO: 23311 - DNA, 592 bp, Artificial Sequence
  chemically treated genomic DNA (Homo sapiens) CpG-island No: 23311
ttttttcgttttttttttttcgtttttcgtgttttttttcgaggcgtcgtaggtgaggtcgcgttagggcgcggatcgcggtacggcgcggacgtagcggtcgcgcggttgcgtttcgtgacgtagttagcgaggcggcgcgaggagtggcgaggtatgtgatagtgatcgttgtttttttgttgtttcgaggcggcggggcgggttagggggggggtgcggcgcggcgtgcgtaggttgggttcgtgcgcgacgcgcgtttttttttttttcgcgtgtttgtttttgcgcggcgcgcgcgttcgagagggtagtttgcgtttttttgtcggttgtgggcggtcggcgttttgacgtggttttttcgcgtgtcggcgttcgttcgttttcgggtggcggttgacgtggtttcgttcggttgcgatcgttttcggtttttcgtagtgggttcgtcggcgcgttgcgggttttgtgtgtggtttgtggtgtacggcgggttggttcgtggtcgtcggtgttgtgttgtttgtttgtagggtgtcgcgttttgtttttcggtgtgttgtgtggttgggtagttgcgcgtgtcgtt

SEQ ID NO: 23312 - DNA, 592 bp, Artificial Sequence
  chemically treated genomic DNA (Homo sapiens) CpG-island No: 23312
aacgacacgcgcaactacccaaccacacaacacaccgaaaaacaaaacgcgacaccctacaaacaaacaacacaacaccgacgaccacgaaccaacccgccgtacaccacaaaccacacacaaaacccgcaacgcgccgacgaacccactacgaaaaaccgaaaacgatcgcaaccgaacgaaaccacgtcaaccgccacccgaaaacgaacgaacgccgacacgcgaaaaaaccacgtcaaaacgccgaccgcccacaaccgacaaaaaaacgcaaactaccctctcgaacgcgcgcgccgcgcaaaaacaaacacgcgaaaaaaaaaaaaacgcgcgtcgcgcacgaacccaacctacgcacgccgcgccgcaccccccccctaacccgccccgccgcctcgaaacaacaaaaaaacaacgatcactatcacatacctcgccactcctcgcgccgcctcgctaactacgtcacgaaacgcaaccgcgcgaccgctacgtccgcgccgtaccgcgatccgcgccctaacgcgacctcacctacgacgcctcgaaaaaaaacacgaaaaacgaaaaaaaaaaaacgaaaaaa

SEQ ID NO: 23313 - DNA, 863 bp, Artificial Sequence
  chemically treated genomic DNA (Homo sapiens) CpG-island No: 23313
ttttcgtgtatcgggttgtcggtagtttcggtcgtttagttttcgcggtagtaatagtagtaatagtatcgggggagttttttttaggcggattataagtttcggtaggtcgcgcgcgggtcgcgtatgcgtagcggggatcggcgtttgagtggtaagttgtttgttatagcgaatattagttgtttttcgcgtcgggcgtcgcgcgtcgttgtttcgtcgttcggtttttcggttgttgttttgtcggcgttgtttttttcgtttcgcggtttttttttgtaatttggcgggtttttttttttttgttcggttcggttcggtcgtcgtcgtttttcgcgttcggcgtcgagttttcgggttttcgggtcggttgtcggtgtcggtagggcgcggagggggcgggggtcgcggttcgttttttcgcggatgagtcgtcgcggacggggcgcgggcggacgatggaattttatattttggagtatcggttgtaagttgttagcgtcgttaaggagagtatttcgttgtttattacggtttgattaaatttgtttttttgttttttaagattaggtaagcgcgcggggacgcggcgtcggtcggggatagataaagggggcgtatttcgggtcgttgttttcgtcgtcgcgtttcggaaaataatttcgggtttcgggaggttttcgtttcgttttcgtcgtcgcgttcgttagcgtttgataaagtcggagtcgtagggttttggttttcggattttttgaaaaattttatttttcggtgcgttattttttatttttgtcgttttttttattttttatttttttttttatcgtagtttttttttcgaaattcggggggttggg

SEQ ID NO: 23314 - DNA, 863 bp, Artificial Sequence
  chemically treated genomic DNA (Homo sapiens) CpG-island No: 23314
cccaaccccccgaatttcgaaaaaaaaactacgataaaaaaaaaaataaaaaataaaaaaaacgacaaaaataaaaaataacgcaccgaaaaataaaatttttcaaaaaatccgaaaaccaaaaccctacgactccgactttatcaaacgctaacgaacgcgacgacgaaaacgaaacgaaaacctcccgaaacccgaaattattttccgaaacgcgacgacgaaaacaacgacccgaaatacgccccctttatctatccccgaccgacgccgcgtccccgcgcgcttacctaatcttaaaaaacaaaaaaacaaatttaatcaaaccgtaataaacaacgaaatactctccttaacgacgctaacaacttacaaccgatactccaaaatataaaattccatcgtccgcccgcgccccgtccgcgacgactcatccgcgaaaaaacgaaccgcgacccccgccccctccgcgccctaccgacaccgacaaccgacccgaaaacccgaaaactcgacgccgaacgcgaaaaacgacgacgaccgaaccgaaccgaacaaaaaaaaaaaaacccgccaaattacaaaaaaaaaccgcgaaacgaaaaaaacaacgccgacaaaacaacaaccgaaaaaccgaacgacgaaacaacgacgcgcgacgcccgacgcgaaaaacaactaatattcgctataacaaacaacttaccactcaaacgccgatccccgctacgcatacgcgacccgcgcgcgacctaccgaaacttataatccgcctaaaaaaaactcccccgatactattactactattactaccgcgaaaactaaacgaccgaaactaccgacaacccgatacacgaaaa

SEQ ID NO: 23315 - DNA, 863 bp, Artificial Sequence
  chemically treated genomic DNA (Homo sapiens) CpG-island No: 23315
tttagtttttcggatttcggggagggggttgcgatgggggagggggtgggagatgggggggacgatagaggtggggggtggcgtatcggggggtgaaattttttaaggggttcgggagttaagattttgcggtttcggttttgttagacgttagcgaacgcggcggcgggggcggggcgggggtttttcggggttcgaagttgtttttcgaggcgcggcggcgaggatagcggttcggggtgcgttttttttgtttgttttcggtcggcgtcgcgttttcgcgcgtttatttggttttggaggataggaaggtaagtttgattaggtcgtagtgaatagcgggatattttttttggcgacgttggtaatttgtagtcggtgttttaggatgtggagttttatcgttcgttcgcgtttcgttcgcggcggtttattcgcggggggacgagtcgcggttttcgtttttttcgcgttttgtcggtatcgatagtcggttcggagattcgggagttcggcgtcgggcgcggggggcggcggcggtcgggtcgggtcggataaaagggaggaggttcgttaagttgtaagggggagtcgcggggcgagggaggtagcgtcggtagagtagtagtcgaggggtcgagcggcggagtagcggcgcgcggcgttcggcgcggggagtagttggtgttcgttgtaataaataatttgttatttaaacgtcggttttcgttgcgtatgcgcggttcgcgcgcggtttgtcgggatttgtagttcgtttggggggggttttttcggtgttgttgttgttgttgttgtcgcgggggttgggcggtcggagttatcggtagttcggtgtacgggaa

SEQ ID NO: 23316 - DNA, 863 bp, Artificial Sequence
  chemically treated genomic DNA (Homo sapiens) CpG-island No: 23316
ttcccgtacaccgaactaccgataactccgaccgcccaacccccgcgacaacaacaacaacaacaacaccgaaaaaaccccccccaaacgaactacaaatcccgacaaaccgcgcgcgaaccgcgcatacgcaacgaaaaccgacgtttaaataacaaattatttattacaacgaacaccaactactccccgcgccgaacgccgcgcgccgctactccgccgctcgacccctcgactactactctaccgacgctacctccctcgccccgcgactcccccttacaacttaacgaacctcctcccttttatccgacccgacccgaccgccgccgccccccgcgcccgacgccgaactcccgaatctccgaaccgactatcgataccgacaaaacgcgaaaaaaacgaaaaccgcgactcgtccccccgcgaataaaccgccgcgaacgaaacgcgaacgaacgataaaactccacatcctaaaacaccgactacaaattaccaacgtcgccaaaaaaaatatcccgctattcactacgacctaatcaaacttaccttcctatcctccaaaaccaaataaacgcgcgaaaacgcgacgccgaccgaaaacaaacaaaaaaaacgcaccccgaaccgctatcctcgccgccgcgcctcgaaaaacaacttcgaaccccgaaaaacccccgccccgcccccgccgccgcgttcgctaacgtctaacaaaaccgaaaccgcaaaatcttaactcccgaaccccttaaaaaatttcaccccccgatacgccaccccccacctctatcgtcccccccatctcccaccccctcccccatcgcaaccccctccccgaaatccgaaaaactaaa

SEQ ID NO: 23317 - DNA, 822 bp, Artificial Sequence
  chemically treated genomic DNA (Homo sapiens) CpG-island No: 23317
ttcgtattttttgttatcgattttcgtcgtttatttttacgaagttcgaagttttatattatattttttattttcgaattatatttttaggattcgatttttcgtttagttattttttacgttttattacgtcgttagaattttttattttagtttttttttagttttgtgtacgtttgattattcgatttggtttagtagtaattcgttcgattatatatttattacggttttatcgttatttttattatttacgtttatcgatttataatttttttttttttttatatatatagtttatacgttttatcggtttattaataacgttagatcgttcgggtttcgcggtatacgaggcgtattatattacggttttttttttcgttttacgtttttttttattttttttcgcgtttttttgttcgcgcgattttttaggtcgttttatcgtattattaaggtacggttacgtattatttatttttttttttatatatttagaattcgttgcgtcgttttttatttcgtcgttcgtcgtcgcgtttcgacgatttttttttttttttttttttttttttgtagttcgaggatagcgtacgcgcgttagttacgcgcgtatcgttataacgttttttttttagacgagaagtatttatagtttatattttttgcgttttatgtttatttttttttttttcgtttacgtttttatatattatattagcgattagtcgttatttaattttttcgttcgtttacgtattttagagttacgttttacgtatacgttatttattacgataagtgtagttacgattgttt

SEQ ID NO: 23318 - DNA, 822 bp, Artificial Sequence
  chemically treated genomic DNA (Homo sapiens) CpG-island No: 23318
aaacaatcgtaactacacttatcgtaataaataacgtatacgtaaaacgtaactctaaaatacgtaaacgaacgaaaaaattaaataacgactaatcgctaatataatatataaaaacgtaaacgaaaaaaaaaaaaataaacataaaacgcaaaaaatataaactataaatacttctcgtctaaaaaaaaaacgttataacgatacgcgcgtaactaacgcgcgtacgctatcctcgaactacaaaaaaaaaaaaaaaaaaaaaaaaaaatcgtcgaaacgcgacgacgaacgacgaaataaaaaacgacgcaacgaattctaaatatataaaaaaaaaaataaataatacgtaaccgtaccttaataatacgataaaacgacctaaaaaatcgcgcgaacaaaaaaacgcgaaaaaaaataaaaaaaaacgtaaaacgaaaaaaaaaaccgtaatataatacgcctcgtataccgcgaaacccgaacgatctaacgttattaataaaccgataaaacgtataaactatatatataaaaaaaaaaaaaaattataaatcgataaacgtaaataataaaaataacgataaaaccgtaataaatatataatcgaacgaattactactaaaccaaatcgaataatcaaacgtacacaaaactaaaaaaaaactaaaataaaaaattctaacgacgtaataaaacgtaaaaaataactaaacgaaaaatcgaatcctaaaaatataattcgaaaataaaaaatataatataaaacttcgaacttcgtaaaaataaacgacgaaaatcgataacaaaaaatacgaa

SEQ ID NO: 23319 - DNA, 822 bp, Artificial Sequence
  chemically treated genomic DNA (Homo sapiens) CpG-island No: 23319
gggtagtcgtggttgtatttgtcgtggtgggtggcgtgtgcgtgaggcgtggttttggagtacgtgggcgggcgggagggttgggtggcggttggtcgttggtgtggtgtgtagggacgtggacggagaggggggggatgggtatggagcgtagggagtatgagttgtggatgtttttcgtttggaggggggacgttgtggcggtgcgcgcgtgattgacgcgcgtgcgttgttttcgagttgtagaggaggggaggggggggggggggggtcgtcgggacgcggcgacgagcggcggggtggagggcggcgtagcgggttttgagtgtgtggaggaaagagtaggtggtgcgtggtcgtgttttggtggtgcggtggagcggtttgggaggtcgcgcgggtaggagggcgcgggggggggtggagagaggcgtgagacgagggaggaggtcgtggtgtggtgcgtttcgtgtgtcgcgaggttcgggcggtttggcgttgttggtgggtcggtggggcgtgtgagttatatatgtgggagagagagagagttgtgagtcgatgggcgtgggtagtgagagtggcggtggggtcgtgatggatgtgtgatcgagcgggttattgttggattaggtcgagtggttaggcgtgtatagggttgagagagggttgaggtgggaggttttggcggcgtgatggggcgtgggaggtggttgagcgaagggtcgggttttggggatgtggttcggaggtgaggagtgtggtgtggagtttcgagtttcgtagaagtgggcggcggggatcggtggtaagaagtgcgag

SEQ ID NO: 23320 - DNA, 822 bp, Artificial Sequence
  chemically treated genomic DNA (Homo sapiens) CpG-island No: 23320
ctcgcacttcttaccaccgatccccgccgcccacttctacgaaactcgaaactccacaccacactcctcacctccgaaccacatccccaaaacccgacccttcgctcaaccacctcccacgccccatcacgccgccaaaacctcccacctcaaccctctctcaaccctatacacgcctaaccactcgacctaatccaacaataacccgctcgatcacacatccatcacgaccccaccgccactctcactacccacgcccatcgactcacaactctctctctctcccacatatataactcacacgccccaccgacccaccaacaacgccaaaccgcccgaacctcgcgacacacgaaacgcaccacaccacgacctcctccctcgtctcacgcctctctccacccccccccgcgccctcctacccgcgcgacctcccaaaccgctccaccgcaccaccaaaacacgaccacgcaccacctactctttcctccacacactcaaaacccgctacgccgccctccaccccgccgctcgtcgccgcgtcccgacgacccccccccccccccctcccctcctctacaactcgaaaacaacgcacgcgcgtcaatcacgcgcgcaccgccacaacgtcccccctccaaacgaaaaacatccacaactcatactccctacgctccatacccatcccccccctctccgtccacgtccctacacaccacaccaacgaccaaccgccacccaaccctcccgcccgcccacgtactccaaaaccacgcctcacgcacacgccacccaccacgacaaatacaaccacgactaccc

SEQ ID NO: 23321 - DNA, 940 bp, Artificial Sequence
  chemically treated genomic DNA (Homo sapiens) CpG-island No: 23321
gggaagaattttagggcgtcgttttaaattaaattcgttcggcgagaaaataatttttatatttcgtttttacggtcgttatttattcgttttataattttatttttttaagttcggacgcgttttcgcgttattattagtattttttttttttagatttattcgagttcgtcgttttcgtttagttatattataatagtcgtatttttacgattttatattattatttattttttcgcgattcgtcgtacgtatttatatttttttttacgcgcgtcgttttagtcggacgatttcgcgtttcgacgtatacgcgtagatatcgtattatacgattcgatttcgaatatatataattatatcgtttcgattattagttcgttagcgatattttcgattatattttatatcgcgtcgatatttttagacggcgtattcgcgtttataagatatttcgcgtttcgcgttcgcgtcgcgttcgtagtagtatattttattcgttcggtttagcgcgcggtagagttcgacgcgttatagttcgtttattcgttatttataatatagttttttcgcgaagacgcgatcgaagtatatcgagcgatcgatatatagttcgcgttatcgagttagacgagtcgtatattcgttcgtacgacgcgtagcgacgcgcgcgcgtcgtttttcgttttcgcgcgtatttttttcgcgtatattcgtaacgatagttcgtttattcgatttatttagcgtacgtcgtttttcggcgtacgttcgtatattatcgtttttaagtttcggtcgtatagtagttcgtatagtttttatatatatcgtatattcgcgttttttacgtattttacgtatttttttttttattattatcgacgtttttttattagtttatttatttttatagtttaggagaagtcgttaatatatt

SEQ ID NO: 23322 - DNA, 940 bp, Artificial Sequence
  chemically treated genomic DNA (Homo sapiens) CpG-island No: 23322
aatatattaacgacttctcctaaactataaaaataaataaactaataaaaaaacgtcgataataataaaaaaaaaaatacgtaaaatacgtaaaaaacgcgaatatacgatatatataaaaactatacgaactactatacgaccgaaacttaaaaacgataatatacgaacgtacgccgaaaaacgacgtacgctaaataaatcgaataaacgaactatcgttacgaatatacgcgaaaaaaatacgcgcgaaaacgaaaaacgacgcgcgcgcgtcgctacgcgtcgtacgaacgaatatacgactcgtctaactcgataacgcgaactatatatcgatcgctcgatatacttcgatcgcgtcttcgcgaaaaaactatattataaataacgaataaacgaactataacgcgtcgaactctaccgcgcgctaaaccgaacgaataaaatatactactacgaacgcgacgcgaacgcgaaacgcgaaatatcttataaacgcgaatacgccgtctaaaaatatcgacgcgatataaaatataatcgaaaatatcgctaacgaactaataatcgaaacgatataattatatatattcgaaatcgaatcgtataatacgatatctacgcgtatacgtcgaaacgcgaaatcgtccgactaaaacgacgcgcgtaaaaaaaaatataaatacgtacgacgaatcgcgaaaaaataaataataatataaaatcgtaaaaatacgactattataatataactaaacgaaaacgacgaactcgaataaatctaaaaaaaaaaaatactaataataacgcgaaaacgcgtccgaacttaaaaaaataaaattataaaacgaataaataacgaccgtaaaaacgaaatataaaaattattttctcgccgaacgaatttaatttaaaacgacgccctaaaattcttccc

SEQ ID NO: 23323 - DNA, 940 bp, Artificial Sequence
  chemically treated genomic DNA (Homo sapiens) CpG-island No: 23323
ggtgtgttggcggttttttttgggttgtggaggtgagtgggttggtgggggggcgtcggtggtggtgggggggggggtgcgtgggatgcgtagggggcgcgggtgtgcggtgtgtgtgggggttgtgcgggttgttgtgcggtcggggtttggaggcggtggtgtgcggacgtgcgtcggggggcggcgtgcgttgggtgggtcgggtgggcgggttgtcgttgcgggtgtgcgcggggggggtgcgcgcgggggcggggggcggcgcgcgcgcgtcgttgcgcgtcgtgcgggcgggtgtgcggttcgtttggttcggtggcgcgagttatgtgtcggtcgttcggtgtgtttcggtcgcgttttcgcgaggggattgtgttgtgagtggcgagtgggcgggttgtggcgcgtcgagttttgtcgcgcgttgagtcgggcgggtggggtgtgttgttgcgggcgcggcgcgagcgcggggcgcgaggtgttttgtgggcgcgggtacgtcgtttgggggtgtcggcgcggtgtggggtgtggtcggaggtgtcgttggcgggttggtggtcggagcggtgtggttgtgtgtgttcggggtcgggtcgtgtggtgcggtgtttgcgcgtgtgcgtcggggcgcggggtcgttcggttggggcggcgcgcgtggggaggagtgtgggtgcgtgcggcgggtcgcgggggggtgggtggtggtgtggggtcgtgggggtgcggttgttgtggtgtggttgggcgggggcggcgggttcgggtgggtttgggggaggggggtgttggtggtggcgcggggacgcgttcgggtttgggggggtggggttgtggggcgggtaggtggcggtcgtgggggcggagtgtgggggttgttttttcgtcgggcgggtttaatttggggcgacgttttggggtttttttt

SEQ ID NO: 23324 - DNA, 940 bp, Artificial Sequence
  chemically treated genomic DNA (Homo sapiens) CpG-island No: 23324
aaaaaaaaccccaaaacgtcgccccaaattaaacccgcccgacgaaaaaacaacccccacactccgcccccacgaccgccacctacccgccccacaaccccacccccccaaacccgaacgcgtccccgcgccaccaccaacacccccctcccccaaacccacccgaacccgccgcccccgcccaaccacaccacaacaaccgcacccccacgaccccacaccaccacccacccccccgcgacccgccgcacgcacccacactcctccccacgcgcgccgccccaaccgaacgaccccgcgccccgacgcacacgcgcaaacaccgcaccacacgacccgaccccgaacacacacaaccacaccgctccgaccaccaacccgccaacgacacctccgaccacaccccacaccgcgccgacacccccaaacgacgtacccgcgcccacaaaacacctcgcgccccgcgctcgcgccgcgcccgcaacaacacaccccacccgcccgactcaacgcgcgacaaaactcgacgcgccacaacccgcccactcgccactcacaacacaatcccctcgcgaaaacgcgaccgaaacacaccgaacgaccgacacataactcgcgccaccgaaccaaacgaaccgcacacccgcccgcacgacgcgcaacgacgcgcgcgcgccgccccccgcccccgcgcgcaccccccccgcgcacacccgcaacgacaacccgcccacccgacccacccaacgcacgccgccccccgacgcacgtccgcacaccaccgcctccaaaccccgaccgcacaacaacccgcacaacccccacacacaccgcacacccgcgccccctacgcatcccacgcacccccccccccaccaccaccgacgcccccccaccaacccactcacctccacaacccaaaaaaaaccgccaacacacc

SEQ ID NO: 23325 - DNA, 595 bp, Artificial Sequence
  chemically treated genomic DNA (Homo sapiens) CpG-island No: 23325
ttgtttgcgtcggggcgggcgggttggtcgtggtcgcgcggtttatttgttggcggtcgaggcgtcgggtttgaggacgttgggtagtttgttagaattcggtattttttagggtttcggcgcgacggcggttttgcgcgtcggggcgtttttcgggggtcgcgggttcggtcggggattcgcgcgcgtattcgttttgttttcggtttttagcgcgtcgttgtcgtcgtcgttcgggtcggtaaacgtcggcgtagttttcgggttttcgcgtcggtagagttcggagttcgtcgtcgtacggggcgtttttttttcgttcgttcgcgtcgcgttcgtcgcgtttgtcgtcgcgagttcgggcgttttggttttcgaggcgggtttgtcggtttcgggtcgtttttggtcgtcgggcgttttttcgagtttcggtcgcgcggttttttgcggattcgtcgagcgttttttttgtttttcgaggcgttgttttttttggtcgtaggttgaaagtttttttggttttttaacgtcgtgttttcgtttgatattttaagttgggtttgggtttatttggtgggaagggtcggagggt

SEQ ID NO: 23326 - DNA, 595 bp, Artificial Sequence
  chemically treated genomic DNA (Homo sapiens) CpG-island No: 23326
accctccgacccttcccaccaaataaacccaaacccaacttaaaatatcaaacgaaaacacgacgttaaaaaaccaaaaaaactttcaacctacgaccaaaaaaaacaacgcctcgaaaaacaaaaaaaacgctcgacgaatccgcaaaaaaccgcgcgaccgaaactcgaaaaaacgcccgacgaccaaaaacgacccgaaaccgacaaacccgcctcgaaaaccaaaacgcccgaactcgcgacgacaaacgcgacgaacgcgacgcgaacgaacgaaaaaaaaacgccccgtacgacgacgaactccgaactctaccgacgcgaaaacccgaaaactacgccgacgtttaccgacccgaacgacgacgacaacgacgcgctaaaaaccgaaaacaaaacgaatacgcgcgcgaatccccgaccgaacccgcgacccccgaaaaacgccccgacgcgcaaaaccgccgtcgcgccgaaaccctaaaaaataccgaattctaacaaactacccaacgtcctcaaacccgacgcctcgaccgccaacaaataaaccgcgcgaccacgaccaacccgcccgccccgacgcaaacaa

SEQ ID NO: 23327 - DNA, 595 bp, Artificial Sequence
  chemically treated genomic DNA (Homo sapiens) CpG-island No: 23327
atttttcgattttttttattagataagtttaggtttaatttgggatattaaacgggaatacgacgttaggaaattaaaggagtttttagtttgcggttagaagaagtagcgtttcggggagtagagggagcgttcggcgagttcgtagagggtcgcgcggtcgaggttcgaggaggcgttcggcggttaggggcggttcgaggtcggtaggttcgtttcggaggttagggcgttcgggttcgcggcggtagacgcggcggacgcggcgcgggcgggcgggaaggaggcgtttcgtgcggcggcgggtttcgagttttgtcggcgcgaaggttcgggggttgcgtcggcgtttgtcggttcgggcggcggcggtagcggcgcgttggaggtcgagggtagggcgggtgcgcgcgcgggttttcggtcgggttcgcgattttcggggggcgtttcggcgcgtaaggtcgtcgtcgcgtcggggttttggaaggtgtcgggttttgataagttgtttagcgtttttaaattcggcgtttcggtcgttagtagatgagtcgcgcggttacggttaattcgttcgtttcggcgtaggtag

SEQ ID NO: 23328 - DNA, 595 bp, Artificial Sequence
  chemically treated genomic DNA (Homo sapiens) CpG-island No: 23328
ctacctacgccgaaacgaacgaattaaccgtaaccgcgcgactcatctactaacgaccgaaacgccgaatttaaaaacgctaaacaacttatcaaaacccgacaccttccaaaaccccgacgcgacgacgaccttacgcgccgaaacgccccccgaaaatcgcgaacccgaccgaaaacccgcgcgcgcacccgccctaccctcgacctccaacgcgccgctaccgccgccgcccgaaccgacaaacgccgacgcaacccccgaaccttcgcgccgacaaaactcgaaacccgccgccgcacgaaacgcctccttcccgcccgcccgcgccgcgtccgccgcgtctaccgccgcgaacccgaacgccctaacctccgaaacgaacctaccgacctcgaaccgcccctaaccgccgaacgcctcctcgaacctcgaccgcgcgaccctctacgaactcgccgaacgctccctctactccccgaaacgctacttcttctaaccgcaaactaaaaactcctttaatttcctaacgtcgtattcccgtttaatatcccaaattaaacctaaacttatctaataaaaaaaatcgaaaaat

SEQ ID NO: 23329 - DNA, 521 bp, Artificial Sequence
  chemically treated genomic DNA (Homo sapiens) CpG-island No: 23329
tgggaggcgtagcgttcgcgggcgcgggaattggcgttcggcgttcgtcgtagttcggtttgggacgcggttacggagcgttcgggacggcgattaaaggagggaatcggagggtcgtttgtgagttgagaggtcgggtgggacgttgggggtttgttttttcggaggcgtttttcggttaatttggtattttcgggtttttacgtcggtattggattcgttaggttcggcgcggggagcgaaggtagcggcgattatagcgttttttttggttcggcggcgtcgttttaggtcgggtttggcggggtttgggggcggcggggtagtttgtttttaggagtaggagtaggttcggcgttagttcggtttgggttttcggcgttcggggtggtgaagttgtttttttttagatacgtagaatgggggcgttttttttcggttagggttttttaggtttcgcgggatttcgggaaatggaagagttgacgattttcgtgggaagggggaagtttggataggat

SEQ ID NO: 23330 - DNA, 521 bp, Artificial Sequence
  chemically treated genomic DNA (Homo sapiens) CpG-island No: 23330
atcctatccaaacttcccccttcccacgaaaatcgtcaactcttccatttcccgaaatcccgcgaaacctaaaaaaccctaaccgaaaaaaaacgcccccattctacgtatctaaaaaaaaacaacttcaccaccccgaacgccgaaaacccaaaccgaactaacgccgaacctactcctactcctaaaaacaaactaccccgccgcccccaaaccccgccaaacccgacctaaaacgacgccgccgaaccaaaaaaaacgctataatcgccgctaccttcgctccccgcgccgaacctaacgaatccaataccgacgtaaaaacccgaaaataccaaattaaccgaaaaacgcctccgaaaaaacaaacccccaacgtcccacccgacctctcaactcacaaacgaccctccgattccctcctttaatcgccgtcccgaacgctccgtaaccgcgtcccaaaccgaactacgacgaacgccgaacgccaattcccgcgcccgcgaacgctacgcctccca

SEQ ID NO: 23331 - DNA, 521 bp, Artificial Sequence
  chemically treated genomic DNA (Homo sapiens) CpG-island No: 23331
gttttgtttaaatttttttttttttacggaagtcgttaatttttttatttttcggggtttcgcggagtttggggggttttggtcggggggaaacgtttttattttgcgtgtttgaggaaaagtaattttattatttcggacgtcgaaggtttaggtcgggttggcgtcgggtttgtttttatttttggggataaattgtttcgtcgtttttagatttcgttaagttcggtttgaggcggcgtcgtcgggttagagggggcgttgtggtcgtcgttattttcgtttttcgcgtcgggtttaacgagtttagtgtcggcgtagaggttcggaggtgttaggttggtcggggggcgttttcggagggataggtttttaacgttttattcgattttttagtttataaacggtttttcggtttttttttttggtcgtcgtttcgggcgtttcgtgatcgcgttttaggtcgagttacggcgagcgtcgagcgttaattttcgcgttcgcgagcgttgcgtttttta

SEQ ID NO: 23332 - DNA, 521 bp, Artificial Sequence
  chemically treated genomic DNA (Homo sapiens) CpG-island No: 23332
taaaaaacgcaacgctcgcgaacgcgaaaattaacgctcgacgctcgccgtaactcgacctaaaacgcgatcacgaaacgcccgaaacgacgaccaaaaaaaaaaaccgaaaaaccgtttataaactaaaaaatcgaataaaacgttaaaaacctatccctccgaaaacgccccccgaccaacctaacacctccgaacctctacgccgacactaaactcgttaaacccgacgcgaaaaacgaaaataacgacgaccacaacgccccctctaacccgacgacgccgcctcaaaccgaacttaacgaaatctaaaaacgacgaaacaatttatccccaaaaataaaaacaaacccgacgccaacccgacctaaaccttcgacgtccgaaataataaaattacttttcctcaaacacgcaaaataaaaacgtttccccccgaccaaaaccccccaaactccgcgaaaccccgaaaaataaaaaaattaacgacttccgtaaaaaaaaaaaaatttaaacaaaac

SEQ ID NO: 23333 - DNA, 1080 bp, Artificial Sequence
  chemically treated genomic DNA (Homo sapiens) CpG-island No: 23333
ttgtcgtcgcgttttttatattagtcggattttcgttcgtagtttcgtcgtcgtttaattgggcgttgaatatcgatttaaagtattcgttgtaggcggttagtacggcgcggtgcgttgggaagttttcgtcgtttattcgtaagagtacgtcgtagaagcgttcgtcgtttttgcgttgttggtttaggttgtgtagtattttcgtgttgtgtttgtttatttggtatgtgtagtagttagacgggtcgtacgaagcgtcgtttattcgttttatggtcgtcgtttttttttattagttcggtcgttgtatttgttcgtttttttttttttttttagtagcgagaagcggggcgtagtagacgtgtttatattttttatacgtgtcggttcgaggttttgtagtttcgtaggtgcgtcgagtgtatacgtttttagttcggattagattgtttagattgcggggtgtattattttttatatagttaattttcgttttcgttggattgcgcgttattttttttttttcgttcgttcgtttttttttttcggtttatttttcgggggggtgcgcgagcgaagaggtgcgttttttttgtaaacgcgtttgttattttttttttcgttcgttaggcggcgtcggcgcgtagttaagaagggtacgcgtacgcggggaggagaaggaggggttcgtcgcgtaggcgcgcgcgcgcgtcgcggtttttttcgggttcgttgggggcgcgcgttgcgttttttgtaaagcgcgagtcggggcgggggcgtcggagcggaggaaataaaaggcgaaggcgaaggcggcggcggcggggcgcgtacgggggcggtggcgcgggtcgggtttcggagtttggagggcggtggcggcggcggcggcggttggagcgggcgggcggcggcggcggtagagtaggtttttttttaggtcgggagaaggcggcggcggagcggcggttgtgcggtttcgggtttcgtgtgttcggagcggaggaaaattgtgtagcggttgtatttttttttgtatttttatttttggggggaggagaaggagggggcgat

SEQ ID NO: 23334 - DNA, 1080 bp, Artificial Sequence
  chemically treated genomic DNA (Homo sapiens) CpG-island No: 23334
atcgccccctccttctcctccccccaaaaataaaaatacaaaaaaaaatacaaccgctacacaattttcctccgctccgaacacacgaaacccgaaaccgcacaaccgccgctccgccgccgccttctcccgacctaaaaaaaaacctactctaccgccgccgccgcccgcccgctccaaccgccgccgccgccgccaccgccctccaaactccgaaacccgacccgcgccaccgcccccgtacgcgccccgccgccgccgccttcgccttcgccttttatttcctccgctccgacgcccccgccccgactcgcgctttacaaaaaacgcaacgcgcgcccccaacgaacccgaaaaaaaccgcgacgcgcgcgcgcgcctacgcgacgaacccctccttctcctccccgcgtacgcgtacccttcttaactacgcgccgacgccgcctaacgaacgaaaaaaaaaataacaaacgcgtttacaaaaaaaacgcacctcttcgctcgcgcacccccccgaaaaataaaccgaaaaaaaaaaacgaacgaacgaaaaaaaaaaaataacgcgcaatccaacgaaaacgaaaattaactatataaaaaataatacaccccgcaatctaaacaatctaatccgaactaaaaacgtatacactcgacgcacctacgaaactacaaaacctcgaaccgacacgtataaaaaatataaacacgtctactacgccccgcttctcgctactaaaaaaaaaaaaaaaaacgaacaaatacaacgaccgaactaataaaaaaaaacgacgaccataaaacgaataaacgacgcttcgtacgacccgtctaactactacacataccaaataaacaaacacaacacgaaaatactacacaacctaaaccaacaacgcaaaaacgacgaacgcttctacgacgtactcttacgaataaacgacgaaaacttcccaacgcaccgcgccgtactaaccgcctacaacgaatactttaaatcgatattcaacgcccaattaaacgacgacgaaactacgaacgaaaatccgactaatataaaaaacgcgacgacaa

SEQ ID NO: 23335 - DNA, 1080 bp, Artificial Sequence
  chemically treated genomic DNA (Homo sapiens) CpG-island No: 23335
atcgtttttttttttttttttttttaggggtgaaagtgtaagaggaagtgtagtcgttgtatagttttttttcgtttcgaatatacggagttcggggtcgtatagtcgtcgtttcgtcgtcgttttttttcggtttgaggaagggtttattttgtcgtcgtcgtcgttcgttcgttttagtcgtcgtcgtcgtcgttatcgttttttaggtttcgggattcggttcgcgttatcgttttcgtgcgcgtttcgtcgtcgtcgttttcgttttcgttttttgtttttttcgtttcggcgttttcgtttcggttcgcgttttgtaggggacgtagcgcgcgtttttagcgggttcgggaaaagtcgcggcgcgcgcgcgcgtttgcgcggcggatttttttttttttttttcgcgtgcgcgtgttttttttggttgcgcgtcggcgtcgtttggcgggcgggaggggaggtggtaggcgcgtttgtaggaggggcgtattttttcgttcgcgtattttttcggaaggtagatcgggaaggggaggcgggcgggcggagaggagagagtggcgcgtagtttagcgagggcgggggttggttatgtggggggtggtgtatttcgtagtttagatagtttgattcgggttgggggcgtgtatattcggcgtatttgcgagattatagagtttcgggtcggtacgtgtggggagtgtggatacgtttgttgcgtttcgtttttcgttgttgaggggaagggagggggcgggtaggtgtagcggtcgggttagtgggagggggcggcggttatggagcgggtgaacgacgtttcgtgcggttcgtttggttgttatatatattaggtgagtagatatagtacggagatgttgtataatttgaattagtagcgtaaaaacggcgggcgtttttgcgacgtgtttttgcgggtaggcgacgagagttttttagcgtatcgcgtcgtgttggtcgtttgtagcgagtattttgagtcggtgtttagcgtttagttgggcgacggcggagttgcggacgggggttcggttgatgtagggggcgcgacggtag

SEQ ID NO: 23336 - DNA, 1080 bp, Artificial Sequence
  chemically treated genomic DNA (Homo sapiens) CpG-island No: 23336
ctaccgtcgcgccccctacatcaaccgaacccccgtccgcaactccgccgtcgcccaactaaacgctaaacaccgactcaaaatactcgctacaaacgaccaacacgacgcgatacgctaaaaaactctcgtcgcctacccgcaaaaacacgtcgcaaaaacgcccgccgtttttacgctactaattcaaattatacaacatctccgtactatatctactcacctaatatatataacaaccaaacgaaccgcacgaaacgtcgttcacccgctccataaccgccgccccctcccactaacccgaccgctacacctacccgccccctcccttcccctcaacaacgaaaaacgaaacgcaacaaacgtatccacactccccacacgtaccgacccgaaactctataatctcgcaaatacgccgaatatacacgcccccaacccgaatcaaactatctaaactacgaaatacaccaccccccacataaccaacccccgccctcgctaaactacgcgccactctctcctctccgcccgcccgcctccccttcccgatctaccttccgaaaaaatacgcgaacgaaaaaatacgcccctcctacaaacgcgcctaccacctcccctcccgcccgccaaacgacgccgacgcgcaaccaaaaaaaacacgcgcacgcgaaaaaaaaaaaaaaaaatccgccgcgcaaacgcgcgcgcgcgccgcgacttttcccgaacccgctaaaaacgcgcgctacgtcccctacaaaacgcgaaccgaaacgaaaacgccgaaacgaaaaaaacaaaaaacgaaaacgaaaacgacgacgacgaaacgcgcacgaaaacgataacgcgaaccgaatcccgaaacctaaaaaacgataacgacgacgacgacgactaaaacgaacgaacgacgacgacgacaaaataaacccttcctcaaaccgaaaaaaaacgacgacgaaacgacgactatacgaccccgaactccgtatattcgaaacgaaaaaaaactatacaacgactacacttcctcttacactttcacccctaaaaaaaaaaaaaaaaaaaaacgat

SEQ ID NO: 23337 - DNA, 643 bp, Artificial Sequence
  chemically treated genomic DNA (Homo sapiens) CpG-island No: 23337
attttttgtcggcgtgaggtggcgttgtttggtcgtattttgggggagcgtttatattttcggtcgataaaaggagcgtcgatattttcggatttgggaaagtgacggtttaaacgttagggaggagttaggatttcgttttgagttagcgggaggtaacggcggggagttttggggcggagatcgagcgttgggggcgtggtttttagcgggattgggtttttagcgggagtgggggcgggggcgggggcggggttagtttgggggtttagacgtggcgtagcgattcggaggttcgtttttagtttgcgtattatttgcggtcgggtttcgatgagttttttgttgttttcgttggcgttgttgttgtttttcgcggcgtttgtggttttagttatagtcgttattgtttatcggtcggattggaatcgtttgagcggtttaattcgcgttcgggtagaggtgagtacgtcggtttttagtttcggtattatcgttttttaattttgcggttttatgggagtatcgttcgtttcggttttaagattatttcgaatcgcgagtttttttgttttttttttggcgtcgggattattttttttgttttttagttttagatggttttagtatttatcgtggaagt

SEQ ID NO: 23338 - DNA, 643 bp, Artificial Sequence
  chemically treated genomic DNA (Homo sapiens) CpG-island No: 23338
acttccacgataaatactaaaaccatctaaaactaaaaaacaaaaaaaataatcccgacgccaaaaaaaaaacaaaaaaactcgcgattcgaaataatcttaaaaccgaaacgaacgatactcccataaaaccgcaaaattaaaaaacgataataccgaaactaaaaaccgacgtactcacctctacccgaacgcgaattaaaccgctcaaacgattccaatccgaccgataaacaataacgactataactaaaaccacaaacgccgcgaaaaacaacaacaacgccaacgaaaacaacaaaaaactcatcgaaacccgaccgcaaataatacgcaaactaaaaacgaacctccgaatcgctacgccacgtctaaacccccaaactaaccccgcccccgcccccgcccccactcccgctaaaaacccaatcccgctaaaaaccacgcccccaacgctcgatctccgccccaaaactccccgccgttacctcccgctaactcaaaacgaaatcctaactcctccctaacgtttaaaccgtcactttcccaaatccgaaaatatcgacgctccttttatcgaccgaaaatataaacgctcccccaaaatacgaccaaacaacgccacctcacgccgacaaaaaat

SEQ ID NO: 23339 - DNA, 643 bp, Artificial Sequence
  chemically treated genomic DNA (Homo sapiens) CpG-island No: 23339
gtttttacggtggatgttggggttatttggggttagggaataggagggatggtttcggcgttagggggaaagtagggagattcgcggttcgaggtggttttggggtcgggacggacggtgtttttatggggtcgtagggttggggaacgatagtgtcggggttggaggtcggcgtatttatttttattcgggcgcgggttaggtcgtttagacggttttagttcggtcggtaggtagtggcggttgtggttggggttataagcgtcgcgagaagtagtagtagcgttagcggaggtaataggaggtttatcgggattcggtcgtagatgatgcgtaagttggaggcgaattttcgagtcgttgcgttacgtttgggtttttaggttggtttcgttttcgttttcgtttttattttcgttagaggtttagtttcgttggagattacgtttttagcgttcggttttcgttttaggatttttcgtcgttatttttcgttagtttagggcgaggttttggtttttttttggcgtttgggtcgttatttttttaggttcgagagtgtcgacgttttttttgtcgatcgaggatgtggacgtttttttaggatgcggttaggtagcgttattttacgtcggtagagggt

SEQ ID NO: 23340 - DNA, 643 bp, Artificial Sequence
  chemically treated genomic DNA (Homo sapiens) CpG-island No: 23340
accctctaccgacgtaaaataacgctacctaaccgcatcctaaaaaaacgtccacatcctcgatcgacaaaaaaaacgtcgacactctcgaacctaaaaaaataacgacccaaacgccaaaaaaaaaccaaaacctcgccctaaactaacgaaaaataacgacgaaaaatcctaaaacgaaaaccgaacgctaaaaacgtaatctccaacgaaactaaacctctaacgaaaataaaaacgaaaacgaaaacgaaaccaacctaaaaacccaaacgtaacgcaacgactcgaaaattcgcctccaacttacgcatcatctacgaccgaatcccgataaacctcctattacctccgctaacgctactactacttctcgcgacgcttataaccccaaccacaaccgccactacctaccgaccgaactaaaaccgtctaaacgacctaacccgcgcccgaataaaaataaatacgccgacctccaaccccgacactatcgttccccaaccctacgaccccataaaaacaccgtccgtcccgaccccaaaaccacctcgaaccgcgaatctccctactttccccctaacgccgaaaccatccctcctattccctaaccccaaataaccccaacatccaccgtaaaaac

SEQ ID NO: 23341 - DNA, 537 bp, Artificial Sequence
  chemically treated genomic DNA (Homo sapiens) CpG-island No: 23341
gttattttttcgttttttagagtcgtgtattgagtgtttattgagcgttattttttcgttttttagagtcgtgtattgagtgtttattgagtgttattttttcgttttttagagtcgtgtattgagtgtttattgagcgtttttttttcgtttttttgagtcgtgtattgagtgtttattgagcgttttttttttgttttttagagtcgtgtattgagtgtttattgagcgtttttttatcgtttttcggagtcgtgtattgagtgtttattgagcgtttttttttcgttttttagagtcgtgtattgagtgtttattgagcgttttttttttgtttttttgagtcgtgtattgagtgtttattgagcgttattttttcgttttttagagtcgtgtattgagtgtttattgagcgttattttttcgttttttagagtcgtgtattgagtgtttattgagtgttattttttcgttttttagagtcgtgtattgagtgtttattgagcgttttttttttatttttttgagtcgtgtatt

SEQ ID NO: 23342 - DNA, 537 bp, Artificial Sequence
  chemically treated genomic DNA (Homo sapiens) CpG-island No: 23342
aatacacgactcaaaaaaataaaaaaaaaacgctcaataaacactcaatacacgactctaaaaaacgaaaaaataacactcaataaacactcaatacacgactctaaaaaacgaaaaaataacgctcaataaacactcaatacacgactctaaaaaacgaaaaaataacgctcaataaacactcaatacacgactcaaaaaaacaaaaaaaaaacgctcaataaacactcaatacacgactctaaaaaacgaaaaaaaaacgctcaataaacactcaatacacgactccgaaaaacgataaaaaaacgctcaataaacactcaatacacgactctaaaaaacaaaaaaaaaacgctcaataaacactcaatacacgactcaaaaaaacgaaaaaaaaacgctcaataaacactcaatacacgactctaaaaaacgaaaaaataacactcaataaacactcaatacacgactctaaaaaacgaaaaaataacgctcaataaacactcaatacacgactctaaaaaacgaaaaaataac

SEQ ID NO: 23343 - DNA, 537 bp, Artificial Sequence
  chemically treated genomic DNA (Homo sapiens) CpG-island No: 23343
aatatacgatttaggaggatgaggagggagcgtttagtaagtatttaatatacgattttggaggacgaggaggtggtatttagtaagtatttaatatacgattttggaggacgaggaggtggcgtttagtaagtatttaatgtacgattttggaggacgaggaggtggcgtttagtaagtatttaatatacgatttaggaggataaggagggagcgtttagtaagtatttaatatacgattttggaggacgaggagggggcgtttagtaagtatttaatatacgatttcggaggacgatgagggagcgtttagtaagtatttaatatacgattttggaggataaggagggagcgtttagtaagtatttaatatacgatttaggaggacgaggagggagcgtttagtaagtatttaatatacgattttggaggacgaggaggtggtatttagtaagtatttaatatacgattttggaggacgaggaggtggcgtttagtaagtatttaatgtacgattttggaggacgaggaggtggt

SEQ ID NO: 23344 - DNA, 537 bp, Artificial Sequence
  chemically treated genomic DNA (Homo sapiens) CpG-island No: 23344
accacctcctcgtcctccaaaatcgtacattaaatacttactaaacgccacctcctcgtcctccaaaatcgtatattaaatacttactaaataccacctcctcgtcctccaaaatcgtatattaaatacttactaaacgctccctcctcgtcctcctaaatcgtatattaaatacttactaaacgctccctccttatcctccaaaatcgtatattaaatacttactaaacgctccctcatcgtcctccgaaatcgtatattaaatacttactaaacgccccctcctcgtcctccaaaatcgtatattaaatacttactaaacgctccctccttatcctcctaaatcgtatattaaatacttactaaacgccacctcctcgtcctccaaaatcgtacattaaatacttactaaacgccacctcctcgtcctccaaaatcgtatattaaatacttactaaataccacctcctcgtcctccaaaatcgtatattaaatacttactaaacgctccctcctcatcctcctaaatcgtatatt

SEQ ID NO: 23345 - DNA, 544 bp, Artificial Sequence
  chemically treated genomic DNA (Homo sapiens) CpG-island No: 23345
tattgagcgtttttttttcgtttttttgagtcgtgtattgagtgtttattgagcgttatttttttgtttttcggagtcgtgtattgagtgtttattgagcgtttttttttcgtttttttgagtcgtgtattgagtgtttattgagcgtttttttttcgtttttttgagtcgtgtattgagtgtttattgagcgtttttttttcgttttttagagtcgtgtattgagtgtttattgagcgtttttttttcgtttttttgagtcgtgtattgagtgtttattgagcgtttttttttcgttttttagagtcgtgtattgagtgtttattgagcgttattttttcgttttttagagtcgtgtattgagtgtttattgagcgttttttttttatttttttgagtcgtgtattgagtgtttattgagcgtttttttttcgtttttttgagtcgtgtattgagtgtttattgagcgttttttttttgttttttagagtcgtgtattgagtgtttattgagcgttttttttttgttttttggagtcgtgtat

SEQ ID NO: 23346 - DNA, 544 bp, Artificial Sequence
  chemically treated genomic DNA (Homo sapiens) CpG-island No: 23346
atacacgactccaaaaaacaaaaaaaaaacgctcaataaacactcaatacacgactctaaaaaacaaaaaaaaaacgctcaataaacactcaatacacgactcaaaaaaacgaaaaaaaaacgctcaataaacactcaatacacgactcaaaaaaataaaaaaaaaacgctcaataaacactcaatacacgactctaaaaaacgaaaaaataacgctcaataaacactcaatacacgactctaaaaaacgaaaaaaaaacgctcaataaacactcaatacacgactcaaaaaaacgaaaaaaaaacgctcaataaacactcaatacacgactctaaaaaacgaaaaaaaaacgctcaataaacactcaatacacgactcaaaaaaacgaaaaaaaaacgctcaataaacactcaatacacgactcaaaaaaacgaaaaaaaaacgctcaataaacactcaatacacgactccgaaaaacaaaaaaataacgctcaataaacactcaatacacgactcaaaaaaacgaaaaaaaaacgctcaata

SEQ ID NO: 23347 - DNA, 544 bp, Artificial Sequence
  chemically treated genomic DNA (Homo sapiens) CpG-island No: 23347
atatacgattttagaggataaggagggagcgtttagtaagtatttaatatacgattttggaggataaggagggagcgtttagtaagtatttaatatacgatttaggaggacgaggagggagcgtttagtaagtatttaatatacgatttaggaggatgaggagggagcgtttagtaagtatttaatatacgattttggaggacgaggaggtggcgtttagtaagtatttaatatacgattttggaggacgaggagggggcgtttagtaagtatttaatatacgatttaggaggacgaggagggagcgtttagtaagtatttaatatacgattttggaggacgaggagggggcgtttagtaagtatttaatatacgatttaggaggacgaggagggagcgtttagtaagtatttaatatacgatttaggaggacgaggagggagcgtttagtaagtatttaatatacgatttcggaagataaggaggtggcgtttagtaagtatttaatatacgatttaggaggacgaggagggagcgtttagta

SEQ ID NO: 23348 - DNA, 544 bp, Artificial Sequence
  chemically treated genomic DNA (Homo sapiens) CpG-island No: 23348
tactaaacgctccctcctcgtcctcctaaatcgtatattaaatacttactaaacgccacctccttatcttccgaaatcgtatattaaatacttactaaacgctccctcctcgtcctcctaaatcgtatattaaatacttactaaacgctccctcctcgtcctcctaaatcgtatattaaatacttactaaacgccccctcctcgtcctccaaaatcgtatattaaatacttactaaacgctccctcctcgtcctcctaaatcgtatattaaatacttactaaacgccccctcctcgtcctccaaaatcgtatattaaatacttactaaacgccacctcctcgtcctccaaaatcgtatattaaatacttactaaacgctccctcctcatcctcctaaatcgtatattaaatacttactaaacgctccctcctcgtcctcctaaatcgtatattaaatacttactaaacgctccctccttatcctccaaaatcgtatattaaatacttactaaacgctccctccttatcctctaaaatcgtatat

SEQ ID NO: 23349 - DNA, 636 bp, Artificial Sequence
  chemically treated genomic DNA (Homo sapiens) CpG-island No: 23349
attgagcgtttttttttcgttttttagagtcgtgtattgagtgtttattgagcgttatttttttattttttagagtcgtgtattgagtgtttattgagcgtttttttttcgttttttagagtcgtgtattgagtgtttattgagcgtttttttttcgttttttagagtcgtgtattgagtgtttattgagcgtttttttttcgttttttagagtcgtgtattgagtgtttattgagcgttattttttcgttttttagagtcgtgtattgagtgtttattgagcgtttttttttcgttttttagagtcgtgtattgagtgtttattgagcgttattttttcgttttttagagtcgtgtattgagtgtttattgagcgttattttttcgttttttagagtcgtgtattgagtgtttattgagcgttattttttcgttttttagagtcgtgtattgagtgtttattgagcgtttttttttcgttttttagagtcgtgtattgagtgtttattgagcgttattttttcgttttttaaagtcgtgtattgagtgtttattgagcgttttttttttgttttttagagtcgtgtattgagtgtttattgagcgttatttttttattttttagagtcgtgtatt

SEQ ID NO: 23350 - DNA, 636 bp, Artificial Sequence
  chemically treated genomic DNA (Homo sapiens) CpG-island No: 23350
aatacacgactctaaaaaataaaaaaataacgctcaataaacactcaatacacgactctaaaaaacaaaaaaaaaacgctcaataaacactcaatacacgactttaaaaaacgaaaaaataacgctcaataaacactcaatacacgactctaaaaaacgaaaaaaaaacgctcaataaacactcaatacacgactctaaaaaacgaaaaaataacgctcaataaacactcaatacacgactctaaaaaacgaaaaaataacgctcaataaacactcaatacacgactctaaaaaacgaaaaaataacgctcaataaacactcaatacacgactctaaaaaacgaaaaaaaaacgctcaataaacactcaatacacgactctaaaaaacgaaaaaataacgctcaataaacactcaatacacgactctaaaaaacgaaaaaaaaacgctcaataaacactcaatacacgactctaaaaaacgaaaaaaaaacgctcaataaacactcaatacacgactctaaaaaacgaaaaaaaaacgctcaataaacactcaatacacgactctaaaaaataaaaaaataacgctcaataaacactcaatacacgactctaaaaaacgaaaaaaaaacgctcaat

SEQ ID NO: 23351 - DNA, 636 bp, Artificial Sequence
  chemically treated genomic DNA (Homo sapiens) CpG-island No: 23351
aatatacgattttggaggatgaggaggtggcgtttagtaagtatttaatatacgattttggaggataaggagggagcgtttagtaagtatttaatatacgattttggaggacgaggaggtggcgtttagtaagtatttaatatacgattttggaggacgaggagggagcgtttagtaagtatttaatatacgattttggaggacgaggaggtggcgtttagtaagtatttaatatacgattttggaggacgaggaggtggcgtttagtaagtatttaatatacgattttggaggacgaggaggtggcgtttagtaagtatttaatatacgattttggaggacgaggagggagcgtttagtaagtatttaatatacgattttggaggacgaggaggtggcgtttagtaagtatttaatatacgattttggaggacgaggagggagcgtttagtaagtatttaatatacgattttggaggacgaggagggagcgtttagtaagtatttaatatacgattttggaggacgaggagggagcgtttagtaagtatttaatatacgattttggaggatgaggaggtggcgtttagtaagtatttaatatacgattttggaggacgaggagggggcgtttagt

SEQ ID NO: 23352 - DNA, 636 bp, Artificial Sequence
  chemically treated genomic DNA (Homo sapiens) CpG-island No: 23352
actaaacgccccctcctcgtcctccaaaatcgtatattaaatacttactaaacgccacctcctcatcctccaaaatcgtatattaaatacttactaaacgctccctcctcgtcctccaaaatcgtatattaaatacttactaaacgctccctcctcgtcctccaaaatcgtatattaaatacttactaaacgctccctcctcgtcctccaaaatcgtatattaaatacttactaaacgccacctcctcgtcctccaaaatcgtatattaaatacttactaaacgctccctcctcgtcctccaaaatcgtatattaaatacttactaaacgccacctcctcgtcctccaaaatcgtatattaaatacttactaaacgccacctcctcgtcctccaaaatcgtatattaaatacttactaaacgccacctcctcgtcctccaaaatcgtatattaaatacttactaaacgctccctcctcgtcctccaaaatcgtatattaaatacttactaaacgccacctcctcgtcctccaaaatcgtatattaaatacttactaaacgctccctccttatcctccaaaatcgtatattaaatacttactaaacgccacctcctcatcctccaaaatcgtatatt

SEQ ID NO: 23353 - DNA, 584 bp, Artificial Sequence
  chemically treated genomic DNA (Homo sapiens) CpG-island No: 23353
tgagcgttattttttcgttttttagagtcgtgtattgagtgtttattgagcgttattttttcgttttttagagtcgtgtattgagtgtttattgagcgttttttttttatttttttgagtcgtgtattgagtgtttattgagcgtttttttttcgtttttttgagtcgtgtattgagtgtttattgagcgttttttttttgttttttagagtcgtgtattgagtgtttattgagcgtttttttatcgtttttcggagtcgtgtattgagtgtttattgagcgtttttttttcgttttttagagtcgtgtattgagtgtttattgagcgttattttttcgtttttttgagtcgtgtattgagtgtttattgagcgttatttttttgtttttttgagtcgtgtattgagtgtttattgagcgtttttttttcgttttttagagtcgtattaattgagcgtttttattttgttttttagagtcgcgtaatttagcgtttattgagcgttatttttttgttttttagagtcgtgtattgagtgcgtattgagcgttatttttttattttttagggtagtgtattgagt

SEQ ID NO: 23354 - DNA, 584 bp, Artificial Sequence
  chemically treated genomic DNA (Homo sapiens) CpG-island No: 23354
actcaatacactaccctaaaaaataaaaaaataacgctcaatacgcactcaatacacgactctaaaaaacaaaaaaataacgctcaataaacgctaaattacgcgactctaaaaaacaaaataaaaacgctcaattaatacgactctaaaaaacgaaaaaaaaacgctcaataaacactcaatacacgactcaaaaaaacaaaaaaataacgctcaataaacactcaatacacgactcaaaaaaacgaaaaaataacgctcaataaacactcaatacacgactctaaaaaacgaaaaaaaaacgctcaataaacactcaatacacgactccgaaaaacgataaaaaaacgctcaataaacactcaatacacgactctaaaaaacaaaaaaaaaacgctcaataaacactcaatacacgactcaaaaaaacgaaaaaaaaacgctcaataaacactcaatacacgactcaaaaaaataaaaaaaaaacgctcaataaacactcaatacacgactctaaaaaacgaaaaaataacgctcaataaacactcaatacacgactctaaaaaacgaaaaaataacgctca

SEQ ID NO: 23355 - DNA, 584 bp, Artificial Sequence
  chemically treated genomic DNA (Homo sapiens) CpG-island No: 23355
atttaatatattattttggaggatgaggaggtggcgtttagtgcgtatttaatatacgattttggagggtaaggaggtggcgtttagtaagcgttgagttacgcgattttggaggataaggtgggagcgtttagttagtacgattttggaggacgaggagggagcgtttagtaagtatttaatatacgatttaggaggataaggaggtggcgtttagtaagtatttaatatacgatttaggaggacgaggaggtggcgtttagtaagtatttaatatacgattttggaggacgaggagggggcgtttagtaagtatttaatatacgatttcggaggacgatgagggagcgtttagtaagtatttaatatacgattttggaggataaggagggagcgtttagtaagtatttaatatacgatttaggaggacgaggagggagcgtttagtaagtatttaatatacgatttaggaggatgaggagggagcgtttagtaagtatttaatatacgattttggaggacgaggaggtggcgtttagtaagtatttaatatacgattttggaggacgaggaggtggcgttta

SEQ ID NO: 23356 - DNA, 584 bp, Artificial Sequence
  chemically treated genomic DNA (Homo sapiens) CpG-island No: 23356
taaacgccacctcctcgtcctccaaaatcgtatattaaatacttactaaacgccacctcctcgtcctccaaaatcgtatattaaatacttactaaacgctccctcctcatcctcctaaatcgtatattaaatacttactaaacgctccctcctcgtcctcctaaatcgtatattaaatacttactaaacgctccctccttatcctccaaaatcgtatattaaatacttactaaacgctccctcatcgtcctccgaaatcgtatattaaatacttactaaacgccccctcctcgtcctccaaaatcgtatattaaatacttactaaacgccacctcctcgtcctcctaaatcgtatattaaatacttactaaacgccacctccttatcctcctaaatcgtatattaaatacttactaaacgctccctcctcgtcctccaaaatcgtactaactaaacgctcccaccttatcctccaaaatcgcgtaactcaacgcttactaaacgccacctccttaccctccaaaatcgtatattaaatacgcactaaacgccacctcctcatcctccaaaataatatattaaat

SEQ ID NO: 23357 - DNA, 676 bp, Artificial Sequence
  chemically treated genomic DNA (Homo sapiens) CpG-island No: 23357
ttttttcgatttttttttcgatttttttagtttttttcgatttttttagtttttttcgatttttttagtttttttcgatttttttagtttttttcgatttttttaggttttttcgatttttttagtttttttcgatttttttattttttttcgatttttttagtttttttcgatttttttagtttttttcgatttttttagtttttttcgatttttttagtttttttcgatttttttaggttttttcgatttttttagtttttttcgatttttttagtttttttcgatttttttaggttttttcgatttttttagtttttttcgatttttttagtttttttcgatttttttagtttttttcgatttttttagtttttttcgatttttttaggttttttcgatttttttagtttttttcgatttttttagtttttttcgatttttttaggttttttcgatttttttagtttttttcgatttttttagtttttttcgatttttttagtttttttcgatttttttaggttttttcgatttttttagtttttttcgatttttttagtttttttcgatttttttagtttttttcgatttttttagtttttttcgatttttttagtttttttcgatttttttagtttttttcgttagttgttgatttttatattttgttttt

SEQ ID NO: 23358 - DNA, 676 bp, Artificial Sequence
  chemically treated genomic DNA (Homo sapiens) CpG-island No: 23358
aaaaacaaaatataaaaatcaacaactaacgaaaaaaactaaaaaaatcgaaaaaaactaaaaaaatcgaaaaaaactaaaaaaatcgaaaaaaactaaaaaaatcgaaaaaaactaaaaaaatcgaaaaaaactaaaaaaatcgaaaaaacctaaaaaaatcgaaaaaaactaaaaaaatcgaaaaaaactaaaaaaatcgaaaaaaactaaaaaaatcgaaaaaacctaaaaaaatcgaaaaaaactaaaaaaatcgaaaaaaactaaaaaaatcgaaaaaacctaaaaaaatcgaaaaaaactaaaaaaatcgaaaaaaactaaaaaaatcgaaaaaaactaaaaaaatcgaaaaaaactaaaaaaatcgaaaaaacctaaaaaaatcgaaaaaaactaaaaaaatcgaaaaaaactaaaaaaatcgaaaaaacctaaaaaaatcgaaaaaaactaaaaaaatcgaaaaaaactaaaaaaatcgaaaaaaactaaaaaaatcgaaaaaaactaaaaaaatcgaaaaaaaataaaaaaatcgaaaaaaactaaaaaaatcgaaaaaacctaaaaaaatcgaaaaaaactaaaaaaatcgaaaaaaactaaaaaaatcgaaaaaaactaaaaaaatcgaaaaaaactaaaaaaatcgaaaaaaaaatcgaaaaaa

SEQ ID NO: 23359 - DNA, 676 bp, Artificial Sequence
  chemically treated genomic DNA (Homo sapiens) CpG-island No: 23359
ggggatagagtgtggaggttagtagttggcgggaaaggttggaggggtcgggaaaagttggaggggtcgggaaaggttggaggggtcgggaaaggttggaggggtcgggaaaagttggaggggtcgggaaaggttggaggggtcgggaaagtttggaggggtcgggaaaggttggaggggtcgggaaaggttggaggggtcgggaaaggttggaggggtcgggaaagtttggaggggtcgggaaaggttggaggggtcgggaaaggttggaggggtcgggaaagtttggaggggtcgggaaaggttggaggggtcgggaaaggttggaggggtcgggaaaggttggaggggtcgggaaaggttggaggggtcgggaaagtttggaggggtcgggaaaggttggaggggtcgggaaaggttggaggggtcgggaaagtttggaggggtcgggaaaggttggaggggtcgggaaaggttggaggggtcgggaaaggttggaggggtcgggaaaggttggaggggtcgggaaaggatggaggggtcgggaaaggttggaggggtcgggaaagtttggaggggtcgggaaaggttggaggggtcgggaaaggttggaggggtcgggaaaggttgggggagtcgggaaaggttggaggagtcggggaaggagtcggggaag

SEQ ID NO: 23360 - DNA, 676 bp, Artificial Sequence
  chemically treated genomic DNA (Homo sapiens) CpG-island No: 23360
cttccccgactccttccccgactcctccaacctttcccgactcccccaacctttcccgacccctccaacctttcccgacccctccaacctttcccgacccctccaaactttcccgacccctccaacctttcccgacccctccatcctttcccgacccctccaacctttcccgacccctccaacctttcccgacccctccaacctttcccgacccctccaacctttcccgacccctccaaactttcccgacccctccaacctttcccgacccctccaacctttcccgacccctccaaactttcccgacccctccaacctttcccgacccctccaacctttcccgacccctccaacctttcccgacccctccaacctttcccgacccctccaaactttcccgacccctccaacctttcccgacccctccaacctttcccgacccctccaaactttcccgacccctccaacctttcccgacccctccaacctttcccgacccctccaacctttcccgacccctccaaactttcccgacccctccaacctttcccgacccctccaacttttcccgacccctccaacctttcccgacccctccaacctttcccgacccctccaacttttcccgacccctccaacctttcccgccaactactaacctccacactctatcccc

SEQ ID NO: 23361 - DNA, 906 bp, Artificial Sequence
  chemically treated genomic DNA (Homo sapiens) CpG-island No: 23361
cggcgtttcgttattgggggattgtgtggtgttggggtgttcgcgtttcgttattgggggattgtgtggtgttggggtgttcgcgtttcgttgttgggggattgtgtggtgttcgggtgttcgcgtttcgttattgggggattgtgtggagttcgggtgttcgcgtttcgttgttgcgggattgtgtgttgttggggtgtcggcgtttcgttattgggggattgtgtggtgttggggtgttcgcgtttcgttattgggggattgtgtggtgttgggtgttcgtgtttcgttgttggtggattgtgtggtgttgggtgttcgcgtttcgttgttcggggattgtgtggtgttggggtgttcgcgtttcgttgttgggggattgtgtggtgttggggtgttcgcgttttattattggggggttgtgtggtgttggggtgttcgcgtttcgttattgggggattgtgtggtgttggggtgtttgcgtttcgttattgggggattgtgtggtgttgggtgttcgcgtttcgttattggggggttgtgtggtgttggggtgttcgcgtttcgttattggggggttgtgtggtgttggggtgttcgcgtttcgttattgggggattgtgtggtgttggggtgttcgtgtttcgttattgcggggattgtgtagtgttcgggtgttcgcgtttcgttattgggggattgtgtggtgttggggtgttcgcgtttcgttgttggggggttgtgtggttttggggtgttcgcgtttcgttattgggggattgtgtggtgttgggtgttcgcgtttcgttgttgggggattgtgtggtgttggggtgttcgcgttttattgttgggggattgtgtggtgttggggtgttcgcgtttcgttattggggggttgtgtgg

SEQ ID NO: 23362 - DNA, 906 bp, Artificial Sequence
  chemically treated genomic DNA (Homo sapiens) CpG-island No: 23362
ccacacaaccccccaataacgaaacgcgaacaccccaacaccacacaatcccccaacaataaaacgcgaacaccccaacaccacacaatcccccaacaacgaaacgcgaacacccaacaccacacaatcccccaataacgaaacgcgaacaccccaaaaccacacaaccccccaacaacgaaacgcgaacaccccaacaccacacaatcccccaataacgaaacgcgaacacccgaacactacacaatccccgcaataacgaaacacgaacaccccaacaccacacaatcccccaataacgaaacgcgaacaccccaacaccacacaaccccccaataacgaaacgcgaacaccccaacaccacacaaccccccaataacgaaacgcgaacacccaacaccacacaatcccccaataacgaaacgcaaacaccccaacaccacacaatcccccaataacgaaacgcgaacaccccaacaccacacaaccccccaataataaaacgcgaacaccccaacaccacacaatcccccaacaacgaaacgcgaacaccccaacaccacacaatccccgaacaacgaaacgcgaacacccaacaccacacaatccaccaacaacgaaacacgaacacccaacaccacacaatcccccaataacgaaacgcgaacaccccaacaccacacaatcccccaataacgaaacgccgacaccccaacaacacacaatcccgcaacaacgaaacgcgaacacccgaactccacacaatcccccaataacgaaacgcgaacacccgaacaccacacaatcccccaacaacgaaacgcgaacaccccaacaccacacaatcccccaataacgaaacgcgaacaccccaacaccacacaatcccccaataacgaaacgccg

SEQ ID NO: 23363 - DNA, 906 bp, Artificial Sequence
  chemically treated genomic DNA (Homo sapiens) CpG-island No: 23363
ttatatagttttttagtaacgaggcgcggatattttaatattatatagttttttagtaatgaggcgcggatattttaatattatatagttttttagtaacgaggcgcggatatttaatattatatagttttttagtaacgaggcgcggatattttaaaattatatagttttttagtaacgaggcgcggatattttaatattatatagttttttagtaacgaggcgcggatattcggatattgtatagttttcgtagtaacgaggtacggatattttaatattatatagttttttagtaacgaggcgcggatattttaatattatatagttttttagtaacgaggcgcggatattttaatattatatagttttttagtaacgaggcgcggatatttaatattatatagttttttagtaacgaggcgtagatattttaatattatatagttttttagtaacgaggcgcggatattttaatattatatagttttttagtaatgaggcgcggatattttaatattatatagttttttagtaacgaggcgcggatattttaatattatatagttttcgagtaacgaggcgcggatatttaatattatatagtttattagtaacgaggtacggatatttaatattatatagttttttagtaacgaggcgcggatattttaatattatatagttttttagtaacgaggcgtcgatattttaataatatatagtttcgtagtaacgaggcgcggatattcgaattttatatagttttttagtaacgaggcgcggatattcgaatattatatagttttttagtaacgaggcgcggatattttaatattatatagttttttagtaacgaggcgcggatattttaatattatatagttttttagtaacgaggcgtcg

SEQ ID NO: 23364 - DNA, 906 bp, Artificial Sequence
  chemically treated genomic DNA (Homo sapiens) CpG-island No: 23364
cgacgcctcgttactaaaaaactatataatattaaaatatccgcgcctcgttactaaaaaactatataatattaaaatatccgcgcctcgttactaaaaaactatataatattcgaatatccgcgcctcgttactaaaaaactatataaaattcgaatatccgcgcctcgttactacgaaactatatattattaaaatatcgacgcctcgttactaaaaaactatataatattaaaatatccgcgcctcgttactaaaaaactatataatattaaatatccgtacctcgttactaataaactatataatattaaatatccgcgcctcgttactcgaaaactatataatattaaaatatccgcgcctcgttactaaaaaactatataatattaaaatatccgcgcctcattactaaaaaactatataatattaaaatatccgcgcctcgttactaaaaaactatataatattaaaatatctacgcctcgttactaaaaaactatataatattaaatatccgcgcctcgttactaaaaaactatataatattaaaatatccgcgcctcgttactaaaaaactatataatattaaaatatccgcgcctcgttactaaaaaactatataatattaaaatatccgtacctcgttactacgaaaactatacaatatccgaatatccgcgcctcgttactaaaaaactatataatattaaaatatccgcgcctcgttactaaaaaactatataattttaaaatatccgcgcctcgttactaaaaaactatataatattaaatatccgcgcctcgttactaaaaaactatataatattaaaatatccgcgcctcattactaaaaaactatataatattaaaatatccgcgcctcgttactaaaaaactatataa

SEQ ID NO: 23365 - DNA, 549 bp, Artificial Sequence
  chemically treated genomic DNA (Homo sapiens) CpG-island No: 23365
gtagttcgcgtagcgtggtcgagtcgttgtttttaggtaggtagacgaagcggtggaatttgggttgttggttaaagcggttaaagagtaggcggaagcgcgcgtcgtttagcggtcggggattgcggtgttcgcgtacggtttagcgtatcgaggcgttgtttgcgtttatcgtttttatcgttaggttgtatagaatgaatttgttgaagtcgtatgggtcggatattagcggcggtagttcggttttatcgtcggattgggcggtacgtttttggtgtttcgtgtttagacgatgtttcgtcgcgcgttgttaggggtcgtcggcgggcgatggcgtagagttaggagaggtcgttggggtgggtttcgcgagggcgggatttgttcgagtcggacggtttcgttggggttttttgtgtaggtttagggattgtggagtcgggttcgcggcggtagcgacggaggggttgggttgttggaggttcgggtttcgtcgatttagttttagggcgttgcggttgtttattagttttttggcggttttat

SEQ ID NO: 23366 - DNA, 549 bp, Artificial Sequence
  chemically treated genomic DNA (Homo sapiens) CpG-island No: 23366
ataaaaccgccaaaaaactaataaacaaccgcaacgccctaaaactaaatcgacgaaacccgaacctccaacaacccaacccctccgtcgctaccgccgcgaacccgactccacaatccctaaacctacacaaaaaaccccaacgaaaccgtccgactcgaacaaatcccgccctcgcgaaacccaccccaacgacctctcctaactctacgccatcgcccgccgacgacccctaacaacgcgcgacgaaacatcgtctaaacacgaaacaccaaaaacgtaccgcccaatccgacgataaaaccgaactaccgccgctaatatccgacccatacgacttcaacaaattcattctatacaacctaacgataaaaacgataaacgcaaacaacgcctcgatacgctaaaccgtacgcgaacaccgcaatccccgaccgctaaacgacgcgcgcttccgcctactctttaaccgctttaaccaacaacccaaattccaccgcttcgtctacctacctaaaaacaacgactcgaccacgctacgcgaactac

SEQ ID NO: 23367 - DNA, 549 bp, Artificial Sequence
  chemically treated genomic DNA (Homo sapiens) CpG-island No: 23367
atggggtcgttagggagttggtaggtaatcgtagcgttttaaggttgagtcggcggggttcgggtttttagtagtttagttttttcgtcgttgtcgtcgcgggttcggttttatagtttttagatttgtataagaagttttagcggggtcgttcgattcgggtagatttcgttttcgcggagtttattttaacggttttttttggttttgcgttatcgttcgtcggcgatttttggtagcgcgcgacgaagtatcgtttgggtacggagtattaggagcgtgtcgtttagttcgacggtggggtcgggttgtcgtcgttggtgttcgatttatgcgattttaataagtttattttgtgtaatttgacggtggaggcggtgggcgtagatagcgtttcggtgcgttgggtcgtgcgcgagtatcgtagttttcggtcgttgggcggcgcgcgttttcgtttgttttttgatcgttttggttagtagtttaagttttatcgtttcgtttatttgtttgagagtagcgattcggttacgttgcgcgagttgt

SEQ ID NO: 23368 - DNA, 549 bp, Artificial Sequence
  chemically treated genomic DNA (Homo sapiens) CpG-island No: 23368
acaactcgcgcaacgtaaccgaatcgctactctcaaacaaataaacgaaacgataaaacttaaactactaaccaaaacgatcaaaaaacaaacgaaaacgcgcgccgcccaacgaccgaaaactacgatactcgcgcacgacccaacgcaccgaaacgctatctacgcccaccgcctccaccgtcaaattacacaaaataaacttattaaaatcgcataaatcgaacaccaacgacgacaacccgaccccaccgtcgaactaaacgacacgctcctaatactccgtacccaaacgatacttcgtcgcgcgctaccaaaaatcgccgacgaacgataacgcaaaaccaaaaaaaaccgttaaaataaactccgcgaaaacgaaatctacccgaatcgaacgaccccgctaaaacttcttatacaaatctaaaaactataaaaccgaacccgcgacgacaacgacgaaaaaactaaactactaaaaacccgaaccccgccgactcaaccttaaaacgctacgattacctaccaactccctaacgaccccat

SEQ ID NO: 23369 - DNA, 535 bp, Artificial Sequence
  chemically treated genomic DNA (Homo sapiens) CpG-island No: 23369
cgaggtgcgtgagttggttgtttttgagcgagagtaggtcgagacgtggtaggtgttggaagatgcgcggttcgaggtgttgtaggttgttggtcgagaggatgagggaggagagggagcgtagcggtgcgaaggtggtcgcgtggcgtagggagggttgtagttcgttggtagagaggttgaggaagcgtagtttgtttagttgggcgaaggcgtttttgtttagaaagcggattcggttggattttagatgtaggtagagtaggttgtttaagggagcgaagatcgcgttcggtagcgtttttagggcgttttcgtttagtcgtagtttgattagattttttaggttttcgaaggagtcgcggtttaggcggttgatttcgttttcgttggcgtagaggatgcgtagtttgcgtagcggggttagcgtgttcggggcgagcgtttgtaagaggttgttttttaggtatagtttttttagtcgcgagagtttttcgaaggttttggggtgtagagagcggatttggttgtattg

SEQ ID NO: 23370 - DNA, 535 bp, Artificial Sequence
  chemically treated genomic DNA (Homo sapiens) CpG-island No: 23370
caatacaaccaaatccgctctctacaccccaaaaccttcgaaaaactctcgcgactaaaaaaactatacctaaaaaacaacctcttacaaacgctcgccccgaacacgctaaccccgctacgcaaactacgcatcctctacgccaacgaaaacgaaatcaaccgcctaaaccgcgactccttcgaaaacctaaaaaatctaatcaaactacgactaaacgaaaacgccctaaaaacgctaccgaacgcgatcttcgctcccttaaacaacctactctacctacatctaaaatccaaccgaatccgctttctaaacaaaaacgccttcgcccaactaaacaaactacgcttcctcaacctctctaccaacgaactacaaccctccctacgccacgcgaccaccttcgcaccgctacgctccctctcctccctcatcctctcgaccaacaacctacaacacctcgaaccgcgcatcttccaacacctaccacgtctcgacctactctcgctcaaaaacaaccaactcacgcacctcg

SEQ ID NO: 23371 - DNA, 535 bp, Artificial Sequence
  chemically treated genomic DNA (Homo sapiens) CpG-island No: 23371
tagtataattagattcgttttttgtattttaagattttcgagaagttttcgcggttggaagagttgtatttggggaataattttttgtaggcgttcgtttcgggtacgttggtttcgttgcgtaagttgcgtattttttacgttaacgggaacgagattagtcgtttaagtcgcggttttttcgagggtttggagagtttagttaagttgcggttggacgggaacgttttgggggcgttgtcggacgcggttttcgtttttttgggtaatttgttttatttatatttggagtttaatcggattcgttttttgggtaagaacgttttcgtttagttaggtaagttgcgtttttttaatttttttgttaacgagttatagttttttttgcgttacgcggttattttcgtatcgttgcgttttttttttttttttattttttcggttaataatttgtagtatttcgggtcgcgtattttttagtatttgttacgtttcggtttgttttcgtttaggggtaattagtttacgtatttcg

SEQ ID NO: 23372 - DNA, 535 bp, Artificial Sequence
  chemically treated genomic DNA (Homo sapiens) CpG-island No: 23372
cgaaatacgtaaactaattacccctaaacgaaaacaaaccgaaacgtaacaaatactaaaaaatacgcgacccgaaatactacaaattattaaccgaaaaaataaaaaaaaaaaaaaaacgcaacgatacgaaaataaccgcgtaacgcaaaaaaaactataactcgttaacaaaaaaattaaaaaaacgcaacttacctaactaaacgaaaacgttcttacccaaaaaacgaatccgattaaactccaaatataaataaaacaaattacccaaaaaaacgaaaaccgcgtccgacaacgcccccaaaacgttcccgtccaaccgcaacttaactaaactctccaaaccctcgaaaaaaccgcgacttaaacgactaatctcgttcccgttaacgtaaaaaatacgcaacttacgcaacgaaaccaacgtacccgaaacgaacgcctacaaaaaattattccccaaatacaactcttccaaccgcgaaaacttctcgaaaatcttaaaatacaaaaaacgaatctaattatacta

SEQ ID NO: 23373 - DNA, 957 bp, Artificial Sequence
  chemically treated genomic DNA (Homo sapiens) CpG-island No: 23373
gacggtggaagtcgaaggtcgtgatgttggttatgaagttgtcgtcgaggttgtaggtgagtacgtcgtgggggttcggtagcgagttggttttgggtattacgcggagttttttgttggtgtataggagatgttggggatgttggtagtcgtagcgtttcgggtatacgggttcggtagcggcgggagcgcgaggtagtcgtatattacgagtaggaggcgtaaggcgcgggtagtttttatcgtttttcgttttgcgtgtagcggtcggatcgtttttttggttcgtcggttttgtgttttttttgtattttttttagtttggttagagtcgttaaatggtttttttcggatttcgtagcgtcgtttagtttttttttcgttttttgttcggaggtcggttcgggtttttgtaggcgggtttcgttcggttaagttaggcggcgcggggcgttttgtagatttcgggtattatttgttgtatttttgtataaaattgttttttcgggtgcgcgtcggcgggcgggaggagggagtaagattcggcgttttttgtttgtagttgagttcggagagttggattttttggcgcggatttttttagtcgagtggattttttagttgtaggcgggagtcgttttaagagtttcgcggggcgcggtttggtagtagagtttcggttgttcggttttcgtagacggtattttttcgttcgcggtttcggacggggagggcggttttagtgtaatagttcggggagtacgcgggttgcgttcggaagggatttaagtttgcgagcggagagtaaacggggcggaaattcgttttttttatattttgttcgcggggacgtaggcggagaaagaggagacggtagagggaggatagatttcggtagggggaggaggaaatattaagtggtttcgcgtttggttagttcgggttcgggatgttaag

SEQ ID NO: 23374 - DNA, 957 bp, Artificial Sequence
  chemically treated genomic DNA (Homo sapiens) CpG-island No: 23374
cttaacatcccgaacccgaactaaccaaacgcgaaaccacttaatatttcctcctccccctaccgaaatctatcctccctctaccgtctcctctttctccgcctacgtccccgcgaacaaaatataaaaaaaacgaatttccgccccgtttactctccgctcgcaaacttaaatcccttccgaacgcaacccgcgtactccccgaactattacactaaaaccgccctccccgtccgaaaccgcgaacgaaaaaataccgtctacgaaaaccgaacaaccgaaactctactaccaaaccgcgccccgcgaaactcttaaaacgactcccgcctacaactaaaaaatccactcgactaaaaaaatccgcgccaaaaaatccaactctccgaactcaactacaaacaaaaaacgccgaatcttactccctcctcccgcccgccgacgcgcacccgaaaaaacaattttatacaaaaatacaacaaataatacccgaaatctacaaaacgccccgcgccgcctaacttaaccgaacgaaacccgcctacaaaaacccgaaccgacctccgaacaaaaaacgaaaaaaaaactaaacgacgctacgaaatccgaaaaaaaccatttaacgactctaaccaaactaaaaaaaatacaaaaaaaacacaaaaccgacgaaccaaaaaaacgatccgaccgctacacgcaaaacgaaaaacgataaaaactacccgcgccttacgcctcctactcgtaatatacgactacctcgcgctcccgccgctaccgaacccgtatacccgaaacgctacgactaccaacatccccaacatctcctatacaccaacaaaaaactccgcgtaatacccaaaaccaactcgctaccgaacccccacgacgtactcacctacaacctcgacgacaacttcataaccaacatcacgaccttcgacttccaccgtc

SEQ ID NO: 23375 - DNA, 957 bp, Artificial Sequence
  chemically treated genomic DNA (Homo sapiens) CpG-island No: 23375
tttggtatttcgggttcgggttgattagacgcggagttatttagtgtttttttttttttttgtcggggtttgttttttttttgtcgtttttttttttttcgtttgcgttttcgcgggtagagtgtgggaagaacgaattttcgtttcgtttgtttttcgttcgtagatttgggtttttttcggacgtagttcgcgtgtttttcgagttattgtattggagtcgtttttttcgttcgggatcgcgagcgagaaggtgtcgtttgcgggggtcgagtagtcggggttttgttgttaagtcgcgtttcgcgaagtttttggaacggttttcgtttgtagttggggaatttattcggttgggagaattcgcgttagggaatttagtttttcggatttagttgtaaataaaaagcgtcgggttttgtttttttttttcgttcgtcgacgcgtattcggagaaatagttttatatagaaatgtaataagtagtattcggggtttgtagagcgtttcgcgtcgtttgatttggtcgggcgaagttcgtttgtagagattcgggtcggttttcggataaaggacggaggaggggttggacggcgttgcgaagttcgaaagaggttatttagcgattttggttaggttaaggggaatgtagaggagatatagagtcggcgggttaagaggacgattcggtcgttgtacgtagggcgggaggcgatggaggttgttcgcgttttgcgttttttgttcgtggtgtgcggttgtttcgcgttttcgtcgttgtcgagttcgtgtgttcggagcgttgcgattgttagtatttttagtattttttgtgtattaatagggggtttcgcgtagtgtttaagattagttcgttgtcgagtttttacgacgtgtttatttatagtttcggcggtaattttataattaatattacggttttcgatttttatcgtt

SEQ ID NO: 23376 - DNA, 957 bp, Artificial Sequence
  chemically treated genomic DNA (Homo sapiens) CpG-island No: 23376
aacgataaaaatcgaaaaccgtaatattaattataaaattaccgccgaaactataaataaacacgtcgtaaaaactcgacaacgaactaatcttaaacactacgcgaaaccccctattaatacacaaaaaatactaaaaatactaacaatcgcaacgctccgaacacacgaactcgacaacgacgaaaacgcgaaacaaccgcacaccacgaacaaaaaacgcaaaacgcgaacaacctccatcgcctcccgccctacgtacaacgaccgaatcgtcctcttaacccgccgactctatatctcctctacattccccttaacctaaccaaaatcgctaaataacctctttcgaacttcgcaacgccgtccaacccctcctccgtcctttatccgaaaaccgacccgaatctctacaaacgaacttcgcccgaccaaatcaaacgacgcgaaacgctctacaaaccccgaatactacttattacatttctatataaaactatttctccgaatacgcgtcgacgaacgaaaaaaaaaaacaaaacccgacgctttttatttacaactaaatccgaaaaactaaattccctaacgcgaattctcccaaccgaataaattccccaactacaaacgaaaaccgttccaaaaacttcgcgaaacgcgacttaacaacaaaaccccgactactcgacccccgcaaacgacaccttctcgctcgcgatcccgaacgaaaaaaacgactccaatacaataactcgaaaaacacgcgaactacgtccgaaaaaaacccaaatctacgaacgaaaaacaaacgaaacgaaaattcgttcttcccacactctacccgcgaaaacgcaaacgaaaaaaaaaaaaacgacaaaaaaaaaacaaaccccgacaaaaaaaaaaaaaaacactaaataactccgcgtctaatcaacccgaacccgaaataccaaa

SEQ ID NO: 23377 - DNA, 555 bp, Artificial Sequence
  chemically treated genomic DNA (Homo sapiens) CpG-island No: 23377
ttatcgtatagcgacggtcggcgttaggtcgtcgaggatatatacgggttaggtttaggtttcgtcgttttttcgttttcgttattatttttcgtttggtttttttggttttagcgtcgttggtttcggggtttacgttcgggggtttcggttcgagtttttattcggttcgcgcgaattttgggtcgtatagttttcgttcgtttaggtgttggttcgggcggttagcgtttagtttcgtagattcggtgatttttatttattagaggttaaagtttgggaattagagtaagcggtgatttgaagaggcgtaggaagcgagggtagtgcggaggtggcgcgtatgtgtagtacgtacgcgcgaatacgtacgtagggagaggtgtatacgcgtaggagtgtatcggaagttcgttttttgggatatttatcgtcgtttttaggataagtaacggattttattttttatgagtttacgcgttttttaagtttaggggtcgttttaaatgtttttatttcgtttaaaggttaagaagttttaggttatgagttttg

SEQ ID NO: 23378 - DNA, 555 bp, Artificial Sequence
  chemically treated genomic DNA (Homo sapiens) CpG-island No: 23378
caaaactcataacctaaaacttcttaacctttaaacgaaataaaaacatttaaaacgacccctaaacttaaaaaacgcgtaaactcataaaaaataaaatccgttacttatcctaaaaacgacgataaatatcccaaaaaacgaacttccgatacactcctacgcgtatacacctctccctacgtacgtattcgcgcgtacgtactacacatacgcgccacctccgcactaccctcgcttcctacgcctcttcaaatcaccgcttactctaattcccaaactttaacctctaataaataaaaatcaccgaatctacgaaactaaacgctaaccgcccgaaccaacacctaaacgaacgaaaactatacgacccaaaattcgcgcgaaccgaataaaaactcgaaccgaaacccccgaacgtaaaccccgaaaccaacgacgctaaaaccaaaaaaaccaaacgaaaaataataacgaaaacgaaaaaacgacgaaacctaaacctaacccgtatatatcctcgacgacctaacgccgaccgtcgctatacgataa

SEQ ID NO: 23379 - DNA, 555 bp, Artificial Sequence
  chemically treated genomic DNA (Homo sapiens) CpG-island No: 23379
taaagtttatagtttggagttttttaatttttaggcggggtagagatatttaagacggtttttaaatttggggagcgcgtaggtttataggaaatagagttcgttatttgttttgggaacggcggtgggtgttttaggaggcggattttcggtgtatttttgcgcgtgtgtatttttttttgcgtgcgtgttcgcgcgtgcgtgttgtatatgcgcgttattttcgtattgttttcgttttttgcgtttttttaggttatcgtttgttttagtttttaggttttggtttttagtggatgagaattatcgagtttgcggggttggacgttgatcgttcgggttagtatttaggcgggcgggagttgtgcggtttagggttcgcgcgggtcgggtagaggttcgagtcgggattttcgagcgtgaatttcggagttagcggcgttggggttagaggggttaggcgggaggtggtggcggaggcgaaggggcgacgggatttgggtttggttcgtgtgtgttttcggcggtttggcgtcggtcgtcgttgtacggtga

SEQ ID NO: 23380 - DNA, 555 bp, Artificial Sequence
  chemically treated genomic DNA (Homo sapiens) CpG-island No: 23380
tcaccgtacaacgacgaccgacgccaaaccgccgaaaacacacacgaaccaaacccaaatcccgtcgccccttcgcctccgccaccacctcccgcctaacccctctaaccccaacgccgctaactccgaaattcacgctcgaaaatcccgactcgaacctctacccgacccgcgcgaaccctaaaccgcacaactcccgcccgcctaaatactaacccgaacgatcaacgtccaaccccgcaaactcgataattctcatccactaaaaaccaaaacctaaaaactaaaacaaacgataacctaaaaaaacgcaaaaaacgaaaacaatacgaaaataacgcgcatatacaacacgcacgcgcgaacacgcacgcaaaaaaaaatacacacgcgcaaaaatacaccgaaaatccgcctcctaaaacacccaccgccgttcccaaaacaaataacgaactctatttcctataaacctacgcgctccccaaatttaaaaaccgtcttaaatatctctaccccgcctaaaaattaaaaaactccaaactataaacttta

SEQ ID NO: 23381 - DNA, 633 bp, Artificial Sequence
  chemically treated genomic DNA (Homo sapiens) CpG-island No: 23381
agcgattcgtagagggtaggacggacgggcgttgtataggttcggggttaaatcgtattttgtaatttgagtttcgagggtcgtcgtattcgtttttgtttgggattacgttttttagcgggtattgcgtcgaggttacgttcggtttcggcggcgttgtttgcgtattggaagtgggaagcgtcgggtttttttaggttgaggggcggggcggggcggggcggggcggggcggggcggggcggggcggggcggggcggggcggggtagcggggaggggtggggaggggcggggcgcggtcgggggcggggcggtttcgcggcgcggtttagtggatgtcgggttatgggggagcgcgcgcggggttgttcgttgggcgtggcgggcgggtgtggttaggggtgtgggtttgtgagggatcggtcggaagggcgtcgcgcggtttcgggtgatatgcggggggcggcgagcgcgagtgttcgcgagtcgacgtcgttttcgggtagaggcgtttttcgtataaagtttcgggcgggtcgaggttcgattgtagggattttagttattttggttttttttgttcggggaaggtcgcgtttaaggaatggtttcgtatttaaaggttagcgagga

SEQ ID NO: 23382 - DNA, 633 bp, Artificial Sequence
  chemically treated genomic DNA (Homo sapiens) CpG-island No: 23382
tcctcgctaacctttaaatacgaaaccattccttaaacgcgaccttccccgaacaaaaaaaaccaaaataactaaaatccctacaatcgaacctcgacccgcccgaaactttatacgaaaaacgcctctacccgaaaacgacgtcgactcgcgaacactcgcgctcgccgccccccgcatatcacccgaaaccgcgcgacgcccttccgaccgatccctcacaaacccacacccctaaccacacccgcccgccacgcccaacgaacaaccccgcgcgcgctcccccataacccgacatccactaaaccgcgccgcgaaaccgccccgcccccgaccgcgccccgcccctccccacccctccccgctaccccgccccgccccgccccgccccgccccgccccgccccgccccgccccgccccgccccgcccctcaacctaaaaaaacccgacgcttcccacttccaatacgcaaacaacgccgccgaaaccgaacgtaacctcgacgcaatacccgctaaaaaacgtaatcccaaacaaaaacgaatacgacgaccctcgaaactcaaattacaaaatacgatttaaccccgaacctatacaacgcccgtccgtcctaccctctacgaatcgct

SEQ ID NO: 23383 - DNA, 633 bp, Artificial Sequence
  chemically treated genomic DNA (Homo sapiens) CpG-island No: 23383
ttttcgttggtttttggatgcgaggttattttttgagcgcggtttttttcgggtagggagggttaaggtggttggagtttttatagtcgggtttcggttcgttcggggttttgtgcggggggcgtttttattcgggagcggcgtcggttcgcggatattcgcgttcgtcgtttttcgtatgttattcgaggtcgcgcgacgttttttcgatcggttttttatagatttatatttttggttatattcgttcgttacgtttagcgaatagtttcgcgcgcgtttttttatggttcggtatttattgggtcgcgtcgcggagtcgtttcgttttcggtcgcgtttcgtttttttttattttttttcgttgtttcgtttcgtttcgtttcgtttcgtttcgtttcgtttcgtttcgtttcgtttcgtttcgttttttagtttagagaagttcggcgttttttatttttagtgcgtaggtagcgtcgtcggaatcgggcgtggtttcggcgtaatgttcgttgggaagcgtagttttaagtagggacggatgcggcggttttcggagtttaggttgtaagatacggtttggtttcgggtttatgtaacgttcgttcgttttgttttttgcgggtcgtt

SEQ ID NO: 23384 - DNA, 633 bp, Artificial Sequence
  chemically treated genomic DNA (Homo sapiens) CpG-island No: 23384
aacgacccgcaaaaaacaaaacgaacgaacgttacataaacccgaaaccaaaccgtatcttacaacctaaactccgaaaaccgccgcatccgtccctacttaaaactacgcttcccaacgaacattacgccgaaaccacgcccgattccgacgacgctacctacgcactaaaaataaaaaacgccgaacttctctaaactaaaaaacgaaacgaaacgaaacgaaacgaaacgaaacgaaacgaaacgaaacgaaacgaaacgaaacaacgaaaaaaaataaaaaaaaacgaaacgcgaccgaaaacgaaacgactccgcgacgcgacccaataaataccgaaccataaaaaaacgcgcgcgaaactattcgctaaacgtaacgaacgaatataaccaaaaatataaatctataaaaaaccgatcgaaaaaacgtcgcgcgacctcgaataacatacgaaaaacgacgaacgcgaatatccgcgaaccgacgccgctcccgaataaaaacgccccccgcacaaaaccccgaacgaaccgaaacccgactataaaaactccaaccaccttaaccctccctacccgaaaaaaaccgcgctcaaaaaataacctcgcatccaaaaaccaacgaaaa

SEQ ID NO: 23385 - DNA, 500 bp, Artificial Sequence
  chemically treated genomic DNA (Homo sapiens) CpG-island No: 23385
gtttcgcggagcgtcgggtgggcgattcggaggggatatgtgcggcgggaggtggcggcgaaagtggtgtgggggatttcgaggttttggagttttattttattttattcgggttgttgtagtaacgacgcggtttaaaaacggtcgcgattaggtcgtttcgttcggttttcgtaggtattcgtttttttcgcgtttatgttcgtattcgtatttttttcgcgattttaagtcggtgttgttttttggtgttcgtagttttgtacgtaggtcgtcgcgggcgcgtagtcgattttcgttttttttttaatgttttgttgaaagtgagaagtcgcgggacgtaaacgcgtcgtttttttaggagtatgagaggcgttttagtttaaagcgatttttagtaaacgcgttgtttacgagtttttatttaggttggaaaacgggtttttttgtttttgtcgggttttcggatttgttcgtaggtttgaggtagggaagttaga

SEQ ID NO: 23386 - DNA, 500 bp, Artificial Sequence
  chemically treated genomic DNA (Homo sapiens) CpG-island No: 23386
tctaacttccctacctcaaacctacgaacaaatccgaaaacccgacaaaaacaaaaaaacccgttttccaacctaaataaaaactcgtaaacaacgcgtttactaaaaatcgctttaaactaaaacgcctctcatactcctaaaaaaacgacgcgtttacgtcccgcgacttctcactttcaacaaaacattaaaaaaaaaacgaaaatcgactacgcgcccgcgacgacctacgtacaaaactacgaacaccaaaaaacaacaccgacttaaaatcgcgaaaaaaatacgaatacgaacataaacgcgaaaaaaacgaatacctacgaaaaccgaacgaaacgacctaatcgcgaccgtttttaaaccgcgtcgttactacaacaacccgaataaaataaaataaaactccaaaacctcgaaatcccccacaccactttcgccgccacctcccgccgcacatatcccctccgaatcgcccacccgacgctccgcgaaac

SEQ ID NO: 23387 - DNA, 500 bp, Artificial Sequence
  chemically treated genomic DNA (Homo sapiens) CpG-island No: 23387
tttggtttttttgttttagatttgcgggtaggttcgggaattcgatagggatagagaagttcgttttttagtttaaatagaagttcgtgggtagcgcgtttgttggaggtcgttttgggttgaaacgttttttatatttttagaggagcggcgcgtttgcgtttcgcggttttttatttttagtaggatattaggagggagacgagagtcggttgcgcgttcgcggcggtttacgtatagggttgcggatattagggggtagtatcgatttagggtcgcgggaggggtgcgggtgcgggtatgggcgcgggggaggcgggtgtttgcgaaggtcgggcggggcggtttagtcgcggtcgtttttaggtcgcgtcgttgttgtagtaattcgggtggggtggggtgggattttagggtttcgagattttttatattattttcgtcgttatttttcgtcgtatatgtttttttcgagtcgtttattcggcgtttcgcggggt

SEQ ID NO: 23388 - DNA, 500 bp, Artificial Sequence
  chemically treated genomic DNA (Homo sapiens) CpG-island No: 23388
accccgcgaaacgccgaataaacgactcgaaaaaaacatatacgacgaaaaataacgacgaaaataatataaaaaatctcgaaaccctaaaatcccaccccaccccacccgaattactacaacaacgacgcgacctaaaaacgaccgcgactaaaccgccccgcccgaccttcgcaaacacccgcctcccccgcgcccatacccgcacccgcacccctcccgcgaccctaaatcgatactaccccctaatatccgcaaccctatacgtaaaccgccgcgaacgcgcaaccgactctcgtctccctcctaatatcctactaaaaataaaaaaccgcgaaacgcaaacgcgccgctcctctaaaaatataaaaaacgtttcaacccaaaacgacctccaacaaacgcgctacccacgaacttctatttaaactaaaaaacgaacttctctatccctatcgaattcccgaacctacccgcaaatctaaaacaaaaaaaccaaa

SEQ ID NO: 23389 - DNA, 612 bp, Artificial Sequence
  chemically treated genomic DNA (Homo sapiens) CpG-island No: 23389
gcgcggcgggcgggtgcgggtttagtgtcgagacgtgtagtttcgtttcggtcgttgttgtcgtcgtcgtcgtcgcggtcgtcgttttcgttaggttcgggtcgggtagcggtttggttagcgcgtcgggcggtagcgcgagtgtcgggaagaaggagggttgcgtcgtcgttagaaaggcggatatggggaagtcggcgggtcgtggcgcgtggaacgggtggtaagttatggcgttggtcgttagcgtcggtttttttatcgggatattcggtttaggcgttcgggggtcggggtcggggtcgggggcgcgcggttcggattttcggttcgggcggcggcgcgcgcggtggacggacgattcgggtggcgggcgtagtagttgtttttcggggtttttcgttcggcgtatcgtaaggggtattcggttttgtgcgcgggggcggcgggggttttgcgcggggtcgggttgggtcgggttgagttggttcgtttcggcgtcggggattacgcgcgattggttagattttgtcgtgatttttggaaaattgtgattattttatatgttttgtttagttcggattttttgcgttaacgagttaggtttttttt

SEQ ID NO: 23390 - DNA, 612 bp, Artificial Sequence
  chemically treated genomic DNA (Homo sapiens) CpG-island No: 23390
aaaaaaaacctaactcgttaacgcaaaaaatccgaactaaacaaaacatataaaataatcacaattttccaaaaatcacgacaaaatctaaccaatcgcgcgtaatccccgacgccgaaacgaaccaactcaacccgacccaacccgaccccgcgcaaaacccccgccgcccccgcgcacaaaaccgaataccccttacgatacgccgaacgaaaaaccccgaaaaacaactactacgcccgccacccgaatcgtccgtccaccgcgcgcgccgccgcccgaaccgaaaatccgaaccgcgcgcccccgaccccgaccccgacccccgaacgcctaaaccgaatatcccgataaaaaaaccgacgctaacgaccaacgccataacttaccacccgttccacgcgccacgacccgccgacttccccatatccgcctttctaacgacgacgcaaccctccttcttcccgacactcgcgctaccgcccgacgcgctaaccaaaccgctacccgacccgaacctaacgaaaacgacgaccgcgacgacgacgacgacaacaacgaccgaaacgaaactacacgtctcgacactaaacccgcacccgcccgccgcgc

SEQ ID NO: 23391 - DNA, 612 bp, Artificial Sequence
  chemically treated genomic DNA (Homo sapiens) CpG-island No: 23391
aaggggggtttggttcgttagcgtaggggattcgagttgggtaggatatgtgagatagttatagttttttagagattacgataagatttaattagtcgcgcgtggttttcggcgtcggagcgggttagtttagttcggtttagttcggtttcgcgtagagttttcgtcgttttcgcgtatagagtcgggtgttttttgcggtgcgtcggacgggaagtttcgaggagtagttgttgcgttcgttattcgggtcgttcgtttatcgcgcgcgtcgtcgttcgggtcgggggttcgagtcgcgcgttttcggtttcggtttcggttttcgggcgtttgggtcggatgtttcgatgagagagtcggcgttggcggttagcgttatggtttattattcgttttacgcgttacggttcgtcgatttttttatgttcgtttttttggcggcggcgtagtttttttttttttcggtattcgcgttgtcgttcggcgcgttggttaagtcgttgttcgattcgggtttggcgggggcggcggtcgcggcggcggcggcggtagtagcggtcgaggcggggttgtacgtttcggtattgggttcgtattcgttcgtcgcgt

SEQ ID NO: 23392 - DNA, 612 bp, Artificial Sequence
  chemically treated genomic DNA (Homo sapiens) CpG-island No: 23392
acgcgacgaacgaatacgaacccaataccgaaacgtacaaccccgcctcgaccgctactaccgccgccgccgccgcgaccgccgcccccgccaaacccgaatcgaacaacgacttaaccaacgcgccgaacgacaacgcgaataccgaaaaaaaaaaaaactacgccgccgccaaaaaaacgaacataaaaaaatcgacgaaccgtaacgcgtaaaacgaataataaaccataacgctaaccgccaacgccgactctctcatcgaaacatccgacccaaacgcccgaaaaccgaaaccgaaaccgaaaacgcgcgactcgaacccccgacccgaacgacgacgcgcgcgataaacgaacgacccgaataacgaacgcaacaactactcctcgaaacttcccgtccgacgcaccgcaaaaaacacccgactctatacgcgaaaacgacgaaaactctacgcgaaaccgaactaaaccgaactaaactaacccgctccgacgccgaaaaccacgcgcgactaattaaatcttatcgtaatctctaaaaaactataactatctcacatatcctacccaactcgaatcccctacgctaacgaaccaaacccccctt

SEQ ID NO: 23393 - DNA, 795 bp, Artificial Sequence
  chemically treated genomic DNA (Homo sapiens) CpG-island No: 23393
cgggtcgtcgggtttcgagatttttttttttgtttcggtttttatcgttcgttcgcgtttgcggttgtttgcgtcggattggagagcgcggagggtcgatttgattcgtcgaaagggtttgaggcgaggggagttcgggtttcggggttttggggaaggattcgtagtcgtacgtcggttttaagtgtaaagtattgatacgatttcgagcggagagggggcgttttttttttttcgcgtttagaggttcggtcgttttggttcgagttttagtttggttttcgatttagtttcgggtcgtggcgtcgtttgggggtttttgcgtttcggaaagagatagtaggtattggaaagcgaggtcggtgggcgggcgagtcgggaggttcgggcggtcgaggttcgggagcggattttaggtggcgggagttggtgagtggagttatggtcgagttttgttggggtcggcgcgggcgggagcgggacgcggttttgcgttggggaaacgcggggattttttattcgcgttcgtttttatcggaagattcggaaggaatttggagtttttcgtaggttcgggtttcgttttgagttttttagcggtcgggaggagcggattttcggggttaggaaggtgagcgtatttttcgttgagtatagggcggtatcgcgcgggcggatttcggattttttattcgcgatttaacgaattttcgttttattcggtatcggagacgaaagtttttttttttcgaaatatcggtttttttttttcgttttgttaattatttttttagt

SEQ ID NO: 23394 - DNA, 795 bp, Artificial Sequence
  chemically treated genomic DNA (Homo sapiens) CpG-island No: 23394
actaaaaaaataattaacaaaacgaaaaaaaaaaaccgatatttcgaaaaaaaaaaactttcgtctccgataccgaataaaacgaaaattcgttaaatcgcgaataaaaaatccgaaatccgcccgcgcgataccgccctatactcaacgaaaaatacgctcaccttcctaaccccgaaaatccgctcctcccgaccgctaaaaaactcaaaacgaaacccgaacctacgaaaaactccaaattccttccgaatcttccgataaaaacgaacgcgaataaaaaatccccgcgtttccccaacgcaaaaccgcgtcccgctcccgcccgcgccgaccccaacaaaactcgaccataactccactcaccaactcccgccacctaaaatccgctcccgaacctcgaccgcccgaacctcccgactcgcccgcccaccgacctcgctttccaatacctactatctctttccgaaacgcaaaaacccccaaacgacgccacgacccgaaactaaatcgaaaaccaaactaaaactcgaaccaaaacgaccgaacctctaaacgcgaaaaaaaaaaaacgccccctctccgctcgaaatcgtatcaatactttacacttaaaaccgacgtacgactacgaatccttccccaaaaccccgaaacccgaactcccctcgcctcaaaccctttcgacgaatcaaatcgaccctccgcgctctccaatccgacgcaaacaaccgcaaacgcgaacgaacgataaaaaccgaaacaaaaaaaaaaatctcgaaacccgacgacccg

SEQ ID NO: 23395 - DNA, 795 bp, Artificial Sequence
  chemically treated genomic DNA (Homo sapiens) CpG-island No: 23395
attaaaaaagtggttggtagggcgaagagaggaagtcggtatttcggaagaaggagattttcgttttcggtatcggatagggcgaaaattcgttgggtcgcgggtggagaattcggggttcgttcgcgcggtgtcgttttgtgtttagcgaaaggtgcgtttatttttttggtttcgaggattcgtttttttcggtcgttggaaagtttagggcggggttcgggtttgcggagaattttaggtttttttcgagtttttcggtgaaggcgggcgcgggtagggggttttcgcgtttttttagcgtaaggtcgcgtttcgttttcgttcgcgtcggttttagtagggttcggttatggttttatttattagttttcgttatttgggattcgttttcggatttcggtcgttcgagtttttcgattcgttcgtttatcggtttcgttttttagtgtttgttgttttttttcggggcgtagggatttttaggcggcgttacgattcggagttgggtcggaggttaggttggggttcgggttagagcggtcgggtttttgggcgcgggagaaggagggcgtttttttttcgttcggggtcgtgttaatgttttgtatttggggtcggcgtgcggttgcgggtttttttttaaggtttcgggattcgggtttttttcgttttaggttttttcggcgggttaggtcggtttttcgcgttttttagttcggcgtaggtagtcgtaggcgcgggcgggcggtgggggtcggggtaggaggaggggtttcggggttcggcggttcg

SEQ ID NO: 23396 - DNA, 795 bp, Artificial Sequence
  chemically treated genomic DNA (Homo sapiens) CpG-island No: 23396
cgaaccgccgaaccccgaaacccctcctcctaccccgacccccaccgcccgcccgcgcctacgactacctacgccgaactaaaaaacgcgaaaaaccgacctaacccgccgaaaaaacctaaaacgaaaaaaacccgaatcccgaaaccttaaaaaaaaacccgcaaccgcacgccgaccccaaatacaaaacattaacacgaccccgaacgaaaaaaaaacgccctccttctcccgcgcccaaaaacccgaccgctctaacccgaaccccaacctaacctccgacccaactccgaatcgtaacgccgcctaaaaatccctacgccccgaaaaaaaacaacaaacactaaaaaacgaaaccgataaacgaacgaatcgaaaaactcgaacgaccgaaatccgaaaacgaatcccaaataacgaaaactaataaataaaaccataaccgaaccctactaaaaccgacgcgaacgaaaacgaaacgcgaccttacgctaaaaaaacgcgaaaaccccctacccgcgcccgccttcaccgaaaaactcgaaaaaaacctaaaattctccgcaaacccgaaccccgccctaaactttccaacgaccgaaaaaaacgaatcctcgaaaccaaaaaaataaacgcacctttcgctaaacacaaaacgacaccgcgcgaacgaaccccgaattctccacccgcgacccaacgaattttcgccctatccgataccgaaaacgaaaatctccttcttccgaaataccgacttcctctcttcgccctaccaaccacttttttaat

SEQ ID NO: 23397 - DNA, 577 bp, Artificial Sequence
  chemically treated genomic DNA (Homo sapiens) CpG-island No: 23397
tataatttaaggtgtgtacggggagagtgaagcgattacgtatttgtttttaatcgggttcgggcgcgaatatttaggttgatttttgaaggtcgttttttgaaggaaaagatagagtatgtattagttacgggtgatatttttattcgtataatcgcgtggtgggcgcgtatatttaatattgatttatgtaggcgttcgtttattgcgtatatcggtcgtagggtatttcgttgttgaacgttgggagtagcgtttgaaggtcggattttttttggtagtgcggattcgggatcggcggaagtagtatggtttttgcgatcgttatttttatttttcggggtcgattttagggtttttataattttttattatcgtatatgtgagcgtcgtttttatagggttttttttacgatttcgtttttggttaggtcgtattttttttagtattttttttttggttagaacgaatttttgatttcgagttgcgtagtttacgtagacggggtaggatttattgtagttttttataggtaaatatttgttggttttattttaggcgagatgtggtttttcg

SEQ ID NO: 23398 - DNA, 577 bp, Artificial Sequence
  chemically treated genomic DNA (Homo sapiens) CpG-island No: 23398
cgaaaaaccacatctcgcctaaaataaaaccaacaaatatttacctataaaaaactacaataaatcctaccccgtctacgtaaactacgcaactcgaaatcaaaaattcgttctaaccaaaaaaaaaatactaaaaaaaatacgacctaaccaaaaacgaaatcgtaaaaaaaaccctataaaaacgacgctcacatatacgataataaaaaattataaaaaccctaaaatcgaccccgaaaaataaaaataacgatcgcaaaaaccatactacttccgccgatcccgaatccgcactaccaaaaaaaatccgaccttcaaacgctactcccaacgttcaacaacgaaataccctacgaccgatatacgcaataaacgaacgcctacataaatcaatattaaatatacgcgcccaccacgcgattatacgaataaaaatatcacccgtaactaatacatactctatcttttccttcaaaaaacgaccttcaaaaatcaacctaaatattcgcgcccgaacccgattaaaaacaaatacgtaatcgcttcactctccccgtacacaccttaaattata

SEQ ID NO: 23399 - DNA, 577 bp, Artificial Sequence
  chemically treated genomic DNA (Homo sapiens) CpG-island No: 23399
cgagaggttatatttcgtttaaggtggagttagtaggtatttgtttgtggaaaattgtagtggattttgtttcgtttgcgtagattgcgtagttcggagttaaagattcgttttggttagagaggaggtattaagagaggtgcgatttagttaagaacgaggtcgtggagaaaattttgtgggggcggcgtttatatatgcggtgatgaggagttgtgagggttttggggtcggtttcgaaaagtagggataacggtcgtagaggttatattgttttcgtcggtttcgaattcgtattgttaggagagattcggtttttaaacgttgtttttaacgtttaataacgaagtgttttgcgatcggtgtgcgtagtgggcgggcgtttgtatgggttaatgttggatgtacgcgtttattacgcggttgtacgggtgggaatgttattcgtggttagtgtatgttttgtttttttttttagaaaacgatttttaggaattagtttgagtgttcgcgttcgagttcgattggaagtaggtgcgtggtcgttttatttttttcgtgtatattttgagttata

SEQ ID NO: 23400 - DNA, 577 bp, Artificial Sequence
  chemically treated genomic DNA (Homo sapiens) CpG-island No: 23400
tataactcaaaatatacacgaaaaaaataaaacgaccacgcacctacttccaatcgaactcgaacgcgaacactcaaactaattcctaaaaatcgttttctaaaaaaaaaaacaaaacatacactaaccacgaataacattcccacccgtacaaccgcgtaataaacgcgtacatccaacattaacccatacaaacgcccgcccactacgcacaccgatcgcaaaacacttcgttattaaacgttaaaaacaacgtttaaaaaccgaatctctcctaacaatacgaattcgaaaccgacgaaaacaatataacctctacgaccgttatccctacttttcgaaaccgaccccaaaaccctcacaactcctcatcaccgcatatataaacgccgcccccacaaaattttctccacgacctcgttcttaactaaatcgcacctctcttaatacctcctctctaaccaaaacgaatctttaactccgaactacgcaatctacgcaaacgaaacaaaatccactacaattttccacaaacaaatacctactaactccaccttaaacgaaatataacctctcg

SEQ ID NO: 23401 - DNA, 505 bp, Artificial Sequence
  chemically treated genomic DNA (Homo sapiens) CpG-island No: 23401
acgcggtcgagaattaaggtcgtatttcggatggatttcgggtgattttttcggagttttggggaattttttaattcggggagttgtagacgatttattggtttcgggtcgcggtttcgcgggtggtcgttgtacgtttgagatatttggttcgtagaagttaggtgtacgtttgtgtatcgtcgtgcgttggatgtgtatggaggcgagatcgtggttatggatgtttgggattacgggagcgtgaacggggcgatcgattgagtgatttgagagacggggtagagcgtaggaaggatttttaggacgggtttatttgcgacgggcggcggtgggggagtggggggtttgtcggcgcgtttataggttttgggttcgcgttcggaaacgttttcgtagggagcgggtcgggatttttcggagtagtacggtgacggcgtgttataattcgggttttagttgtgtcgttttcgttttttttatttttgttaaggggtatttggtt

SEQ ID NO: 23402 - DNA, 505 bp, Artificial Sequence
  chemically treated genomic DNA (Homo sapiens) CpG-island No: 23402
aaccaaataccccttaacaaaaataaaaaaaacgaaaacgacacaactaaaacccgaattataacacgccgtcaccgtactactccgaaaaatcccgacccgctccctacgaaaacgtttccgaacgcgaacccaaaacctataaacgcgccgacaaaccccccactcccccaccgccgcccgtcgcaaataaacccgtcctaaaaatccttcctacgctctaccccgtctctcaaatcactcaatcgatcgccccgttcacgctcccgtaatcccaaacatccataaccacgatctcgcctccatacacatccaacgcacgacgatacacaaacgtacacctaacttctacgaaccaaatatctcaaacgtacaacgaccacccgcgaaaccgcgacccgaaaccaataaatcgtctacaactccccgaattaaaaaattccccaaaactccgaaaaaatcacccgaaatccatccgaaatacgaccttaattctcgaccgcgt

SEQ ID NO: 23403 - DNA, 505 bp, Artificial Sequence
  chemically treated genomic DNA (Homo sapiens) CpG-island No: 23403
ggttaggtgttttttagtagggatggggagggcggaggcggtatagttggagttcggattgtggtacgtcgttatcgtgttgtttcggggaatttcgattcgttttttgcgaaagcgttttcgaacgcgaatttagagtttgtgaacgcgtcggtaagttttttatttttttatcgtcgttcgtcgtaggtgggttcgttttaggggttttttttgcgttttatttcgttttttaagttatttagtcgatcgtttcgtttacgttttcgtgattttagatatttataattacgatttcgtttttatgtatatttaacgtacgacggtgtatagacgtgtatttgatttttgcggattaggtgttttaagcgtatagcggttattcgcggaatcgcggttcggggttagtgagtcgtttgtagtttttcgggttaggggattttttagaatttcgggaaagttattcgaagtttattcgggatgcggttttggttttcggtcgcgt

SEQ ID NO: 23404 - DNA, 505 bp, Artificial Sequence
  chemically treated genomic DNA (Homo sapiens) CpG-island No: 23404
acgcgaccgaaaaccaaaaccgcatcccgaataaacttcgaataactttcccgaaattctaaaaaatcccctaacccgaaaaactacaaacgactcactaaccccgaaccgcgattccgcgaataaccgctatacgcttaaaacacctaatccgcaaaaatcaaatacacgtctatacaccgtcgtacgttaaatatacataaaaacgaaatcgtaattataaatatctaaaatcacgaaaacgtaaacgaaacgatcgactaaataacttaaaaaacgaaataaaacgcaaaaaaaacccctaaaacgaacccacctacgacgaacgacgataaaaaaataaaaaacttaccgacgcgttcacaaactctaaattcgcgttcgaaaacgctttcgcaaaaaacgaatcgaaattccccgaaacaacacgataacgacgtaccacaatccgaactccaactataccgcctccgccctccccatccctactaaaaaacacctaacc

SEQ ID NO: 23405 - DNA, 854 bp, Artificial Sequence
  chemically treated genomic DNA (Homo sapiens) CpG-island No: 23405
ggcggttcggcggtcgcggagtcgttgttcgtcgcggagaaggcggaggagttcggggatcggtcggcggaggagtggttgggtcgcgcgggtttgcgttggacgtgggcgcggagttttgcggagtcggtagcggtcggtttgacgtgtttttcgagcgtgacgcgcgggtagcggttggcggcgggcggcgggtgtttgttgttggttgtattgtgtttcggtttagtcgcgttttacgtatcggtgttgttgttgcgcgcgcgtaagttcgcgttgttttggttattgggttcggcgttggcgttggcgggaagcgcgttgttgcggggcggcgcggcgtgcggacgtttgttgcgttgcgaagaagcgtcgtttcggttcgcgttgttttatatggtagcgttgggcgttacgttgttcgtcgcgttgggttttcgtagtacgttgtttacggtgttgggcgcgggcgcgtaggtggtcgcgttgttggtcgcgttggttgggttgttgttttggggcggcggtatcgcgttgcgtttcgtattgggtcgtttgggtcgcggcgtcggtttcgttaaggtgttgttcgtgtgaggatttcgcgttttcgtcgttggggaagtacgcggagttagcgtcgtcggagatcgcgtcggtcgagttgaggattgtacgtcgttgtgcggaagttcgtggcgaaggttttgttttaatagtttgcgagtttaattcgggagcggttgttgttagcggaggcgatagtagcgttgggagtttttcgatgttagttttttgtgttggatttggtatacgttttgaaaattgagattttgttattgaattggtgatag

SEQ ID NO: 23406 - DNA, 854 bp, Artificial Sequence
  chemically treated genomic DNA (Homo sapiens) CpG-island No: 23406
ctatcaccaattcaataacaaaatctcaattttcaaaacgtataccaaatccaacacaaaaaactaacatcgaaaaactcccaacgctactatcgcctccgctaacaacaaccgctcccgaattaaactcgcaaactattaaaacaaaaccttcgccacgaacttccgcacaacgacgtacaatcctcaactcgaccgacgcgatctccgacgacgctaactccgcgtacttccccaacgacgaaaacgcgaaatcctcacacgaacaacaccttaacgaaaccgacgccgcgacccaaacgacccaatacgaaacgcaacgcgataccgccgccccaaaacaacaacccaaccaacgcgaccaacaacgcgaccacctacgcgcccgcgcccaacaccgtaaacaacgtactacgaaaacccaacgcgacgaacaacgtaacgcccaacgctaccatataaaacaacgcgaaccgaaacgacgcttcttcgcaacgcaacaaacgtccgcacgccgcgccgccccgcaacaacgcgcttcccgccaacgccaacgccgaacccaataaccaaaacaacgcgaacttacgcgcgcgcaacaacaacaccgatacgtaaaacgcgactaaaccgaaacacaatacaaccaacaacaaacacccgccgcccgccgccaaccgctacccgcgcgtcacgctcgaaaaacacgtcaaaccgaccgctaccgactccgcaaaactccgcgcccacgtccaacgcaaacccgcgcgacccaaccactcctccgccgaccgatccccgaactcctccgccttctccgcgacgaacaacgactccgcgaccgccgaaccgcc

SEQ ID NO: 23407 - DNA, 854 bp, Artificial Sequence
  chemically treated genomic DNA (Homo sapiens) CpG-island No: 23407
ttgttattagtttaatgataaaattttagtttttagagcgtgtgttaagtttagtataaaaagttgatatcgaggagtttttaacgttgttgtcgttttcgttggtagtagtcgttttcggattagattcgtaggttgttagggtagggttttcgttacgggttttcgtatagcggcgtgtagtttttagttcggtcggcgcggttttcgacggcgttggtttcgcgtatttttttagcggcgagggcgcgaggtttttatacgggtagtattttggcgaggtcggcgtcgcggtttaggcgatttagtgcgaggcgtagcgcggtgtcgtcgttttagggtagtagtttaattagcgcggttagtagcgcggttatttgcgcgttcgcgtttagtatcgtgagtagcgtgttgcgaaggtttagcgcggcgaatagcgtggcgtttagcgttgttatgtagagtagcgcgggtcgggacggcgttttttcgtagcgtagtaggcgttcgtacgtcgcgtcgtttcgtagtagcgcgtttttcgttaacgttagcgtcgagtttagtgattagagtagcgcgaatttgcgcgcgcgtagtagtaatatcggtgcgtagagcgcggttaggtcgaaatatagtgtagttagtagtaggtattcgtcgttcgtcgttagtcgttgttcgcgcgttacgttcgggaggtacgttaggtcggtcgttgtcgatttcgtagggtttcgcgtttacgtttagcgtaagttcgcgcggtttagttattttttcgtcggtcggttttcgggttttttcgtttttttcgcggcgagtagcggtttcgcggtcgtcgggtcgtt

SEQ ID NO: 23408 - DNA, 854 bp, Artificial Sequence
  chemically treated genomic DNA (Homo sapiens) CpG-island No: 23408
aacgacccgacgaccgcgaaaccgctactcgccgcgaaaaaaacgaaaaaacccgaaaaccgaccgacgaaaaaataactaaaccgcgcgaacttacgctaaacgtaaacgcgaaaccctacgaaatcgacaacgaccgacctaacgtacctcccgaacgtaacgcgcgaacaacgactaacgacgaacgacgaatacctactactaactacactatatttcgacctaaccgcgctctacgcaccgatattactactacgcgcgcgcaaattcgcgctactctaatcactaaactcgacgctaacgttaacgaaaaacgcgctactacgaaacgacgcgacgtacgaacgcctactacgctacgaaaaaacgccgtcccgacccgcgctactctacataacaacgctaaacgccacgctattcgccgcgctaaaccttcgcaacacgctactcacgatactaaacgcgaacgcgcaaataaccgcgctactaaccgcgctaattaaactactaccctaaaacgacgacaccgcgctacgcctcgcactaaatcgcctaaaccgcgacgccgacctcgccaaaatactacccgtataaaaacctcgcgccctcgccgctaaaaaaatacgcgaaaccaacgccgtcgaaaaccgcgccgaccgaactaaaaactacacgccgctatacgaaaacccgtaacgaaaaccctaccctaacaacctacgaatctaatccgaaaacgactactaccaacgaaaacgacaacaacgttaaaaactcctcgatatcaactttttatactaaacttaacacacgctctaaaaactaaaattttatcattaaactaataacaa

SEQ ID NO: 23409 - DNA, 1518 bp, Artificial Sequence
  chemically treated genomic DNA (Homo sapiens) CpG-island No: 23409
tatatatcgacggaataggatttagtttacgcgtcgacggaagaggatttagtttatacgttaacgggaatagaatttcgtttatatatcgacggaatagaatttagtttatgtatcgacggaataggatttagtttacgtatcgacgggaatagaatttagtttatatatcgatagaatagaatttagtttatatacggacgggaatagaatttagtttatatatcgacggaataggatttagtttatatatcgacggaataggatttagtttacgcgtcgacggaagaggatttagtttatacgttaacgggaatagaatttcgtttatatatcgacggaatagaatttagtttatgtatcgacggaataggatttagtttacgtatcgacgggaatagaatttagtttatatatcgatagaatagaatttagtttatatacggacgggaatagaatttagtttatatatcgacggaataggatttagtttatatatcgacggaataggatttagtttatacgtcgacggaagaggatttagtttatatatcgacggaataggatttagtttacgcgtcgacggaagaggatttagtttatacgtcgatagaatagaatttagtttatatacggacgggaatagaatttagtttatatacggacgggaatagaatttagtttatatatcgacggaataggatttagtttacgcgtcgacggaagaggatttagtttatatattaacgggaatagaatttcgtttatatatcgacggaatagaatttagtttatgtatcgacggaataggatttagtttacgtatcgacggaagaggatttagtttatatatcgacgggaatagaatttagtttatatatcgacgggataggatttagtttatatatcgacgggaatagaatttagtttatatatcgacggaataggatttagtttatatatcgacggaataggatttagtttatacgtcgacggaagaggatttagtttatatatcgacggaataggatttagtttacgcgtcgacggaagaggatttagtttatacgtcgatagaatagaatttagtttatatacggacgggaatagaatttagtttatatacggacgggaatagaatttagtttatatatcgacggaataggatttagtttacgcgtcgacggaagaggatttagtttatatattaacgggaatagaatttcgtttatatatcgacggaatagaatttagtttatgtatcgacggaataggatttagtttacgtatcgacggaagaggatttagtttatatatcgacgggaatagaatttagtttatatatcgacgggataggatttagtttatatatcgacgggaatagaatttagtttatatatcgacggaataggatttagtttacgcgtcgacggaagaggatttagtttacgcgtcgacggaataggatttagtttatatacggatggaatagaatttagtttatgtattaacggaata

SEQ ID NO: 23410 - DNA, 1518 bp, Artificial Sequence
  chemically treated genomic DNA (Homo sapiens) CpG-island No: 23410
tattccgttaatacataaactaaattctattccatccgtatataaactaaatcctattccgtcgacgcgtaaactaaatcctcttccgtcgacgcgtaaactaaatcctattccgtcgatatataaactaaattctattcccgtcgatatataaactaaatcctatcccgtcgatatataaactaaattctattcccgtcgatatataaactaaatcctcttccgtcgatacgtaaactaaatcctattccgtcgatacataaactaaattctattccgtcgatatataaacgaaattctattcccgttaatatataaactaaatcctcttccgtcgacgcgtaaactaaatcctattccgtcgatatataaactaaattctattcccgtccgtatataaactaaattctattcccgtccgtatataaactaaattctattctatcgacgtataaactaaatcctcttccgtcgacgcgtaaactaaatcctattccgtcgatatataaactaaatcctcttccgtcgacgtataaactaaatcctattccgtcgatatataaactaaatcctattccgtcgatatataaactaaattctattcccgtcgatatataaactaaatcctatcccgtcgatatataaactaaattctattcccgtcgatatataaactaaatcctcttccgtcgatacgtaaactaaatcctattccgtcgatacataaactaaattctattccgtcgatatataaacgaaattctattcccgttaatatataaactaaatcctcttccgtcgacgcgtaaactaaatcctattccgtcgatatataaactaaattctattcccgtccgtatataaactaaattctattcccgtccgtatataaactaaattctattctatcgacgtataaactaaatcctcttccgtcgacgcgtaaactaaatcctattccgtcgatatataaactaaatcctcttccgtcgacgtataaactaaatcctattccgtcgatatataaactaaatcctattccgtcgatatataaactaaattctattcccgtccgtatataaactaaattctattctatcgatatataaactaaattctattcccgtcgatacgtaaactaaatcctattccgtcgatacataaactaaattctattccgtcgatatataaacgaaattctattcccgttaacgtataaactaaatcctcttccgtcgacgcgtaaactaaatcctattccgtcgatatataaactaaatcctattccgtcgatatataaactaaattctattcccgtccgtatataaactaaattctattctatcgatatataaactaaattctattcccgtcgatacgtaaactaaatcctattccgtcgatacataaactaaattctattccgtcgatatataaacgaaattctattcccgttaacgtataaactaaatcctcttccgtcgacgcgtaaactaaatcctattccgtcgatatata

SEQ ID NO: 23411 - DNA, 1518 bp, Artificial Sequence
  chemically treated genomic DNA (Homo sapiens) CpG-island No: 23411
tgtttcgttggtgtatggattggattttattttattcgtgtgtggattggattttgtttcgtcggcgcgtggattggattttttttcgtcggcgcgtggattggattttgtttcgtcggtgtgtggattggattttattttcgtcggtgtgtggattggattttgtttcgtcggtgtgtggattggattttattttcgtcggtgtgtggattggattttttttcgtcggtgcgtgggttggattttgtttcgtcggtgtatggattggattttgtttcgtcggtgtgtggacgggattttattttcgttggtgtgtggattagattttttttcgtcggcgcgtggattggattttgtttcgtcggtgtgtggattggattttattttcgttcgtgtgtggattggattttattttcgttcgtgtgtggattggattttgttttgtcggcgtgtggattggattttttttcgtcggcgcgtggattggattttgtttcgtcggtgtgtggattggattttttttcgtcggcgtgtggattggattttgtttcgtcggtgtgtggattggattttgtttcgtcggtgtgtggattggattttattttcgtcggtgtgtggattggattttgtttcgtcggtgtgtggattggattttattttcgtcggtgtgtggattggattttttttcgtcggtgcgtgggttggattttgtttcgtcggtgtatggattggattttgtttcgtcggtgtgtggacgggattttattttcgttggtgtgtggattagattttttttcgtcggcgcgtggattggattttgtttcgtcggtgtgtggattggattttattttcgttcgtgtgtggattggattttattttcgttcgtgtgtggattggattttgttttgtcggcgtgtggattggattttttttcgtcggcgcgtggattggattttgtttcgtcggtgtgtggattggattttttttcgtcggcgtgtggattggattttgtttcgtcggtgtgtggattggattttgtttcgtcggtgtgtggattggattttattttcgttcgtgtgtggattggattttgttttgtcggtgtgtggattggattttattttcgtcggtgcgtggattggattttgtttcgtcggtgtatggattggattttgtttcgtcggtgtgtggacgggattttattttcgttggcgtgtggattagattttttttcgtcggcgcgtggattggattttgtttcgtcggtgtgtggattggattttgtttcgtcggtgtgtggattggattttattttcgttcgtgtgtggattggattttgttttgtcggtgtgtggattggattttattttcgtcggtgcgtggattgaattttgtttcgtcggtgtatggattggattttgtttcgtcggtgtgtggacgggattttattttcgttggcgtgtggattagattttttttcgtcggcgcgtggattggattttgtttcgtcggtgtgtg

SEQ ID NO: 23412 - DNA, 1518 bp, Artificial Sequence
  chemically treated genomic DNA (Homo sapiens) CpG-island No: 23412
cacacaccgacgaaacaaaatccaatccacgcgccgacgaaaaaaaatctaatccacacgccaacgaaaataaaatcccgtccacacaccgacgaaacaaaatccaatccatacaccgacgaaacaaaattcaatccacgcaccgacgaaaataaaatccaatccacacaccgacaaaacaaaatccaatccacacacgaacgaaaataaaatccaatccacacaccgacgaaacaaaatccaatccacacaccgacgaaacaaaatccaatccacgcgccgacgaaaaaaaatctaatccacacgccaacgaaaataaaatcccgtccacacaccgacgaaacaaaatccaatccatacaccgacgaaacaaaatccaatccacgcaccgacgaaaataaaatccaatccacacaccgacaaaacaaaatccaatccacacacgaacgaaaataaaatccaatccacacaccgacgaaacaaaatccaatccacacaccgacgaaacaaaatccaatccacacgccgacgaaaaaaaatccaatccacacaccgacgaaacaaaatccaatccacgcgccgacgaaaaaaaatccaatccacacgccgacaaaacaaaatccaatccacacacgaacgaaaataaaatccaatccacacacgaacgaaaataaaatccaatccacacaccgacgaaacaaaatccaatccacgcgccgacgaaaaaaaatctaatccacacaccaacgaaaataaaatcccgtccacacaccgacgaaacaaaatccaatccatacaccgacgaaacaaaatccaacccacgcaccgacgaaaaaaaatccaatccacacaccgacgaaaataaaatccaatccacacaccgacgaaacaaaatccaatccacacaccgacgaaaataaaatccaatccacacaccgacgaaacaaaatccaatccacacaccgacgaaacaaaatccaatccacacgccgacgaaaaaaaatccaatccacacaccgacgaaacaaaatccaatccacgcgccgacgaaaaaaaatccaatccacacgccgacaaaacaaaatccaatccacacacgaacgaaaataaaatccaatccacacacgaacgaaaataaaatccaatccacacaccgacgaaacaaaatccaatccacgcgccgacgaaaaaaaatctaatccacacaccaacgaaaataaaatcccgtccacacaccgacgaaacaaaatccaatccatacaccgacgaaacaaaatccaacccacgcaccgacgaaaaaaaatccaatccacacaccgacgaaaataaaatccaatccacacaccgacgaaacaaaatccaatccacacaccgacgaaaataaaatccaatccacacaccgacgaaacaaaatccaatccacgcgccgacgaaaaaaaatccaatccacgcgccgacgaaacaaaatccaatccacacacgaataaaataaaatccaatccatacaccaacgaaaca

SEQ ID NO: 23413 - DNA, 560 bp, Artificial Sequence
  chemically treated genomic DNA (Homo sapiens) CpG-island No: 23413
cggcgtttcgaggagggcgcggacggggcggggcggggtatttcggttgcgttttcgcgcgtggtcgcgagggggcgcggtaggacggggttgttagggcggtcgcgggtgagttagggcggcgttaggatgagttagtttttcgtgggtttatcgcgtttttttcgtttttggttttttcgttcggtcgcgttttggtcgtcggttcgttttgattttcggggattttaggttttgcgtcgttttgcgttttttcgggatttttttgtcgttaggagatcgcgtttttcgggaatatagggtagggcgcgcgggtttgggttaggtcgttttcgcgggttttttcgtcgttttttttttggggtcgggcgtggttttttttttagagcgggtttcggggtcggtttcggttcggttcggattcgagggatagttttgttaaggttcggttatgggcggtcgtcgcgggggaaatgtgttttttggttaatacgtggggagaaagtttttttcgtttttgggtgtatttcggtgtttcggtttttttttagagtaaatta

SEQ ID NO: 23414 - DNA, 560 bp, Artificial Sequence
  chemically treated genomic DNA (Homo sapiens) CpG-island No: 23414
taatttactctaaaaaaaaaccgaaacaccgaaatacacccaaaaacgaaaaaaactttctccccacgtattaaccaaaaaacacatttcccccgcgacgaccgcccataaccgaaccttaacaaaactatccctcgaatccgaaccgaaccgaaaccgaccccgaaacccgctctaaaaaaaaaaccacgcccgaccccaaaaaaaaaacgacgaaaaaacccgcgaaaacgacctaacccaaacccgcgcgccctaccctatattcccgaaaaacgcgatctcctaacgacaaaaaaatcccgaaaaaacgcaaaacgacgcaaaacctaaaatccccgaaaatcaaaacgaaccgacgaccaaaacgcgaccgaacgaaaaaaccaaaaacgaaaaaaacgcgataaacccacgaaaaactaactcatcctaacgccgccctaactcacccgcgaccgccctaacaaccccgtcctaccgcgccccctcgcgaccacgcgcgaaaacgcaaccgaaataccccgccccgccccgtccgcgccctcctcgaaacgccg

SEQ ID NO: 23415 - DNA, 560 bp, Artificial Sequence
  chemically treated genomic DNA (Homo sapiens) CpG-island No: 23415
tgatttgttttgagaagaggtcgaaatatcggggtatatttaagaacggagagggttttttttttacgtgttagttagggggtatatttttttcgcggcggtcgtttatggtcgggttttggtagagttgtttttcgaattcgggtcgagtcggggtcggtttcgaaattcgttttgggagggaagttacgttcggttttaggaaaggagcgacgggagggttcgcgggaacggtttggtttaggttcgcgcgttttgttttgtgttttcgggaggcgcggttttttggcggtaggggagtttcgggagggcgtagggcggcgtagagtttgggattttcgagggttagggcgagtcggcggttagggcgcggtcgggcggggaagttaggggcggagggggcgcggtaagtttacggagggttgatttattttggcgtcgttttgatttattcgcggtcgttttggtagtttcgttttgtcgcgttttttcgcggttacgcgcggaagcgtagtcggggtgtttcgtttcgtttcgttcgcgtttttttcggagcgtcg

SEQ ID NO: 23416 - DNA, 560 bp, Artificial Sequence
  chemically treated genomic DNA (Homo sapiens) CpG-island No: 23416
cgacgctccgaaaaaaacgcgaacgaaacgaaacgaaacaccccgactacgcttccgcgcgtaaccgcgaaaaaacgcgacaaaacgaaactaccaaaacgaccgcgaataaatcaaaacgacgccaaaataaatcaaccctccgtaaacttaccgcgccccctccgcccctaacttccccgcccgaccgcgccctaaccgccgactcgccctaaccctcgaaaatcccaaactctacgccgccctacgccctcccgaaactcccctaccgccaaaaaaccgcgcctcccgaaaacacaaaacaaaacgcgcgaacctaaaccaaaccgttcccgcgaaccctcccgtcgctcctttcctaaaaccgaacgtaacttccctcccaaaacgaatttcgaaaccgaccccgactcgacccgaattcgaaaaacaactctaccaaaacccgaccataaacgaccgccgcgaaaaaaatataccccctaactaacacgtaaaaaaaaaaccctctccgttcttaaatataccccgatatttcgacctcttctcaaaacaaatca

SEQ ID NO: 23417 - DNA, 525 bp, Artificial Sequence
  chemically treated genomic DNA (Homo sapiens) CpG-island No: 23417
agcgagttgttcgtgttttcggtttttgtttcgtaaatttcggacgatgttatcggaggacgttgaaggtaaaggttggtggggttaggcgtcggcgagattgtcgcgttagtatagttttcgcgggagtcgagtgttgacgggtttcgcgattttttttcgagggtaaacggttcggttttttagggatatttggttagtgttattttttttttatcgggtgtcgcgtatttttttaatagaacgtgatttcgtagacggatgaattcggaatcggtaaaattcgtttgtttttgtttagtttttttgttttattatattattgttttttattgcggattgcgtcgtgtgcgtttcgggatcgtttttgtatttttgtttatagttttttattattaaggtagtcggaggaagattttttcgagttatttgttttacgttagtagttatatcgaggcggtttttttcgtattattttttaagtgtagagtttttgaaagttcgaggtttttgtgttacgtattt

SEQ ID NO: 23418 - DNA, 525 bp, Artificial Sequence
  chemically treated genomic DNA (Homo sapiens) CpG-island No: 23418
aaatacgtaacacaaaaacctcgaactttcaaaaactctacacttaaaaaataatacgaaaaaaaccgcctcgatataactactaacgtaaaacaaataactcgaaaaaatcttcctccgactaccttaataataaaaaactataaacaaaaatacaaaaacgatcccgaaacgcacacgacgcaatccgcaataaaaaacaataatataataaaacaaaaaaactaaacaaaaacaaacgaattttaccgattccgaattcatccgtctacgaaatcacgttctattaaaaaaatacgcgacacccgataaaaaaaaaataacactaaccaaatatccctaaaaaaccgaaccgtttaccctcgaaaaaaaatcgcgaaacccgtcaacactcgactcccgcgaaaactatactaacgcgacaatctcgccgacgcctaaccccaccaacctttaccttcaacgtcctccgataacatcgtccgaaatttacgaaacaaaaaccgaaaacacgaacaactcgct

SEQ ID NO: 23419 - DNA, 525 bp, Artificial Sequence
  chemically treated genomic DNA (Homo sapiens) CpG-island No: 23419
gggtgcgtggtataggagtttcggatttttaggggttttgtatttggggagtggtgcgagggggatcgtttcggtgtggttgttgacgtgagataggtaattcggaaaggttttttttcggttgttttggtaatgggaagttgtgggtaaaggtgtaggggcggtttcggagcgtatacggcgtagttcgtagtgaagggtagtggtgtggtggggtagagagattagataagggtaggcgggttttgtcgatttcgagtttattcgtttacggggttacgttttgttgagaaaatgcgcgatattcggtagggagagagtgatattgattaagtgtttttggagggtcgagtcgtttgttttcgggagggggtcgcgaggttcgttagtattcggttttcgcggaagttgtgttagcgcggtagtttcgtcggcgtttggttttattagtttttgtttttagcgtttttcggtggtatcgttcgagatttgcggagtagaagtcgaggatacgagtaattcgtt

SEQ ID NO: 23420 - DNA, 525 bp, Artificial Sequence
  chemically treated genomic DNA (Homo sapiens) CpG-island No: 23420
aacgaattactcgtatcctcgacttctactccgcaaatctcgaacgataccaccgaaaaacgctaaaaacaaaaactaataaaaccaaacgccgacgaaactaccgcgctaacacaacttccgcgaaaaccgaatactaacgaacctcgcgaccccctcccgaaaacaaacgactcgaccctccaaaaacacttaatcaatatcactctctccctaccgaatatcgcgcattttctcaacaaaacgtaaccccgtaaacgaataaactcgaaatcgacaaaacccgcctacccttatctaatctctctaccccaccacaccactacccttcactacgaactacgccgtatacgctccgaaaccgcccctacacctttacccacaacttcccattaccaaaacaaccgaaaaaaaacctttccgaattacctatctcacgtcaacaaccacaccgaaacgatccccctcgcaccactccccaaatacaaaacccctaaaaatccgaaactcctataccacgcaccc

SEQ ID NO: 23421 - DNA, 596 bp, Artificial Sequence
  chemically treated genomic DNA (Homo sapiens) CpG-island No: 23421
atggggcgcgtcgggtcgtttggtcgggcggttacgtgttttttttttttcgttattgcggcgggagttttaattagagcgcgttagggggtttttttcgggtaggaattattcggttcggcggcggagggtgggtcgtcgttatttgatcgttcgttttcgtttttcgcgagtaaggggcggtggtagcgtttgttcggttataaatggtttttttcgttcggttcgttcgttcgttcgggttcggcgcggattcgtttgggcgtgtttttttcgtcggttttaggcgttttatcgttttgttcggcgttagttcgcggttttagttatttttgagggcgcgtcgggtatttagcgcgtaggttcgtttacggaggtcgatacggaagtttggatcgtcgaggcgtgtggttcgtttatcggtaggtgagcgtgtatcgcgggcgtgggatgttgtggggatagtgcgggggacgtgtggggttttcggatgcgaacgcgagttcgtgcgatgtttaggttaagtttgtagagagagtttgcggtgtttgtttttttggtttttttttgatgtttttgcgggttgggggttcgga

SEQ ID NO: 23422 - DNA, 596 bp, Artificial Sequence
  chemically treated genomic DNA (Homo sapiens) CpG-island No: 23422
tccgaacccccaacccgcaaaaacatcaaaaaaaaaccaaaaaaacaaacaccgcaaactctctctacaaacttaacctaaacatcgcacgaactcgcgttcgcatccgaaaaccccacacgtcccccgcactatccccacaacatcccacgcccgcgatacacgctcacctaccgataaacgaaccacacgcctcgacgatccaaacttccgtatcgacctccgtaaacgaacctacgcgctaaatacccgacgcgccctcaaaaataactaaaaccgcgaactaacgccgaacaaaacgataaaacgcctaaaaccgacgaaaaaaacacgcccaaacgaatccgcgccgaacccgaacgaacgaacgaaccgaacgaaaaaaaccatttataaccgaacaaacgctaccaccgccccttactcgcgaaaaacgaaaacgaacgatcaaataacgacgacccaccctccgccgccgaaccgaataattcctacccgaaaaaaaccccctaacgcgctctaattaaaactcccgccgcaataacgaaaaaaaaaaaacacgtaaccgcccgaccaaacgacccgacgcgccccat

SEQ ID NO: 23423 - DNA, 596 bp, Artificial Sequence
  chemically treated genomic DNA (Homo sapiens) CpG-island No: 23423
ttcgagtttttaattcgtaggagtattaagaggaggttaaggagatagatatcgtagattttttttgtaaatttgatttgggtatcgtacggattcgcgttcgtattcgaagattttatacgtttttcgtattgtttttatagtattttacgttcgcggtgtacgtttatttgtcggtagacgagttatacgtttcggcggtttagattttcgtgtcgattttcgtgggcgagtttacgcgttgggtgttcggcgcgtttttaggagtggttgggatcgcgggttggcgtcgggtagggcggtgggacgtttggagtcggcgggaggagtacgtttaggcgggttcgcgtcgagttcgagcgagcgggcgagtcgggcgggaggggttatttgtaatcgagtagacgttattatcgttttttattcgcggggggcgggggcgggcggttaggtgacggcggtttatttttcgtcgtcgagtcgggtggtttttgttcgggaggagttttttggcgcgttttgattggaattttcgtcgtagtggcgggggaggggggatacgtgatcgttcggttaggcggttcggcgcgttttat

SEQ ID NO: 23424 - DNA, 596 bp, Artificial Sequence
  chemically treated genomic DNA (Homo sapiens) CpG-island No: 23424
ataaaacgcgccgaaccgcctaaccgaacgatcacgtatcccccctcccccgccactacgacgaaaattccaatcaaaacgcgccaaaaaactcctcccgaacaaaaaccacccgactcgacgacgaaaaataaaccgccgtcacctaaccgcccgcccccgccccccgcgaataaaaaacgataataacgtctactcgattacaaataacccctcccgcccgactcgcccgctcgctcgaactcgacgcgaacccgcctaaacgtactcctcccgccgactccaaacgtcccaccgccctacccgacgccaacccgcgatcccaaccactcctaaaaacgcgccgaacacccaacgcgtaaactcgcccacgaaaatcgacacgaaaatctaaaccgccgaaacgtataactcgtctaccgacaaataaacgtacaccgcgaacgtaaaatactataaaaacaatacgaaaaacgtataaaatcttcgaatacgaacgcgaatccgtacgatacccaaatcaaatttacaaaaaaaatctacgatatctatctccttaacctcctcttaatactcctacgaattaaaaactcgaa

SEQ ID NO: 23425 - DNA, 744 bp, Artificial Sequence
  chemically treated genomic DNA (Homo sapiens) CpG-island No: 23425
tgtcgaagtggtattgcggtcggttttgcgtttttatcgcgatcgaggtggcggtaagagttgggagagagggggagaaaagcggttagggtaggggcgagggcgggggcgagggtaggggcgagggcggggttgagacgaagttcgcgttacggtgttttacgtcggttcgtcgcgatagcgtaggaggttaagacgaggttttttttcgtttcgggtttcgcggtttttacgtagcgcgtacgtatgcgggcgagttttttatttggttggtttttagtttgagcgggttttcgtgagtagaagagaaagtattgttattgtagttaaattttaacgtcgttaacggaacgtcgtttttttttttaggtcgggttttttaatgttacgttaaatttcgcgagagtcgggataaatatcgcgagagtatagtttagatgggggtggttaatcgaaggtggcggtagcgggggcgtacgtacgggggcgtacgtacgggggcgtgtttggggagttttcgaggagtttttagttagcgtttttatatttgcgcgttttttgtttgtttttttttttgaagttagtcgtttaatttgaaagtcgtggatgcgtttgcgttttttatttcgttaggtgtggttgtgagcgtcgcgtatttttcgatatcgcgagatttttttgttttcgagcgttgtgaaggaattgagtgaattgaggttttgagttttcgttagttaagacgtt

SEQ ID NO: 23426 - DNA, 744 bp, Artificial Sequence
  chemically treated genomic DNA (Homo sapiens) CpG-island No: 23426
aacgtcttaactaacgaaaactcaaaacctcaattcactcaattccttcacaacgctcgaaaacaaaaaaatctcgcgatatcgaaaaatacgcgacgctcacaaccacacctaacgaaataaaaaacgcaaacgcatccacgactttcaaattaaacgactaacttcaaaaaaaaaaacaaacaaaaaacgcgcaaatataaaaacgctaactaaaaactcctcgaaaactccccaaacacgcccccgtacgtacgcccccgtacgtacgcccccgctaccgccaccttcgattaaccacccccatctaaactatactctcgcgatatttatcccgactctcgcgaaatttaacgtaacattaaaaaacccgacctaaaaaaaaaaacgacgttccgttaacgacgttaaaatttaactacaataacaatactttctcttctactcacgaaaacccgctcaaactaaaaaccaaccaaataaaaaactcgcccgcatacgtacgcgctacgtaaaaaccgcgaaacccgaaacgaaaaaaaacctcgtcttaacctcctacgctatcgcgacgaaccgacgtaaaacaccgtaacgcgaacttcgtctcaaccccgccctcgcccctaccctcgcccccgccctcgcccctaccctaaccgcttttctccccctctctcccaactcttaccgccacctcgatcgcgataaaaacgcaaaaccgaccgcaataccacttcgaca

SEQ ID NO: 23427 - DNA, 744 bp, Artificial Sequence
  chemically treated genomic DNA (Homo sapiens) CpG-island No: 23427
aacgttttggttaacgaaaatttaaagttttaatttatttagtttttttatagcgttcggaaatagagaagtttcgcggtatcggaaaatgcgcggcgtttatagttatatttgacgagatggagggcgtaggcgtatttacggtttttagattgggcgattgattttaaaggggggggtaaatagggaacgcgtaggtataggagcgttggttggaggtttttcgagagttttttagatacgttttcgtgcgtacgttttcgtgcgtacgttttcgttgtcgttattttcggttgattatttttatttagattgtattttcgcggtatttgtttcgattttcgcggggtttagcgtggtattgggaggttcggtttgggggaggagacggcgtttcgttagcggcgttggggtttggttgtagtggtagtgtttttttttttgtttacggggattcgtttaggttggaggttagttaggtgaagagttcgttcgtatgcgtgcgcgttgcgtgggagtcgcgaggttcggggcgggagggggtttcgttttggttttttgcgttgtcgcgacgggtcggcgtgaggtatcgtggcgcggatttcgttttagtttcgttttcgtttttgttttcgttttcgttttcgtttttgttttgatcgttttttttttttttttttttagtttttgtcgttatttcggtcgcgatgggggcgtaggatcggtcgtagtgttatttcgata

SEQ ID NO: 23428 - DNA, 744 bp, Artificial Sequence
  chemically treated genomic DNA (Homo sapiens) CpG-island No: 23428
tatcgaaataacactacgaccgatcctacgcccccatcgcgaccgaaataacgacaaaaactaaaaaaaaaaaaaaaaaaaacgatcaaaacaaaaacgaaaacgaaaacgaaaacaaaaacgaaaacgaaactaaaacgaaatccgcgccacgatacctcacgccgacccgtcgcgacaacgcaaaaaaccaaaacgaaaccccctcccgccccgaacctcgcgactcccacgcaacgcgcacgcatacgaacgaactcttcacctaactaacctccaacctaaacgaatccccgtaaacaaaaaaaaaaacactaccactacaaccaaaccccaacgccgctaacgaaacgccgtctcctcccccaaaccgaacctcccaataccacgctaaaccccgcgaaaatcgaaacaaataccgcgaaaatacaatctaaataaaaataatcaaccgaaaataacgacaacgaaaacgtacgcacgaaaacgtacgcacgaaaacgtatctaaaaaactctcgaaaaacctccaaccaacgctcctatacctacgcgttccctatttacccccccctttaaaatcaatcgcccaatctaaaaaccgtaaatacgcctacgccctccatctcgtcaaatataactataaacgccgcgcattttccgataccgcgaaacttctctatttccgaacgctataaaaaaactaaataaattaaaactttaaattttcgttaaccaaaacgtt

SEQ ID NO: 23429 - DNA, 677 bp, Artificial Sequence
  chemically treated genomic DNA (Homo sapiens) CpG-island No: 23429
atgcggtaggtcgtttttgtagtgttttggcgggagtcgcggcggtcgtcgtagtagtattcgagacgcgtcgggtaaattcgtcgttttggtttattcgttcgacgttttttttagttggataatcgttttacggagtagttacggcgaaaatgttttttttttatttttatttttatcggttgttagtaatttggagacgtcgtttttttttcggtgtagggagtttcggaggatgcggggcggaaaagtaaaatattattttttttcgaagtttcgaggtaaatgacgataaatagtattttcgtttttttttaatattatgggagtttttgattcgatttcgaaggaggcgggcgggcgagagtttggatttatatggttttttagtttttttcgtttttcgtattttagcgcggatttcgttaaggttacgcggcgcgttaggagtttttaggagtttggagtggagtagggtgcgtgcggcggcgggttcgttcggtttatttttgggcgttgtaagattagtagaaatttgagaaagcgtttggaatatcgagtagcgattggtttattcgggcgtgggttggggagggcgggggagggtaggagcgaggaggtggatggaaaatatgagggggtggtttggaagagagcggggttgttatttagttttt

SEQ ID NO: 23430 - DNA, 677 bp, Artificial Sequence
  chemically treated genomic DNA (Homo sapiens) CpG-island No: 23430
aaaaactaaataacaaccccgctctcttccaaaccaccccctcatattttccatccacctcctcgctcctaccctcccccgccctccccaacccacgcccgaataaaccaatcgctactcgatattccaaacgctttctcaaatttctactaatcttacaacgcccaaaaataaaccgaacgaacccgccgccgcacgcaccctactccactccaaactcctaaaaactcctaacgcgccgcgtaaccttaacgaaatccgcgctaaaatacgaaaaacgaaaaaaactaaaaaaccatataaatccaaactctcgcccgcccgcctccttcgaaatcgaatcaaaaactcccataatattaaaaaaaaacgaaaatactatttatcgtcatttacctcgaaacttcgaaaaaaaataatattttacttttccgccccgcatcctccgaaactccctacaccgaaaaaaaaacgacgtctccaaattactaacaaccgataaaaataaaaataaaaaaaaaacattttcgccgtaactactccgtaaaacgattatccaactaaaaaaaacgtcgaacgaataaaccaaaacgacgaatttacccgacgcgtctcgaatactactacgacgaccgccgcgactcccgccaaaacactacaaaaacgacctaccgcat

SEQ ID NO: 23431 - DNA, 677 bp, Artificial Sequence
  chemically treated genomic DNA (Homo sapiens) CpG-island No: 23431
gggaattgaatgataatttcgtttttttttaaattatttttttatattttttatttattttttcgtttttgttttttttcgttttttttaatttacgttcgggtgggttaatcgttgttcggtattttaggcgtttttttaggtttttgttgattttgtagcgtttagaaatggatcgagcggattcgtcgtcgtacgtattttgttttattttaagtttttaagggtttttggcgcgtcgcgtagttttggcgaggttcgcgttggggtgcggagagcgaagggaattggagagttatgtagatttaggttttcgttcgttcgtttttttcgggatcgaattaagggtttttatagtgttaggagggggcgagagtgttgtttatcgttatttgtttcggagtttcgagagagggtggtattttgttttttcgtttcgtatttttcggaattttttgtatcggagagaggacggcgtttttaggttgttggtaatcggtgagaatgggggtagggaaggaatattttcgtcgtagttgtttcgtaaagcgattgtttaattgagaggggcgtcggacgagtggattagggcggcgagtttgttcggcgcgtttcggatgttgttgcggcggtcgtcgcggttttcgttagggtattgtaaagacgatttgtcgtat

SEQ ID NO: 23432 - DNA, 677 bp, Artificial Sequence
  chemically treated genomic DNA (Homo sapiens) CpG-island No: 23432
atacgacaaatcgtctttacaataccctaacgaaaaccgcgacgaccgccgcaacaacatccgaaacgcgccgaacaaactcgccgccctaatccactcgtccgacgcccctctcaattaaacaatcgctttacgaaacaactacgacgaaaatattccttccctacccccattctcaccgattaccaacaacctaaaaacgccgtcctctctccgatacaaaaaattccgaaaaatacgaaacgaaaaaacaaaataccaccctctctcgaaactccgaaacaaataacgataaacaacactctcgccccctcctaacactataaaaacccttaattcgatcccgaaaaaaacgaacgaacgaaaacctaaatctacataactctccaattcccttcgctctccgcaccccaacgcgaacctcgccaaaactacgcgacgcgccaaaaacccttaaaaacttaaaataaaacaaaatacgtacgacgacgaatccgctcgatccatttctaaacgctacaaaatcaacaaaaacctaaaaaaacgcctaaaataccgaacaacgattaacccacccgaacgtaaattaaaaaaaacgaaaaaaaacaaaaacgaaaaaataaataaaaaatataaaaaaataatttaaaaaaaaacgaaattatcattcaattccc

SEQ ID NO: 23433 - DNA, 511 bp, Artificial Sequence
  chemically treated genomic DNA (Homo sapiens) CpG-island No: 23433
gttcggtgcgtgtttagttgaattaggcggttgcggaaaaaaaaaagcggggagaaagtagggttcggttattagcggttttacgggcgtacgtagtttaggttttaagattttgggttgggattggttgagtttggcgggaggcggggttcgagttatcgtttgtcgtcgcgttttcggtttttataaattgagttcgtagtttttcgtttcgttttttgttttttttgttcgatagttagtcgtatttttttttgcgtcgttaggtgaagacgggcggagagaaattcgggaggttagggacggtttgaaggcggtaggggcgggcgtaggtcggatgtgttcgcgtcgttgcggggtgggttcgggcggttttcgtattgtaggggcgggcggaggacgtgatgcggcgcgggttgggtatggaggtttggtgggggaggggaggggaggcgtgtgtgtcggtcggggttattaggcgtttattgtttttttttttcgcgtagtcgag

SEQ ID NO: 23434 - DNA, 511 bp, Artificial Sequence
  chemically treated genomic DNA (Homo sapiens) CpG-island No: 23434
ctcgactacgcgaaaaaaaaaaacaataaacgcctaataaccccgaccgacacacacgcctcccctcccctcccccaccaaacctccatacccaacccgcgccgcatcacgtcctccgcccgcccctacaatacgaaaaccgcccgaacccaccccgcaacgacgcgaacacatccgacctacgcccgcccctaccgccttcaaaccgtccctaacctcccgaatttctctccgcccgtcttcacctaacgacgcaaaaaaaaatacgactaactatcgaacaaaaaaaacaaaaaacgaaacgaaaaactacgaactcaatttataaaaaccgaaaacgcgacgacaaacgataactcgaaccccgcctcccgccaaactcaaccaatcccaacccaaaatcttaaaacctaaactacgtacgcccgtaaaaccgctaataaccgaaccctactttctccccgcttttttttttccgcaaccgcctaattcaactaaacacgcaccgaac

SEQ ID NO: 23435 - DNA, 511 bp, Artificial Sequence
  chemically treated genomic DNA (Homo sapiens) CpG-island No: 23435
ttcggttgcgcggagggagagaatagtgagcgtttagtggtttcggtcgatatatacgttttttttttttttttttattaggtttttatgtttagttcgcgtcgtattacgtttttcgttcgtttttgtaatgcggaggtcgttcgggtttatttcgtagcggcgcgaatatattcggtttgcgttcgtttttgtcgtttttaggtcgtttttagtttttcgggttttttttcgttcgtttttatttggcgacgtaaaagaagatgcggttgattgtcgaataggaggagtagagagcgaagcgggaggttgcgggtttaatttatagaaatcgggggcgcggcggtaggcggtgattcggatttcgtttttcgttaggtttagttagttttagtttaaggttttgaggtttgagttacgtgcgttcgtaaaatcgttagtagtcgggttttatttttttttcgttttttttttttcgtagtcgtttggtttaattgggtacgtatcgagt

SEQ ID NO: 23436 - DNA, 511 bp, Artificial Sequence
  chemically treated genomic DNA (Homo sapiens) CpG-island No: 23436
actcgatacgtacccaattaaaccaaacgactacgaaaaaaaaaaaacgaaaaaaaaataaaacccgactactaacgattttacgaacgcacgtaactcaaacctcaaaaccttaaactaaaactaactaaacctaacgaaaaacgaaatccgaatcaccgcctaccgccgcgcccccgatttctataaattaaacccgcaacctcccgcttcgctctctactcctcctattcgacaatcaaccgcatcttcttttacgtcgccaaataaaaacgaacgaaaaaaaacccgaaaaactaaaaacgacctaaaaacgacaaaaacgaacgcaaaccgaatatattcgcgccgctacgaaataaacccgaacgacctccgcattacaaaaacgaacgaaaaacgtaatacgacgcgaactaaacataaaaacctaataaaaaaaaaaaaaaaaaacgtatatatcgaccgaaaccactaaacgctcactattctctccctccgcgcaaccgaa

SEQ ID NO: 23437 - DNA, 535 bp, Artificial Sequence
  chemically treated genomic DNA (Homo sapiens) CpG-island No: 23437
tttgttttttttttttaatttttattttcgtttgtattcgtttcgttttcgttttattttggttagtacgttgtagagagcgcggatttcgggcgtgatggtgtcgatttggacgtttattttattcgggtgtatttacgataagttaggtttttgtattagagtgggttttagtttcggttcgagtcggcgggcgtgcgagaacgattagatggtgtcgggtatgaagcgggtcgacgaggaataggtggtggaggtggaggtggaggacgacgagaggttggtcgcggagggcgcgagggggtcggtcggggagcgcgcgggcgagtttagtacgcgcgtcgaagggttgtagatagcggtcggtcgggcgtttagttgtagttttaggggtcggatggggttgacgaagtcggtttgtattgtttggtcgcgacgatttaggtttcgtcggttttgtttatttttttttagcgtttgttgtagttgtttttttaatagtcggtttcggcgttttagtttatgtattttggtt

SEQ ID NO: 23438 - DNA, 535 bp, Artificial Sequence
  chemically treated genomic DNA (Homo sapiens) CpG-island No: 23438
aaccaaaatacataaactaaaacgccgaaaccgactattaaaaaaacaactacaacaaacgctaaaaaaaaataaacaaaaccgacgaaacctaaatcgtcgcgaccaaacaatacaaaccgacttcgtcaaccccatccgacccctaaaactacaactaaacgcccgaccgaccgctatctacaacccttcgacgcgcgtactaaactcgcccgcgcgctccccgaccgaccccctcgcgccctccgcgaccaacctctcgtcgtcctccacctccacctccaccacctattcctcgtcgacccgcttcatacccgacaccatctaatcgttctcgcacgcccgccgactcgaaccgaaactaaaacccactctaatacaaaaacctaacttatcgtaaatacacccgaataaaataaacgtccaaatcgacaccatcacgcccgaaatccgcgctctctacaacgtactaaccaaaataaaacgaaaacgaaacgaatacaaacgaaaataaaaattaaaaaaaaaaaacaaa

SEQ ID NO: 23439 - DNA, 535 bp, Artificial Sequence
  chemically treated genomic DNA (Homo sapiens) CpG-island No: 23439
ggttaaggtgtatgagttggagcgtcggaatcggttgttggagaagtaattgtagtaagcgttggaggagggtaagtagggtcggcggggtttgggtcgtcgcgattaggtagtgtagatcggtttcgttagttttattcggtttttggggttgtagttgggcgttcggtcggtcgttgtttgtagtttttcggcgcgcgtgttgggttcgttcgcgcgtttttcggtcggttttttcgcgtttttcgcggttagtttttcgtcgttttttatttttatttttattatttatttttcgtcggttcgttttatgttcggtattatttggtcgttttcgtacgttcgtcggttcgggtcgggattggagtttattttggtgtaagggtttggtttgtcgtgggtgtattcggatggggtgggcgtttagatcgatattattacgttcgagattcgcgttttttataacgtgttggttaaagtgaagcgggagcgggacgagtataagcggaggtagggattgggaaagggggatagg

SEQ ID NO: 23440 - DNA, 535 bp, Artificial Sequence
  chemically treated genomic DNA (Homo sapiens) CpG-island No: 23440
cctatccccctttcccaatccctacctccgcttatactcgtcccgctcccgcttcactttaaccaacacgttataaaaaacgcgaatctcgaacgtaataatatcgatctaaacgcccaccccatccgaatacacccacgacaaaccaaacccttacaccaaaataaactccaatcccgacccgaaccgacgaacgtacgaaaacgaccaaataataccgaacataaaacgaaccgacgaaaaataaataataaaaataaaaataaaaaacgacgaaaaactaaccgcgaaaaacgcgaaaaaaccgaccgaaaaacgcgcgaacgaacccaacacgcgcgccgaaaaactacaaacaacgaccgaccgaacgcccaactacaaccccaaaaaccgaataaaactaacgaaaccgatctacactacctaatcgcgacgacccaaaccccgccgaccctacttaccctcctccaacgcttactacaattacttctccaacaaccgattccgacgctccaactcatacaccttaacc

SEQ ID NO: 23441 - DNA, 507 bp, Artificial Sequence
  chemically treated genomic DNA (Homo sapiens) CpG-island No: 23441
  unsure (396)
cgcgggttcggagacgtttgaggaaggggcgggtgacgggatgattttcggggttggtagggtcgtgaggggcgtttttttgggaatttcgcgttttttttatttcggagtcgtcgtaggtcgcgttgggttcggttcggtgttattttcgtttcggttttttttcgtcgcggtcgaaggggggaaaatggtttcggttttagcgtcgttttttaaagggtttgaaatatcggtcgggaaattttatcgtataggtttcgtttttttacggatagtttataataattttaattaattttaattttttttttttattatcgttatttttttttttaggtttttcgggtaattttcgttttttcgtcgtttaggtaattattggttacgttttttttngagcgggcgcgcgcgcgttatttgggtaatcgtttattttttggttattttataatatatacggatatttttttttttaatatatatatatatatatatatatatatatat

SEQ ID NO: 23442 - DNA, 507 bp, Artificial Sequence
  chemically treated genomic DNA (Homo sapiens) CpG-island No: 23442
  unsure (112)
atatatatatatatatatatatatatatatattaaaaaaaaaaatatccgtatatattataaaataaccaaaaaataaacgattacccaaataacgcgcgcgcgcccgctcnaaaaaaaacgtaaccaataattacctaaacgacgaaaaaacgaaaattacccgaaaaacctaaaaaaaaaaataacgataataaaaaaaaaaaattaaaattaattaaaattattataaactatccgtaaaaaaacgaaacctatacgataaaatttcccgaccgatatttcaaaccctttaaaaaacgacgctaaaaccgaaaccattttccccccttcgaccgcgacgaaaaaaaaccgaaacgaaaataacaccgaaccgaacccaacgcgacctacgacgactccgaaataaaaaaaacgcgaaattcccaaaaaaacgcccctcacgaccctaccaaccccgaaaatcatcccgtcacccgccccttcctcaaacgtctccgaacccgcg

SEQ ID NO: 23443 - DNA, 507 bp, Artificial Sequence
  chemically treated genomic DNA (Homo sapiens) CpG-island No: 23443
  unsure (112)
gtgtgtgtgtgtgtgtgtgtgtgtgtgtgtgttgggggggggggtgttcgtgtgtattatgggatggttaggaggtgggcggttgtttaggtgacgcgcgcgcgttcgtttngaagggggcgtggttagtggttgtttgagcgacgagggggcgggggttgttcgggagatttggggaggagggtggcggtagtggaaggggggggttggagttggttgaggttattatgggttgttcgtgggggggcggggtttgtgcggtgggatttttcggtcggtgttttaggttttttaagaggcgacgttggagtcggagttattttttttttttcggtcgcggcgaggaggagtcggagcgggagtgatatcgagtcggatttagcgcgatttgcggcggtttcggggtgaggagagcgcggggtttttaaagagacgttttttacggttttattagtttcgagggttatttcgttattcgttttttttttaggcgttttcggattcgcg

SEQ ID NO: 23444 - DNA, 507 bp, Artificial Sequence
  chemically treated genomic DNA (Homo sapiens) CpG-island No: 23444
  unsure (396)
cgcgaatccgaaaacgcctaaaaaaaaaacgaataacgaaataaccctcgaaactaataaaaccgtaaaaaacgtctctttaaaaaccccgcgctctcctcaccccgaaaccgccgcaaatcgcgctaaatccgactcgatatcactcccgctccgactcctcctcgccgcgaccgaaaaaaaaaaaataactccgactccaacgtcgcctcttaaaaaacctaaaacaccgaccgaaaaatcccaccgcacaaaccccgcccccccacgaacaacccataataacctcaaccaactccaaccccccccttccactaccgccaccctcctccccaaatctcccgaacaacccccgccccctcgtcgctcaaacaaccactaaccacgcccccttcnaaacgaacgcgcgcgcgtcacctaaacaaccgcccacctcctaaccatcccataatacacacgaacacccccccccccaacacacacacacacacacacacacacacacac

SEQ ID NO: 23445 - DNA, 586 bp, Artificial Sequence
  chemically treated genomic DNA (Homo sapiens) CpG-island No: 23445
attttcggggtatgggttcgatggtttatgggaaggatgtaattagtattttcggggtatgggttcgatggtttatgggaaggatgtaattagtattttcggggtatgggttcgatggtttatgggaaggatgtaattagtattttcggggtatgggttcgatggtttatgggaaggatgtaattagtattttcggggtatgggttcgatggtttatgggaaggatgtaattagtattttcggggtatgggttcgatggtttatgggaaggatgtaattagtattttcggggtatgggttcgatggtttatgggaaggatgtaattagtattttcggggtatgggttcgatggtttatgggaaggatgtaattagtattttcggggtatgggttcgatggtttatgggaaggatgtaattagtattttcggggtatgggttcgatggtttatgggaaggatgtaattagtattttcggggtatgggttcgatggtttatgggaaggatgtaattagtattttcggggtatgggttcgatggtttatgggaaggatgtaattagtattttcggggtatgggtttgat

SEQ ID NO: 23446 - DNA, 586 bp, Artificial Sequence
  chemically treated genomic DNA (Homo sapiens) CpG-island No: 23446
atcaaacccataccccgaaaatactaattacatccttcccataaaccatcgaacccataccccgaaaatactaattacatccttcccataaaccatcgaacccataccccgaaaatactaattacatccttcccataaaccatcgaacccataccccgaaaatactaattacatccttcccataaaccatcgaacccataccccgaaaatactaattacatccttcccataaaccatcgaacccataccccgaaaatactaattacatccttcccataaaccatcgaacccataccccgaaaatactaattacatccttcccataaaccatcgaacccataccccgaaaatactaattacatccttcccataaaccatcgaacccataccccgaaaatactaattacatccttcccataaaccatcgaacccataccccgaaaatactaattacatccttcccataaaccatcgaacccataccccgaaaatactaattacatccttcccataaaccatcgaacccataccccgaaaatactaattacatccttcccataaaccatcgaacccataccccgaaaat

SEQ ID NO: 23447 - DNA, 586 bp, Artificial Sequence
  chemically treated genomic DNA (Homo sapiens) CpG-island No: 23447
attaagtttatatttcgaaaatgttggttatattttttttataagttatcgagtttatatttcgaaaatgttggttatattttttttataagttatcgagtttatatttcgaaaatgttggttatattttttttataagttatcgagtttatatttcgaaaatgttggttatattttttttataagttatcgagtttatatttcgaaaatgttggttatattttttttataagttatcgagtttatatttcgaaaatgttggttatattttttttataagttatcgagtttatatttcgaaaatgttggttatattttttttataagttatcgagtttatatttcgaaaatgttggttatattttttttataagttatcgagtttatatttcgaaaatgttggttatattttttttataagttatcgagtttatatttcgaaaatgttggttatattttttttataagttatcgagtttatatttcgaaaatgttggttatattttttttataagttatcgagtttatatttcgaaaatgttggttatattttttttataagttatcgagtttatatttcgaaaat

SEQ ID NO: 23448 - DNA, 586 bp, Artificial Sequence
  chemically treated genomic DNA (Homo sapiens) CpG-island No: 23448
attttcgaaatataaactcgataacttataaaaaaaatataaccaacattttcgaaatataaactcgataacttataaaaaaaatataaccaacattttcgaaatataaactcgataacttataaaaaaaatataaccaacattttcgaaatataaactcgataacttataaaaaaaatataaccaacattttcgaaatataaactcgataacttataaaaaaaatataaccaacattttcgaaatataaactcgataacttataaaaaaaatataaccaacattttcgaaatataaactcgataacttataaaaaaaatataaccaacattttcgaaatataaactcgataacttataaaaaaaatataaccaacattttcgaaatataaactcgataacttataaaaaaaatataaccaacattttcgaaatataaactcgataacttataaaaaaaatataaccaacattttcgaaatataaactcgataacttataaaaaaaatataaccaacattttcgaaatataaactcgataacttataaaaaaaatataaccaacattttcgaaatataaacttaat

SEQ ID NO: 23449 - DNA, 705 bp, Artificial Sequence
  chemically treated genomic DNA (Homo sapiens) CpG-island No: 23449
atagcgcgggagcgcggattttttggaggcgcgcggcgtttatcgttgttcgttttcgaagtttcgtttcggggtttcgttttcgtcggcgcgtgtttttttagggatcgcgcgcgtcgcggtttcgttttggggtcggtatttgcgcgttcgtatttcgcgtttttcgtttcgtttttcgtttcgcgttttacgcgcgttttagcgttgggggtttttttttcgcggcgggaatgtttggtcggtttcggtagtacggcgcggtttaggttttcgcgtttacgacgggttagcgcgttgggttatgattcggttgggcggttggtgtgcgcggcggttttgtagcgcggcggttttcgcggggcggcgcggggcggcgggcgggttgggtttggcgggaggtcgcgttttacgggtgttggtggatatggacggcgtgttggttgatttcgagggcggattttttaggaagtttcgcgcgcgttttttcgattagttttttatcgcgttggaggatcggcgcggtttttgggtgtcggagtagtacggtcgtttgcggttagggttgagcgtgagcgttttcgtttcgtttcgcgtcgggtttttttttcgtttcgagttttagatatcgtttttgcgtcggtgattttggacggttagcgttttagtttcggggtggttttttgatagaatagggtttggggg

SEQ ID NO: 23450 - DNA, 705 bp, Artificial Sequence
  chemically treated genomic DNA (Homo sapiens) CpG-island No: 23450
cccccaaaccctattctatcaaaaaaccaccccgaaactaaaacgctaaccgtccaaaatcaccgacgcaaaaacgatatctaaaactcgaaacgaaaaaaaaacccgacgcgaaacgaaacgaaaacgctcacgctcaaccctaaccgcaaacgaccgtactactccgacacccaaaaaccgcgccgatcctccaacgcgataaaaaactaatcgaaaaaacgcgcgcgaaacttcctaaaaaatccgccctcgaaatcaaccaacacgccgtccatatccaccaacacccgtaaaacgcgacctcccgccaaacccaacccgcccgccgccccgcgccgccccgcgaaaaccgccgcgctacaaaaccgccgcgcacaccaaccgcccaaccgaatcataacccaacgcgctaacccgtcgtaaacgcgaaaacctaaaccgcgccgtactaccgaaaccgaccaaacattcccgccgcgaaaaaaaaacccccaacgctaaaacgcgcgtaaaacgcgaaacgaaaaacgaaacgaaaaacgcgaaatacgaacgcgcaaataccgaccccaaaacgaaaccgcgacgcgcgcgatccctaaaaaaacacgcgccgacgaaaacgaaaccccgaaacgaaacttcgaaaacgaacaacgataaacgccgcgcgcctccaaaaaatccgcgctcccgcgctat

SEQ ID NO: 23451 - DNA, 705 bp, Artificial Sequence
  chemically treated genomic DNA (Homo sapiens) CpG-island No: 23451
tttttagattttattttattagagggttatttcgaggttggggcgttgatcgtttaaggttatcggcgtaggggcggtgtttggggttcggggcgagaaggaggttcggcgcggggcggggcggggacgtttacgtttagttttggtcgtaggcggtcgtattgtttcgatatttagaagtcgcgtcggttttttagcgcgatgaagggttggtcgggaaagcgcgcgcggaattttttgaggaattcgttttcgaagttagttagtacgtcgtttatgtttattagtattcgtagggcgcggtttttcgttaggtttagttcgttcgtcgtttcgcgtcgtttcgcgggaatcgtcgcgttgtagagtcgtcgcgtatattagtcgtttagtcggattatggtttagcgcgttggttcgtcgtgggcgcggggatttgggtcgcgtcgtgttgtcggagtcggttagatattttcgtcgcggaggagaagtttttaacgttggggcgcgcgtggagcgcgggacggggagcggggcggggagcgcggggtgcgggcgcgtaagtatcggttttagagcgaggtcgcggcgcgcgcggtttttaaaggaatacgcgtcggcggaggcggagtttcggggcggggtttcgaggacggatagcggtaagcgtcgcgcgtttttagaaggttcgcgttttcgcgttgt

SEQ ID NO: 23452 - DNA, 705 bp, Artificial Sequence
  chemically treated genomic DNA (Homo sapiens) CpG-island No: 23452
acaacgcgaaaacgcgaaccttctaaaaacgcgcgacgcttaccgctatccgtcctcgaaaccccgccccgaaactccgcctccgccgacgcgtattcctttaaaaaccgcgcgcgccgcgacctcgctctaaaaccgatacttacgcgcccgcaccccgcgctccccgccccgctccccgtcccgcgctccacgcgcgccccaacgttaaaaacttctcctccgcgacgaaaatatctaaccgactccgacaacacgacgcgacccaaatccccgcgcccacgacgaaccaacgcgctaaaccataatccgactaaacgactaatatacgcgacgactctacaacgcgacgattcccgcgaaacgacgcgaaacgacgaacgaactaaacctaacgaaaaaccgcgccctacgaatactaataaacataaacgacgtactaactaacttcgaaaacgaattcctcaaaaaattccgcgcgcgctttcccgaccaacccttcatcgcgctaaaaaaccgacgcgacttctaaatatcgaaacaatacgaccgcctacgaccaaaactaaacgtaaacgtccccgccccgccccgcgccgaacctccttctcgccccgaaccccaaacaccgcccctacgccgataaccttaaacgatcaacgccccaacctcgaaataaccctctaataaaataaaatctaaaaa

SEQ ID NO: 23453 - DNA, 533 bp, Artificial Sequence
  chemically treated genomic DNA (Homo sapiens) CpG-island No: 23453
gacgcgtaagcgtagtttgttagtttggtttttttttaaagtttgcgtgtaggttggcggcgggagatcgggtttcgcgatgcgagtgagcgtgtgcgtgcgcggttttcgcgagttcgcgtacgtcgtttttaatattatagggtggtagcggttttttcgtattgcgttcggggtaggatcgtgcgcggcggtcgcggcgggtgttgggagttagcgtttgtttcgtcgtcgttttcgttgtttgttatttcgttttggttcgtttttcgtatcgtgtagaggcggcgggttggggagggagcggcgttagtacgaggtttttagtcgttgggaagtttttagacgcgtcgaggggtcgggttacgagcggttgaggtaggtaggggtgcgcgggttggttagtcggtcgggagcggggtagggcggcggcgagaacgggcgtttcgttgatcggggagaagaggttttttgttaaggggttttagtgtagtcggagtgagaggaggggtttcggacgtagtttgtttttt

SEQ ID NO: 23454 - DNA, 533 bp, Artificial Sequence
  chemically treated genomic DNA (Homo sapiens) CpG-island No: 23454
aaaaaacaaactacgtccgaaacccctcctctcactccgactacactaaaaccccttaacaaaaaacctcttctccccgatcaacgaaacgcccgttctcgccgccgccctaccccgctcccgaccgactaaccaacccgcgcacccctacctacctcaaccgctcgtaacccgacccctcgacgcgtctaaaaacttcccaacgactaaaaacctcgtactaacgccgctccctccccaacccgccgcctctacacgatacgaaaaacgaaccaaaacgaaataacaaacaacgaaaacgacgacgaaacaaacgctaactcccaacacccgccgcgaccgccgcgcacgatcctaccccgaacgcaatacgaaaaaaccgctaccaccctataatattaaaaacgacgtacgcgaactcgcgaaaaccgcgcacgcacacgctcactcgcatcgcgaaacccgatctcccgccgccaacctacacgcaaactttaaaaaaaaaccaaactaacaaactacgcttacgcgtc

SEQ ID NO: 23455 - DNA, 533 bp, Artificial Sequence
  chemically treated genomic DNA (Homo sapiens) CpG-island No: 23455
gaagagtaggttacgttcggggtttttttttttatttcggttatattagggttttttggtaggaggtttttttttttcggttagcgaggcgttcgttttcgtcgtcgttttatttcgttttcggtcggttgattagttcgcgtatttttatttattttagtcgttcgtagttcggtttttcggcgcgtttaggggttttttagcggttgggaatttcgtgttggcgtcgttttttttttagttcgtcgtttttgtacggtgcggagaacgggttaagacggagtggtaggtagcgagggcggcggcgaggtaggcgttggtttttagtattcgtcgcggtcgtcgcgtacggttttgtttcggacgtagtacgaagaggtcgttattattttgtagtgttagaggcggcgtgcgcgagttcgcgagggtcgcgtacgtatacgtttattcgtatcgcgagattcgatttttcgtcgttaatttgtacgtaagttttgggagggagttaggttggtaggttgcgtttgcgcgtt

SEQ ID NO: 23456 - DNA, 533 bp, Artificial Sequence
  chemically treated genomic DNA (Homo sapiens) CpG-island No: 23456
aacgcgcaaacgcaacctaccaacctaactccctcccaaaacttacgtacaaattaacgacgaaaaatcgaatctcgcgatacgaataaacgtatacgtacgcgaccctcgcgaactcgcgcacgccgcctctaacactacaaaataataacgacctcttcgtactacgtccgaaacaaaaccgtacgcgacgaccgcgacgaatactaaaaaccaacgcctacctcgccgccgccctcgctacctaccactccgtcttaacccgttctccgcaccgtacaaaaacgacgaactaaaaaaaaaacgacgccaacacgaaattcccaaccgctaaaaaacccctaaacgcgccgaaaaaccgaactacgaacgactaaaataaataaaaatacgcgaactaatcaaccgaccgaaaacgaaataaaacgacgacgaaaacgaacgcctcgctaaccgaaaaaaaaaaacctcctaccaaaaaaccctaatataaccgaaataaaaaaaaaaaccccgaacgtaacctactcttc

SEQ ID NO: 23457 - DNA, 884 bp, Artificial Sequence
  chemically treated genomic DNA (Homo sapiens) CpG-island No: 23457
agtttcgtcgtttaattgtttcgttttggtttacgatatttttttgttcgtatggattgcgcgtagcgtcgttaagcggggagtttagttcggtgttagcgttcgcgaagcggaggaggtcggcgttcgaggttgggcgaagttttttttagcgtagcgaggatcggagggtaaggttagcgcgcgtcgggcgatttgcgtttcgggtatagacgcgacgggttcgtacggggcggggatcgcgcgcgtttgttgggtttacggttgtggggcgcgtagagtttatttggcggttaagggcgttggcgatcgttgaagtttttgggggtgttcggggttcgggttgcgtttgtgttcgcgggaaggttgggcgttttttatatatagatttcgtttcgggttagtttcgtagggagattattagggttggcggtagttgggcgtggtcgggtcgggggcggttgtgggcggtcggtaggtagcgcgcggggtagttttcggtagacggttaatggcggcggtgttcggggcgttcggggcgacgcggcgtttgttggcggcgttgcgaggttagagtttagggttagcggttatggtgagtgtatagcggtcgcgtgggtgggggttcggggtcggggggcggtgcgaggttcggcggcgtcggttgagggattagcgggattggggcgaattcggcgtgggtcgagttttggagttcgggcgtcgggttatcgcgtttcgggattgattatttgttcggtgcgtcgtttagagatcggggtggtcgtagttttcgttatttgtttttgattttatattttcgtcgaagtttacgaatttgttaatcggaaataaatgggaacgaattttgtttagtaattata

SEQ ID NO: 23458 - DNA, 884 bp, Artificial Sequence
  chemically treated genomic DNA (Homo sapiens) CpG-island No: 23458
tataattactaaacaaaattcgttcccatttatttccgattaacaaattcgtaaacttcgacgaaaatataaaatcaaaaacaaataacgaaaactacgaccaccccgatctctaaacgacgcaccgaacaaataatcaatcccgaaacgcgataacccgacgcccgaactccaaaactcgacccacgccgaattcgccccaatcccgctaatccctcaaccgacgccgccgaacctcgcaccgccccccgaccccgaacccccacccacgcgaccgctatacactcaccataaccgctaaccctaaactctaacctcgcaacgccgccaacaaacgccgcgtcgccccgaacgccccgaacaccgccgccattaaccgtctaccgaaaactaccccgcgcgctacctaccgaccgcccacaaccgcccccgacccgaccacgcccaactaccgccaaccctaataatctccctacgaaactaacccgaaacgaaatctatatataaaaaacgcccaaccttcccgcgaacacaaacgcaacccgaaccccgaacacccccaaaaacttcaacgatcgccaacgcccttaaccgccaaataaactctacgcgccccacaaccgtaaacccaacaaacgcgcgcgatccccgccccgtacgaacccgtcgcgtctatacccgaaacgcaaatcgcccgacgcgcgctaaccttaccctccgatcctcgctacgctaaaaaaaacttcgcccaacctcgaacgccgacctcctccgcttcgcgaacgctaacaccgaactaaactccccgcttaacgacgctacgcgcaatccatacgaacaaaaaaatatcgtaaaccaaaacgaaacaattaaacgacgaaact

SEQ ID NO: 23459 - DNA, 884 bp, Artificial Sequence
  chemically treated genomic DNA (Homo sapiens) CpG-island No: 23459
tgtagttgttgaataaaattcgtttttatttgttttcggttggtaagttcgtaggtttcggcggaagtgtaaagttaagggtaagtggcggaggttgcggttatttcggtttttgagcggcgtatcggataggtggttagtttcgggacgcggtgattcgacgttcgagttttaaggttcggtttacgtcgggttcgttttagtttcgttggttttttagtcgacgtcgtcgggtttcgtatcgtttttcgatttcggatttttatttacgcggtcgttgtgtatttattatggtcgttagttttaggttttggtttcgtagcgtcgttaataagcgtcgcgtcgtttcgagcgtttcgagtatcgtcgttattggtcgtttgtcgagggttgtttcgcgcgttgtttgtcggtcgtttatagtcgttttcgattcgattacgtttagttatcgttagttttggtagtttttttgcggggttggttcggagcggggtttgtgtgtgggaagcgtttagttttttcgcgggtataggcgtagttcggatttcgaatatttttaggagttttagcggtcgttagcgtttttggtcgttaggtggattttgcgcgttttatagtcgtaggtttagtaggcgcgcgcggttttcgtttcgtgcgggttcgtcgcgtttgtgttcgggacgtaggtcgttcggcgcgcgttggttttgtttttcggttttcgttgcgttaggaggaatttcgtttagtttcgggcgtcggtttttttcgtttcgcgggcgttagtatcgagttgggtttttcgtttggcggcgttgcgcgtagtttatgcgggtaggaggatgtcgtaggttagggcggggtagttgagcggcggggtt

SEQ ID NO: 23460 - DNA, 884 bp, Artificial Sequence
  chemically treated genomic DNA (Homo sapiens) CpG-island No: 23460
aaccccgccgctcaactaccccgccctaacctacgacatcctcctacccgcataaactacgcgcaacgccgccaaacgaaaaacccaactcgatactaacgcccgcgaaacgaaaaaaaccgacgcccgaaactaaacgaaattcctcctaacgcaacgaaaaccgaaaaacaaaaccaacgcgcgccgaacgacctacgtcccgaacacaaacgcgacgaacccgcacgaaacgaaaaccgcgcgcgcctactaaacctacgactataaaacgcgcaaaatccacctaacgaccaaaaacgctaacgaccgctaaaactcctaaaaatattcgaaatccgaactacgcctatacccgcgaaaaaactaaacgcttcccacacacaaaccccgctccgaaccaaccccgcaaaaaaactaccaaaactaacgataactaaacgtaatcgaatcgaaaacgactataaacgaccgacaaacaacgcgcgaaacaaccctcgacaaacgaccaataacgacgatactcgaaacgctcgaaacgacgcgacgcttattaacgacgctacgaaaccaaaacctaaaactaacgaccataataaatacacaacgaccgcgtaaataaaaatccgaaatcgaaaaacgatacgaaacccgacgacgtcgactaaaaaaccaacgaaactaaaacgaacccgacgtaaaccgaaccttaaaactcgaacgtcgaatcaccgcgtcccgaaactaaccacctatccgatacgccgctcaaaaaccgaaataaccgcaacctccgccacttacccttaactttacacttccgccgaaacctacgaacttaccaaccgaaaacaaataaaaacgaattttattcaacaactaca

SEQ ID NO: 23461 - DNA, 557 bp, Artificial Sequence
  chemically treated genomic DNA (Homo sapiens) CpG-island No: 23461
gggattggttggtgtcgcgagaagaggggggcgttgtcgtagagaggcgaggcggggtagagttgcggggtgggggcggggcgttgtcgttggggcggagtcgagttagtggagggcggtgggggcggggtaagcgcggaggattagggatcggtttcggatcgcgtagttagcgtcgtttggtttgggtcggattcggttagggtttttaagttgtcgtttttatggggttgtgttttttttgtttcggggagttcgcgttttttacgtcggatttggtgagtagagtaggtttttgcgttcgtcgggtcgcgttttgagtatttgttttcgggttgcggggcgggtcgagttattgtatttggtggcgtaggtcgagagttcgttgggggattttgttagcgaggacgggtggacgcgttaggagggtcgttgggttttgttagagcgatttaggtcgtcgttttcgtgtagatttttatttttgtaataaaaagttgtcgaaaggcggttgtggcgtttttttattttttattgattttagttgcgtcggattt

SEQ ID NO: 23462 - DNA, 557 bp, Artificial Sequence
  chemically treated genomic DNA (Homo sapiens) CpG-island No: 23462
aaatccgacgcaactaaaatcaataaaaaataaaaaaacgccacaaccgcctttcgacaactttttattacaaaaataaaaatctacacgaaaacgacgacctaaatcgctctaacaaaacccaacgaccctcctaacgcgtccacccgtcctcgctaacaaaatcccccaacgaactctcgacctacgccaccaaatacaataactcgacccgccccgcaacccgaaaacaaatactcaaaacgcgacccgacgaacgcaaaaacctactctactcaccaaatccgacgtaaaaaacgcgaactccccgaaacaaaaaaaacacaaccccataaaaacgacaacttaaaaaccctaaccgaatccgacccaaaccaaacgacgctaactacgcgatccgaaaccgatccctaatcctccgcgcttaccccgcccccaccgccctccactaactcgactccgccccaacgacaacgccccgcccccaccccgcaactctaccccgcctcgcctctctacgacaacgcccccctcttctcgcgacaccaaccaatccc

SEQ ID NO: 23463 - DNA, 557 bp, Artificial Sequence
  chemically treated genomic DNA (Homo sapiens) CpG-island No: 23463
agattcggcgtagttaaagttagtggaaggtagaaagacgttatagtcgtttttcgataattttttgttataaaagtggagatttatacggaggcgacggtttaggtcgttttgataggatttaacgatttttttgacgcgtttattcgttttcgttagtagggttttttagcgggttttcgatttgcgttattaggtataatggttcggttcgtttcgtaattcgaggataggtgtttaaggcgcggttcggcggacgtagggatttgttttatttattaggttcggcgtgggaggcgcggatttttcgggataaggaaaatatagttttatagggacgatagtttgagaattttgatcgggttcggtttaggttaggcggcgttaattgcgcggttcggagtcggtttttggtttttcgcgtttgtttcgtttttatcgttttttattggttcggtttcgttttagcggtaacgtttcgtttttatttcgtagttttgtttcgtttcgtttttttgcggtaacgttttttttttttcgcgatattaattagtttt

SEQ ID NO: 23464 - DNA, 557 bp, Artificial Sequence
  chemically treated genomic DNA (Homo sapiens) CpG-island No: 23464
aaaactaattaatatcgcgaaaaaaaaaaaacgttaccgcaaaaaaacgaaacgaaacaaaactacgaaataaaaacgaaacgttaccgctaaaacgaaaccgaaccaataaaaaacgataaaaacgaaacaaacgcgaaaaaccaaaaaccgactccgaaccgcgcaattaacgccgcctaacctaaaccgaacccgatcaaaattctcaaactatcgtccctataaaactatattttccttatcccgaaaaatccgcgcctcccacgccgaacctaataaataaaacaaatccctacgtccgccgaaccgcgccttaaacacctatcctcgaattacgaaacgaaccgaaccattatacctaataacgcaaatcgaaaacccgctaaaaaaccctactaacgaaaacgaataaacgcgtcaaaaaaatcgttaaatcctatcaaaacgacctaaaccgtcgcctccgtataaatctccacttttataacaaaaaattatcgaaaaacgactataacgtctttctaccttccactaactttaactacgccgaatct

SEQ ID NO: 23465 - DNA, 655 bp, Artificial Sequence
  chemically treated genomic DNA (Homo sapiens) CpG-island No: 23465
agtgcgtttgtcggggaaatagcgtcgtagggcgcgttttttatttggggttcgtatcgttatttcgttcgattcggtttggtatatgtttttattcgggaatttattagttcggtttatgtttattcggcgtcggtttcgtcgcgcggcgtttcgtttagatgcggttcggttgtagtagcgtagatagcgtgaggggtattagtcgtttttggacgtacggagtcgggttttagtagggtttagtcggttttgcgttttgtatggttcggtcgtttcgttagtttcgttcgtcgttcggtttcgttcgtcgcgtttttatttcgttcgtttttcgtattttaaatttgttgtgttaggtcgtagtatcgtttgtcgtatttttttcgaagtcggtaagttatagagtcggcggcgtagcgtagttttagcgcgtttgacgtcgttcggttttagttcgttttgttcgcgtaacggtttcgggcggcgtcgtcgcgcggtacgttgggagttgtagtttacgtcgcgcggttttatttagtcgaggagattttcgagttcgcgaggagataggcgggttttatttcggttttttttttttgtcgatttcggtttttgttttttgttgtttttagcgttcggatgtaggaagagt

SEQ ID NO: 23466 - DNA, 655 bp, Artificial Sequence
  chemically treated genomic DNA (Homo sapiens) CpG-island No: 23466
actcttcctacatccgaacgctaaaaacaacaaaaaacaaaaaccgaaatcgacaaaaaaaaaaaaccgaaataaaacccgcctatctcctcgcgaactcgaaaatctcctcgactaaataaaaccgcgcgacgtaaactacaactcccaacgtaccgcgcgacgacgccgcccgaaaccgttacgcgaacaaaacgaactaaaaccgaacgacgtcaaacgcgctaaaactacgctacgccgccgactctataacttaccgacttcgaaaaaaatacgacaaacgatactacgacctaacacaacaaatttaaaatacgaaaaacgaacgaaataaaaacgcgacgaacgaaaccgaacgacgaacgaaactaacgaaacgaccgaaccatacaaaacgcaaaaccgactaaaccctactaaaacccgactccgtacgtccaaaaacgactaatacccctcacgctatctacgctactacaaccgaaccgcatctaaacgaaacgccgcgcgacgaaaccgacgccgaataaacataaaccgaactaataaattcccgaataaaaacatataccaaaccgaatcgaacgaaataacgatacgaaccccaaataaaaaacgcgccctacgacgctatttccccgacaaacgcact

SEQ ID NO: 23467 - DNA, 655 bp, Artificial Sequence
  chemically treated genomic DNA (Homo sapiens) CpG-island No: 23467
gttttttttatattcgggcgttggggatagtagggggtaagggtcggggtcggtagggaggaagggtcggggtgaagttcgtttgttttttcgcggattcgggggttttttcggttgggtggggtcgcgcggcgtggattataatttttagcgtgtcgcgcggcggcgtcgttcgaagtcgttgcgcgagtagggcgggttggggtcgagcggcgttaggcgcgttggggttgcgttgcgtcgtcggttttgtggtttgtcggtttcggggaaggtgcggtaggcggtgttgcggtttggtatagtaggtttggggtgcgggaggcgggcggggtaggagcgcggcgggcggggtcgggcggcgggcggggttggcggggcggtcgggttatgtagggcgtagagtcggttaaattttgttgagattcggtttcgtgcgtttaggggcggttaatgttttttacgttgtttacgttgttgtaatcgggtcgtatttggacggggcgtcgcgcggcggagtcgacgtcgggtgagtatagatcgggttggtgggttttcgggtggggatatgtgttaggtcgagtcgggcgaggtggcggtgcggattttaggtggggggcgcgttttgcggcgttattttttcgatagacgtatt

SEQ ID NO: 23468 - DNA, 655 bp, Artificial Sequence
  chemically treated genomic DNA (Homo sapiens) CpG-island No: 23468
aatacgtctatcgaaaaaataacgccgcaaaacgcgccccccacctaaaatccgcaccgccacctcgcccgactcgacctaacacatatccccacccgaaaacccaccaacccgatctatactcacccgacgtcgactccgccgcgcgacgccccgtccaaatacgacccgattacaacaacgtaaacaacgtaaaaaacattaaccgcccctaaacgcacgaaaccgaatctcaacaaaatttaaccgactctacgccctacataacccgaccgccccgccaaccccgcccgccgcccgaccccgcccgccgcgctcctaccccgcccgcctcccgcaccccaaacctactataccaaaccgcaacaccgcctaccgcaccttccccgaaaccgacaaaccacaaaaccgacgacgcaacgcaaccccaacgcgcctaacgccgctcgaccccaacccgccctactcgcgcaacgacttcgaacgacgccgccgcgcgacacgctaaaaattataatccacgccgcgcgaccccacccaaccgaaaaaacccccgaatccgcgaaaaaacaaacgaacttcaccccgacccttcctccctaccgaccccgacccttaccccctactatccccaacgcccgaatataaaaaaaac

SEQ ID NO: 23469 - DNA, 1012 bp, Artificial Sequence
  chemically treated genomic DNA (Homo sapiens) CpG-island No: 23469
gggcggttttatcgtggcggtaggggttatagagcgttatcgtcgcggagtcggcggttaatagcgttttttgtagcggggaggtggggaggtggtgcgagtatagcgggtcggcgtcgtcgtttttagttcggaggggtatttttgcggggtaagaaaaaggtcgaggttagaggagtcgggcgtttttaggttttttttcgtttgcgtttagaattcggcgttatttgtttgtcgtaggtcgttgtaggttcgggagttcgtagagtcgacggaggatagggcgtagtagagtcgttatggtagcgggcgttcgcggaggatgggcgggtacgaagaacgtcgcgattttgttaggcgacggagcgtcggaggggttaaaatttattgaaaaatcgattttgacggcgtagtttacggtttttcgaggggaaatatcgttttacgggtagaaggtatgtaggttaagtaggcgaaggaaacgtacgcgaattgtttatcgtttacgtttatcgatttaagattttcgttatgttatttcgttttagaaagtgtttgtaaaggatacgtaattacgtttatttagcgtcgggttttatttttttttttatagtcggtttttttcgaagattataaaatgcgaatttttttcggttgtggaatatggcggcgttcgtggaaaggattatatttgggggcggggtttggcggtattttcgtttaggtttagcgggtgttgtgatttttaagtatggggtttgttggtttgtcgcggttgtatgggtttttcgcggtttataagttttcggggttaaaatggaagtatttgcgggatatagtggagttataatttttgaagggtgagtgtttcgaattagatttacgttttcgttttcgtttttttggaagtttattttcgtttttggtttttattttaaaataaaattacgtgatttatttatttgggtagagcgtttttttaaacgtttgttttttgtgtttttttattttt

SEQ ID NO: 23470 - DNA, 1012 bp, Artificial Sequence
  chemically treated genomic DNA (Homo sapiens) CpG-island No: 23470
aaaaataaaaaaacacaaaaaacaaacgtttaaaaaaacgctctacccaaataaataaatcacgtaattttattttaaaataaaaaccaaaaacgaaaataaacttccaaaaaaacgaaaacgaaaacgtaaatctaattcgaaacactcacccttcaaaaattataactccactatatcccgcaaatacttccattttaaccccgaaaacttataaaccgcgaaaaacccatacaaccgcgacaaaccaacaaaccccatacttaaaaatcacaacacccgctaaacctaaacgaaaataccgccaaaccccgcccccaaatataatcctttccacgaacgccgccatattccacaaccgaaaaaaattcgcattttataatcttcgaaaaaaaccgactataaaaaaaaaaataaaacccgacgctaaataaacgtaattacgtatcctttacaaacactttctaaaacgaaataacataacgaaaatcttaaatcgataaacgtaaacgataaacaattcgcgtacgtttccttcgcctacttaacctacataccttctacccgtaaaacgatatttcccctcgaaaaaccgtaaactacgccgtcaaaatcgatttttcaataaattttaacccctccgacgctccgtcgcctaacaaaatcgcgacgttcttcgtacccgcccatcctccgcgaacgcccgctaccataacgactctactacgccctatcctccgtcgactctacgaactcccgaacctacaacgacctacgacaaacaaataacgccgaattctaaacgcaaacgaaaaaaaacctaaaaacgcccgactcctctaacctcgacctttttcttaccccgcaaaaatacccctccgaactaaaaacgacgacgccgacccgctatactcgcaccacctccccacctccccgctacaaaaaacgctattaaccgccgactccgcgacgataacgctctataacccctaccgccacgataaaaccgccc

SEQ ID NO: 23471 - DNA, 1012 bp, Artificial Sequence
  chemically treated genomic DNA (Homo sapiens) CpG-island No: 23471
aggagtaagaaagtatagagaataggcgtttgggaaagcgttttgtttaggtgaataggttacgtgattttgttttggggtaaggattagaagcggagatggatttttaagagaacgagagcgggaacgtgggtttggttcgaggtatttattttttagaagttgtagttttattgtatttcgtaggtgtttttattttagtttcgggggtttatagatcgcgaaaagtttatgtagtcgcgataagttagtagattttatatttgaagattatagtattcgttggatttggacggaagtatcgttaggtttcgtttttaaatgtggttttttttacgggcgtcgttatgttttatagtcggaagaggttcgtattttatagttttcggggaaaatcggttgtggagaaggaaatagggttcggcgttgagtgagcgtggttgcgtgttttttgtagatattttttggggcgaggtgatatggcgagagttttggatcggtggacgtagacggtagatagttcgcgtgcgtttttttcgtttatttggtttatatgttttttgttcgtgaagcgatgttttttttcgaaaggtcgtaggttacgtcgttagaatcggttttttagtgagttttgattttttcgacgtttcgtcgtttgatagaatcgcggcgtttttcgtattcgtttatttttcgcggacgttcgttgttatggcgattttgttgcgttttgtttttcgtcggttttgcgggttttcgggtttatagcggtttgcggtaggtaagtggcgtcgggttttgggcgtaggcgggaaggagtttgagggcgttcggtttttttgatttcggttttttttttgtttcgtagaaatgttttttcgggttaggagcgacggcgtcggttcgttatattcgtattatttttttattttttcgttgtagaaagcgttgttggtcgtcggtttcgcggcgatggcgttttataatttttatcgttacggtaaggtcgttt

SEQ ID NO: 23472 - DNA, 1012 bp, Artificial Sequence
  chemically treated genomic DNA (Homo sapiens) CpG-island No: 23472
aaacgaccttaccgtaacgataaaaattataaaacgccatcgccgcgaaaccgacgaccaacaacgctttctacaacgaaaaaataaaaaaataatacgaatataacgaaccgacgccgtcgctcctaacccgaaaaaacatttctacgaaacaaaaaaaaaaccgaaatcaaaaaaaccgaacgccctcaaactccttcccgcctacgcccaaaacccgacgccacttacctaccgcaaaccgctataaacccgaaaacccgcaaaaccgacgaaaaacaaaacgcaacaaaatcgccataacaacgaacgtccgcgaaaaataaacgaatacgaaaaacgccgcgattctatcaaacgacgaaacgtcgaaaaaatcaaaactcactaaaaaaccgattctaacgacgtaacctacgacctttcgaaaaaaaacatcgcttcacgaacaaaaaacatataaaccaaataaacgaaaaaaacgcacgcgaactatctaccgtctacgtccaccgatccaaaactctcgccatatcacctcgccccaaaaaatatctacaaaaaacacgcaaccacgctcactcaacgccgaaccctatttccttctccacaaccgattttccccgaaaactataaaatacgaacctcttccgactataaaacataacgacgcccgtaaaaaaaaccacatttaaaaacgaaacctaacgatacttccgtccaaatccaacgaatactataatcttcaaatataaaatctactaacttatcgcgactacataaacttttcgcgatctataaacccccgaaactaaaataaaaacacctacgaaatacaataaaactacaacttctaaaaaataaatacctcgaaccaaacccacgttcccgctctcgttctcttaaaaatccatctccgcttctaatccttaccccaaaacaaaatcacgtaacctattcacctaaacaaaacgctttcccaaacgcctattctctatactttcttactcct

SEQ ID NO: 23473 - DNA, 529 bp, Artificial Sequence
  chemically treated genomic DNA (Homo sapiens) CpG-island No: 23473
cgcgggagtcggagagcgattttttaggtgtatcgggttaggaattttgattcggagtgtgaattggcgtatagaaagttgcgcgcgtatttaaggaaagtcggtttcgtttttttttcgaggtgggcggggatagcggttgcgtgcgtagtttttgttgtgacgttataggtttttttggttacgtcgttgtatagttacgttttttttcgttttatattttttattgattaatgggttttgatttttgaggttacgtttttattttgcgttttagtatcgttttggttacgttttttttggtttcgtcgtatagttgcgcggtggttgattgattttcgtagtggttgtcgggatcgcgttgatgtggttttaatttcgttttttttttcgtttcgcgatgtcggaagaaattcgatagagtaaattggtcgtagcgaagaaaaaggtaaagtgtatcgggtcgcggtttttcgatttagttttagttttatttcgatggtaggattatggttagagtttttgttat

SEQ ID NO: 23474 - DNA, 529 bp, Artificial Sequence
  chemically treated genomic DNA (Homo sapiens) CpG-island No: 23474
ataacaaaaactctaaccataatcctaccatcgaaataaaactaaaactaaatcgaaaaaccgcgacccgatacactttacctttttcttcgctacgaccaatttactctatcgaatttcttccgacatcgcgaaacgaaaaaaaaaacgaaattaaaaccacatcaacgcgatcccgacaaccactacgaaaatcaatcaaccaccgcgcaactatacgacgaaaccaaaaaaaacgtaaccaaaacgatactaaaacgcaaaataaaaacgtaacctcaaaaatcaaaacccattaatcaataaaaaatataaaacgaaaaaaaacgtaactatacaacgacgtaaccaaaaaaacctataacgtcacaacaaaaactacgcacgcaaccgctatccccgcccacctcgaaaaaaaaacgaaaccgactttccttaaatacgcgcgcaactttctatacgccaattcacactccgaatcaaaattcctaacccgatacacctaaaaaatcgctctccgactcccgcg

SEQ ID NO: 23475 - DNA, 529 bp, Artificial Sequence
  chemically treated genomic DNA (Homo sapiens) CpG-island No: 23475
gtggtagagattttggttatggttttgttatcggagtggggttggggttgggtcggggggtcgcgattcggtgtattttattttttttttcgttgcggttaatttgttttgtcgggtttttttcgatatcgcggggcggggagggaggcggggttggggttatattagcgcgatttcggtaattattgcggaagttagttagttatcgcgtagttgtgcgacggagttagaggaggcgtaattagggcgatattggagcgtagaatgggggcgtggttttaaagattaaagtttattggttaatgagaaatatgaagcggaagggggcgtggttatgtagcggcgtggttagagggatttgtggcgttataataaaagttgcgtacgtaatcgttgttttcgtttatttcgggagaggggcggggtcggttttttttgggtgcgcgcgtagttttttgtgcgttagtttatatttcgggttagagtttttggttcggtgtatttgagaggtcgtttttcgattttcgcg

SEQ ID NO: 23476 - DNA, 529 bp, Artificial Sequence
  chemically treated genomic DNA (Homo sapiens) CpG-island No: 23476
cgcgaaaatcgaaaaacgacctctcaaatacaccgaaccaaaaactctaacccgaaatataaactaacgcacaaaaaactacgcgcgcacccaaaaaaaaccgaccccgcccctctcccgaaataaacgaaaacaacgattacgtacgcaacttttattataacgccacaaatccctctaaccacgccgctacataaccacgcccccttccgcttcatatttctcattaaccaataaactttaatctttaaaaccacgcccccattctacgctccaatatcgccctaattacgcctcctctaactccgtcgcacaactacgcgataactaactaacttccgcaataattaccgaaatcgcgctaatataaccccaaccccgcctccctccccgccccgcgatatcgaaaaaaacccgacaaaacaaattaaccgcaacgaaaaaaaaaataaaatacaccgaatcgcgaccccccgacccaaccccaaccccactccgataacaaaaccataaccaaaatctctaccac

SEQ ID NO: 23477 - DNA, 793 bp, Artificial Sequence
  chemically treated genomic DNA (Homo sapiens) CpG-island No: 23477
tcgcgtatttagatttttaattttcgggatacgttttgcgcggttattttgttattttattttaggtcgttttttttaatttcggtcgagtttgggcggcgagaggcgttgggtggggttttttttatcgcggttttagttaaggcgggaggtttcgggggtttttttcgtcgtttcggatttcgagggggcgcgaattaggggttttttcgttcgtagttcgtcgttttatcgggacggttttttcgggttcgagttgtcggtagtcgttttgtattattcggttcggtcgaggtttttaggaaaatcgcgtttcgtttgtaattagtttagtttttaatttttcgcgtcgtttattttcgtatttatagttatagtgcggtcgggttacgtttagttcgttaatttcgtttgcggcggatatggcggacgagttcgagtttttgttgaggaagtcgtgaaattttggaggcgcggacggcggtagttatagtttttgttaagtgcgcgggtttgtcggggttttcgatgtttcgtttcgtgtcgttagttttatttcgtaggtttcgttttagcggtatcgttttagcgatatcgttttgagcggtcggaaagaggcggggttagagttatcgtgtttcgtttttaatttcgtttttttagttcggtttcgttttgtatttcgttatggttttcgtaggcggaaggaagaaggtagagtttattttttaatcgggtttacgttgagtttgttttgtcgggaatgttcgtttaggtttatagtttcgttttt

SEQ ID NO: 23478 - DNA, 793 bp, Artificial Sequence
  chemically treated genomic DNA (Homo sapiens) CpG-island No: 23478
aaaaacgaaactataaacctaaacgaacattcccgacaaaacaaactcaacgtaaacccgattaaaaaataaactctaccttcttccttccgcctacgaaaaccataacgaaatacaaaacgaaaccgaactaaaaaaacgaaattaaaaacgaaacacgataactctaaccccgcctctttccgaccgctcaaaacgatatcgctaaaacgataccgctaaaacgaaacctacgaaataaaactaacgacacgaaacgaaacatcgaaaaccccgacaaacccgcgcacttaacaaaaactataactaccgccgtccgcgcctccaaaatttcacgacttcctcaacaaaaactcgaactcgtccgccatatccgccgcaaacgaaattaacgaactaaacgtaacccgaccgcactataactataaatacgaaaataaacgacgcgaaaaattaaaaactaaactaattacaaacgaaacgcgattttcctaaaaacctcgaccgaaccgaataatacaaaacgactaccgacaactcgaacccgaaaaaaccgtcccgataaaacgacgaactacgaacgaaaaaacccctaattcgcgccccctcgaaatccgaaacgacgaaaaaaacccccgaaacctcccgccttaactaaaaccgcgataaaaaaaaccccacccaacgcctctcgccgcccaaactcgaccgaaattaaaaaaaacgacctaaaataaaataacaaaataaccgcgcaaaacgtatcccgaaaattaaaaatctaaatacgcga

SEQ ID NO: 23479 - DNA, 793 bp, Artificial Sequence
  chemically treated genomic DNA (Homo sapiens) CpG-island No: 23479
gggggcggggttataaatttgggcgggtattttcggtagggtaagtttagcgtgagttcgattggaggatgggttttattttttttttttcgtttacggagattatagcgggatgtagggcggggtcgggttgagggggcggagttaggggcggggtacggtgattttggtttcgttttttttcggtcgtttagggcggtgtcgttggggcggtgtcgttggggcggggtttgcggggtggggttgacggtacggggcggggtatcggggatttcggtaagttcgcgtatttggtaggagttgtagttatcgtcgttcgcgtttttaaggttttacggtttttttagtagagattcgggttcgttcgttatgttcgtcgtagacgaggttgacgggttgggcgtggttcggtcgtattatggttgtgagtgcgggggtgggcggcgcggggggttgggggttgggttaattgtagacgaggcgcgatttttttgggggtttcggtcgggtcgggtggtgtagggcggttgtcggtagttcggattcggaagagtcgtttcggtggggcggcgggttgcgggcggggaggtttttggttcgcgttttttcggggttcgaggcggcggagaggattttcgaggtttttcgttttagttggggtcgcggtagggggagttttatttagcgtttttcgtcgtttaggttcggtcgagattggggaagacggtttagagtgaggtggtaggatgatcgcgtagggcgtgtttcggggattgggggtttgggtacgcgg

SEQ ID NO: 23480 - DNA, 793 bp, Artificial Sequence
  chemically treated genomic DNA (Homo sapiens) CpG-island No: 23480
ccgcgtacccaaacccccaatccccgaaacacgccctacgcgatcatcctaccacctcactctaaaccgtcttccccaatctcgaccgaacctaaacgacgaaaaacgctaaataaaactccccctaccgcgaccccaactaaaacgaaaaacctcgaaaatcctctccgccgcctcgaaccccgaaaaaacgcgaaccaaaaacctccccgcccgcaacccgccgccccaccgaaacgactcttccgaatccgaactaccgacaaccgccctacaccacccgacccgaccgaaacccccaaaaaaatcgcgcctcgtctacaattaacccaacccccaaccccccgcgccgcccacccccgcactcacaaccataatacgaccgaaccacgcccaacccgtcaacctcgtctacgacgaacataacgaacgaacccgaatctctactaaaaaaaccgtaaaaccttaaaaacgcgaacgacgataactacaactcctaccaaatacgcgaacttaccgaaatccccgataccccgccccgtaccgtcaaccccaccccgcaaaccccgccccaacgacaccgccccaacgacaccgccctaaacgaccgaaaaaaaacgaaaccaaaatcaccgtaccccgcccctaactccgccccctcaacccgaccccgccctacatcccgctataatctccgtaaacgaaaaaaaaaaaataaaacccatcctccaatcgaactcacgctaaacttaccctaccgaaaatacccgcccaaatttataaccccgccccc

SEQ ID NO: 23481 - DNA, 503 bp, Artificial Sequence
  chemically treated genomic DNA (Homo sapiens) CpG-island No: 23481
ttgttacgatgtcgtttgagacggaaagggtattgggtcggcgtttggaattggtttatacgttttaggttatttgttacgatgtcgtttgagacggaaagggtattgggtcggcgtttggaattggtttttacgttttaggttatttgttacgatgtcgtttgagacggaaagggtattgggtcggcgtttggaattggtttatacgttttaggttatttgttacgatgtcgtttgagacggaaagggtattgggtcggcgtttggaattggtttatacgttttaggttatttgttacgatgtcgtttgagacggaaagggtattgggtcggcgtttggaattggtttttacgttttaggttatttgttacgatgtcgtttgagacggaaagggtattgggtcggcgtttggaattggtttttacgttttaggttatttgttacgatgtcgtttgagagggaaagggtattgggtcggcgtttggaattggtttttacgttt

SEQ ID NO: 23482 - DNA, 503 bp, Artificial Sequence
  chemically treated genomic DNA (Homo sapiens) CpG-island No: 23482
aaacgtaaaaaccaattccaaacgccgacccaataccctttccctctcaaacgacatcgtaacaaataacctaaaacgtaaaaaccaattccaaacgccgacccaataccctttccgtctcaaacgacatcgtaacaaataacctaaaacgtaaaaaccaattccaaacgccgacccaataccctttccgtctcaaacgacatcgtaacaaataacctaaaacgtataaaccaattccaaacgccgacccaataccctttccgtctcaaacgacatcgtaacaaataacctaaaacgtataaaccaattccaaacgccgacccaataccctttccgtctcaaacgacatcgtaacaaataacctaaaacgtaaaaaccaattccaaacgccgacccaataccctttccgtctcaaacgacatcgtaacaaataacctaaaacgtataaaccaattccaaacgccgacccaataccctttccgtctcaaacgacatcgtaacaa

SEQ ID NO: 23483 - DNA, 503 bp, Artificial Sequence
  chemically treated genomic DNA (Homo sapiens) CpG-island No: 23483
aggcgtgggggttagttttagacgtcggtttagtgtttttttttttttaaacggtatcgtgatagatgatttgaggcgtgggggttagttttagacgtcggtttagtgtttttttcgttttaaacggtatcgtgatagatgatttgaggcgtgggggttagttttagacgtcggtttagtgtttttttcgttttaaacggtatcgtgatagatgatttgaggcgtgtgggttagttttagacgtcggtttagtgtttttttcgttttaaacggtatcgtgatagatgatttgaggcgtgtgggttagttttagacgtcggtttagtgtttttttcgttttaaacggtatcgtgatagatgatttgaggcgtgggggttagttttagacgtcggtttagtgtttttttcgttttaaacggtatcgtgatagatgatttgaggcgtgtgggttagttttagacgtcggtttagtgtttttttcgttttaaacggtatcgtgatag

SEQ ID NO: 23484 - DNA, 503 bp, Artificial Sequence
  chemically treated genomic DNA (Homo sapiens) CpG-island No: 23484
ctatcacgataccgtttaaaacgaaaaaaacactaaaccgacgtctaaaactaacccacacgcctcaaatcatctatcacgataccgtttaaaacgaaaaaaacactaaaccgacgtctaaaactaacccccacgcctcaaatcatctatcacgataccgtttaaaacgaaaaaaacactaaaccgacgtctaaaactaacccacacgcctcaaatcatctatcacgataccgtttaaaacgaaaaaaacactaaaccgacgtctaaaactaacccacacgcctcaaatcatctatcacgataccgtttaaaacgaaaaaaacactaaaccgacgtctaaaactaacccccacgcctcaaatcatctatcacgataccgtttaaaacgaaaaaaacactaaaccgacgtctaaaactaacccccacgcctcaaatcatctatcacgataccgtttaaaaaaaaaaaaacactaaaccgacgtctaaaactaacccccacgcct

SEQ ID NO: 23485 - DNA, 1451 bp, Artificial Sequence
  chemically treated genomic DNA (Homo sapiens) CpG-island No: 23485
tttcgttcgtttttgtttttagcgaggtttggggtcggggtgttcgaggtgggggatattcgggggggttaggtggttggcgcggggagtcggggttgtgaggggtgatgtttttaggcggcggcgttgcggggtgcggcgaggatatcggtggggtgagagtatcggcggggtagtagcgggggtcgtagcgtcgggtttttcggttcggggtttttttcgcgcggattaggggcgtgataggggggcgtggttggtggcgttgacgttatttcgtttataaaatgttcggggcgtcgttagttgggttttgtggagcgttgcgtagggtgcgtgcgggttcggtatcgaataaaggagtaggggcgtcgcgtatggattcgttatttatttttcggggtcgcgtagttttcgtttattgttattatgatcgttaacgtatagcgaggcggtgtagatttagttcggttttattaattgcggtaataagtatttgacggtcgaggcgttcgggtttaaggtgaacgcgttcgttagtagtttgaagaagaagtagatttggacgttggagtagttttttgacgaggcgggtagcgcggtcgtgtgtttgcgtagttatttgggtcgttatttggcggcggataaggacggtaacgtgatttgcgagcgcgaggtgttcggtttcgattgtcgtttttttatcgtggcgtacgacgacggtcgttggtcgttgtagttcgaggcgtatcggcgttatttcggcggtatcgaggatcgtttgttttgtttcgcgtagacggtgtttttcgtcgagaagtggagcgtgtatatcgttatgtatttttaggttaatatttatagcgttattcgtaagcgttacgtatttgagcgcgcggtcggtcgacgagatcgtcgtggatcgcgacgtgttttggggcgtcgattcgtttattattttcgttttttaggattagcgttatagcgtgtagatcgtcgattatcgttttttgcgttacgacggcgttggtggcgcgtttcgagtcggttattggttatacgttggagtttcgtttcggtaaggtggtttttcgcgattgcgagggtcgttatttggcgtcgtcggggtttagcggtacgtttaaggcggtaaggtattaaggtgggtaaggacgagttttttgttttggagtagattgcgtttaggtcgtgttgtaggcggttaacgagaggaacgtgttaacggcgttagggtgagtggaacgttgttttcgttttttttggttcgtgtataaagcgtattttattcgcgtttttttagttttcgtattttttttcgttcgcgggtcgttgcggttcggagtattgtttattgcgttttcgttaggtaaacgggttatttcgtttggagggggcgaggagtgagttttgtttattttcgggtgtcgttgttt

SEQ ID NO: 23486 - DNA, 1451 bp, Artificial Sequence
  chemically treated genomic DNA (Homo sapiens) CpG-island No: 23486
aaacaacgacacccgaaaataaacaaaactcactcctcgccccctccaaacgaaataacccgtttacctaacgaaaacgcaataaacaatactccgaaccgcaacgacccgcgaacgaaaaaaaatacgaaaactaaaaaaacgcgaataaaatacgctttatacacgaaccaaaaaaaacgaaaacaacgttccactcaccctaacgccgttaacacgttcctctcgttaaccgcctacaacacgacctaaacgcaatctactccaaaacaaaaaactcgtccttacccaccttaataccttaccgccttaaacgtaccgctaaaccccgacgacgccaaataacgaccctcgcaatcgcgaaaaaccaccttaccgaaacgaaactccaacgtataaccaataaccgactcgaaacgcgccaccaacgccgtcgtaacgcaaaaaacgataatcgacgatctacacgctataacgctaatcctaaaaaacgaaaataataaacgaatcgacgccccaaaacacgtcgcgatccacgacgatctcgtcgaccgaccgcgcgctcaaatacgtaacgcttacgaataacgctataaatattaacctaaaaatacataacgatatacacgctccacttctcgacgaaaaacaccgtctacgcgaaacaaaacaaacgatcctcgataccgccgaaataacgccgatacgcctcgaactacaacgaccaacgaccgtcgtcgtacgccacgataaaaaaacgacaatcgaaaccgaacacctcgcgctcgcaaatcacgttaccgtccttatccgccgccaaataacgacccaaataactacgcaaacacacgaccgcgctacccgcctcgtcaaaaaactactccaacgtccaaatctacttcttcttcaaactactaacgaacgcgttcaccttaaacccgaacgcctcgaccgtcaaatacttattaccgcaattaataaaaccgaactaaatctacaccgcctcgctatacgttaacgatcataataacaataaacgaaaactacgcgaccccgaaaaataaataacgaatccatacgcgacgcccctactcctttattcgataccgaacccgcacgcaccctacgcaacgctccacaaaacccaactaacgacgccccgaacattttataaacgaaataacgtcaacgccaccaaccacgcccccctatcacgcccctaatccgcgcgaaaaaaaccccgaaccgaaaaacccgacgctacgacccccgctactaccccgccgatactctcaccccaccgatatcctcgccgcaccccgcaacgccgccgcctaaaaacatcacccctcacaaccccgactccccgcgccaaccacctaacccccccgaatatcccccacctcgaacaccccgaccccaaacctcgctaaaaacaaaaacgaacgaaa

SEQ ID NO: 23487 - DNA, 1451 bp, Artificial Sequence
  chemically treated genomic DNA (Homo sapiens) CpG-island No: 23487
gggtagcggtattcgaggatgggtaaagtttatttttcgttttttttaggcggggtagttcgtttgtttagcgggggcgtaatgggtagtgtttcggatcgtagcggttcgcgagcgaagaaaggtgcggaggttggaggggcgcgggtggggtgcgttttgtgtacggattaggagaggcgggggtagcgttttatttattttggcgtcgttgatacgtttttttcgttggtcgtttgtagtacgatttgggcgtagtttgttttagagtaaagagttcgtttttgtttattttggtgttttgtcgttttgagcgtgtcgttgggtttcgacggcgttaggtaacggttttcgtagtcgcggaaggttattttgtcggagcggaattttagcgtgtagttagtggtcggttcggggcgcgttattagcgtcgtcgtggcgtaggaagcggtggtcggcggtttgtacgttgtagcgttggttttggaaggcgagggtgatgagcgagtcgacgttttagggtacgtcgcggtttacggcgatttcgtcggtcggtcgcgcgtttaggtgcgtagcgtttacgggtgacgttgtagatgttgatttgagggtgtatggcgatgtgtacgttttatttttcggcgggggatatcgtttgcgcgaagtaggataggcggttttcggtgtcgtcgaagtagcgtcggtgcgtttcggattgtagcgattagcgatcgtcgtcgtgcgttacgatgaggaaacggtagtcgggatcgggtatttcgcgttcgtaggttacgttgtcgtttttgttcgtcgttaggtagcggtttaggtggttgcgtaggtatacggtcgcgttgttcgtttcgttagggggttgttttagcgtttagatttgttttttttttaggttgttggcggacgcgtttattttgaattcgaacgtttcggtcgttaggtatttgttgtcgtagttgatgaggtcgaattggatttgtatcgtttcgttgtgcgttggcgattatggtggtagtagacgagagttgcgcggtttcgggaggtgggtggcgggtttatgcgcggcgtttttgtttttttgttcggtgtcgggttcgtacgtattttacgtagcgttttataaagtttagttagcggcgtttcggatattttataggcgaggtgacgttagcgttattagttacgtttttttgttacgtttttggttcgcgcgggaggagtttcgggtcgagggattcggcgttgcggttttcgttgttgtttcgtcggtgtttttattttatcggtgttttcgtcgtatttcgtagcgtcgtcgtttgaggatattattttttataatttcggtttttcgcgttagttatttaattttttcggatgttttttatttcggatatttcgattttaagtttcgttaggagtaaggacgagcgagg

SEQ ID NO: 23488 - DNA, 1451 bp, Artificial Sequence
  chemically treated genomic DNA (Homo sapiens) CpG-island No: 23488
cctcgctcgtccttactcctaacgaaacttaaaatcgaaatatccgaaataaaaaacatccgaaaaaattaaataactaacgcgaaaaaccgaaattataaaaaataatatcctcaaacgacgacgctacgaaatacgacgaaaacaccgataaaataaaaacaccgacgaaacaacaacgaaaaccgcaacgccgaatccctcgacccgaaactcctcccgcgcgaaccaaaaacgtaacaaaaaaacgtaactaataacgctaacgtcacctcgcctataaaatatccgaaacgccgctaactaaactttataaaacgctacgtaaaatacgtacgaacccgacaccgaacaaaaaaacaaaaacgccgcgcataaacccgccacccacctcccgaaaccgcgcaactctcgtctactaccaccataatcgccaacgcacaacgaaacgatacaaatccaattcgacctcatcaactacgacaacaaatacctaacgaccgaaacgttcgaattcaaaataaacgcgtccgccaacaacctaaaaaaaaaacaaatctaaacgctaaaacaaccccctaacgaaacgaacaacgcgaccgtatacctacgcaaccacctaaaccgctacctaacgacgaacaaaaacgacaacgtaacctacgaacgcgaaatacccgatcccgactaccgtttcctcatcgtaacgcacgacgacgatcgctaatcgctacaatccgaaacgcaccgacgctacttcgacgacaccgaaaaccgcctatcctacttcgcgcaaacgatatcccccgccgaaaaataaaacgtacacatcgccatacaccctcaaatcaacatctacaacgtcacccgtaaacgctacgcacctaaacgcgcgaccgaccgacgaaatcgccgtaaaccgcgacgtaccctaaaacgtcgactcgctcatcaccctcgccttccaaaaccaacgctacaacgtacaaaccgccgaccaccgcttcctacgccacgacgacgctaataacgcgccccgaaccgaccactaactacacgctaaaattccgctccgacaaaataaccttccgcgactacgaaaaccgttacctaacgccgtcgaaacccaacgacacgctcaaaacgacaaaacaccaaaataaacaaaaacgaactctttactctaaaacaaactacgcccaaatcgtactacaaacgaccaacgaaaaaaacgtatcaacgacgccaaaataaataaaacgctacccccgcctctcctaatccgtacacaaaacgcaccccacccgcgcccctccaacctccgcacctttcttcgctcgcgaaccgctacgatccgaaacactacccattacgcccccgctaaacaaacgaactaccccgcctaaaaaaaacgaaaaataaactttacccatcctcgaataccgctaccc

SEQ ID NO: 23489 - DNA, 1207 bp, Artificial Sequence
  chemically treated genomic DNA (Homo sapiens) CpG-island No: 23489
tcgttcgcgaagtcggttttgtatatgtcggagtcgttgtcgacgacgagcgcggcgatattattatttatggtgagttgcgagaatagtcgggcgcgttgtgagtcgaggtcgttttcgttttggttattttcggcgcgtcgagtttttaggtcgttaggggcgtcggcgcgcgtttagattggggataaaggaagtcgggtcggtcgcgttattattataaaaggtaaatattggtcggaggcgttttcgcggcgcgcggtaggaagttaggttttaatttttttttaatcgggcgttagtttcgtttcgttcggtttaaatagcgtcgggttagggcgcgcgtacgtagcggttatattttcgggcggttagcggttcgggtaggaagtgcgtaagcgtacgggagtcgcggcgattttatttttttcggtcgagtcgttttcgttttagtttaggtcgcggtatttcgggttttagaacgtacgcgtagttagcgttttgagttttaagcggtacgcggtaattagcgttaatttttagcgcgtacgtagttagcgtttaaaggattagcggtacgcgtaatggcgttttagttttatcgggtttggcggggttcgtcgcgtttattttgcgatttttattggtaagagttcggtttagataaagatttcgtcggttgttttcgtttcgagagcggtattttcggagcgcgtttttcgacgcggtttcgcgttttcgaattggcgtggggtgttttttattttcggaggtttagggtttttttcgcgttttttacggcggttcggttttttttttatgcgtttttcgttgcggtttagacggcggttttgtacgggcgaaggggtcggttcgtgcgtcgggtcgtgagtcgtttgtttcggtcggttggtcgggttttattggcggcgggtgtggacgggcggcggatcggtaaaagcgaggttttgtgttcgcggggcgaatcggtttcggcgggtgtggcgcgttcgttagtgtgttattatagtggcgtcgcgcggtcgcgtcgagttataaaaggtaattttcggaaggcgtacgttgattggtttcgcgtcgtttatttatcggtttcggtatagtgtagtatttttttatttttttttttttttttttgcgaaaaaaaaaaagagcgagagcgagattgaggaagaggaggagggag

SEQ ID NO: 23490 - DNA, 1207 bp, Artificial Sequence
  chemically treated genomic DNA (Homo sapiens) CpG-island No: 23490
ctccctcctcctcttcctcaatctcgctctcgctctttttttttttcgcaaaaaaaaaaaaaaaaaaataaaaaaatactacactataccgaaaccgataaataaacgacgcgaaaccaatcaacgtacgccttccgaaaattaccttttataactcgacgcgaccgcgcgacgccactataataacacactaacgaacgcgccacacccgccgaaaccgattcgccccgcgaacacaaaacctcgcttttaccgatccgccgcccgtccacacccgccgccaataaaacccgaccaaccgaccgaaacaaacgactcacgacccgacgcacgaaccgaccccttcgcccgtacaaaaccgccgtctaaaccgcaacgaaaaacgcataaaaaaaaaaccgaaccgccgtaaaaaacgcgaaaaaaaccctaaacctccgaaaataaaaaacaccccacgccaattcgaaaacgcgaaaccgcgtcgaaaaacgcgctccgaaaataccgctctcgaaacgaaaacaaccgacgaaatctttatctaaaccgaactcttaccaataaaaatcgcaaaataaacgcgacgaaccccgccaaacccgataaaactaaaacgccattacgcgtaccgctaatcctttaaacgctaactacgtacgcgctaaaaattaacgctaattaccgcgtaccgcttaaaactcaaaacgctaactacgcgtacgttctaaaacccgaaataccgcgacctaaactaaaacgaaaacgactcgaccgaaaaaaataaaatcgccgcgactcccgtacgcttacgcacttcctacccgaaccgctaaccgcccgaaaatataaccgctacgtacgcgcgccctaacccgacgctatttaaaccgaacgaaacgaaactaacgcccgattaaaaaaaaattaaaacctaacttcctaccgcgcgccgcgaaaacgcctccgaccaatatttaccttttataataataacgcgaccgacccgacttcctttatccccaatctaaacgcgcgccgacgcccctaacgacctaaaaactcgacgcgccgaaaataaccaaaacgaaaacgacctcgactcacaacgcgcccgactattctcgcaactcaccataaataataatatcgccgcgctcgtcgtcgacaacgactccgacatatacaaaaccgacttcgcgaacga

SEQ ID NO: 23491 - DNA, 1207 bp, Artificial Sequence
  chemically treated genomic DNA (Homo sapiens) CpG-island No: 23491
tttttttttttttttttttaatttcgttttcgttttttttttttttcgtaaaaggaggggagagggggtaaaaaaatgttgtattgtgtcgaagtcggtgagtgagcggcgcggggttaattagcgtgcgtttttcgaaagttgttttttatggttcgacgcggtcgcgcggcgttattataataatatattagcggacgcgttatattcgtcgagatcggttcgtttcgcgagtatagagtttcgtttttgtcgattcgtcgttcgtttatattcgtcgttagtaaagttcggttagtcgatcggggtaggcggtttacggttcggcgtacgggtcggttttttcgttcgtgtagagtcgtcgtttgggtcgtagcggggggcgtatggggggggaatcggatcgtcgtggggggcgcgggagaagttttgggttttcggagatgggggatattttacgttagttcggaggcgcgaggtcgcgtcgggaggcgcgtttcgggggtgtcgttttcggggcgggggtaatcggcggggtttttgtttgagtcgggtttttgttaatggggatcgtagggtgggcgcggcggatttcgttaggttcggtggggttggggcgttattgcgcgtgtcgttggttttttgggcgttaattgcgtgcgcgttgggaattggcgttaattgtcgcgtgtcgtttgggatttaaggcgttaattgcgcgtgcgttttggggttcggggtgtcgcggtttgggttggggcgaaggcggttcggtcggaaggggtggggtcgtcgcggttttcgtgcgtttgcgtattttttgttcgagtcgttggtcgttcgagggtgtggtcgttgcgtgcgcgcgttttgattcggcgttgtttgaatcgggcggagcggggttggcgttcggttgggagggggttggggtttggttttttgtcgcgcgtcgcggggacgttttcgattagtgtttgttttttatggtaataacgcggtcggttcggttttttttgtttttaatttgggcgcgcgtcggcgtttttggcggtttaaggattcggcgcgtcggaagtggttagggcgggggcgatttcggtttatagcgcgttcggttattttcgtagtttattatggatgatgatatcgtcgcgttcgtcgtcgataacggtttcggtatgtgtaaggtcggtttcgcgggcga

SEQ ID NO: 23492 - DNA, 1207 bp, Artificial Sequence
  chemically treated genomic DNA (Homo sapiens) CpG-island No: 23492
tcgcccgcgaaaccgaccttacacataccgaaaccgttatcgacgacgaacgcgacgatatcatcatccataataaactacgaaaataaccgaacgcgctataaaccgaaatcgcccccgccctaaccacttccgacgcgccgaatccttaaaccgccaaaaacgccgacgcgcgcccaaattaaaaacaaaaaaaaccgaaccgaccgcgttattaccataaaaaacaaacactaatcgaaaacgtccccgcgacgcgcgacaaaaaaccaaaccccaaccccctcccaaccgaacgccaaccccgctccgcccgattcaaacaacgccgaatcaaaacgcgcgcacgcaacgaccacaccctcgaacgaccaacgactcgaacaaaaaatacgcaaacgcacgaaaaccgcgacgaccccaccccttccgaccgaaccgccttcgccccaacccaaaccgcgacaccccgaaccccaaaacgcacgcgcaattaacgccttaaatcccaaacgacacgcgacaattaacgccaattcccaacgcgcacgcaattaacgcccaaaaaaccaacgacacgcgcaataacgccccaaccccaccgaacctaacgaaatccgccgcgcccaccctacgatccccattaacaaaaacccgactcaaacaaaaaccccgccgattacccccgccccgaaaacgacacccccgaaacgcgcctcccgacgcgacctcgcgcctccgaactaacgtaaaatatcccccatctccgaaaacccaaaacttctcccgcgccccccacgacgatccgattccccccccatacgccccccgctacgacccaaacgacgactctacacgaacgaaaaaaccgacccgtacgccgaaccgtaaaccgcctaccccgatcgactaaccgaactttactaacgacgaatataaacgaacgacgaatcgacaaaaacgaaactctatactcgcgaaacgaaccgatctcgacgaatataacgcgtccgctaatatattattataataacgccgcgcgaccgcgtcgaaccataaaaaacaactttcgaaaaacgcacgctaattaaccccgcgccgctcactcaccgacttcgacacaatacaacatttttttaccccctctcccctccttttacgaaaaaaaaaaaaaacgaaaacgaaattaaaaaaaaaaaaaaaaaaa

SEQ ID NO: 23493 - DNA, 590 bp, Artificial Sequence
  chemically treated genomic DNA (Homo sapiens) CpG-island No: 23493
ttttcggtcgtttagtttttaatttcgtggttttagtcgggttacgtacgttgcgggttttaatttttttaatcgtaaaatggggatagagcgcgggattcgcggggatcggcggggggtgttatgagttcgattcggagtggggattggggttagggtcgtggtttacgggttcggcgtgggggtcgcggtaggggggttgggttgtattttcgggtcggcgagggttcgtagtgagggaggggaatacggtgggcgggggcggttcgtggatttaacgtttttttttcgggcgtttttaaatttcgttttttatggagaggaattcgggttaagtggtcgggtcggtcgaggggcggggtgggggtcggtgaggggcgggttgggggtcggtcgggttcgcgttggattcgtacggggtttggtttatttttcggtagcgtcgcggttttgggacgcgggaggttcgcgagttgggtttacgtgagtcgcgcgggtttgggagttttcgataataattatttatttagttcgggtagagtcggttttcgtattttaagttgagattttagttttggtttcgggttcga

SEQ ID NO: 23494 - DNA, 590 bp, Artificial Sequence
  chemically treated genomic DNA (Homo sapiens) CpG-island No: 23494
tcgaacccgaaaccaaaactaaaatctcaacttaaaatacgaaaaccgactctacccgaactaaataaataattattatcgaaaactcccaaacccgcgcgactcacgtaaacccaactcgcgaacctcccgcgtcccaaaaccgcgacgctaccgaaaaataaaccaaaccccgtacgaatccaacgcgaacccgaccgacccccaacccgcccctcaccgacccccaccccgcccctcgaccgacccgaccacttaacccgaattcctctccataaaaaacgaaatttaaaaacgcccgaaaaaaaaacgttaaatccacgaaccgcccccgcccaccgtattcccctccctcactacgaaccctcgccgacccgaaaatacaacccaacccccctaccgcgacccccacgccgaacccgtaaaccacgaccctaaccccaatccccactccgaatcgaactcataacaccccccgccgatccccgcgaatcccgcgctctatccccattttacgattaaaaaaattaaaacccgcaacgtacgtaacccgactaaaaccacgaaattaaaaactaaacgaccgaaaa

SEQ ID NO: 23495 - DNA, 590 bp, Artificial Sequence
  chemically treated genomic DNA (Homo sapiens) CpG-island No: 23495
tcgaattcggggttagggttagagttttagtttggggtgcgggggtcgattttgttcgggttgggtggatagttgttatcgggagtttttaggttcgcgcggtttacgtgggtttagttcgcggatttttcgcgttttaggatcgcgacgttatcgggagataagttaggtttcgtgcgagtttagcgcggattcggtcggtttttagttcgttttttatcggtttttatttcgtttttcggtcggttcggttatttggttcgagtttttttttataaaaggcgaggtttgggagcgttcggggagggggcgttgggtttacgggtcgttttcgtttatcgtgttttttttttttattgcgagttttcgtcggttcgggggtgtagtttagtttttttgtcgcgatttttacgtcgggttcgtagattacgattttgattttagtttttatttcggatcgggtttatagtatttttcgtcggttttcgcgagtttcgcgttttgtttttattttgcgattgaagaaattgaggttcgtagcgtgcgtagttcggttggggttacggggttggggattgaacggtcggaaa

SEQ ID NO: 23496 - DNA, 590 bp, Artificial Sequence
  chemically treated genomic DNA (Homo sapiens) CpG-island No: 23496
tttccgaccgttcaatccccaaccccgtaaccccaaccgaactacgcacgctacgaacctcaatttcttcaatcgcaaaataaaaacaaaacgcgaaactcgcgaaaaccgacgaaaaatactataaacccgatccgaaataaaaactaaaatcaaaatcgtaatctacgaacccgacgtaaaaatcgcgacaaaaaaactaaactacacccccgaaccgacgaaaactcgcaataaaaaaaaaaaacacgataaacgaaaacgacccgtaaacccaacgccccctccccgaacgctcccaaacctcgccttttataaaaaaaaactcgaaccaaataaccgaaccgaccgaaaaacgaaataaaaaccgataaaaaacgaactaaaaaccgaccgaatccgcgctaaactcgcacgaaacctaacttatctcccgataacgtcgcgatcctaaaacgcgaaaaatccgcgaactaaacccacgtaaaccgcgcgaacctaaaaactcccgataacaactatccacccaacccgaacaaaatcgacccccgcaccccaaactaaaactctaaccctaaccccgaattcga

SEQ ID NO: 23497 - DNA, 961 bp, Artificial Sequence
  chemically treated genomic DNA (Homo sapiens) CpG-island No: 23497
acgaattttaaaaattttcgaagaaaataggatttgcgaatataggtcgtagatatcgggaattaggggtttttagaatcgcgtcggtaggtcgggtattttggtcggcgtgttaggcggttggagttagggaacgtagagttttagtacgttgttttttgttttttcggagtaggcggtaaatatagtttttagtcgtttcggggcgcgcggtaggaatgaaacggcgtcgcggtagaaaggggcgagtacgggatgtacgaaagtaaaaagtttgtaatttagcggttgttttttatacgttttgtttaagttgtttttgtcgttattatttttaggttcgcgggagttcggttttataatagttttacgtcgcgtatttttagcgtaaaagtttaattcggaggcggggaaacgtcgtagttttcgattggtttttacgggtggcgtcgcgagtagaggcggtagcgggtcggtttttagttttgggtataaagagcgtttgcggttggaaggtagtagtcgtagagtagagaaagggttttttaattttgtttttagcgcggcggagaatttgtaggtaggttttttcgggcgtcggttatatatacgtaatttttaataaaaggaagttgcggtcgcgtttcgtacggtaagagaaggcgttcggtgtaaatttttgagtttttcgttttcgtttttcgcgtaacgtcggtataaaagttattttaaattcgtacggagtttgtagtttcgtttacgtttaatttttttttgttgtttttattttcgaagaatttcggattcgcgttttttattattagtagttggggttttttcgcgtaggtgagcgaggtagggcgtcggagagttcgagggttatttggagttttttcggaggttggaacgtacgggtattgagggttcgtagtttttttttcggatgtattttggcgggtat

SEQ ID NO: 23498 - DNA, 961 bp, Artificial Sequence
  chemically treated genomic DNA (Homo sapiens) CpG-island No: 23498
atacccgccaaaatacatccgaaaaaaaaactacgaaccctcaatacccgtacgttccaacctccgaaaaaactccaaataaccctcgaactctccgacgccctacctcgctcacctacgcgaaaaaaccccaactactaataataaaaaacgcgaatccgaaattcttcgaaaataaaaacaacaaaaaaaaattaaacgtaaacgaaactacaaactccgtacgaatttaaaataacttttataccgacgttacgcgaaaaacgaaaacgaaaaactcaaaaatttacaccgaacgccttctcttaccgtacgaaacgcgaccgcaacttccttttattaaaaattacgtatatataaccgacgcccgaaaaaacctacctacaaattctccgccgcgctaaaaacaaaattaaaaaaccctttctctactctacgactactaccttccaaccgcaaacgctctttatacccaaaactaaaaaccgacccgctaccgcctctactcgcgacgccacccgtaaaaaccaatcgaaaactacgacgtttccccgcctccgaattaaacttttacgctaaaaatacgcgacgtaaaactattataaaaccgaactcccgcgaacctaaaaataataacgacaaaaacaacttaaacaaaacgtataaaaaacaaccgctaaattacaaactttttactttcgtacatcccgtactcgcccctttctaccgcgacgccgtttcattcctaccgcgcgccccgaaacgactaaaaactatatttaccgcctactccgaaaaaacaaaaaacaacgtactaaaactctacgttccctaactccaaccgcctaacacgccgaccaaaatacccgacctaccgacgcgattctaaaaacccctaattcccgatatctacgacctatattcgcaaatcctattttcttcgaaaatttttaaaattcgt

SEQ ID NO: 23499 - DNA, 961 bp, Artificial Sequence
  chemically treated genomic DNA (Homo sapiens) CpG-island No: 23499
gtattcgttagggtgtattcggagagaggattgcgggtttttagtgttcgtgcgttttagttttcggggagattttaggtggttttcggatttttcggcgttttgtttcgtttatttgcgcgaggagattttagttgttggtggtgggggacgcgaattcggggtttttcgggaatggggatagtaagagggggttaggcgtgagcgaggttgtaggtttcgtgcgagtttggggtggtttttgtgtcgacgttgcgcggggggcggaggcggggggtttaggggtttgtatcgagcgtttttttttgtcgtgcgaggcgcggtcgtagtttttttttgttaaaagttgcgtgtgtgtgatcggcgttcgggaggatttgtttgtaggtttttcgtcgcgttgagggtaaagttagagagttttttttttgttttgcggttattgttttttaatcgtaggcgttttttgtgtttagagttggggatcgattcgttgtcgtttttgttcgcggcgttattcgtggagattaatcgaaggttgcggcgttttttcgttttcgggttaggtttttgcgttgggagtgcgcggcgtggggttgttgtggggtcggattttcgcgagtttggaggtggtggcgatagggataatttgggtagggcgtgtggaaagtagtcgttaggttgtagattttttgttttcgtatatttcgtgttcgtttttttttgtcgcggcgtcgttttatttttgtcgcgcgtttcggggcggttggaggttgtgtttgtcgtttgtttcgggaaggtaagggatagcgtgttgggattttgcgttttttgattttaatcgtttagtacgtcggttagagtgttcggtttgtcggcgcggttttgaaagtttttagttttcggtgtttgcgatttgtattcgtaggttttgtttttttcggaaatttttgagattcgt

SEQ ID NO: 23500 - DNA, 961 bp, Artificial Sequence
  chemically treated genomic DNA (Homo sapiens) CpG-island No: 23500
acgaatctcaaaaatttccgaaaaaaacaaaacctacgaatacaaatcgcaaacaccgaaaactaaaaactttcaaaaccgcgccgacaaaccgaacactctaaccgacgtactaaacgattaaaatcaaaaaacgcaaaatcccaacacgctatcccttaccttcccgaaacaaacgacaaacacaacctccaaccgccccgaaacgcgcgacaaaaataaaacgacgccgcgacaaaaaaaaacgaacacgaaatatacgaaaacaaaaaatctacaacctaacgactactttccacacgccctacccaaattatccctatcgccaccacctccaaactcgcgaaaatccgaccccacaacaaccccacgccgcgcactcccaacgcaaaaacctaacccgaaaacgaaaaaacgccgcaaccttcgattaatctccacgaataacgccgcgaacaaaaacgacaacgaatcgatccccaactctaaacacaaaaaacgcctacgattaaaaaacaataaccgcaaaacaaaaaaaaaactctctaactttaccctcaacgcgacgaaaaacctacaaacaaatcctcccgaacgccgatcacacacacgcaacttttaacaaaaaaaaactacgaccgcgcctcgcacgacaaaaaaaaacgctcgatacaaacccctaaaccccccgcctccgccccccgcgcaacgtcgacacaaaaaccaccccaaactcgcacgaaacctacaacctcgctcacgcctaaccccctcttactatccccattcccgaaaaaccccgaattcgcgtcccccaccaccaacaactaaaatctcctcgcgcaaataaacgaaacaaaacgccgaaaaatccgaaaaccacctaaaatctccccgaaaactaaaacgcacgaacactaaaaacccgcaatcctctctccgaatacaccctaacgaatac

SEQ ID NO: 23501 - DNA, 826 bp, Artificial Sequence
  chemically treated genomic DNA (Homo sapiens) CpG-island No: 23501
  unsure (38, 40, 51, 410)
tcggtttcggttcggttcggttgtagggtcgggttttntntatatcgatanaggatatcggagttgtttcgagacgttaagagggttgcgaagagttgtttttgtatttagagttagacgcggtttacgggacgggatcgttacgtttggggtttgcgggttgtagggcggcgcggtacgcgtgggtatattttgcgggggcgggttgcggtcgcggggaatagcggcgagaggggggttcgcgggagatgcggttttgtttagtcgcgtcgagaaggcggggaaggcgaggtcggaatatatttttttttgtacgtttcggagcgtttcgtcggttggggagggtaggaggtttaggtcggagtcgcgtaggggatattttcgttttcgtttaggagttttgttaggtncggcgtcgcggcgtttatcgtcgatttacgggttagttacggtttgacggggtttggtttcggggcgtcgttcgtttgcggtttagtttttatcgtttttatatacgtttttttgaagaattcggcgcgaggaggtattagtcggtcggatattacggaaggttcgggttatttggggggttgttggtggttgggtagtttttcgggcgggaggggggcgttaggattaggaataggagtgcggacgtagcgggagagggggcgggggcggtcgatcgaggcgtcggtaggtatattggtaggtcgagaggtgtagacgcgtcggtagtagtagcggtagtagtagtggtagcggtgattgtttttgtgtttttttagtatttttttcgggttggtttaagatggcggcgtttttt

SEQ ID NO: 23502 - DNA, 826 bp, Artificial Sequence
  chemically treated genomic DNA (Homo sapiens) CpG-island No: 23502
  unsure (417, 776, 787, 789)
aaaaaacgccgccatcttaaaccaacccgaaaaaaatactaaaaaaacacaaaaacaatcaccgctaccactactactaccgctactactaccgacgcgtctacacctctcgacctaccaatatacctaccgacgcctcgatcgaccgcccccgccccctctcccgctacgtccgcactcctattcctaatcctaacgcccccctcccgcccgaaaaactacccaaccaccaacaaccccccaaataacccgaaccttccgtaatatccgaccgactaatacctcctcgcgccgaattcttcaaaaaaacgtatataaaaacgataaaaactaaaccgcaaacgaacgacgccccgaaaccaaaccccgtcaaaccgtaactaacccgtaaatcgacgataaacgccgcgacgccgnacctaacaaaactcctaaacgaaaacgaaaatatcccctacgcgactccgacctaaacctcctaccctccccaaccgacgaaacgctccgaaacgtacaaaaaaaaatatattccgacctcgccttccccgccttctcgacgcgactaaacaaaaccgcatctcccgcgaacccccctctcgccgctattccccgcgaccgcaacccgcccccgcaaaatatacccacgcgtaccgcgccgccctacaacccgcaaaccccaaacgtaacgatcccgtcccgtaaaccgcgtctaactctaaatacaaaaacaactcttcgcaaccctcttaacgtctcgaaacaactccgatatcctntatcgatatananaaaacccgaccctacaaccgaaccgaaccgaaaccga

SEQ ID NO: 23503 - DNA, 826 bp, Artificial Sequence
  chemically treated genomic DNA (Homo sapiens) CpG-island No: 23503
  unsure (417, 776, 787, 789)
agggagcgtcgttattttggattagttcgaggaagatattgagggagtataggagtagttatcgttgttattgttattgtcgttattgttgtcggcgcgtttgtatttttcggtttgttagtgtatttgtcggcgtttcggtcgatcgttttcgttttttttttcgttgcgttcgtatttttgtttttggttttgacgtttttttttcgttcggaaagttgtttagttattagtaattttttaggtaattcgggtttttcgtagtgttcggtcggttgatattttttcgcgtcgggttttttagaggggcgtgtgtggggacggtggagattgggtcgtaggcgggcggcgtttcggggttaggtttcgttaggtcgtggttagttcgtgggtcggcggtgagcgtcgcggcgtcgngtttgataggatttttgggcgggggcggaggtgttttttgcgcggtttcggtttgagttttttgttttttttaatcggcggggcgtttcgaggcgtgtagggaagggtgtgtttcggtttcgtttttttcgttttttcggcgcggttgggtaggatcgtatttttcgcgggtttttttttcgtcgttgtttttcgcggtcgtagttcgttttcgtagggtgtatttacgcgtgtcgcgtcgttttgtagttcgtaagttttagacgtggcggtttcgtttcgtaggtcgcgtttggttttgagtataaaggtagtttttcgtagtttttttggcgtttcggggtagtttcggtgttttntgtcgatgtgngnggagttcggttttgtagtcgggtcgggtcggggtcgg

SEQ ID NO: 23504 - DNA, 826 bp, Artificial Sequence
  chemically treated genomic DNA (Homo sapiens) CpG-island No: 23504
  unsure (38, 40, 51, 410)
ccgaccccgacccgacccgactacaaaaccgaactccncncacatcgacanaaaacaccgaaactaccccgaaacgccaaaaaaactacgaaaaactacctttatactcaaaaccaaacgcgacctacgaaacgaaaccgccacgtctaaaacttacgaactacaaaacgacgcgacacgcgtaaatacaccctacgaaaacgaactacgaccgcgaaaaacaacgacgaaaaaaaaacccgcgaaaaatacgatcctacccaaccgcgccgaaaaaacgaaaaaaacgaaaccgaaacacacccttccctacacgcctcgaaacgccccgccgattaaaaaaaacaaaaaactcaaaccgaaaccgcgcaaaaaacacctccgcccccgcccaaaaatcctatcaaacncgacgccgcgacgctcaccgccgacccacgaactaaccacgacctaacgaaacctaaccccgaaacgccgcccgcctacgacccaatctccaccgtccccacacacgcccctctaaaaaacccgacgcgaaaaaatatcaaccgaccgaacactacgaaaaacccgaattacctaaaaaattactaataactaaacaactttccgaacgaaaaaaaaacgtcaaaaccaaaaacaaaaatacgaacgcaacgaaaaaaaaaacgaaaacgatcgaccgaaacgccgacaaatacactaacaaaccgaaaaatacaaacgcgccgacaacaataacgacaataacaataacaacgataactactcctatactccctcaatatcttcctcgaactaatccaaaataacgacgctccct

SEQ ID NO: 23505 - DNA, 809 bp, Artificial Sequence
  chemically treated genomic DNA (Homo sapiens) CpG-island No: 23505
  unsure (777, 801)
tagcgttgttagtgattagtagttgcggtaattgttgatcgggagaaaatttaattagcggaaaatgttaggttattgtttttagtgtgcgtagacggtttattaatttttttttagcgggagcggggcgggtgataaggatatttatgtcggggcgttttcgttatagattttagcgaggatttcgcgcgcgtcgttatttagtagtttttttgttagcgaaatttttatttgttcggtattttgcggcgtatcgcggcgtttatcgcgaataatttgcgaatcgttcggcgcgtcgattagcgtacgtagttagatttcgttattaataagttcggcgtagttattaattggtatttgatattcgttttcgagacgggtatttatggcgcgttttgcggtaacgcgtagtgtagtttcgtggtgatttagcgcggtaagtagttcgcgagtgcgtgaattattaaggcggtatttaatatttatcgtattttgttttatcgtcggaagagaaatttcgggtggtaacgcggcgcgaatacgtgattttagatttaaacgttttagttcggttacggtaagaatgatggtatcgtattcgtcgttatttagtttgtttaggcgagtgtcgacgttgtcgcgtagggagcggataattagattcggacggcgtttagatagttggtattggcgacgtaaattggacgtttcgacgatattgtttgtcggtaacgtatttagattgttatagttattggtaatagaggtttagggttnttgtaagcgtttttatgttttttnttttttcg

SEQ ID NO: 23506 - DNA, 809 bp, Artificial Sequence
  chemically treated genomic DNA (Homo sapiens) CpG-island No: 23506
  unsure (9, 33)
cgaaaaaanaaaaaacataaaaacgcttacaanaaccctaaacctctattaccaataactataacaatctaaatacgttaccgacaaacaatatcgtcgaaacgtccaatttacgtcgccaataccaactatctaaacgccgtccgaatctaattatccgctccctacgcgacaacgtcgacactcgcctaaacaaactaaataacgacgaatacgataccatcattcttaccgtaaccgaactaaaacgtttaaatctaaaatcacgtattcgcgccgcgttaccacccgaaatttctcttccgacgataaaacaaaatacgataaatattaaataccgccttaataattcacgcactcgcgaactacttaccgcgctaaatcaccacgaaactacactacgcgttaccgcaaaacgcgccataaatacccgtctcgaaaacgaatatcaaataccaattaataactacgccgaacttattaataacgaaatctaactacgtacgctaatcgacgcgccgaacgattcgcaaattattcgcgataaacgccgcgatacgccgcaaaataccgaacaaataaaaatttcgctaacaaaaaaactactaaataacgacgcgcgcgaaatcctcgctaaaatctataacgaaaacgccccgacataaatatccttatcacccgccccgctcccgctaaaaaaaaattaataaaccgtctacgcacactaaaaacaataacctaacattttccgctaattaaattttctcccgatcaacaattaccgcaactactaatcactaacaacgcta

SEQ ID NO: 23507 - DNA, 809 bp, Artificial Sequence
  chemically treated genomic DNA (Homo sapiens) CpG-island No: 23507
  unsure (9, 33)
cggaggggnaagaaatatgagaacgtttgtagnagttttgaatttttgttgttaataattatgatagtttggatgcgttatcggtaggtagtatcgtcgggacgtttagtttacgtcgttagtgttaattgtttgaacgtcgttcggatttgattattcgttttttgcgcggtaacgtcggtattcgtttgagtaaattggataacggcgaatacgatgttattatttttgtcgtagtcggattaaaacgtttaggtttggagttacgtattcgcgtcgcgttgttattcgagatttttttttcggcggtaggataaggtgcggtgggtattgaatgtcgttttgatgatttacgtattcgcgagttgtttgtcgcgttgaattattacgaaattgtattgcgcgttatcgtagaacgcgttatgaatattcgtttcgaaggcggatgttaggtgttaattggtagttacgtcgagtttattgatggcgaaatttggttgcgtgcgttggtcggcgcgtcggacggttcgtagattattcgcggtgaacgtcgcggtgcgtcgtaagatgtcgaataaatggggatttcgttggtagaagagttattgaataacggcgcgcgcgagattttcgttgaagtttataacggagacgtttcggtatgagtatttttgttattcgtttcgttttcgttggagaagagttagtgagtcgtttgcgtatattgggggtagtggtttggtatttttcgttgattgagttttttttcggttaataattatcgtaattgttgattattggtaacgttg

SEQ ID NO: 23508 - DNA, 809 bp, Artificial Sequence
  chemically treated genomic DNA (Homo sapiens) CpG-island No: 23508
  unsure (777, 801)
caacgttaccaataatcaacaattacgataattattaaccgaaaaaaaactcaatcaacgaaaaataccaaaccactacccccaatatacgcaaacgactcactaactcttctccaacgaaaacgaaacgaataacaaaaatactcataccgaaacgtctccgttataaacttcaacgaaaatctcgcgcgcgccgttattcaataactcttctaccaacgaaatccccatttattcgacatcttacgacgcaccgcgacgttcaccgcgaataatctacgaaccgtccgacgcgccgaccaacgcacgcaaccaaatttcgccatcaataaactcgacgtaactaccaattaacacctaacatccgccttcgaaacgaatattcataacgcgttctacgataacgcgcaatacaatttcgtaataattcaacgcgacaaacaactcgcgaatacgtaaatcatcaaaacgacattcaatacccaccgcaccttatcctaccgccgaaaaaaaaatctcgaataacaacgcgacgcgaatacgtaactccaaacctaaacgttttaatccgactacgacaaaaataataacatcgtattcgccgttatccaatttactcaaacgaataccgacgttaccgcgcaaaaaacgaataatcaaatccgaacgacgttcaaacaattaacactaacgacgtaaactaaacgtcccgacgatactacctaccgataacgcatccaaactatcataattattaacaacaaaaattcaaaactnctacaaacgttctcatatttcttncccctccg

SEQ ID NO: 23509 - DNA, 719 bp, Artificial Sequence
  chemically treated genomic DNA (Homo sapiens) CpG-island No: 23509
aagatatcgaaggtgaagcgcgttcgtagttagatattaagattggttatttgtcgtagaatcgtagttgaattcggaatatatcgtgcgtgagtttattgaagaagcggttttagaagtggttaacgttttgaaacgtttggatgaagtgtatgcgttgtacgtcgattcggatgtcgattttgataagttggtcgttgaataaggtcgtttggaagagattatttaggtttacgacggttataatttgaacgtatagttggagcgtgcggcggatgcgttacgtttgtcggatttggacgcgagaatcgttaattttttcggtggtgaacgtcgtcgcgtagcgttgtgtcgtttgttgttggaaaaattagatatgttgttgttcgacgaatcgattaattatttggatgtcgaattcgtggtttggttggaacgttttttgtacgatttcgaaggtatcgttgtggcgattatttacgatcgttattttttcgataacgttgtaggttggattttcgaatttgatcgcggtgaaggtatttcgtgggaaggtaattattttttttggttggagtagaaagattagcgtttggcgtaggaagttttataagaagcggcgcgtcgtaagtcgattgagaaagagttggaatgggtacgttaaggtattaaaggtcgttagtcgaaaggtaaagtacgtttggcgcgttttgaagaat

SEQ ID NO: 23510 - DNA, 719 bp, Artificial Sequence
  chemically treated genomic DNA (Homo sapiens) CpG-island No: 23510
attcttcaaaacgcgccaaacgtactttacctttcgactaacgacctttaataccttaacgtacccattccaactctttctcaatcgacttacgacgcgccgcttcttataaaacttcctacgccaaacgctaatctttctactccaaccaaaaaaaataattaccttcccacgaaataccttcaccgcgatcaaattcgaaaatccaacctacaacgttatcgaaaaaataacgatcgtaaataatcgccacaacgataccttcgaaatcgtacaaaaaacgttccaaccaaaccacgaattcgacatccaaataattaatcgattcgtcgaacaacaacatatctaatttttccaacaacaaacgacacaacgctacgcgacgacgttcaccaccgaaaaaattaacgattctcgcgtccaaatccgacaaacgtaacgcatccgccgcacgctccaactatacgttcaaattataaccgtcgtaaacctaaataatctcttccaaacgaccttattcaacgaccaacttatcaaaatcgacatccgaatcgacgtacaacgcatacacttcatccaaacgtttcaaaacgttaaccacttctaaaaccgcttcttcaataaactcacgcacgatatattccgaattcaactacgattctacgacaaataaccaatcttaatatctaactacgaacgcgcttcaccttcgatatctt

SEQ ID NO: 23511 - DNA, 719 bp, Artificial Sequence
  chemically treated genomic DNA (Homo sapiens) CpG-island No: 23511
gttttttaaagcgcgttagacgtgttttatttttcgattgacggtttttagtattttgacgtatttattttagtttttttttaatcgatttacgacgcgtcgttttttgtgaagttttttgcgttaggcgttgatttttttgttttagttaggaggagtagttatttttttacggaatatttttatcgcggttaagttcgaggatttagtttgtaacgttatcgaggaagtaacggtcgtgggtaatcgttataacggtgttttcgaagtcgtgtaggaagcgttttagttaggttacggattcggtatttaggtggttggtcggttcgtcgagtagtagtatgtttggtttttttagtagtaggcggtataacgttacgcgacgacgtttattatcggagaggttagcgattttcgcgtttaagttcggtagacgtagcgtattcgtcgtacgttttagttgtacgtttagattatgatcgtcgtgagtttgaatgattttttttagacggttttgtttagcggttagtttgttaaaatcggtattcggatcggcgtatagcgtatatattttatttaggcgttttagggcgttaattatttttgaaatcgtttttttaatggatttacgtacggtgtgtttcgggtttagttgcggttttgcggtagataattaattttgatgtttggttgcggacgcgttttattttcgatgtttt

SEQ ID NO: 23512 - DNA, 719 bp, Artificial Sequence
  chemically treated genomic DNA (Homo sapiens) CpG-island No: 23512
aaaacatcgaaaataaaacgcgtccgcaaccaaacatcaaaattaattatctaccgcaaaaccgcaactaaacccgaaacacaccgtacgtaaatccattaaaaaaacgatttcaaaaataattaacgccctaaaacgcctaaataaaatatatacgctatacgccgatccgaataccgattttaacaaactaaccgctaaacaaaaccgtctaaaaaaaatcattcaaactcacgacgatcataatctaaacgtacaactaaaacgtacgacgaatacgctacgtctaccgaacttaaacgcgaaaatcgctaacctctccgataataaacgtcgtcgcgtaacgttataccgcctactactaaaaaaaccaaacatactactactcgacgaaccgaccaaccacctaaataccgaatccgtaacctaactaaaacgcttcctacacgacttcgaaaacaccgttataacgattacccacgaccgttacttcctcgataacgttacaaactaaatcctcgaacttaaccgcgataaaaatattccgtaaaaaaataactactcctcctaactaaaacaaaaaaatcaacgcctaacgcaaaaaacttcacaaaaaacgacgcgtcgtaaatcgattaaaaaaaaactaaaataaatacgtcaaaatactaaaaaccgtcaatcgaaaaataaaacacgtctaacgcgctttaaaaaac

SEQ ID NO: 23513 - DNA, 541 bp, Artificial Sequence
  chemically treated genomic DNA (Homo sapiens) CpG-island No: 23513
tttgtttagttgcgttttttaatgattgtaatgttcgttcgtttaatttcgttataagcgataatcgttcgttgtatgtgattgttagcgacggtggtttgttatttgaattagtgaaggtgagcgaattgtcggtgttgatgggcgagcgttttgaagtgttgatggaggttaacgataataaattttttgatatggtgacgttgtcgattagttagatggggatggcgattgcgtcgtttgataagttttattcggtaatgcggatttagtcgattgttattagtgttttcggtgttttgttagatatattaagtagtttgtttgcgttattttcgttggaagggttgacggtacgtaagttgtaattttttatggattcgatgttcgatatgatggggatgtagatgttaatggagaaatatggcgattaggcgatggtcgggatggattatagttagatgatgggttatatggggtacggtaatatgaattatatgaattacggcgggaagttcgatttttattatgttaataaaat

SEQ ID NO: 23514 - DNA, 541 bp, Artificial Sequence
  chemically treated genomic DNA (Homo sapiens) CpG-island No: 23514
attttattaacataataaaaatcgaacttcccgccgtaattcatataattcatattaccgtaccccatataacccatcatctaactataatccatcccgaccatcgcctaatcgccatatttctccattaacatctacatccccatcatatcgaacatcgaatccataaaaaattacaacttacgtaccgtcaacccttccaacgaaaataacgcaaacaaactacttaatatatctaacaaaacaccgaaaacactaataacaatcgactaaatccgcattaccgaataaaacttatcaaacgacgcaatcgccatccccatctaactaatcgacaacgtcaccatatcaaaaaatttattatcgttaacctccatcaacacttcaaaacgctcgcccatcaacaccgacaattcgctcaccttcactaattcaaataacaaaccaccgtcgctaacaatcacatacaacgaacgattatcgcttataacgaaattaaacgaacgaacattacaatcattaaaaaacgcaactaaacaaa

SEQ ID NO: 23515 - DNA, 541 bp, Artificial Sequence
  chemically treated genomic DNA (Homo sapiens) CpG-island No: 23515
attttgttggtatggtggaaatcgaatttttcgtcgtggtttatatgatttatattgtcgtgttttatatggtttattatttggttgtgatttatttcggttatcgtttgatcgttatatttttttattagtatttgtatttttattatatcgagtatcgggtttatagagagttgtagtttgcgtatcgttagtttttttagcgaaggtaacgtaggtaggttatttaatgtgtttggtaaagtatcggaggtattaatagtaatcggttgaattcgtattatcggatgaggtttattaaacggcgtaatcgttatttttatttggttgatcggtagcgttattatgttaaagggtttgttatcgttaatttttattagtattttaaaacgttcgtttattagtatcggtagttcgtttatttttattggtttaggtagtagattatcgtcgttggtaattatatatagcgggcgattgtcgtttgtggcgaaattgagcgaacgggtattatagttattgagaaacgtagttgagtaag

SEQ ID NO: 23516 - DNA, 541 bp, Artificial Sequence
  chemically treated genomic DNA (Homo sapiens) CpG-island No: 23516
cttactcaactacgtttctcaataactataatacccgttcgctcaatttcgccacaaacgacaatcgcccgctatatataattaccaacgacgataatctactacctaaaccaataaaaataaacgaactaccgatactaataaacgaacgttttaaaatactaataaaaattaacgataacaaaccctttaacataataacgctaccgatcaaccaaataaaaataacgattacgccgtttaataaacctcatccgataatacgaattcaaccgattactattaatacctccgatactttaccaaacacattaaataacctacctacgttaccttcgctaaaaaaactaacgatacgcaaactacaactctctataaacccgatactcgatataataaaaatacaaatactaataaaaaaatataacgatcaaacgataaccgaaataaatcacaaccaaataataaaccatataaaacacgacaatataaatcatataaaccacgacgaaaaattcgatttccaccataccaacaaaat

SEQ ID NO: 23517 - DNA, 548 bp, Artificial Sequence
  chemically treated genomic DNA (Homo sapiens) CpG-island No: 23517
aggataaggttcgcggatgaattataggaattttcgggttttaaagattttggcgttaagtttagggcgttgatcgcgaaggacgaggcgttttcgtgacgttttgtttttttaatgaattttaggtttgcggagacgacggagaacggaagttttttgtttgtgtgttggttggttgcgcgttgaggttagtttcgttttttatttttcggtttttttagaagtcgtttagtttttcggtggttgttttacgttcggaggtttagtcgtcgtttatttaggatgtcgcgtggaagtcgaagtcgtatttttcgtatggttttttcggttaggtgagattatcgtagggtttgagattaaagcgcggtcgttcggattttattggggtaatgacgtagagggaggtcgcgggcgggggtgaattaaggtcggttgcggcgtgggttcgtttttgttaggcgggggtagattgaacgtaaagtttatgttaggggagtgtggggagggaatttatttacggaaaaagttttttatttaaataacgggaa

SEQ ID NO: 23518 - DNA, 548 bp, Artificial Sequence
  chemically treated genomic DNA (Homo sapiens) CpG-island No: 23518
ttcccgttatttaaataaaaaactttttccgtaaataaattccctccccacactcccctaacataaactttacgttcaatctacccccgcctaacaaaaacgaacccacgccgcaaccgaccttaattcacccccgcccgcgacctccctctacgtcattaccccaataaaatccgaacgaccgcgctttaatctcaaaccctacgataatctcacctaaccgaaaaaaccatacgaaaaatacgacttcgacttccacgcgacatcctaaataaacgacgactaaacctccgaacgtaaaacaaccaccgaaaaactaaacgacttctaaaaaaaccgaaaaataaaaaacgaaactaacctcaacgcgcaaccaaccaacacacaaacaaaaaacttccgttctccgtcgtctccgcaaacctaaaattcattaaaaaaacaaaacgtcacgaaaacgcctcgtccttcgcgatcaacgccctaaacttaacgccaaaatctttaaaacccgaaaattcctataattcatccgcgaaccttatcct

SEQ ID NO: 23519 - DNA, 548 bp, Artificial Sequence
  chemically treated genomic DNA (Homo sapiens) CpG-island No: 23519
ttttcgttgtttggataggaagtttttttcgtaagtgaattttttttttatatttttttaatataggttttacgtttaatttattttcgtttggtagaggcgagtttacgtcgtagtcgattttagtttattttcgttcgcggtttttttttgcgttattgttttagtagagttcggacggtcgcgttttggttttaaattttgcgatggttttatttggtcggaggggttatgcgggaggtgcggtttcggtttttacgcggtattttaggtaagcgacggttaggttttcggacgtgggataattatcgaagagttaagcgatttttgaggagatcggaagatgggaggcggggttggttttaacgcgtaattaattagtatataggtagagaattttcgtttttcgtcgttttcgtaggtttgaagtttattggaagagtaggacgttacggggacgtttcgtttttcgcggttaacgttttgaatttggcgttaggatttttaaaattcggaagtttttgtggtttattcgcgaattttgtttt

SEQ ID NO: 23520 - DNA, 548 bp, Artificial Sequence
  chemically treated genomic DNA (Homo sapiens) CpG-island No: 23520
aaaacaaaattcgcgaataaaccacaaaaacttccgaattttaaaaatcctaacgccaaattcaaaacgttaaccgcgaaaaacgaaacgtccccgtaacgtcctactcttccaataaacttcaaacctacgaaaacgacgaaaaacgaaaattctctacctatatactaattaattacgcgttaaaaccaaccccgcctcccatcttccgatctcctcaaaaatcgcttaactcttcgataattatcccacgtccgaaaacctaaccgtcgcttacctaaaataccgcgtaaaaaccgaaaccgcacctcccgcataacccctccgaccaaataaaaccatcgcaaaatttaaaaccaaaacgcgaccgtccgaactctactaaaacaataacgcaaaaaaaaaccgcgaacgaaaataaactaaaatcgactacgacgtaaactcgcctctaccaaacgaaaataaattaaacgtaaaacctatattaaaaaaatataaaaaaaaaattcacttacgaaaaaaacttcctatccaaacaacgaaaa

SEQ ID NO: 23521 - DNA, 544 bp, Artificial Sequence
  chemically treated genomic DNA (Homo sapiens) CpG-island No: 23521
taggaaaaatcggcggaaacgtatttatatttcgagtttgtcgggtagcgggtcgagcgtttcgcggcgtgaatatttattaggggtggggttcgaataatggcgcgtcggcgggtagcgcgggtagcggtttcgatacgacgttcggcgtttagggtgcggttttcgcgttcgatttcgtacggcgttttcgaaaattgtaggagcggggaggaagcgggttgggattttttcggggaggagttggggtggggaaacgtttttatttcgcgttaataataaatgatacgaaattgagttggatcgatattaagaggttatggattttcgcgttttttagggtaagggtgtgtttcgtcggtcgcgtttcggttttagagggattcgaattcggtgttgtcgagcggaggaggggtttttttcgattttcgtttttttttcgttttattcgttttattttttatttttttatattttagagaggagatttttaagtttttcgttttcggtttttttgtacggttttttttttttttttttgttt

SEQ ID NO: 23522 - DNA, 544 bp, Artificial Sequence
  chemically treated genomic DNA (Homo sapiens) CpG-island No: 23522
aaacaaaaaaaaaaaaaaaaaaccgtacaaaaaaaccgaaaacgaaaaacttaaaaatctcctctctaaaatataaaaaaataaaaaataaaacgaataaaacgaaaaaaaaacgaaaatcgaaaaaaacccctcctccgctcgacaacaccgaattcgaatccctctaaaaccgaaacgcgaccgacgaaacacacccttaccctaaaaaacgcgaaaatccataacctcttaatatcgatccaactcaatttcgtatcatttattattaacgcgaaataaaaacgtttccccaccccaactcctccccgaaaaaatcccaacccgcttcctccccgctcctacaattttcgaaaacgccgtacgaaatcgaacgcgaaaaccgcaccctaaacgccgaacgtcgtatcgaaaccgctacccgcgctacccgccgacgcgccattattcgaaccccacccctaataaatattcacgccgcgaaacgctcgacccgctacccgacaaactcgaaatataaatacgtttccgccgatttttccta

SEQ ID NO: 23523 - DNA, 544 bp, Artificial Sequence
  chemically treated genomic DNA (Homo sapiens) CpG-island No: 23523
aagtagagaaaggaaaagaaaatcgtgtagggaagtcggaaacgagggatttaagggttttttttttagggtgtgggagagtgggggatggggcgaatggggcgaggagggggcgaggatcgagggaggtttttttttcgttcggtaatatcgggttcgggtttttttagagtcgggacgcggtcggcgggatatatttttgttttgggagacgcgagggtttatggttttttagtgtcggtttagtttagtttcgtgttatttgttgttagcgcgaggtaggggcgtttttttattttagttttttttcggggaaattttagttcgtttttttttcgtttttgtagttttcgggagcgtcgtgcggggtcgagcgcggaggtcgtattttgggcgtcgggcgtcgtgtcgggatcgttgttcgcgttgttcgtcggcgcgttattgttcgagttttatttttgatgaatatttacgtcgcggggcgttcggttcgttattcggtaggttcggggtgtgagtgcgttttcgtcggttttttttg

SEQ ID NO: 23524 - DNA, 544 bp, Artificial Sequence
  chemically treated genomic DNA (Homo sapiens) CpG-island No: 23524
caaaaaaaaccgacgaaaacgcactcacaccccgaacctaccgaataacgaaccgaacgccccgcgacgtaaatattcatcaaaaataaaactcgaacaataacgcgccgacgaacaacgcgaacaacgatcccgacacgacgcccgacgcccaaaatacgacctccgcgctcgaccccgcacgacgctcccgaaaactacaaaaacgaaaaaaaaacgaactaaaatttccccgaaaaaaaactaaaataaaaaaacgcccctacctcgcgctaacaacaaataacacgaaactaaactaaaccgacactaaaaaaccataaaccctcgcgtctcccaaaacaaaaatatatcccgccgaccgcgtcccgactctaaaaaaacccgaacccgatattaccgaacgaaaaaaaaacctccctcgatcctcgccccctcctcgccccattcgccccatcccccactctcccacaccctaaaaaaaaaacccttaaatccctcgtttccgacttccctacacgattttcttttcctttctctactt

SEQ ID NO: 23525 - DNA, 718 bp, Artificial Sequence
  chemically treated genomic DNA (Homo sapiens) CpG-island No: 23525
gagtcgtcgggaaggcgaggcgcgcggtgggtgggtggggtgggttggtatgggtgtcggtgtttttagcgttggggtcggagcgcggaacgtttttttatcgttttttcggggttgacgtacgtttttacggcgcgcgtattttttagatttttttaggtcggagggaggaggggaggggaaggggttgatgcggtttcgtatcgggattcgggattcgaggaggcgattcgtttattacgcgtcgttcgcggagggtagagaaggtagtttttattaggcgttttcgatcgtttcggttgtcgggcgttttttgttgttttttgtagttcgttcgcgcgttttcgtttcgatttcggagggtaggtatttcggagtttcggtttttaggagtttttcggtcgcggtcggagcgttttttcggattatttattcgacgttagcgttagtcgaaggcgagggaaaggggcggggggagcgtaggaatcggttttttttgcggcggtcgttattagtcggaatagtaatcggcggagttcgtgcgtatcgtagcgtagcgtagcggtcggggggtgcgggcgttttcgcgttcggttatttatcgtcgtttgggcgtcgtcgttgtttttttttttcgtttttattttttagtagacgttcgtcggagcgattttttttagggtgatcgggggaaggtgggtggcgttgattttatttt

SEQ ID NO: 23526 - DNA, 718 bp, Artificial Sequence
  chemically treated genomic DNA (Homo sapiens) CpG-island No: 23526
aaaataaaatcaacgccacccaccttcccccgatcaccctaaaaaaaatcgctccgacgaacgtctactaaaaaataaaaacgaaaaaaaaaaacaacgacgacgcccaaacgacgataaataaccgaacgcgaaaacgcccgcaccccccgaccgctacgctacgctacgatacgcacgaactccgccgattactattccgactaataacgaccgccgcaaaaaaaaccgattcctacgctccccccgcccctttccctcgccttcgactaacgctaacgtcgaataaataatccgaaaaaacgctccgaccgcgaccgaaaaactcctaaaaaccgaaactccgaaatacctaccctccgaaatcgaaacgaaaacgcgcgaacgaactacaaaaaacaacaaaaaacgcccgacaaccgaaacgatcgaaaacgcctaataaaaactaccttctctaccctccgcgaacgacgcgtaataaacgaatcgcctcctcgaatcccgaatcccgatacgaaaccgcatcaaccccttcccctcccctcctccctccgacctaaaaaaatctaaaaaatacgcgcgccgtaaaaacgtacgtcaaccccgaaaaaacgataaaaaaacgttccgcgctccgaccccaacgctaaaaacaccgacacccataccaacccaccccacccacccaccgcgcgcctcgccttcccgacgactc

SEQ ID NO: 23527 - DNA, 718 bp, Artificial Sequence
  chemically treated genomic DNA (Homo sapiens) CpG-island No: 23527
aaggtgaggttaacgttatttattttttttcggttattttgggaggggtcgtttcggcgggcgtttgttggagggtagaagcggggaagggaggtagcggcggcgtttaggcggcggtaggtagtcgggcgcgagggcgttcgtatttttcggtcgttgcgttgcgttgcggtgcgtacgggtttcgtcggttgttatttcggttggtggcggtcgtcgtaggaagggtcggtttttgcgtttttttcgtttttttttttcgttttcggttgacgttgacgtcggatgagtgattcggagggacgtttcgatcgcggtcgggaggtttttgggggtcggggtttcgaggtatttgtttttcggggtcggggcgggggcgcgcgggcgggttgtaggaagtagtaggagacgttcggtagtcgggacggtcggggacgtttggtaggagttgttttttttgtttttcgcgggcggcgcgtgataggcgagtcgttttttcgggtttcggatttcggtgcggaatcgtattagttttttttttttttttttttttttcggtttgggaaggtttggaggatgcgcgcgtcgtgagagcgtgcgttagtttcgggggagcggtagggaagcgtttcgcgtttcggttttagcgttgggagtatcggtatttatgttagtttattttatttatttatcgcgcgtttcgttttttcggcggttt

SEQ ID NO: 23528 - DNA, 718 bp, Artificial Sequence
  chemically treated genomic DNA (Homo sapiens) CpG-island No: 23528
aaaccgccgaaaaaacgaaacgcgcgataaataaataaaataaactaacataaataccgatactcccaacgctaaaaccgaaacgcgaaacgcttccctaccgctcccccgaaactaacgcacgctctcacgacgcgcgcatcctccaaaccttcccaaaccgaaaaaaaaaaaaaaaaaaaaaaaactaatacgattccgcaccgaaatccgaaacccgaaaaaacgactcgcctatcacgcgccgcccgcgaaaaacaaaaaaaacaactcctaccaaacgtccccgaccgtcccgactaccgaacgtctcctactacttcctacaacccgcccgcgcgcccccgccccgaccccgaaaaacaaatacctcgaaaccccgacccccaaaaacctcccgaccgcgatcgaaacgtccctccgaatcactcatccgacgtcaacgtcaaccgaaaacgaaaaaaaaaaacgaaaaaaacgcaaaaaccgacccttcctacgacgaccgccaccaaccgaaataacaaccgacgaaacccgtacgcaccgcaacgcaacgcaacgaccgaaaaatacgaacgccctcgcgcccgactacctaccgccgcctaaacgccgccgctacctcccttccccgcttctaccctccaacaaacgcccgccgaaacgacccctcccaaaataaccgaaaaaaaataaataacgttaacctcacctt

SEQ ID NO: 23529 - DNA, 529 bp, Artificial Sequence
  chemically treated genomic DNA (Homo sapiens) CpG-island No: 23529
tcgcgacgacgatttgttattgttttatttacgcgcgcgcgcgcgtttttttcgggattgtatacgggtgcgcgtcggtaatcgcgagtacgagagttggttttcgtttttcgcgattttcggcgtcggcggtttggtcgtgcgtattttcgtgtcgtattttagggatcgcgcggtggtcggttatttgacgcgggtcgttgagtttttgcgtattttttcggtgttggagttcggtggattcggcggttgcgcggcgagacgacgcgttatcgtggaggagacggcgcgggcggtcgattgtcgtgtcgtttagaacggcggtttttttcgtatgaattcgggcgagtgtttggggaacgtggtgagcgacgagcggcgggtgagtagtttcggggggttgtagaacgcgtagttcgggattcgtcgcgacgggattttggttatcgggtgaggaggtagggagtttcgtgttgtcgagggtagagggtttgagatttgggttgtagtcgtgttttcgtgtttaagt

SEQ ID NO: 23530 - DNA, 529 bp, Artificial Sequence
  chemically treated genomic DNA (Homo sapiens) CpG-island No: 23530
acttaaacacgaaaacacgactacaacccaaatctcaaaccctctaccctcgacaacacgaaactccctacctcctcacccgataaccaaaatcccgtcgcgacgaatcccgaactacgcgttctacaaccccccgaaactactcacccgccgctcgtcgctcaccacgttccccaaacactcgcccgaattcatacgaaaaaaaccgccgttctaaacgacacgacaatcgaccgcccgcgccgtctcctccacgataacgcgtcgtctcgccgcgcaaccgccgaatccaccgaactccaacaccgaaaaaatacgcaaaaactcaacgacccgcgtcaaataaccgaccaccgcgcgatccctaaaatacgacacgaaaatacgcacgaccaaaccgccgacgccgaaaatcgcgaaaaacgaaaaccaactctcgtactcgcgattaccgacgcgcacccgtatacaatcccgaaaaaaacgcgcgcgcgcgcgtaaataaaacaataacaaatcgtcgtcgcga

SEQ ID NO: 23531 - DNA, 529 bp, Artificial Sequence
  chemically treated genomic DNA (Homo sapiens) CpG-island No: 23531
atttgaatacggaggtacggttataatttaaattttaggttttttgttttcgatagtacggggttttttgtttttttattcggtgattagggtttcgtcgcggcggatttcgaattgcgcgttttgtagtttttcggagttgtttattcgtcgttcgtcgtttattacgttttttaggtattcgttcgagtttatgcggaagaagtcgtcgttttgggcgatacggtagtcggtcgttcgcgtcgttttttttacggtggcgcgtcgtttcgtcgcgtagtcgtcgggtttatcgggttttagtatcgagaaggtgcgtaggggtttaacggttcgcgttaggtggtcggttatcgcgcggtttttgaagtgcgatacgaaggtgcgtacggttagatcgtcggcgtcgggagtcgcgggaggcggaggttaattttcgtgttcgcggttgtcggcgcgtattcgtgtgtagtttcgggggaggcgcgcgcgcgcgcgtggatagggtagtagtaagtcgtcgtcgcgg

SEQ ID NO: 23532 - DNA, 529 bp, Artificial Sequence
  chemically treated genomic DNA (Homo sapiens) CpG-island No: 23532
ccgcgacgacgacttactactaccctatccacgcgcgcgcgcgcgcctcccccgaaactacacacgaatacgcgccgacaaccgcgaacacgaaaattaacctccgcctcccgcgactcccgacgccgacgatctaaccgtacgcaccttcgtatcgcacttcaaaaaccgcgcgataaccgaccacctaacgcgaaccgttaaacccctacgcaccttctcgatactaaaacccgataaacccgacgactacgcgacgaaacgacgcgccaccgtaaaaaaaacgacgcgaacgaccgactaccgtatcgcccaaaacgacgacttcttccgcataaactcgaacgaatacctaaaaaacgtaataaacgacgaacgacgaataaacaactccgaaaaactacaaaacgcgcaattcgaaatccgccgcgacgaaaccctaatcaccgaataaaaaaacaaaaaaccccgtactatcgaaaacaaaaaacctaaaatttaaattataaccgtacctccgtattcaaat

SEQ ID NO: 23533 - DNA, 547 bp, Artificial Sequence
  chemically treated genomic DNA (Homo sapiens) CpG-island No: 23533
gtgttcgttaaagtattaggagcgtcgagtttcgcggtagcgtagaattaggtgaaggtttcggttagaggcgcgtcgggttcgaggagggtggggttgcgagcgttcgtttcggcggtttttgcgttttagtgtttgttcggttttcggagtttttcggttgggggtgggcggcgttcggttaagatttagtgtttttattttcgcgtttaagtttcgttcgcgcggtggttttttttcgggaaggtaagtattattttttcggggagcggttcgtagagttagtggtcggcgggcgtttcgtttttagcgagtagggattcggagttattgtcgcgtcgtagttcgggtttttcgcgtcgtcgttcgtttatttgcgttttcgttcgtttttcggtgcgcgttcggttcgttagtcgtcgtcgttcgtatttcgagcgttattatgaattcgttttttaggaagagaaataaaggtaaatatagttttattgtgtagattcggaggtgaggaggcgtttatagtttcgtttcgggacgtttttgt

SEQ ID NO: 23534 - DNA, 547 bp, Artificial Sequence
  chemically treated genomic DNA (Homo sapiens) CpG-island No: 23534
acaaaaacgtcccgaaacgaaactataaacgcctcctcacctccgaatctacacaataaaactatatttacctttatttctcttcctaaaaaacgaattcataataacgctcgaaatacgaacgacgacgactaacgaaccgaacgcgcaccgaaaaacgaacgaaaacgcaaataaacgaacgacgacgcgaaaaacccgaactacgacgcgacaataactccgaatccctactcgctaaaaacgaaacgcccgccgaccactaactctacgaaccgctccccgaaaaaataatacttaccttcccgaaaaaaaaccaccgcgcgaacgaaacttaaacgcgaaaataaaaacactaaatcttaaccgaacgccgcccacccccaaccgaaaaactccgaaaaccgaacaaacactaaaacgcaaaaaccgccgaaacgaacgctcgcaaccccaccctcctcgaacccgacgcgcctctaaccgaaaccttcacctaattctacgctaccgcgaaactcgacgctcctaatactttaacgaacac

SEQ ID NO: 23535 - DNA, 547 bp, Artificial Sequence
  chemically treated genomic DNA (Homo sapiens) CpG-island No: 23535
gtaagagcgtttcggagcggagttgtgggcgtttttttattttcgggtttgtatagtggggttgtatttgtttttgtttttttttttgaagagcgagtttatggtggcgttcggggtgcgggcggcggcggttggcgggtcgggcgcgtatcgaggggcgggcgggagcgtaggtgagcgagcggcggcgcggggagttcggattgcggcgcggtagtggtttcgggtttttattcgttgggggcggggcgttcgtcggttattggttttgcgggtcgtttttcgagaaggtggtgtttattttttcgaggaggggttatcgcgcgggcggggtttggacgcgggggtggggatattgggttttggtcggacgtcgtttatttttagtcgggggatttcggaggtcgggtaggtattggggcgtaaaggtcgtcggggcgagcgttcgtagttttatttttttcgggttcggcgcgtttttggtcgaggtttttatttggttttgcgttatcgcggaattcggcgtttttggtgttttggcggatat

SEQ ID NO: 23536 - DNA, 547 bp, Artificial Sequence
  chemically treated genomic DNA (Homo sapiens) CpG-island No: 23536
atatccgccaaaacaccaaaaacgccgaattccgcgataacgcaaaaccaaataaaaacctcgaccaaaaacgcgccgaacccgaaaaaaataaaactacgaacgctcgccccgacgacctttacgccccaatacctacccgacctccgaaatcccccgactaaaaataaacgacgtccgaccaaaacccaatatccccacccccgcgtccaaaccccgcccgcgcgataacccctcctcgaaaaaataaacaccaccttctcgaaaaacgacccgcaaaaccaataaccgacgaacgccccgcccccaacgaataaaaacccgaaaccactaccgcgccgcaatccgaactccccgcgccgccgctcgctcacctacgctcccgcccgcccctcgatacgcgcccgacccgccaaccgccgccgcccgcaccccgaacgccaccataaactcgctcttcaaaaaaaaaaacaaaaacaaatacaaccccactatacaaacccgaaaataaaaaaacgcccacaactccgctccgaaacgctcttac

SEQ ID NO: 23537 - DNA, 546 bp, Artificial Sequence
  chemically treated genomic DNA (Homo sapiens) CpG-island No: 23537
cggggtcggcgttggttttttttttcgcggggcgggtttcgttatgtattatttattggttagagtcgggttgcgggcgcgagtgttgatgttaggtaggcgcgagtgcggcgggcgtagcggcggcggtcgtttagtagttcgggttcgggtgggggggcgtcgagtgggggtggcggttagtatgttgttcggttgcggttcggttttttatattcgcggttttttagttttcgttagtagcggcggcggtagagtagcgagcggcgttcgcgtttgtagcggcgtcgggttcgagcgcgcggcgcggcggtgggggtcggggttcgggcggggagcggggatcgggtatggcgttgcggagaggcggttgcggagcgttcgggttgttgttgttgttgttgggcgtcgcgtgtttgatatcgcggagcgcgtaggtgaggcggttggcgcgttgtttcgttatttgtagttgtattaaggagtttattatttgcgtgggttttttttgggtgtttaggatcgtgtcgggcgatattagttttt

SEQ ID NO: 23538 - DNA, 546 bp, Artificial Sequence
  chemically treated genomic DNA (Homo sapiens) CpG-island No: 23538
aaaaactaatatcgcccgacacgatcctaaacacccaaaaaaaacccacgcaaataataaactccttaatacaactacaaataacgaaacaacgcgccaaccgcctcacctacgcgctccgcgatatcaaacacgcgacgcccaacaacaacaacaacaacccgaacgctccgcaaccgcctctccgcaacgccatacccgatccccgctccccgcccgaaccccgacccccaccgccgcgccgcgcgctcgaacccgacgccgctacaaacgcgaacgccgctcgctactctaccgccgccgctactaacgaaaactaaaaaaccgcgaatataaaaaaccgaaccgcaaccgaacaacatactaaccgccacccccactcgacgcccccccacccgaacccgaactactaaacgaccgccgccgctacgcccgccgcactcgcgcctacctaacatcaacactcgcgcccgcaacccgactctaaccaataaataatacataacgaaacccgccccgcgaaaaaaaaaaccaacgccgaccccg

SEQ ID NO: 23539 - DNA, 546 bp, Artificial Sequence
  chemically treated genomic DNA (Homo sapiens) CpG-island No: 23539
gggagttgatgtcgttcggtacgattttgggtatttaggaagagtttacgtagatgatagattttttggtatagttgtaagtggcggggtagcgcgttagtcgttttatttgcgcgtttcgcggtattaggtacgcggcgtttagtagtagtagtagtagttcgagcgtttcgtagtcgttttttcgtagcgttatgttcggttttcgtttttcgttcgggtttcgatttttatcgtcgcgtcgcgcgttcggattcggcgtcgttgtagacgcgggcgtcgttcgttgttttgtcgtcgtcgttgttggcgaggattagggagtcgcgggtgtgggaggtcgagtcgtagtcgagtagtatgttggtcgttatttttattcggcgtttttttattcgagttcgggttgttgggcggtcgtcgtcgttgcgttcgtcgtattcgcgtttgtttgatattagtattcgcgttcgtagttcggttttggttaatgaataatgtatggcggggttcgtttcgcgggggagggggttagcgtcggtttcg

SEQ ID NO: 23540 - DNA, 546 bp, Artificial Sequence
  chemically treated genomic DNA (Homo sapiens) CpG-island No: 23540
cgaaaccgacgctaaccccctcccccgcgaaacgaaccccgccatacattattcattaaccaaaaccgaactacgaacgcgaatactaatatcaaacaaacgcgaatacgacgaacgcaacgacgacgaccgcccaacaacccgaactcgaataaaaaaacgccgaataaaaataacgaccaacatactactcgactacgactcgacctcccacacccgcgactccctaatcctcgccaacaacgacgacgacaaaacaacgaacgacgcccgcgtctacaacgacgccgaatccgaacgcgcgacgcgacgataaaaatcgaaacccgaacgaaaaacgaaaaccgaacataacgctacgaaaaaacgactacgaaacgctcgaactactactactactactaaacgccgcgtacctaataccgcgaaacgcgcaaataaaacgactaacgcgctaccccgccacttacaactataccaaaaaatctatcatctacgtaaactcttcctaaatacccaaaatcgtaccgaacgacatcaactccc

SEQ ID NO: 23541 - DNA, 806 bp, Artificial Sequence
  chemically treated genomic DNA (Homo sapiens) CpG-island No: 23541
ggtatagcgcggtcgtaggcgttcggcgtagcgtagtgggaagtttattgttagttattggtttgcgtttagcgtcgttacgtttagcgtcgcgttggacgttaggaaggtgtttaggaagttaatgatttggtatgcgtcgggcgtcgacggtgttcgttcgcgtattatatcgagtagcgtgaagggtatgtttagcgtcgttagtagtaggtggtttagagatagatttattaggaggacgtttgaggttcgagtgcggagtttagcgttgtaggcgtaataaagtagtattagtgcgttggatagtagcgttacggttagtattattattaggagattcgttagtagcgtttcgtcggggtttatggcgttagcggttcgttaggtattttggggtttttatggttttgtttcgggcgcgagtttgggaaagtgaggcgatggagtagttgagcggcgcgtttacggtttttgggaggtgtagagtcggttagtaaggtttagagtagcgcgaggaaagcggcggtaagtgtagggttcggggtattcggggggagggcgtagttttgcggagtaggagtagttcggggtcgttttggaggtagcgtaatcgcggtgttgtttagggtgttgaatgcgtttatcgtttcggtaggattgttttgaggttgaagcgaggcgtaggggcgcggggcgtaggggcgagggaggttttttttttaatattgtatttttttttttttttttttcgtggcgtggtaggatgggattttgcgcgtttttgtttcgggttaggttagttt

SEQ ID NO: 23542 - DNA, 806 bp, Artificial Sequence
  chemically treated genomic DNA (Homo sapiens) CpG-island No: 23542
aaactaacctaacccgaaacaaaaacgcgcaaaatcccatcctaccacgccacgaaaaaaaaaaaaaaaaaaatacaatattaaaaaaaaaacctccctcgcccctacgccccgcgcccctacgcctcgcttcaacctcaaaacaatcctaccgaaacgataaacgcattcaacaccctaaacaacaccgcgattacgctacctccaaaacgaccccgaactactcctactccgcaaaactacgccctccccccgaataccccgaaccctacacttaccgccgctttcctcgcgctactctaaaccttactaaccgactctacacctcccaaaaaccgtaaacgcgccgctcaactactccatcgcctcactttcccaaactcgcgcccgaaacaaaaccataaaaaccccaaaatacctaacgaaccgctaacgccataaaccccgacgaaacgctactaacgaatctcctaataataatactaaccgtaacgctactatccaacgcactaatactactttattacgcctacaacgctaaactccgcactcgaacctcaaacgtcctcctaataaatctatctctaaaccacctactactaacgacgctaaacatacccttcacgctactcgatataatacgcgaacgaacaccgtcgacgcccgacgcataccaaatcattaacttcctaaacaccttcctaacgtccaacgcgacgctaaacgtaacgacgctaaacgcaaaccaataactaacaataaacttcccactacgctacgccgaacgcctacgaccgcgctatacc

SEQ ID NO: 23543 - DNA, 806 bp, Artificial Sequence
  chemically treated genomic DNA (Homo sapiens) CpG-island No: 23543
ggattgatttggttcggaatagaagcgcgtagagttttattttgttacgttacgaggagagaagaaggaaagatatagtgttaggaaagagatttttttcgtttttacgtttcgcgtttttgcgtttcgttttagttttaggatagttttgtcgggacggtgagcgtatttagtattttggatagtatcgcggttgcgttgtttttagggcggtttcgggttgtttttgtttcgtagagttacgtttttttttcgggtgtttcggattttgtatttgtcgtcgtttttttcgcgttgttttggattttgttagtcggttttgtattttttagaagtcgtgggcgcgtcgtttagttgttttatcgttttatttttttaggttcgcgttcgaagtagagttatgagaattttagggtgtttggcgagtcgttagcgttatgggtttcggcgaggcgttgttggcgggttttttggtgatggtattggtcgtggcgttgttatttaacgtattggtgttgttttgttgcgtttatagcgttgagtttcgtattcgagttttaggcgtttttttggtgaatttgtttttgggttatttgttgttggcggcgttggatatgttttttacgttgttcggtgtgatgcgcgggcggatatcgtcggcgttcggcgtatgttaagttattggttttttggatatttttttggcgtttaacgcggcgttgagcgtggcggcgttgagcgtagattagtggttggtagtgggttttttattgcgttacgtcggacgtttgcgatcgcgttatgtt

SEQ ID NO: 23544 - DNA, 806 bp, Artificial Sequence
  chemically treated genomic DNA (Homo sapiens) CpG-island No: 23544
aacataacgcgatcgcaaacgtccgacgtaacgcaataaaaaacccactaccaaccactaatctacgctcaacgccgccacgctcaacgccgcgttaaacgccaaaaaaatatccaaaaaaccaataacttaacatacgccgaacgccgacgatatccgcccgcgcatcacaccgaacaacgtaaaaaacatatccaacgccgccaacaacaaataacccaaaaacaaattcaccaaaaaaacgcctaaaactcgaatacgaaactcaacgctataaacgcaacaaaacaacaccaatacgttaaataacaacgccacgaccaataccatcaccaaaaaacccgccaacaacgcctcgccgaaacccataacgctaacgactcgccaaacaccctaaaattctcataactctacttcgaacgcgaacctaaaaaaataaaacgataaaacaactaaacgacgcgcccacgacttctaaaaaatacaaaaccgactaacaaaatccaaaacaacgcgaaaaaaacgacgacaaatacaaaatccgaaacacccgaaaaaaaaacgtaactctacgaaacaaaaacaacccgaaaccgccctaaaaacaacgcaaccgcgatactatccaaaatactaaatacgctcaccgtcccgacaaaactatcctaaaactaaaacgaaacgcaaaaacgcgaaacgtaaaaacgaaaaaaatctctttcctaacactatatctttccttcttctctcctcgtaacgtaacaaaataaaactctacgcgcttctattccgaaccaaatcaatcc

SEQ ID NO: 23545 - DNA, 705 bp, Artificial Sequence
  chemically treated genomic DNA (Homo sapiens) CpG-island No: 23545
  unsure (240)
gcgagcgtgcgagcgtgtgagcgtgcgagtgtgcgagcgtgtgagcgtgcgagcgtgcgagtgtgcgtgcgagcgtgcgagtgtgcgagcgtgcgagtgcgagcgtgcgagcgtgcgagtgtgcgtgcgtgtgagtgtgcgagtgtgcgagcgagcggagtcgtgagagtggtagtgtttagtgcgaaggggtacggagtggtgcgaggtgcgcggaggtgtgtcgagcgttgcggaatngcgcgtagcgtggtggagtgtggcgaggggtgcggagcgttgtgtgttgttcggagcgtgcgggcggtgcggaatggtgcgggcggtgcggagtggggcggggtgtgtcggagcgtgcggggcggaggggagcgttgcggagtggtgcggagcggtgtcggatttgcgtattgggatgttgcgtgtggtttcgagtttgttagatgttggggggtggtgttagtatgatcgacgtgttagaacgttgcgcgatggtgcgcgggtgcgggagttgtcggaagtggtcgagaattgtgcggtagtgttgggggacgggtggagttgtaggtcgcggggggagtaaaggttgtggcggagcggacggtgaaaagatgtcggtgtttggcggggtaatgggggtggggtttgggagagggtgtgggttgcgttggggggttattttgtgcggtttgtcggtgcgagagg

SEQ ID NO: 23546 - DNA, 705 bp, Artificial Sequence
  chemically treated genomic DNA (Homo sapiens) CpG-island No: 23546
  unsure (466)
cctctcgcaccgacaaaccgcacaaaataaccccccaacgcaacccacaccctctcccaaaccccacccccattaccccgccaaacaccgacatcttttcaccgtccgctccgccacaacctttactccccccgcgacctacaactccacccgtcccccaacactaccgcacaattctcgaccacttccgacaactcccgcacccgcgcaccatcgcgcaacgttctaacacgtcgatcatactaacaccaccccccaacatctaacaaactcgaaaccacacgcaacatcccaatacgcaaatccgacaccgctccgcaccactccgcaacgctcccctccgccccgcacgctccgacacaccccgccccactccgcaccgcccgcaccattccgcaccgcccgcacgctccgaacaacacacaacgctccgcacccctcgccacactccaccacgctacgcgcnattccgcaacgctcgacacacctccgcgcacctcgcaccactccgtaccccttcgcactaaacactaccactctcacgactccgctcgctcgcacactcgcacactcacacgcacgcacactcgcacgctcgcacgctcgcactcgcacgctcgcacactcgcacgctcgcacgcacactcgcacgctcgcacgctcacacgctcgcacactcgcacgctcacacgctcgcacgctcgc

SEQ ID NO: 23547 - DNA, 705 bp, Artificial Sequence
  chemically treated genomic DNA (Homo sapiens) CpG-island No: 23547
  unsure (466)
tttttcgtatcggtaaatcgtatagaataattttttaacgtaatttatatttttttttaaattttatttttattatttcgttaagtatcgatatttttttatcgttcgtttcgttataatttttatttttttcgcggtttataattttattcgttttttaatattatcgtataattttcgattattttcgatagttttcgtattcgcgtattatcgcgtagcgttttgatacgtcggttatattaatattattttttaatatttgataagttcggaattatacgtaatattttaatacgtaagttcggtatcgtttcgtattatttcgtaacgttttttttcgtttcgtacgtttcggtatatttcgttttatttcgtatcgttcgtattatttcgtatcgttcgtacgtttcgaataatatataacgtttcgtatttttcgttatattttattacgttgcgcgtnatttcgtagcgttcggtatattttcgcgtatttcgtattatttcgtattttttcgtattggatattattatttttacggtttcgttcgttcgtatattcgtatatttatacgtacgtatattcgtacgttcgtacgttcgtattcgtacgttcgtatattcgtacgttcgtacgtatattcgtacgttcgtacgtttatacgttcgtatattcgtacgtttatacgttcgtacgttcgt

SEQ ID NO: 23548 - DNA, 705 bp, Artificial Sequence
  chemically treated genomic DNA (Homo sapiens) CpG-island No: 23548
  unsure (240)
acgaacgtacgaacgtataaacgtacgaatatacgaacgtataaacgtacgaacgtacgaatatacgtacgaacgtacgaatatacgaacgtacgaatacgaacgtacgaacgtacgaatatacgtacgtataaatatacgaatatacgaacgaacgaaaccgtaaaaataataatatccaatacgaaaaaatacgaaataatacgaaatacgcgaaaatataccgaacgctacgaaatnacgcgcaacgtaataaaatataacgaaaaatacgaaacgttatatattattcgaaacgtacgaacgatacgaaataatacgaacgatacgaaataaaacgaaatataccgaaacgtacgaaacgaaaaaaaacgttacgaaataatacgaaacgataccgaacttacgtattaaaatattacgtataattccgaacttatcaaatattaaaaaataatattaatataaccgacgtatcaaaacgctacgcgataatacgcgaatacgaaaactatcgaaaataatcgaaaattatacgataatattaaaaaacgaataaaattataaaccgcgaaaaaaataaaaattataacgaaacgaacgataaaaaaatatcgatacttaacgaaataataaaaataaaatttaaaaaaaaatataaattacgttaaaaaattattctatacgatttaccgatacgaaaaa

SEQ ID NO: 23549 - DNA, 888 bp, Artificial Sequence
  chemically treated genomic DNA (Homo sapiens) CpG-island No: 23549
ttttcgttcgagttatagattattcgtttttcgtttaggattttatcggttatagcggggcgtcgtagggtttcgcggttttttttttattgattttgtcgtttgcggtggcggtcgtcgtaacgagcggattatagttattgaggcgttttgcgtcgggttttaggcgtttcgtatattcgttcgttttttagcgaaagtagcggcggaggcggcggtcgtagcggtggtgggtggtagttttttcgtttcgttcgtcggaagtttttacgcgtatattatataatagaggtcgcggcggttttgttagttaggtcgggtacggtttagagggagttcgtttcggttattgttttcgtagttagcgtcgcggcgtatattcggattttatttttttattcgggtcgtcgttatttttcggtttttttgtcgaagcggcggttttttaggttttagattcggttcggttttaagaggcgattttcgttcgggtttatttaagtcgggtcgtatttagttcgtcgtttttttttttttttgttcggcgtttacgattcgtagcgttcgttcggggtgagcggggcgtcgcgttttatcgaatttaaggcgaagaggaaagagttagaaattttcgatgtatcggtaattgcggcggtgttttttttgcgatcggaattaacgttaggaggagggagaggtgttattttcgttcggatcgtttttttatcgcgagattttttttttttgtttcgttttgatcgtggataggcgttttcgttttttttattgcgcgcggattagggtgagggattgggataggggaggggagagacgtttttagttttttttatttttttattgggttttacgtcgtttggatatttgttt

SEQ ID NO: 23550 - DNA, 888 bp, Artificial Sequence
  chemically treated genomic DNA (Homo sapiens) CpG-island No: 23550
aaacaaatatccaaacgacgtaaaacccaataaaaaaataaaaaaaactaaaaacgtctctcccctcccctatcccaatccctcaccctaatccgcgcgcaataaaaaaaacgaaaacgcctatccacgatcaaaacgaaacaaaaaaaaaaaatctcgcgataaaaaaacgatccgaacgaaaataacacctctccctcctcctaacgttaattccgatcgcaaaaaaaacaccgccgcaattaccgatacatcgaaaatttctaactctttcctcttcgccttaaattcgataaaacgcgacgccccgctcaccccgaacgaacgctacgaatcgtaaacgccgaacaaaaaaaaaaaaaaacgacgaactaaatacgacccgacttaaataaacccgaacgaaaatcgcctcttaaaaccgaaccgaatctaaaacctaaaaaaccgccgcttcgacaaaaaaaccgaaaaataacgacgacccgaataaaaaaataaaatccgaatatacgccgcgacgctaactacgaaaacaataaccgaaacgaactccctctaaaccgtacccgacctaactaacaaaaccgccgcgacctctattatataatatacgcgtaaaaacttccgacgaacgaaacgaaaaaactaccacccaccaccgctacgaccgccgcctccgccgctactttcgctaaaaaacgaacgaatatacgaaacgcctaaaacccgacgcaaaacgcctcaataactataatccgctcgttacgacgaccgccaccgcaaacgacaaaatcaataaaaaaaaaaccgcgaaaccctacgacgccccgctataaccgataaaatcctaaacgaaaaacgaataatctataactcgaacgaaaa

SEQ ID NO: 23551 - DNA, 888 bp, Artificial Sequence
  chemically treated genomic DNA (Homo sapiens) CpG-island No: 23551
ggataagtgtttaggcgacgtggaatttagtaagggaataaagaagattggaaacgtttttttttttttttattttagttttttattttaattcgcgcgtaatagaaaaggcggaagcgtttgtttacgattagggcggggtaaggggaagaaatttcgcgataggagagcggttcgggcgggggtggtatttttttttttttttggcgttagtttcggtcgtagaggagatatcgtcgtagttgtcggtatatcggggatttttggttttttttttttcgttttaaattcggtgagacgcggcgtttcgtttatttcgggcggacgttgcgggtcgtggacgtcgggtagagggagagggaggcggcgggttggatgcggttcggtttggatgggttcgaacggaggtcgttttttgaggtcgggtcggatttagggtttgaaaggtcgtcgtttcggtagggaggtcgaggggtagcggcggttcgggtggggaggtggggttcgggtgtgcgtcgcggcgttggttgcgaaggtagtggtcgaggcgggttttttttgggtcgtgttcggtttggttaataaagtcgtcgcggtttttgttgtgtgatgtacgcgtgggggttttcggcgggcggggcggaggggttgttatttattatcgttgcggtcgtcgttttcgtcgttgttttcgttggagggcgggcggatgtacggggcgtttggggttcggcgtaaagcgttttagtgattgtggttcgttcgttgcggcggtcgttatcgtaggcgatagggttagtggagaaagagtcgcgggattttacggcgtttcgttgtggtcgatggggttttgggcgggaagcgggtgatttgtggttcgggcgggag

SEQ ID NO: 23552 - DNA, 888 bp, Artificial Sequence
  chemically treated genomic DNA (Homo sapiens) CpG-island No: 23552
ctcccgcccgaaccacaaatcacccgcttcccgcccaaaaccccatcgaccacaacgaaacgccgtaaaatcccgcgactctttctccactaaccctatcgcctacgataacgaccgccgcaacgaacgaaccacaatcactaaaacgctttacgccgaaccccaaacgccccgtacatccgcccgccctccaacgaaaacaacgacgaaaacgacgaccgcaacgataataaataacaacccctccgccccgcccgccgaaaacccccacgcgtacatcacacaacaaaaaccgcgacgactttattaaccaaaccgaacacgacccaaaaaaaacccgcctcgaccactaccttcgcaaccaacgccgcgacgcacacccgaaccccacctccccacccgaaccgccgctacccctcgacctccctaccgaaacgacgacctttcaaaccctaaatccgacccgacctcaaaaaacgacctccgttcgaacccatccaaaccgaaccgcatccaacccgccgcctccctctccctctacccgacgtccacgacccgcaacgtccgcccgaaataaacgaaacgccgcgtctcaccgaatttaaaacgaaaaaaaaaaaaccaaaaatccccgatataccgacaactacgacgatatctcctctacgaccgaaactaacgccaaaaaaaaaaaaaaataccacccccgcccgaaccgctctcctatcgcgaaatttcttccccttaccccgccctaatcgtaaacaaacgcttccgccttttctattacgcgcgaattaaaataaaaaactaaaataaaaaaaaaaaaaaacgtttccaatcttctttattcccttactaaattccacgtcgcctaaacacttatcc

SEQ ID NO: 23553 - DNA, 716 bp, Artificial Sequence
  chemically treated genomic DNA (Homo sapiens) CpG-island No: 23553
ttcgcggtcggttcgacggtagtatatttagtaggaacgttcgtaaggtaggttatggtggtagggtttggggtgttagcggtagagcgatacgtcgtttttttcgtattttttgcggtattgtttgtacggattatcgcggtagagcgggtttcggttttagcgcgagtttgtggttcgtacgttaaacgtttcgatgatgtttttgaagtggtggtaggtgtatttgagggcggttagcgcgcgcgtgggtaggaagttgaagattttgattagtacgtgttcgggtagtagtagtatgtattgtcgcggttttagtagtcgttgaattttgaagcggatttttaggaagtcgtgcgatacgtgtcggtataagcggtatagggaggtgttcgtcgtgttttcggtatcgtttgggtcgggcgtagtggtcggggagtcggtcgggggtggtttcgggggttcgttcggttcgcggttttggagaaagaagagttggttcggaggcggcggttttttcgggttgatcgttaggtatatagtttttttttttacgtttttggtgtcgtttttgttaaagaagatgtatttatttattacgttcgttattattacgtttacgtggaagtttgacgtttcgtagtttcgggtagggggcggagggggcgtcgggggagtgtttttaggtttggcgggtgtcgggttgttatttttat

SEQ ID NO: 23554 - DNA, 716 bp, Artificial Sequence
  chemically treated genomic DNA (Homo sapiens) CpG-island No: 23554
ataaaaataacaacccgacacccgccaaacctaaaaacactcccccgacgccccctccgccccctacccgaaactacgaaacgtcaaacttccacgtaaacgtaataataacgaacgtaataaataaatacatcttctttaacaaaaacgacaccaaaaacgtaaaaaaaaaaactatatacctaacgatcaacccgaaaaaaccgccgcctccgaaccaactcttctttctccaaaaccgcgaaccgaacgaacccccgaaaccacccccgaccgactccccgaccactacgcccgacccaaacgataccgaaaacacgacgaacacctccctataccgcttataccgacacgtatcgcacgacttcctaaaaatccgcttcaaaattcaacgactactaaaaccgcgacaatacatactactactacccgaacacgtactaatcaaaatcttcaacttcctacccacgcgcgcgctaaccgccctcaaatacacctaccaccacttcaaaaacatcatcgaaacgtttaacgtacgaaccacaaactcgcgctaaaaccgaaacccgctctaccgcgataatccgtacaaacaataccgcaaaaaatacgaaaaaaacgacgtatcgctctaccgctaacaccccaaaccctaccaccataacctaccttacgaacgttcctactaaatatactaccgtcgaaccgaccgcgaa

SEQ ID NO: 23555 - DNA, 716 bp, Artificial Sequence
  chemically treated genomic DNA (Homo sapiens) CpG-island No: 23555
gtgagggtgatagttcggtattcgttaggtttgaggatattttttcggcgtttttttcgttttttgttcgggattgcggagcgttaggtttttacgtggacgtggtggtgacgggcgtggtagatgagtgtattttttttggtaaggacggtattaagaacgtgaaggaggagattgtgtgtttgacggttagttcggaggaatcgtcgttttcgggttagtttttttttttttagaatcgcgggtcggacgggttttcggagttattttcggtcgatttttcggttattgcgttcggtttagacgatgtcgagggtacggcggatatttttttgtgtcgtttgtatcggtacgtgtcgtacgattttttagagattcgttttaagatttagcggttgttggagtcgcgatagtatatgttgttgttgttcgagtacgtgttggttaagatttttagttttttgtttacgcgcgcgttggtcgtttttaagtgtatttgttattattttaagggtattatcgaggcgtttggcgtgcgggttatagattcgcgttggagtcgagattcgttttatcgcgatgattcgtgtaaatagtgtcgtaagagatacgagaagggcgacgtgtcgttttgtcgttggtattttaagttttattattatgatttgttttacggacgtttttattggatgtgttgtcgtcgagtcgatcgcgag

SEQ ID NO: 23556 - DNA, 716 bp, Artificial Sequence
  chemically treated genomic DNA (Homo sapiens) CpG-island No: 23556
ctcgcgatcgactcgacgacaacacatccaataaaaacgtccgtaaaacaaatcataataataaaacttaaaataccaacgacaaaacgacacgtcgcccttctcgtatctcttacgacactatttacacgaatcatcgcgataaaacgaatctcgactccaacgcgaatctataacccgcacgccaaacgcctcgataatacccttaaaataataacaaatacacttaaaaacgaccaacgcgcgcgtaaacaaaaaactaaaaatcttaaccaacacgtactcgaacaacaacaacatatactatcgcgactccaacaaccgctaaatcttaaaacgaatctctaaaaaatcgtacgacacgtaccgatacaaacgacacaaaaaaatatccgccgtaccctcgacatcgtctaaaccgaacgcaataaccgaaaaatcgaccgaaaataactccgaaaacccgtccgacccgcgattctaaaaaaaaaaaaactaacccgaaaacgacgattcctccgaactaaccgtcaaacacacaatctcctccttcacgttcttaataccgtccttaccaaaaaaaatacactcatctaccacgcccgtcaccaccacgtccacgtaaaaacctaacgctccgcaatcccgaacaaaaaacgaaaaaaacgccgaaaaaatatcctcaaacctaacgaataccgaactatcaccctcac

SEQ ID NO: 23557 - DNA, 680 bp, Artificial Sequence
  chemically treated genomic DNA (Homo sapiens) CpG-island No: 23557
gtgcggtcgtagagagtgttcggttattttcgaaagcgttcgggcgtttttaagtttagtcgagtttagtttcggatttttcgtcgattcgattgtattcggttatttttggaaacgttcggttgtttcgggggtattttttagtttattagtttcgcgggattacgttcggttattttcggaaatattcgggtgtttttttattttaggtttcgtttcggtttcggtttattcgttcggttcgaatgcgttcgggtattttcgtcgggggcgggttaggtcgttcggaatcgtggcggcggcggaggcggggatttcgcggttgcggcgacggtggtcgcggtggagttacggggcgggtttggtttggtgtgacggcggttgcggcggcggtggcggtcgcgattaggtgagttttgattggttttcgtggcgggggcggttgggagtgtgtttaaatgcggggcgttcgggggtagtgtcgggtttcggtggaagttagaacgtaagcgttaggttgcgtcgggtttcgcgggaattgggggggtcgtaggtaagggggggtttcgggttcggtttcgtagcggtgtagtttttttgggacggtcggggtagaatggggagagatttttcgcgtttaagatatcggattggagtcgaggttttaaatgaagggaggt

SEQ ID NO: 23558 - DNA, 680 bp, Artificial Sequence
  chemically treated genomic DNA (Homo sapiens) CpG-island No: 23558
acctcccttcatttaaaacctcgactccaatccgatatcttaaacgcgaaaaatctctccccattctaccccgaccgtcccaaaaaaactacaccgctacgaaaccgaacccgaaacccccccttacctacgacccccccaattcccgcgaaacccgacgcaacctaacgcttacgttctaacttccaccgaaacccgacactacccccgaacgccccgcatttaaacacactcccaaccgcccccgccacgaaaaccaatcaaaactcacctaatcgcgaccgccaccgccgccgcaaccgccgtcacaccaaaccaaacccgccccgtaactccaccgcgaccaccgtcgccgcaaccgcgaaatccccgcctccgccgccgccacgattccgaacgacctaacccgcccccgacgaaaatacccgaacgcattcgaaccgaacgaataaaccgaaaccgaaacgaaacctaaaataaaaaaacacccgaatatttccgaaaataaccgaacgtaatcccgcgaaactaataaactaaaaaatacccccgaaacaaccgaacgtttccaaaaataaccgaatacaatcgaatcgacgaaaaatccgaaactaaactcgactaaacttaaaaacgcccgaacgctttcgaaaataaccgaacactctctacgaccgcac

SEQ ID NO: 23559 - DNA, 680 bp, Artificial Sequence
  chemically treated genomic DNA (Homo sapiens) CpG-island No: 23559
gtttttttttatttggggtttcggttttagttcggtattttggacgcggggagtttttttttattttgtttcgatcgttttaaggaggttgtatcgttgcggagtcgagttcgaggtttttttttgtttgcggtttttttagttttcgcggggttcgacgtagtttggcgtttgcgttttggtttttatcggggttcggtattgttttcgggcgtttcgtatttaagtatatttttagtcgttttcgttacgagggttagttaggatttatttggtcgcggtcgttatcgtcgtcgtagtcgtcgttatattaagttaagttcgtttcgtggttttatcgcggttatcgtcgtcgtagtcgcgggattttcgttttcgtcgtcgttacggtttcgagcggtttggttcgttttcggcggaaatgttcgagcgtattcgagtcgggcggatgaatcgaggtcgaggcggagtttgaggtaagggggtattcgagtgttttcggaagtagtcgaacgtaatttcgcgggattggtggattagagggtgttttcgagatagtcgagcgtttttagaggtagtcgagtgtaatcgggtcggcgagggattcgagattgggttcggttgggtttagagacgttcgagcgttttcggaaatggtcgaatattttttacggtcgtat

SEQ ID NO: 23560 - DNA, 680 bp, Artificial Sequence
  chemically treated genomic DNA (Homo sapiens) CpG-island No: 23560
atacgaccgtaaaaaatattcgaccatttccgaaaacgctcgaacgtctctaaacccaaccgaacccaatctcgaatccctcgccgacccgattacactcgactacctctaaaaacgctcgactatctcgaaaacaccctctaatccaccaatcccgcgaaattacgttcgactacttccgaaaacactcgaatacccccttacctcaaactccgcctcgacctcgattcatccgcccgactcgaatacgctcgaacatttccgccgaaaacgaaccaaaccgctcgaaaccgtaacgacgacgaaaacgaaaatcccgcgactacgacgacgataaccgcgataaaaccacgaaacgaacttaacttaatataacgacgactacgacgacgataacgaccgcgaccaaataaatcctaactaaccctcgtaacgaaaacgactaaaaatatacttaaatacgaaacgcccgaaaacaataccgaaccccgataaaaaccaaaacgcaaacgccaaactacgtcgaaccccgcgaaaactaaaaaaaccgcaaacaaaaaaaaacctcgaactcgactccgcaacgatacaacctccttaaaacgatcgaaacaaaataaaaaaaaactccccgcgtccaaaataccgaactaaaaccgaaaccccaaataaaaaaaaac

SEQ ID NO: 23561 - DNA, 1273 bp, Artificial Sequence
  chemically treated genomic DNA (Homo sapiens) CpG-island No: 23561
ttttttttttttatttttcgtttttttttcgcgcgttattcgtttttttttttttttcgttaataacggttgggtggttgggggaggagggaaggtggtttcggcggagtttgggcgggcgttttttatttagtcgttagtcgtcgtgggagtcggaggatggcggcggtagtagcggtcgtcggagattaggcggtgcggaggttcggggcgttaagcgcggcggtagaaagcggtagcggttcgttatggcgtattagaatcgaaattagcggtagtcgtatcgttatttgagtcgtttttttttgttggagatagcgaggggtgtttgtagtcgggatattttttttttcgcgttttttcgtttttcgcgttcgcgttaggtcgttagttttgtttatcgtttcgagaagagcgcgtcgggcgtcgattgtttttcggggcgtcgggcggcggttttggacgtgcgggggtttttttgggtcggtcgtagcgtttcggttttgttttttagttttcgcgttcgtttttgtttttttggttttcggggtatagcgcgcggttcggttcggagtagggcggatatgagcgttaagtagagcggtttggtcgtcgtttacggcgtacgcgcgcgtattcggttcggatttattttttagtagtagcggagtggttaatgggatcgggattagagtcgggggtcggaggtcgtcgtcgcggggaggttttcggtttaggtgtttagcgtttattagttcggcggcgtcgcggcggtttcgtagttgttttttcgggggggcgtggcgtcgggggttttcgcggcgtagtttttttttagtatttcgaatagtagtagcggttcgtaggattcgtaggattcggtgtatagtagttttgaggatggcggcggcggtcggtatcggtcggtgggttggagtttcggcgggtcgtttttggtgatcggttttttattagtttattttttatcgcgtatgtttggaggtacggatttttttttacgcgttcgcgttcggttttttcgcggttgtacgtgggtcgtggtcgtcggttatttttatttttttttttttttttttcggtcggggcgtcgggggttgtttttcggtttagttcgcgtcggtttttattttgggaagaaattcggtacgtaatatttgcggtgtcgttgtcgcgtagatacgtggttttgtttttaaatatcgtgagtatttatattttagcgggtatttagtagagatagtttattttttag

SEQ ID NO: 23562 - DNA, 1273 bp, Artificial Sequence
  chemically treated genomic DNA (Homo sapiens) CpG-island No: 23562
ctaaaaaataaactatctctactaaatacccgctaaaatataaatactcacgatatttaaaaacaaaaccacgtatctacgcgacaacgacaccgcaaatattacgtaccgaatttcttcccaaaataaaaaccgacgcgaactaaaccgaaaaacaacccccgacgccccgaccgaaaaaaaaaaaaaaaaaaataaaaataaccgacgaccacgacccacgtacaaccgcgaaaaaaccgaacgcgaacgcgtaaaaaaaaatccgtacctccaaacatacgcgataaaaaataaactaataaaaaaccgatcaccaaaaacgacccgccgaaactccaacccaccgaccgataccgaccgccgccgccatcctcaaaactactatacaccgaatcctacgaatcctacgaaccgctactactattcgaaatactaaaaaaaaactacgccgcgaaaacccccgacgccacgcccccccgaaaaaacaactacgaaaccgccgcgacgccgccgaactaataaacgctaaacacctaaaccgaaaacctccccgcgacgacgacctccgacccccgactctaatcccgatcccattaaccactccgctactactaaaaaataaatccgaaccgaatacgcgcgcgtacgccgtaaacgacgaccaaaccgctctacttaacgctcatatccgccctactccgaaccgaaccgcgcgctataccccgaaaaccaaaaaaacaaaaacgaacgcgaaaactaaaaaacaaaaccgaaacgctacgaccgacccaaaaaaacccccgcacgtccaaaaccgccgcccgacgccccgaaaaacaatcgacgcccgacgcgctcttctcgaaacgataaacaaaactaacgacctaacgcgaacgcgaaaaacgaaaaaacgcgaaaaaaaaaatatcccgactacaaacacccctcgctatctccaacaaaaaaaaacgactcaaataacgatacgactaccgctaatttcgattctaatacgccataacgaaccgctaccgctttctaccgccgcgcttaacgccccgaacctccgcaccgcctaatctccgacgaccgctactaccgccgccatcctccgactcccacgacgactaacgactaaataaaaaacgcccgcccaaactccgccgaaaccaccttccctcctcccccaaccacccaaccgttattaacgaaaaaaaaaaaaaaacgaataacgcgcgaaaaaaaaacgaaaaataaaaaaaaaaaa

SEQ ID NO: 23563 - DNA, 1273 bp, Artificial Sequence
  chemically treated genomic DNA (Homo sapiens) CpG-island No: 23563
ttggaaaatagattatttttattgagtattcgttgaggtgtgggtgtttacgatgtttaaaaataaaattacgtgtttacgcggtagcgatatcgtaggtgttacgtgtcgggtttttttttaggatggagatcggcgcgggttgggtcgggaagtagttttcggcgtttcggtcgaaggagaaaaggagaagggtaaaaatagtcggcggttacggtttacgtgtagtcgcgggaggatcgagcgcgggcgcgtggagaggggttcgtatttttaaatatgcgcggtgagaggtgagttggtaaggagtcgattattaggagcggttcgtcggggttttagtttatcggtcggtgtcggtcgtcgtcgttatttttagggttgttgtgtatcgagttttgcgagttttacgggtcgttgttgttgttcgggatgttgaaagaggattgcgtcgcgaaggttttcgacgttacgttttttcgaggaaatagttgcggggtcgtcgcggcgtcgtcgggttggtgagcgttgggtatttgggtcgggaattttttcgcggcggcggttttcggttttcggttttggtttcggttttattggttatttcgttgttattggaaggtagattcgagtcgagtacgcgcgcgtgcgtcgtgagcggcggttaggtcgttttgtttggcgtttatgttcgttttgtttcggatcgggtcgcgcgttgtgtttcgagagttaagaaggtaggagcgaacgcgggagttagagggtagggtcgaggcgttgcggtcggtttagagaggttttcgtacgtttagggtcgtcgttcggcgtttcgaggggtagtcggcgttcggcgcgtttttttcggggcggtgggtaaggttggcggtttgacgcgggcgcgggagacgaggagacgcggagaagaaggtgtttcggttgtaggtatttttcgttgtttttagtaggaaggggcgatttaggtggcggtgcgattgtcgttggtttcggttttggtgcgttatgacgggtcgttgtcgttttttgtcgtcgcgtttggcgtttcgggttttcgtatcgtttagttttcggcggtcgttgttatcgtcgttatttttcggtttttacggcggttggcggttgagtgggaggcgttcgtttagatttcgtcggagttattttttttttttttttagttatttagtcgttattaacggagaaagaggaaaaacgggtggcgcgcgaggggaggacgaagaatgggagggaggga

SEQ ID NO: 23564 - DNA, 1273 bp, Artificial Sequence
  chemically treated genomic DNA (Homo sapiens) CpG-island No: 23564
tccctccctcccattcttcgtcctcccctcgcgcgccacccgtttttcctctttctccgttaataacgactaaataactaaaaaaaaaaaaaaaataactccgacgaaatctaaacgaacgcctcccactcaaccgccaaccgccgtaaaaaccgaaaaataacgacgataacaacgaccgccgaaaactaaacgatacgaaaacccgaaacgccaaacgcgacgacaaaaaacgacaacgacccgtcataacgcaccaaaaccgaaaccaacgacaatcgcaccgccacctaaatcgccccttcctactaaaaacaacgaaaaatacctacaaccgaaacaccttcttctccgcgtctcctcgtctcccgcgcccgcgtcaaaccgccaaccttacccaccgccccgaaaaaaacgcgccgaacgccgactacccctcgaaacgccgaacgacgaccctaaacgtacgaaaacctctctaaaccgaccgcaacgcctcgaccctaccctctaactcccgcgttcgctcctaccttcttaactctcgaaacacaacgcgcgacccgatccgaaacaaaacgaacataaacgccaaacaaaacgacctaaccgccgctcacgacgcacgcgcgcgtactcgactcgaatctaccttccaataacaacgaaataaccaataaaaccgaaaccaaaaccgaaaaccgaaaaccgccgccgcgaaaaaattcccgacccaaatacccaacgctcaccaacccgacgacgccgcgacgaccccgcaactatttcctcgaaaaaacgtaacgtcgaaaaccttcgcgacgcaatcctctttcaacatcccgaacaacaacaacgacccgtaaaactcgcaaaactcgatacacaacaaccctaaaaataacgacgacgaccgacaccgaccgataaactaaaaccccgacgaaccgctcctaataatcgactccttaccaactcacctctcaccgcgcatatttaaaaatacgaacccctctccacgcgcccgcgctcgatcctcccgcgactacacgtaaaccgtaaccgccgactatttttacccttctccttttctccttcgaccgaaacgccgaaaactacttcccgacccaacccgcgccgatctccatcctaaaaaaaaacccgacacgtaacacctacgatatcgctaccgcgtaaacacgtaattttatttttaaacatcgtaaacacccacacctcaacgaatactcaataaaaataatctattttccaa

SEQ ID NO: 23565 - DNA, 707 bp, Artificial Sequence
  chemically treated genomic DNA (Homo sapiens) CpG-island No: 23565
agcgcggttaaaggtgaggggtgcggggagagggcgttcgggcggtttgggtttcgcgtatttggtacggtcggtacggttaattcggtaggtattattgggcgggttgcgaattcgcggttcgggtttcgttgagttcgagttgtattggcgtagtggttgttcgttatttcgggtcgtatttttgttacggttttcgttagtcgtcggtgttcgggttggaggtgggttagcgcgttttggtttttggtttattcgggcgtgcgcggattaaggtttatttttttatacgttttttatcggtttcgatatttttttatatcgggtttgtttttcgtttttattttagcggcgattacggttagcgattttttttaggttgttagcggtgcggataggggcgggcgttagagttttgttcgcggaggggcgaggcgagcgttttaggttcgttttcggcgcgggcgcgggagggcggcgaggtcgcgatcggggtcgtgggtttggaattttgtattagttttaggttattcgttgggaacgtattcgttttattcgcgtcggggtcgcggtttcgttttttttttcggggttgggtagcgagaaggcggggttttcgagtttgaggcggggcgggtaggaaattataatttttagtaggttttgcgttggggtcgtggaggtcgttgggagagtggttttttttt

SEQ ID NO: 23566 - DNA, 707 bp, Artificial Sequence
  chemically treated genomic DNA (Homo sapiens) CpG-island No: 23566
aaaaaaaaaccactctcccaacgacctccacgaccccaacgcaaaacctactaaaaattataatttcctacccgccccgcctcaaactcgaaaaccccgccttctcgctacccaaccccgaaaaaaaaaacgaaaccgcgaccccgacgcgaataaaacgaatacgttcccaacgaataacctaaaactaatacaaaattccaaacccacgaccccgatcgcgacctcgccgccctcccgcgcccgcgccgaaaacgaacctaaaacgctcgcctcgcccctccgcgaacaaaactctaacgcccgcccctatccgcaccgctaacaacctaaaaaaaatcgctaaccgtaatcgccgctaaaataaaaacgaaaaacaaacccgatataaaaaaatatcgaaaccgataaaaaacgtataaaaaaataaaccttaatccgcgcacgcccgaataaaccaaaaaccaaaacgcgctaacccacctccaacccgaacaccgacgactaacgaaaaccgtaacaaaaatacgacccgaaataacgaacaaccactacgccaatacaactcgaactcaacgaaacccgaaccgcgaattcgcaacccgcccaataatacctaccgaattaaccgtaccgaccgtaccaaatacgcgaaacccaaaccgcccgaacgccctctccccgcacccctcacctttaaccgcgct

SEQ ID NO: 23567 - DNA, 707 bp, Artificial Sequence
  chemically treated genomic DNA (Homo sapiens) CpG-island No: 23567
aaaggagagttatttttttagcggtttttacggttttagcgtaagatttgttgggaattgtagttttttgttcgtttcgttttaagttcgaaggtttcgttttttcgttgtttagtttcggggagggaggcggggtcgcgatttcggcgcgggtggggcgaatgcgtttttagcgggtagtttgggattggtgtagagttttaagtttacggtttcggtcgcggtttcgtcgttttttcgcgttcgcgtcgggagcgggtttagagcgttcgtttcgttttttcgcgagtagggttttggcgttcgtttttgttcgtatcgttggtagtttgaagagagtcgttggtcgtggtcgtcgttagggtaaagacgggaggtaggttcggtatgggaaggtgtcggggtcggtgggggacgtgtgagggagtgagttttggttcgcgtacgttcgggtaagttagaggttagaacgcgttagtttatttttagttcgagtatcggcggttggcgggagtcgtggtaagaatgcggttcgaggtggcgagtagttattgcgttagtgtagttcgggtttagcggggttcgggtcgcgggttcgtagttcgtttagtggtgtttgtcgggttggtcgtgtcggtcgtgttaggtgcgcggggtttaggtcgttcgggcgtttttttttcgtattttttatttttggtcgcgtt
